United States Patent Application Publication US 2026/0191920 A1 - sequence listing, part 6

SEQ ID NO: 22227 - protein, 136 aa, unidentified
  source 1..136: note = Mariniradius saccharolyticus
  REGION 1..136: note = tr|M7X7K6|M7X7K6_9BACT 6-pyruvoyl tetrahydrobiopterin synthase OS=Mariniradius saccharolyticus AK6 OX=1239962 GN=C943_02757 PE=4 SV=1
MKIAVYRKEHFNAAHRLHNPDWSDEQNKAVFGKCNNPNFHGHNYELIVKLLGPIDPQTGYVFDMKILSDLIKENVLDKFDHKNLNLDTDEFKKLNPTAENIAVVIWNILRKKIDNKYELTIRLYETERNFVEYDGN

SEQ ID NO: 22228 - protein, 140 aa, unidentified
  source 1..140: note = Mariniradius saccharolyticus
  REGION 1..140: note = tr|M7X8J7|M7X8J7_9BACT 6-pyruvoyl tetrahydrobiopterin synthase OS=Mariniradius saccharolyticus AK6 OX=1239962 GN=C943_02436 PE=4 SV=1
MVHVCRKEHFNAAHKLWNPNWSEEKNKEVFGPCSNVNWHGHNFELIVTVKGLPDPETGFVVDLKELSRLIKTLVIDKVDHKNLNMDVDFMLGKMASCENLVMEFWKILEPAVNAIVPNGHLYKLTLYETPRNFVEYFGEG

SEQ ID NO: 22229 - protein, 160 aa, unidentified
  source 1..160: note = Marinirhabdus gelatinilytica
  REGION 1..160: note = tr|A0A370QJA1|A0A370QJA1_9FLAO 6-pyruvoyltetrahydropterin/6-carboxytetrahydropterin synthase OS=Marinirhabdus gelatinilytica OX=1703343; GN = C8D94_101293 PE=4 SV=1
MSNIRITKSFSFETGHALYGYDGKCRNVHGHSYKLFVTVIGTPIADTNHVKYGMVIDFGDLKKIVKEEIVDVFDHATVFNKNTPHVELAKELSNRGHNVLLVNYQPTSEMMVIDFAEKIKTRLPENIQLYSLKLQETATSYAEWYASDNPSTPLRVLKTN

SEQ ID NO: 22230 - protein, 135 aa, unidentified
  source 1..135: note = Marinirhabdus gelatinilytica
  REGION 1..135: note = tr|A0A370Q985|A0A370Q985_9FLAO 6-carboxy-5,6,7,8-tetrahydropterin synthase; OS = Marinirhabdus gelatinilytica OX=1703343 GN=C8D94_104273; PE = 3 SV=1
MSLTVYRKAHFNAAHRLFKKEWSDEKNLEVFGKCSNPLYHGHNYELEVGVTGEIDPDTGFLIDLKILKDLIYTEVEVPFDHKNLNEEVPEFKNLNPTVENIAMVIYDKLRSKLDGKYAISIKLYETPRNYVVYTG

SEQ ID NO: 22231 - protein, 147 aa, unidentified
  source 1..147: note = Marinisporobacter balticus
  REGION 1..147: note = tr|A0A4R2KHS0|A0A4R2KHS0_9CLOT 6-carboxy-5,6,7,8-tetrahydropterin synthase; OS = Marinisporobacter balticus OX=2018667 GN=EV214_11769; PE = 3 SV=1
MYLLKAEHSFDSAHFLANYNGKCRNIHGHRWKVIVEVQAETLINEGQLDGMVVDFGDLKKDVKEMVDHYDHALIIQENTMRRETLTYLIEDGFKIINVAFRPTAENFAYLFFKTMEKRRYNVKRTIVYETPTNCATYEKSEGKICIR

SEQ ID NO: 22232 - protein, 147 aa, unidentified
  source 1..147: note = Marinitenerispora sediminis
  REGION 1..147: note = tr|A0A368T2H0|A0A368T2H0_9ACTN 6-carboxy-5,6,7,8-tetrahydropterin synthase; OS = Marinitenerispora sediminis OX=1931232 GN=DEF24_17555; PE = 3 SV=1
MNRVTVRHNFETAHRLPHLGGKCRNLHGHSWWVEVTVAGDLDERGIVVDFGSLKKRLRDWIDTHLDHGAMLGDADPLVPALLADGSKLFQFGVSEPSKGLDWPTVENVADLVARVAANEIEAAGWTGVTVSAVRVSETHVNAAEVLR

SEQ ID NO: 22233 - protein, 129 aa, Marinithermus hydrothermalis
  REGION 1..129: note = tr|F2NQ97|F2NQ97_MARHT 6-carboxy-5,6,7,8-tetrahydropterin synthase; OS = Marinithermus hydrothermalis (strain DSM 14884 / JCM 11576 / T1) OX=869210 GN=Marky_0658 PE=3 S V=1
MPRWKLVTEFTFDSAHYITDYDGPCGRMHGHTYRVRVEATSDRLYPSAHTPHPVMVADFKTLRWAKKDVTEGGLDHAVLNEVLPPEYATTAEMIAKYIHDETKRRLPEGVRLKVTVWETPTSWVEYEDA

SEQ ID NO: 22234 - protein, 118 aa, Marinitoga hydrogenitolerans
  REGION 1..118: note = tr|A0A1M4VHZ0|A0A1M4VHZ0_9BACT 6-carboxy-5,6,7,8-tetrahydropterin synthase OS=Marinitoga hydrogenitolerans DSM 16785 OX=1122195; GN = SAMN02745164_00936 PE=3 SV=1
MLVKRVFNFAAAHNLIKYHGKCESLHGHNYRLEVTVKGTTNDEGMVIDFLELKKIVKEEVLNILDHSYLNDIIEQPTAENISMWIWNKLEKKLKRKNCNLYEIALYETENNIVYYRGE

SEQ ID NO: 22235 - protein, 283 aa, Marinobacter adhaerens
  REGION 1..283: note = tr|A0A1E3CBB3|A0A1E3CBB3_9ALTE 6-pyruvoyl tetrahydropterin reductase OS=Marinobacter adhaerens; OX = 1033846 GN=A6779_07815 PE=4 SV=1
MNHLFVDNLTVIDFAYLDPTRGLVGESWIADVVLGGELDEQGMVFDFSNVKRTIKRVIDERVDHRLVIPRGYHGLSWNEEEPDTFNWSLTDGSQITHRSPDEAIVWLSADRVVPSAVASLLEQEIKAVLPANVISVEINLREEEIDGAYYHYVHGLKKHLGNCQRIAHGHRSPIRIDRNGHRDYDLERRWAKLWRDIYVGSEEDVVRRHVGEDGVRYVTFEYEANQGEFALTLPEERVYMLDTDTTVELIAAHMADKLKVEFATDTIRVKAYEGVGKGAIAER

SEQ ID NO: 22236 - protein, 132 aa, Marinobacter adhaerens
  REGION 1..132: note = tr|A0A349SYF4|A0A349SYF4_9ALTE 6-carboxytetrahydropterin synthase OS=Marinobacter adhaerens OX=1033846 GN=DC045_13475 PE=4 SV=1
MFGLTVRDHMMIAHSFNGEIFGPAQKVHGATYVVDVTFERHQLDKDDLVVDIGLASELLKSILSEFNMQNLDELPELRGRNTTTEFMAKLVFDRMAAAIHGGRLGETGEGIVSLKVTLSESHIAWASYHAGI

SEQ ID NO: 22237 - protein, 132 aa, Marinobacter algicola
  REGION 1..132: note = tr|A6EWU1|A6EWU1_9ALTE Uncharacterized protein; OS = Marinobacter algicola DG893 OX=443152 GN=MDG893_05959; PE = 4 SV=1
MFSLTVRDHMMIAHSFKGDIFGPAQGLHGATYVVDVTFEREALDRDDLIVDIGLASEVLSSVIAEFNMKNLDDIEEFANRNTTTEFMAMTVFERMAAAIRQGRLAETGKGLCSMKVTLGESHIAWASYHGKL

SEQ ID NO: 22238 - protein, 283 aa, Marinobacter algicola
  REGION 1..283: note = tr|A6F1F3|A6F1F3_9ALTE Uncharacterized protein; OS = Marinobacter algicola DG893 OX=443152 GN=MDG893_00370; PE = 4 SV=1
MNHLFVDNLTVIDFAYLDASRGLVGESWIVDVVLGGELDDQGMVFDFSNVKRTIKRVIDERVDHRLVIPRAYKGLEWNEDEPDSFTWHLTDGTRILHRSPDEAVVWLSSDRVVPSAVARLLEQELRAVLPANVTDVDIALREDVIEGAHYHYVHGLKKHMGNCQRIAHGHRSPIRIDRNEHRDRDLENQWAKRWQDIYVGSEEDVTQRWVAEDGTAYVTFEYEANQGEFALTLPENRVYMLDSDTTVELIAAHIAGQLKSEFPEDAIRVKAYEGVGKGAIASR

SEQ ID NO: 22239 - protein, 283 aa, unidentified
  source 1..283: note = Marinobacter antarcticus
  REGION 1..283: note = tr|A0A1M6S862|A0A1M6S862_9ALTE 6-pyruvoyl tetrahydropterin synthase OS=Marinobacter antarcticus; OX = 564117 GN=SAMN05216369_1899 PE=4 SV=1
MNHLFVDNLTVIDFAYLDPTRGLVGESWIADVVLGGELDDQGMVFDFSNVKRTIKRIIDERVDHRLVIPRGYEGLSWNQDTPDTFTWRLNDGSHIVHRSPDEAIVWLSSERVVPSAVATLLERELMAVLPANVTSVEINLREDVIEGAYYHYVHGLKKHLGNCQRIAHGHRSPIRIDRNGHRDYDLERTWAKLWQDIYVGSEEDVARRHVGEDGVPYITFEYEANQGEFALTLPEARVYMMNTDTTVELIAAHIADQLKLQSPSDTILVKAYEGVGKGAIASR

SEQ ID NO: 22240 - protein, 132 aa, unidentified
  source 1..132: note = Marinobacter antarcticus
  REGION 1..132: note = tr|A0A1M6SKS8|A0A1M6SKS8_9ALTE 6-pyruvoyl-tetrahydropterin synthase OS=Marinobacter antarcticus OX=564117 GN=SAMN05216369_2107 PE=4 SV=1
MFSLTVRDHMMIAHSFNGEIFGPAQKTHGATYVVDMTFERHELDSDDLIIDIGLASEVLKQVLSEFNMKNLDNIEDFRGRNTTTEFMAKKVFDRMVAAIHAGRLGETAKAVHALKVTLAESHIAWASYHAEV

SEQ ID NO: 22241 - protein, 132 aa, unidentified
  source 1..132: note = Marinobacter confluentis
  REGION 1..132: note = tr|A0A4Z1CBX0|A0A4Z1CBX0_9ALTE 6-carboxytetrahydropterin synthase OS=Marinobacter confluentis OX=1697557 GN=E5Q11_02870 PE=4 SV=1
MFSLTVRDHMMIAHSFKGEVFGPAQKLHGATYVVDVTFERKALDQDDLIVDIGLASEVLSSVLAEFNMQNLDELPALAGRNTTTEFMAATVFDRLEKAIHEGRLGETGKGLCGIKVTLGESHVAWASYHGEL

SEQ ID NO: 22242 - protein, 290 aa, unidentified
  source 1..290: note = Marinobacter confluentis
  REGION 1..290: note = tr|A0A4Z1CBI5|A0A4Z1CBI5_9ALTE 6-pyruvoyl tetrahydropterin reductase OS=Marinobacter confluentis; OX = 1697557 GN=E5Q11_01755 PE=4 SV=1
MNHLFVDNLTVIDFAYLDASRGLVGESWIVDVVLGGELDDQGMVFDFSNVKRTIKRVIDERVDHRLVIPRGYSGLQWDENDPQAFSWVLTDGTALTHRSPDEAVVWLSSDRVVPSAVSTLLQQELRAVLPGNVTDIDIQLREEVIEGAYYHYVHGLKKHLGNCQRIAHGHRSPIRIDRNGQRDRDLERRWARLWEDIYVGTEEDVTGRWVAEDGTAYVSFEYEAEQGEFSLTLPEKRVYMLATDTTVELIAAHIADQLKADFPDDTIMVKAYEGVGKGAVATRGLSPNGD

SEQ ID NO: 22243 - protein, 282 aa, Marinobacter daqiaonensis
  REGION 1..282: note = tr|A0A1I6H4H1|A0A1I6H4H1_9ALTE 6-pyruvoyl-tetrahydropterin synthase OS=Marinobacter daqiaonensis OX=650891 GN=SAMN05216203_0865 PE=4 SV=1
MNHLFIDNLTVIDFAYLDPSRGLVGESWIADIVLGGELDEQGMVFDFGNVKRTIKRVIDERVDHRLVVPAEASCLQRGDTPGSLTWRLADGSHIRHEGPEQSVVFLDHHQVVPSAVARLLEQELKAVLPTNVTAVEVTLREELIEGAYYHYVHGLKKHLGNCQRIAHGHRSPICIDLNGRRSPELEKQWARQWQDIYIGTREDLGQSWSDADGTEYVSFHYDAEQGEFRLTLPRQRVWLLDTDTTVELIAAYLADEIKKAHPADEVRVKAFEGVGKGAIAVR

SEQ ID NO: 22244 - protein, 132 aa, Marinobacter daqiaonensis
  REGION 1..132: note = tr|A0A1I6H0F7|A0A1I6H0F7_9ALTE 6-pyruvoyl-tetrahydropterin synthase OS=Marinobacter daqiaonensis OX=650891 GN=SAMN05216203_0673 PE=4 SV=1
MYALTVRDHVMIAHSFTGQIFGPAQKLHGATYVVDVSFEREQLDDDDLVVDIGLASDVLKKVLAHINMQNLDEMEEFRGRNTTTEFMARHIFDRMSQAVKNGDLGEGARALTAIKVTLAESHIAWASYRGQL

SEQ ID NO: 22245 - protein, 132 aa, Marinobacter excellens
  REGION 1..132: note = tr|A0A0P7YLG8|A0A0P7YLG8_9ALTE 6-pyruvoyl-tetrahydropterin synthase OS=Marinobacter excellens HL-55 OX=1305731 GN=HLUCCX14_02325 PE=4 SV=1
MFSLTVRDHMMIAHSFTGELFGPAQGLHGATYVVDVTFERHVLDDNDLIVDIGLASDVLKAVLGEFNMKNLDDLPQFNGRNTTTEFMAKTVFDRMAQAIHEGRLGEDGKGIVSLKVTLGESHVAWASYHAGI

SEQ ID NO: 22246 - protein, 132 aa, Marinobacter excellens
  REGION 1..132: note = tr|A0A137SH53|A0A137SH53_9ALTE PTPS-like type 4; OS = Marinobacter excellens LAMA 842 OX=1306954 GN=J122_615; PE = 4 SV=1
MFSLTVRDHMMIAHSFKGEIFGPAQGLHGATYVVDVTFERHVLDDNDLIVDIGQASDLLKEVLSEFNMKNLDDLPEFEGRNTTTEFMAQVVFNRMAAAIHAGRLGEEGRQVAGLKVTLGESHLAWASYHAGI

SEQ ID NO: 22247 - protein, 132 aa, Marinobacter flavimaris; identical to SEQ ID NO: 22236
  REGION 1..132: note = tr|A0A3D8H7P1|A0A3D8H7P1_9ALTE 6-carboxytetrahydropterin synthase OS=Marinobacter flavimaris OX=262076 GN=DXI23_03525 PE=4 SV=1

SEQ ID NO: 22248 - protein, 283 aa, Marinobacter flavimaris
  REGION 1..283: note = tr|A0A3D8H731|A0A3D8H731_9ALTE 6-pyruvoyl tetrahydropterin reductase OS=Marinobacter flavimaris; OX = 262076 GN=DXI23_02365 PE=4 SV=1
MNHLFVDNLTVIDFAYLDPTRGLVGESWIADVVLGGELDEQGMVFDFSNVKRTIKRVIDESVDHRLVIPRGYQGLSWSEEQPDTFTWALTDGSQIIHRSPDEAIVWLSADRVVPSAVASLLEQEIKAVLPANVISVEINLREEEIDGAYYHYVHGLKKHLGNCQRIAHGHRSPIRIDRNGHRDYDLERRWAKLWRDIYVGSEEDVVRRHVGEDGVRYVTFEYEANQGEFALTLPEDRVYMLDTDTTVELIAAHMADKLKVEFATDTIRVKAYEGVGKGAIAER

SEQ ID NO: 22249 - protein, 284 aa, unidentified
  source 1..284: note = Marinobacter fuscus
  REGION 1..284: note = tr|A0A2T1K5N7|A0A2T1K5N7_9ALTE 6-pyruvoyl tetrahydropterin reductase OS=Marinobacter fuscus; OX = 2109942 GN=C7H09_15520 PE=4 SV=1
MNHLFVDNLTVIDFAYLDPKRGLVGESWIADVVLGGELDEQGMVFDFSNVKRTIKRVIDERVDHRLVIPRGYPGLQWDEDRPDTFRWQLVDGNYIEHTSPDEAVVWLSADRVLPSAVAELLEKELKAVLPGNVTSIEINLREDVIEGAYYHYVHGLKKHLGNCQRIAHGHRSPIRIDRNGHRDTGLEKHWAKLWEDIYVGTEEDVTRRFVEGNGEAYISFEYEANQGEFALTLPESRVYMLATDTTVELIAAHIADTLQAEYPGDSIRVKAYEGVGKGAIAHRA

SEQ ID NO: 22250 - protein, 132 aa, Marinobacter gudaonensis
  REGION 1..132: note = tr|A0A1I6GE08|A0A1I6GE08_9ALTE 6-pyruvoyl-tetrahydropterin synthase OS=Marinobacter gudaonensis OX=375760 GN=SAMN04488073_0564 PE=4 SV=1
MFGLTVRDHMMIAHSFNGEVFGPAQKLHGATYVVDVTFERHQLDEDDLIVDIGLASEVLKDVLSEFNMKNLDEIPELAGRNTTTEFMARMVFDRMARAIHEGRLGETGRGIASLKVTLSESHIAWASYHAGI

SEQ ID NO: 22251 - protein, 283 aa, Marinobacter gudaonensis
  REGION 1..283: note = tr|A0A1I6GGX3|A0A1I6GGX3_9ALTE 6-pyruvoyl tetrahydropterin synthase OS=Marinobacter gudaonensis; OX = 375760 GN=SAMN04488073_0777 PE=4 SV=1
MNHLFVDNLTVIDFAYLDPTRGLVGESWIADVVLGGELDEQGMVFDFSNVKRTIKRVIDERVDHRLVIPRGYQGLSWNEEKPDTFSWALTDGSEILHRSPDEAIVWLSADRVVPSAVAELLEREIKAVLPANVTSVEINLREEEIDGAYYHYVHGLKKHLGNCQRIAHGHRSPIRIDRNGHRDYDLERRWATLWRDIYVGSEEDVVRRHVGEDGVRYVTFEYEANQGEFALVLPEERVYMLDTDTTVELIAAHMADKLKVEFPTDSIRVKAFEGVGKGAIAIR

SEQ ID NO: 22252 - protein, 132 aa, Marinobacter guineae
  REGION 1..132: note = tr|A0A2G1VHX4|A0A2G1VHX4_9ALTE Uncharacterized protein OS=Marinobacter guineae OX=432303 GN=CLH62_01985; PE = 4 SV=1
MFGLTVRDHMMIAHSFNGEIFGPAQKLHGATYVVDVTFERHQLDKDDLVVDIGLASEVLKGILAEFNMQNLDELPELSGRNTTTEFMARMVFDRMAAAIHGGKLGETGQGIVSLKVALSESHIAWASYHAGI

SEQ ID NO: 22253 - protein, 283 aa, Marinobacter guineae
  REGION 1..283: note = tr|A0A2G1VIQ5|A0A2G1VIQ5_9ALTE 6-pyruvoyl tetrahydropterin reductase OS=Marinobacter guineae; OX = 432303 GN=CLH62_03250 PE=4 SV=1
MNHLFVDNLTVIDFAYLDPTRGLVGESWIADVVLGGELDDQGMVFDFSNVKRTIKRVIDERVDHRLVIPRGFQGLSWSEEQPDTFTWALTDGSQIVHRSPDEAIVWLSAERVVPSAVAALLEQEIKAVLPANVTSVEIHLREEEIDGAYYHYVHGLKKHLGNCQRIAHGHRSPIRIDRNRHRDYDLERRWAKLWRDIYVGSEEDVVRRHVGDDGVRYVTFEYEANQGEFALTLPEERVYMLDTDTTVELIAAHIADKLKVEFAADAIRVKAYEGVGKGAIASR

SEQ ID NO: 22254 - protein, 132 aa, unidentified
  source 1..132: note = Marinobacter halophilus
  REGION 1..132: note = tr|A0A2T1K8P3|A0A2T1K8P3_9ALTE Uncharacterized protein OS=Marinobacter halophilus OX=1323740; GN = C7H08_15515 PE=4 SV=1
MYSLTVRDHMMIAHSFNGELFGPAQGLHGATYVVDVTFERPVLDADDLIVDIGLASDVLKAVLAEFNMKNLDDLPQFKGHNTTTEFMAKAVFDRMAAAVKDGRLGEEGRGIASLKVTLGESHVAWASYHAGI

SEQ ID NO: 22255 - protein, 284 aa, unidentified
  source 1..284: note = Marinobacter halophilus
  REGION 1..284: note = tr|A0A2T1K957|A0A2T1K957_9ALTE 6-pyruvoyl tetrahydropterin reductase OS=Marinobacter halophilus; OX = 1323740 GN=C7H08_16470 PE=4 SV=1
MNHLFVDNLTVIDFAYLDPSRGLVGESWIADVVLGGELDDQGMVFDFSLVKRTIKRVIDERVDHRLVIPRGYQGLHWNEETPDTFLWDLAGGGRIEHRSPDEAVVWLSSDRVLPSAVAALLEKELKAVLPANVTTVEISLREDVIEGAYYHYVHGLKKHLGNCQRIAHGHRSPIRIDRNGHRDYDLERRWAKLWQDIYVGTEEDVTRRYVGEDGFAYITFEYEANQGEFALTLPESRVYMLATDTTVELIAAHIADELKAEFPEDEIRVKAYEGVGKGAIAARV

SEQ ID NO: 22256 - protein, 284 aa, Marinobacter hydrocarbonoclasticus
  REGION 1..284: note = tr|A0A3B8WRL4|A0A3B8WRL4_MARHY 6-pyruvoyl tetrahydropterin reductase OS=Marinobacter hydrocarbonoclasticus OX=2743 GN=DCF82_15975 PE=4 SV=1
MNHLFVDNLTVIDFAYLDPARGLVGESWIADVVLGGELDEQGMVFDFSNVKRTIKRVIDERVDHRLVIPRGYEGLQWSEDAPNTFRWALSGGGHIEHSSPDEAVVWLSSDRVVPSAVAALLEKELKAVLPGNVTSVDINLREEVIEGAYYHYVHGLKKHLGNCQRIAHGHRSPIRIDRNGHRAYDLEERWAKLWQDIYVGTEEDVARRFVGEDGIGYITFEYEANQGEFALTLPEHRVYMLETDTTVELIAAHIADKLKAEFSGEEIRVKAYEGVGKGAIAIRA

SEQ ID NO: 22257 - protein, 284 aa, Marinobacter hydrocarbonoclasticus
  REGION 1..284: note = tr|A0A455W970|A0A455W970_MARHY Uncharacterized protein OS=Marinobacter hydrocarbonoclasticus OX=2743; GN = queD PE=4 SV=1
MNHLFVDNITVIDFAYLDPARGLVGESWITDVVLGGELDDQGMVFDFSLVKRTIKRVIDERVDHRLVIPRGYEGLNWDEETPDAFIWNLTDGSHIEHRSPDEAVVWLSSDRVVPSAVAALLEKELKAVLPGNVTSVEINLREDVIEGAYYHYVHGLKKHLGNCQRIAHGHRSPIRIDRNGHRDYELENRWAKLWKDIYVGTEEDVTRRFVGEDGVGYITFEYEANQGEFALTLPESRVYMLDTDTTVELIAAHIADKLKAEFPEDEIRVKAYEGVGKGAIASRV

SEQ ID NO: 22258 - protein, 283 aa, Marinobacter lipolyticus
  REGION 1..283: note = tr|R8B5R5|R8B5R5_9ALTE 6-pyruvoyl tetrahydropterin synthase-like protein OS=Marinobacter lipolyticus SM19; OX = 1318628 GN=MARLIPOL_00363 PE=4 SV=1
MNHLFVDNLTVIDFAYLDPNRGLVGESWIADVVLGGELDEQGMVFDFSNVKRTIKRVIDERVDHRLVVPRGYSGAAWTEEEPDSFTWTLTDGSRIVHRSPDEAVVWLSAERVVPSAVAALLERELMAVLPGNVTDVEVNLREEVIEGAYYHYVHGLKKHLGNCQRIAHGHRSPIRIDRNDHRDYELEKRWAKLWQDIYVGSEEDVTQRWVAEDGVAYVTFEYEANQGEFALTLPENRVYMMETDTTVELIAAHMADQLKTEFPADAIRVKAYEGVGKGAIASR

SEQ ID NO: 22259 - protein, 283 aa, Marinobacter litoralis
  REGION 1..283: note = tr|A0A3M2RKR5|A0A3M2RKR5_9ALTE 6-pyruvoyl tetrahydropterin synthase OS=Marinobacter litoralis; OX = 187981 GN=DOQ08_00618 PE=4 SV=1
MNHLFVDNLTVIDFAYLDPARGLVGESWIADVVLGGELDEQGMVFDFSNVKRTIKRVIDERVDHRLVIPRGYEGLHWDEDQPHTFRWDLTDGSHITHTSPDEAVVWLSSERVEKPAVAALLETELKAVLPGNVTTVEINLREDVIEGAYYHYVHGLKKHLGNCQRIAHGHRSPIRIDRNGQRDTELEKRWAKLWEDIYVGTEEDVTRRFVGDDSQHYISFEYEANQGEFALTLPESRVYMLETDTTVELIAAHMADVLKAEFPADEIRVKAYEGVGKGAIAVR

SEQ ID NO: 22260 - protein, 283 aa, Marinobacter lutaoensis
  REGION 1..283: note = tr|A0A1V2DWR4|A0A1V2DWR4_9ALTE 6-pyruvoyl tetrahydropterin reductase OS=Marinobacter lutaoensis; OX = 135739 GN=BTO32_01770 PE=4 SV=1
MDHLFVDNLTVIDFAYLDARRGLVGESWIVDVVLGGELDEQGMVFDFSNVKRTIKRVIDERVDHRLVIPRGYPGLSWSEESPDTFSWILADGRRIVHRSPDEAVVWLSAEHVVPSAVARLLEQELRDVLPANVTSVTIDLREDVIEGAYYHYVHGLKKHLGNCQRIAHGHRSPIRIDRNGHRDRELERRWATRWQDIYIGSEEDVVRRHVDSTGTPYVTFEYEANQGEFALTLPEERVYLLDTDTTVELIAAHIADTLKGEFPNDRIRVKAYEGVGKGAIAER

SEQ ID NO: 22261 - protein, 132 aa, unidentified; identical to SEQ ID NO: 22236
  source 1..132: note = Marinobacter manganoxydans
  REGION 1..132: note = tr|G6YRP3|G6YRP3_9ALTE Uncharacterized protein; OS = Marinobacter manganoxydans MnI7-9 OX=1094979; GN = KYE_07612 PE=4 SV=1

SEQ ID NO: 22262 - protein, 283 aa, unidentified
  source 1..283: note = Marinobacter manganoxydans
  REGION 1..283: note = tr|G6YW62|G6YW62_9ALTE Uncharacterized protein; OS = Marinobacter manganoxydans MnI7-9 OX=1094979; GN = KYE_15594 PE=4 SV=1
MNHLFVDNLTVIDFAYLDPTRGLVGESWIADVVLGGELDEQGMVFDFSNVKRTIKRVIDERVDHRLVIPRGYQGLSWSEEQPDTFTWALTDGSQIIHRSPDEAIVWLSADRVVPSAVASLLEQEIKAVLPANVISVEINLREEEIDGAYYHYVHGLKKHLGNCQRIAHGHRSPIRIDRNGHRDYDLECRWAKLWRDIYVGSEEDVVRRHVDEDGVRYVTFEYEANQGEFALTLPEERVYMLDTDTTVELIAAHMADKLKVEFATDTIRVKAYEGVGKGAIAER

SEQ ID NO: 22263 - protein, 304 aa, Marinobacter mobilis
  REGION 1..304: note = tr|A0A1H2Z154|A0A1H2Z154_9ALTE 6-pyruvoyl tetrahydropterin synthase OS=Marinobacter mobilis; OX = 488533 GN=SAMN04487960_106152 PE=4 SV=1
MQRIFARIRWSIKYTSTGLSLMNHLFVDNLTVIDFAYLDASRGLVGESWIVDVVLGGELDDQGMVFDFSNVKRTIKRVIDERVDHRLVVPTGYSGLSRDADQPDAFRWQLKNGHYIDHHSPQEAVVWLEADRVVPSAVATLLQQELHSVLPANVIDIDINLREEVIEGPYYHYVHGLKKHLGNCQRIAHGHRSPIRIDRNNHRDHALEQAWAERWKDIYVGSEEDITTRFVDTNGVGYIRFDYEANQGEFSLTLPEERVYLLNTDTTVELIAAHIADQCKAEWPNDAIRVKAYEGVGKGAISIR

SEQ ID NO: 22264 - protein, 132 aa, unidentified
  source 1..132: note = Marinobacter nanhaiticus
  REGION 1..132: note = tr|N6WTH9|N6WTH9_9ALTE 6-carboxytetrahydropterin synthase OS=Marinobacter nanhaiticus D15-8W OX=626887; GN = J057_23125 PE=4 SV=1
MFSLTVRDHMMIAHSFNSPRFGPAQKLHGATYVVDVSFFREQLDQDDLVIDIGLASEQLKAVVDEFNLTNLDEQAEFEGRNTTTEFMAKVIFDRLAKRIDSGSLGEEAQGLSRMRVCLSESHIAWATFEDAL

SEQ ID NO: 22265 - protein, 283 aa, unidentified
  source 1..283: note = Marinobacter nanhaiticus
  REGION 1..283: note = tr|N6WR98|N6WR98_9ALTE 6-pyruvoyl tetrahydropterin reductase OS=Marinobacter nanhaiticus D15-8W OX=626887; GN = J057_19365 PE=4 SV=1
MNHLFVDNLTVIDFAYLDHHRGLVGESWIVDVMLAGELDEQGMVFDFGSVKRTIKRVIDERVDHRLVVPRDQAGLQVREHGDRVELECPLSDGSVITHSSPVEAVLLVGGREVLPSAVSALLQDELRAVLPGNVIGIEVHLREEEIDGPYYHYVHGLKKHLGNCQRIAHGHRSRIQIQRNHARDQQLEREWARRWQDIYIGTEEDISARFVEDEINYVSFTYEANQGEFSLTLSANRVYLMETDTTVELIAAHLADACKRSHSDDEIRVKAFEGVGKGALAIR

SEQ ID NO: 22266 - protein, 283 aa, unidentified
  source 1..283: note = Marinobacter nitratireducens
  REGION 1..283: note = tr|A0A072N3C4|A0A072N3C4_9ALTE NADPH dependent preQ0 reductase OS=Marinobacter nitratireducens OX=1137280; GN = D777_00645 PE=4 SV=1
MNHLFVDNLTVIDFAYLDPTRGLVGESWIVDVVLGGNLDEQGMVFDFSNVKRTIKRIIDERVDHRLVVPRGYQGLTIDEDQQDTFTWALTDGSELVHKGPDEAVAWLSTDRVLPSAVAALLERELKSVLPANVVSIEINLREEVIEGAYYHYVHGLKKHLGNCQRIAHGHRSPIRIDRNGHRDYDLEKHWATLWRDIYVGSEEDVARRHVGDDGVPYVTFEYEANQGEFALTLPEERVYMLDTDTTVELIAAHIADTLKVEFPTDAIRVKAFEGVGKGAIAER

SEQ ID NO: 22267 - protein, 283 aa, Marinobacter pelagius
  REGION 1..283: note = tr|A0A1I4TP19|A0A1I4TP19_9ALTE 6-pyruvoyl tetrahydropterin synthase OS=Marinobacter pelagius; OX = 379482 GN=SAMN04487961_1226 PE=4 SV=1
MNHLFVDNLTVIDFAYLDATRGLVGESWIADVVLGGELDEQGMVFDFSNVKRTIKRVIDERVDHRLVIPRGYQGLIWNEDQPDTFTWKLTDGSQIVHRSPDEAVVWLSAEHVVPSAVARLLEHELMEVLPANVTSVTINLREEVIEGAYYHYVHGLKKHLGNCQRIAHGHRSPIRIDRNGHRDYDLERRWATLWRDIYVGSEEDVVRRHVGADGVRYVTFEYEANQGEFALTLPEERVYMLDTDTTVELIAAHMAEKLKVEFPTDAIRVKAYEGVGKGAIAER

SEQ ID NO: 22268 - protein, 132 aa, Marinobacter pelagius
  REGION 1..132: note = tr|A0A1I4T2F2|A0A1I4T2F2_9ALTE 6-pyruvoyl-tetrahydropterin synthase OS=Marinobacter pelagius OX=379482 GN=SAMN04487961_0966 PE=4 SV=1
MFSLTVRDHMMIAHSFHGEIFGPAQKLHGATYVVDVTFERRQLDQDDLVVDIGLASQLLKDVLAEFNMQNLDEIEAFRGRNTTTEFMAGVVFDRMASAIQAGKLGEGAREISGMKVTLSESHVAHASYHAGL

SEQ ID NO: 22269 - protein, 132 aa, unidentified
  source 1..132: note = Marinobacter persicus
  REGION 1..132: note = tr|A0A2S6G8Z2|A0A2S6G8Z2_9ALTE 6-pyruvoyl-tetrahydropterin synthase OS=Marinobacter persicus OX=930118 GN=B0H24_1004106 PE=4 SV=1
MFGLTVRDQMMVTHSLNGDVFGPAQKLHGTTYVVDVTFERHQLDKNDLIVEADLAVQLLREVLGEFDMQNLDERLEFEGRNTTTEFMAGVVFERMANAVRQGRLGDSGKGLSSLRVTLSGSQVVWATYHAGI

SEQ ID NO: 22270 - protein, 283 aa, unidentified
  source 1..283: note = Marinobacter persicus
  REGION 1..283: note = tr|A0A1I3S9K4|A0A1I3S9K4_9ALTE 6-pyruvoyl tetrahydropterin synthase OS=Marinobacter persicus; OX = 930118 GN=SAMN05216429_103237 PE=4 SV=1
MDHLFVDNLTVIDFAYLHASRGLVGESWIADVVLGGELDEQGMVFDFSNVKRTIKRVIDERVDHRLVVPRGYLGLRWQEDTPDTFAWHLTDGSHIEHRSPDEAVVWLNAETVVPSAVAELLEKELKAVLPANVTSVEIHLREEEIDGAYYHYVHGLKKHLGNCQRIAHGHRSPIRIDRNGHRDYDLETRWARLWQDIYVGTEEDVTRRFVGEDGNLYITFEYEANQGEFALTLPEERVYMIDTDSTVEFIAAHIADKLKVEFPQDDIRVKAFEGVGKGAIAKR

SEQ ID NO: 22271 - protein, 132 aa, Marinobacter psychrophilus
  REGION 1..132: note = tr|A0A0H4I0J9|A0A0H4I0J9_9ALTE 6-pyruvoyl tetrahydropterin synthase OS=Marinobacter psychrophilus; OX = 330734 GN=ABA45_08555 PE=4 SV=1
MYSLTVRDHIMIAHSFNGEIFGPAQKTHGATYIVDVSFERKTLDHDDLIVDIGLASEQLKALLAEFNMKNLDDVEEFKGRNTTTEFMAKVIFERLAAAIRAGQLGESGRGVERLKVTLAESHIAWASYHGDI

SEQ ID NO: 22272 - protein, 283 aa, Marinobacter psychrophilus
  REGION 1..283: note = tr|A0A0H4I1W4|A0A0H4I1W4_9ALTE 6-pyruvoyl tetrahydropterin reductase OS=Marinobacter psychrophilus; OX = 330734 GN=ABA45_11680 PE=4 SV=1
MNHLFVDNLTVIDFAYLDATRGLVGESWIADIVLGGELDEQGMVFDFSHVKRVIKQVIDAQVDHRLVVPKGHPGLLRNDQTPQHFVWPLTNGEQIAHTGPDEAVLWLAGDTVTKAAVATLLEHELKAVLPKNVISVDVHLREEVLEGPYYHYVHGLKKHLGNCQRIAHGHRSPICIHRNEQRDTALEALWAKLWKDTYVGTEEDVSRRFVDDHGTEYIHFEYEANQGEFALTLPASRVYMMDTDTTVELIAGHIADQLKQEFPEDSIRVKAYEGVGKGGMASR

SEQ ID NO: 22273 - protein, 132 aa, unidentified
  source 1..132: note = Marinobacter salarius
  REGION 1..132: note = tr|W5Z0Z0|W5Z0Z0_9ALTE 6-pyruvoyl tetrahydropterin synthase OS=Marinobacter salarius OX=1420917 GN=AU15_15535; PE = 4 SV=1
MFSLTVRDHMMIAHSFKGDIFGPAQGLHGATYVVDVSFEREALDNDDLIVDIGLASEVLSSVIAEFNMKNLDDIEEFANRNTTTEFMAMTVFDRLAAAIRQGRLGETGKGLCSMKVTLGESHIAWASYHGEL

SEQ ID NO: 22274 - protein, 283 aa, unidentified
  source 1..283: note = Marinobacter salarius
  REGION 1..283: note = tr|A0A1W6K8C9|A0A1W6K8C9_9ALTE 6-pyruvoyl tetrahydropterin synthase OS=Marinobacter salarius; OX = 1420917 GN=MARSALSMR5_01611 PE=4 SV=1
MNHLFVDNLTVIDFAYLDASRGLVGESWIVDVVLGGELDDQGMVFDFSNVKRTIKRVIDERVDHRLVIPRAYKGLEWNEDEPDSFTWHLTDGTRILHRSPDQAVVWLSSDRVVPSAVARLLEQELRAVLPANVTDVDIELREDVIEGAYYHYVHGLKKHMGNCQRIAHGHRSPIRIDRNEHRDRDLENQWAKRWQDIYVGSEEDVTQRWVAEDGTAYVTFEYEANQGEFALTLPESRVYMLDSDTTVELIAAHIAGQLKSEFPEDAIRVKAYEGVGKGAIASR

SEQ ID NO: 22275 - protein, 132 aa, unidentified
  source 1..132: note = Marinobacter salinus
  REGION 1..132: note = tr|A0A1D9GIQ3|A0A1D9GIQ3_9ALTE Uncharacterized protein OS=Marinobacter salinus OX=1874317 GN=BKP64_04450; PE = 4 SV=1
MFSLTVRDHMMIAHSFNGEIFGPAQKTHGATYVVDVSFEREQLDHDDLVVDIGLASTVLKEVLGEFNMQNLDELDVFAGRNTTTEFMAGVVFDRLAEAVKSGRLGESGKGISSLKVTLSESHIAWASYHASI

SEQ ID NO: 22276 - protein, 283 aa, unidentified
  source 1..283: note = Marinobacter salinus
  REGION 1..283: note = tr|A0A1D9GI42|A0A1D9GI42_9ALTE 6-pyruvoyl tetrahydropterin reductase OS=Marinobacter salinus; OX = 1874317 GN=BKP64_03250 PE=4 SV=1
MNHLFVDNLTVIDFAYLDPTRGLVGESWIADVVLGGELDDQGMVFDFSNVKRTIKRVIDERVDHRLVIPRGYAGLSWNEDEPDTFHWALTDGSKIIHRSPDEAVVWLSAERVVPSAVATLLEHELKAVLPSNVISVDIHLREEVIEGAYYHYVHGLKKHLGNCQRIAHGHRSPIRIDRNGHRDYDLERQWARLWRDIYVGSEEDVVRRHVGNDGVRYVTFEYEANQGEFALTLPEERVYMLDTDTTVELIAAHIAEKLKVEFPTDTIRVKAYEGVGKGAIASR

SEQ ID NO: 22277 - protein, 283 aa, Marinobacter santoriniensis
  REGION 1..283: note = tr|M7DDP0|M7DDP0_9ALTE 6-pyruvoyl tetrahydropterin synthase-like protein OS=Marinobacter santoriniensis NKSG1; OX = 1288826 GN=MSNKSG1_07973 PE=4 SV=1
MDHLFVDNLTVIDFAYLDGQRGLVGESWITDVVLGGELDEQGMVFDFSNVKRTIKRVIDERVDHRLVVPREYEGFVPSEDHPDTFYWTLKDGRRIVHRSPEEAVVWLPTRQVVPSAVAALLEQELMAVLPSNVTSVSINLREEVIEGAYYHYVHGLKKHLGNCQRIAHGHRSPIRIERNGHRDYDQERQWAKLWQDIYVGSEEDVVQRKVAADGTHYVTFEYEANQGEFALTLPEDRVYMLDTDTTVEFIAAHIANTLKQTFPNDTIRVKAYEGVGKGAIAER

SEQ ID NO: 22278 - protein, 132 aa, Marinobacter segnicrescens
  REGION 1..132: note = tr|A0A1I0GG08|A0A1I0GG08_9ALTE 6-pyruvoyl-tetrahydropterin synthase OS=Marinobacter segnicrescens OX=430453 GN=SAMN04487962_11819 PE=4 SV=1
MYTLTVRDNVMIAHSFTGEVFGPAQKLHGATYVVDVSFERPELDDHDLVVDIGLASEVLGKVLAPINMQNLDELPQFSGHNTTTEFMARYVFDSVAQAVRNGELGEGARALTALKVTLSESHIAWASYRGEL

SEQ ID NO: 22279 - protein, 282 aa, Marinobacter segnicrescens
  REGION 1..282: note = tr|A0A1H9YZR3|A0A1H9YZR3_9ALTE 6-pyruvoyl tetrahydropterin synthase OS=Marinobacter segnicrescens; OX = 430453 GN=SAMN04487962_101391 PE=4 SV=1
MNHLFIDNLTVIDFAYLDHHRGLVGESWIADIVLGGELDEQGMVFDFGNVKRTIKRVIDERVDHRLVVPAGANCLARSDSPGHLTWTLADGSQIRHEGPEQSVVFLDHTEVVPSAVARLLEQELKAVLPANVTDVEVTLREELIEGAYYHYVHGLKKHLGNCQRIAHGHRSPIRIDINGRRDAELEKHWARQWQDIYIGTREDLSQSWTDGDGTEYVSFHYDAEQGEFRLTLPRQRVWFLETDTTVELIAAYLADQIKASHPGDEVRVRAFEGVGKGAIAVR

SEQ ID NO: 22280 - protein, 290 aa, unidentified
  source 1..290: note = Marinobacter shengliensis
  REGION 1..290: note = tr|A0A2T1KLJ3|A0A2T1KLJ3_9ALTE 6-pyruvoyl tetrahydropterin reductase OS=Marinobacter shengliensis; OX = 1389223 GN=C7H10_14665 PE=4 SV=1
MNHLFVDNITVIDFAYLDPARGLVGESWITDVVLGGELDDQGMVFDFSLVKRTIKRVIDERVDHRLVIPRGYEGLNWDEETPDAFIWNLTDGSRIEHRSPDEAVVWLSSDRVVPSAVAALLEKELKAVLPGNVTSVEINLREDVIEGAYYHYVHGLKKHLGNCQRIAHGHRSPIRIDRNGHRDYDLENRWAKLWKDIYVGTEEDVTRRFVGEDGVGYITFEYEANQGEFALTLPESRVYMLDTDTTVELIAAHIADKLKAEFPEDEIRVKAYEGVGKGAIASRVCPRGLS

SEQ ID NO: 22281 - protein, 132 aa, unidentified
  source 1..132: note = Marinobacter shengliensis
  REGION 1..132: note = tr|A0A2T1KNE6|A0A2T1KNE6_9ALTE Uncharacterized protein OS=Marinobacter shengliensis OX=1389223; GN = C7H10_15840 PE=4 SV=1
MFSLTVRDHMMIAHSFKGEIFGPAQGLHGATYVVDVTFERPELDGNDLIVDIGQASDLLKEVLSEFNMKNLDDLPEFEGRNTTTEFMAQVVFNRMAAAIQAGRLGEEGRQVAGLKVTLGESHLAWASYHAGI

SEQ ID NO: 22282 - protein, 132 aa, unidentified
  source 1..132: note = Marinobacter similis
  REGION 1..132: note = tr|W5YEX1|W5YEX1_9ALTE 6-pyruvoyl tetrahydropterin synthase OS=Marinobacter similis OX=1420916 GN=AU14_00865; PE = 4 SV=1
MFSLTVRDHMMIAHSFRGEIFGPAQQVHGATYVVDVAFERQELDADNLVVDIGLAASVLKDVLAEFNMKNLDDLEQLQNQNTTTEFMASQVFERLAAAIRAGRLGESAQGMNSLKVTLSESHIAWASFHGKL

SEQ ID NO: 22283 - protein, 283 aa, Marinobacter sp.
  REGION 1..283: note = tr|A0A1E7PYX1|A0A1E7PYX1_9ALTE 6-pyruvoyl tetrahydropterin reductase OS=Marinobacter sp. X15-166B; OX = 1897620 GN=BG841_12170 PE=4 SV=1
MNHLFVDNLTVIDFAYLDPSRGLVGESWIADVILSGELDDQGMVFDFSDVKRTIKRVIDDQVDHCLLIPSRYAGLTRLEGHQDTFEWQLEDGSTIHHSSPQQAVVWLDSDHITTSDVSALLAAELKAALPDNVTGIQLELREEEISGAFYHYVHGLKKHDGNCQRIAHGHRSPIRIDRNGHRDLELERQWAQLWRDIYIGTEEDVSRRFVGEDGVHYIRFDYQANQGAFSLTLPENRVYMLTTDTTVELIAAHIADECKAVYPNDRIRVKAYEGVGKGAIAER

SEQ ID NO: 22284 - protein, 132 aa, Marinobacter sp.; identical to SEQ ID NO: 22273
  REGION 1..132: note = tr|A0A434AKK9|A0A434AKK9_9ALTE 6-carboxytetrahydropterin synthase OS=Marinobacter sp. NP-6 OX=2488666 GN=EHM94_06980 PE=4 SV=1

SEQ ID NO: 22285 - protein, 132 aa, unidentified
  source 1..132: note = Marinobacter subterrani
  REGION 1..132: note = tr|A0A0J7J9K6|A0A0J7J9K6_9ALTE 6-pyruvoyl-tetrahydropterin synthase OS=Marinobacter subterrani OX=1658765 GN=Msub_10840 PE=4 SV=1
MFGLTVRDHMMIAHSFNGEIFGPAQKLHGATYVVDVTFERHQLDRDDLIVDIGLASQVLKDVLGEFNMQNLDDLPELSGRNTTTEFMARMVFDRMAAAIHAGKLGETGKGIVSLKVTLSESHIAWASYHAGI

SEQ ID NO: 22286 - protein, 283 aa, unidentified
  source 1..283: note = Marinobacter subterrani
  REGION 1..283: note = tr|A0A0J7J8R0|A0A0J7J8R0_9ALTE 6-pyruvoyl tetrahydropterin synthase OS=Marinobacter subterrani; OX = 1658765 GN=Msub_11066 PE=4 SV=1
MNHLFVDNLTVIDFAYLDPTRGLVGESWIADVVLGGDLDEQGMVFDFSNVKRTIKRVIDERVDHRLVIPRGYQGLSWGEEQPDRFTWALTDGSQIIHRSPDEAIVWLSADRAVPSAVATLLEQEIKAVLPANVTSVEIQLREEEIDGAYYHYVHGLKKHLGNCQRIAHGHRSPIRIDRNGHRDYDLERRWATLWRDVYVGSEEDVVRRHVGDDGVRYVTFEYEANQGEFALTLPEERVYMLDTDTTVELIAAHMADKLKVEFPTDTIRVKAYEGVGKGAIAER

SEQ ID NO: 22287 - protein, 283 aa, Marinobacter vinifirmus
  REGION 1..283: note = tr|A0A259W4F5|A0A259W4F5_9ALTE 6-pyruvoyl tetrahydropterin reductase OS=Marinobacter vinifirmus; OX = 355591 GN=FHK81_05505 PE=4 SV=1
MNHLFVDNLTVIDFAYLDPSRGLVGESWIADVVLGGELDEQGMVFDFSLVKRTIKRVIDERVDHRLVIPRGYEGLHWDEETPDTFVWDLTDGSRIEHRSPDEAVVWLSSDRVVPSAVAALLEKELMAVLPGNVTSVEINLREDVIEGAYYHYVHGLKKHLGNCQRIAHGHRSPIRIDRNGHRDYDLENRWAKLWKDIYVGTEEDVTRRFVGDDGAAYITFEYEANQGEFALTLPESRVYMLDTDTTVELIAAHIADTLKAEFPEDEIRVKAYEGVGKGAIAAR

SEQ ID NO: 22288 - protein, 283 aa, Marinobacter zhejiangensis
  REGION 1..283: note = tr|A0A1I4NV60|A0A1I4NV60_9ALTE 6-pyruvoyl tetrahydropterin synthase OS=Marinobacter zhejiangensis; OX = 488535 GN=SAMN04487963_1632 PE=4 SV=1
MNHLFVDNLTVIDFAYLDASRGLVGESWIVDVVLGGELDEQGMVFDFSNVKRTIKQVIDERVDHRLVIPAQYSGLILNEDEPDSFRWQLTCGRYIDHHSPQEAIVWLDADKVVPSAVAALLQQELHSVLPANVIDIAITLREEVIEGPYYHYVHGLKKHLGNCQRIAHGHRSPIRIDRNHHRDHTLEREWAERWKDIYVGSEEDITTRFVDADGVSYIRFDYEANQGEFSLTLPEDLVYMLDTDTTVELIAAHIADQCKVESPEDSIRVKAYEGVGKGAIAIR

SEQ ID NO: 22289 - protein, 278 aa, unidentified
  source 1..278: note = Marinobacterium aestuarii
  REGION 1..278: note = tr|A0A1A9F3M5|A0A1A9F3M5_9GAMM Uncharacterized protein OS=Marinobacterium aestuarii OX=1821621; GN = A8C75_22210 PE=4 SV=1
MKLFVDNLTNVDFSYLHPQRGLLGESWLVQLVLDGRLNDQGMICDFGIVKKAVKAWMDKHIDHALLVATGLPRLQHARQDGETRIDWLYPDGQHFYCRSPEQAITLVGEPDINPHTLAAWCKEQLLALFPDEVQGLELAFVPERIDGAFYHYSHGLHQHDGNCQRIAHGHRSKIEIHLNDQREEALEAVWGERLRDIYIGTRSHLISEADGMHHYRYDAPQGEFELKLPAQYCYDIETETTVEQIAQHLAVAIKQEHPDSDVQVRAFEGVGKGAIAVA

SEQ ID NO: 22290 - protein, 278 aa, Marinobacterium georgiense
  REGION 1..278: note = tr|A0A1H4GJL0|A0A1H4GJL0_9GAMM 6-pyruvoyl tetrahydropterin synthase OS=Marinobacterium georgiense DSM 11526 OX=1122198 GN=SAMN02745729_11727 PE=4 SV=1
MKLFVDNLTHVDFSYLHPKRGLVGESWAVQLVLDGSLDPQGMICDFGVVKRRVKQWLDAHLDHMLAVPAQLPGLQLEQVGGMTEVRWHYPEGGLFRCRAPEQAIAVLPCTEIDELSVAHWCRDQLRQLFPEQVQGVELAFTAESIDGHYYHYSHGLQQHDGNCQRIAHGHRSRIMIYRNGHRDEVLEGRWAECFRDIYIGTRSHLKNQSAGAHHYAYTAPQGAFELELPARCCYLIDTESTVEQIAAHLAEQIKIDHPQDEVVVRAFEGIGKGAIATA

SEQ ID NO: 22291 - protein, 278 aa, Marinobacterium halophilum
  REGION 1..278: note = tr|A0A2P8EM06|A0A2P8EM06_9GAMM 6-pyruvoyl tetrahydropterin synthase-like protein OS=Marinobacterium halophilum OX=267374 GN=CLV44_12625 PE=4 SV=1
MKLFVDNLTHVDFSYLHPERGLLGESWAVQLVLDGSLDAQGMICDFGVVKRRVKQWLDTHVDHQLVVPTGMARLALTTAEGMTDVDWQYPDGSRFHCRAPEQAIAAVPVEAIDERGLAEWCRDQLLALFPDQVKGVELAFVAESIDGHFYHYSHGLQQHDGNCQRIAHGHRSKIEIYRNHQRDEALEGEWAERFRDIYVGTRAHLQADANGEHRYAYTAPQGEFELSLPAKACYLIDTETTVEQIAMHLAAEIKAAYPHDEIIVRAFEGIGKGAIATA

SEQ ID NO: 22292 - protein, 277 aa, Marinobacterium lutimaris
  REGION 1..277: note = tr|A0A1H6D586|A0A1H6D586_9GAMM 6-pyruvoyl tetrahydropterin synthase OS=Marinobacterium lutimaris; OX = 568106 GN=SAMN05444390_10527 PE=4 SV=1
MKLFVENLTHVDFSYLDAQRGLLGESWKVNLILDGSLDDQGMICDFGVVKKRVKQWLDDFVDHCLVVAEEMPGLEVCRQQERTELSWTYPDGGELRCSAPKQAIAVVPGAAVTPTELADWCRQQLLALFPEQVQGVELEFIAEQIDGAYYHYSHGLQKHAGNCQRIAHGHRSRIQLLRNGQRDAALEAVWAEKFRDIYIGTREHLQAEGAIHHYVYDAPQGHFELSLPSRCCYDIDTESTVELIADHLAKQIKAACPQDRIEVRAFEGIGKGAVATA

SEQ ID NO: 22293 - protein, 277 aa, unidentified
  source 1..277: note = Marinobacterium mangrovicola
  REGION 1..277: note = tr|A0A4R1G9Q6|A0A4R1G9Q6_9GAMM 6-pyruvoyl tetrahydropterin synthase-like protein OS=Marinobacterium mangrovicola OX=1476959 GN=CLV83_3429 PE=4 SV=1
MKLFVENLTHVDFSYLDAQRGLLGESWKVNLILDGSLDDQGMICDFGVVKKRVKQWLDDFVDHCLVVAEEMPGLEVFRGEERTELTWNYPAAGQLRCSAPKQAIALVPGSAVTPTDLADWCRQQLLALFPQQVQGVELEFVAEQIDGAYYHYSHGLQKHAGNCQRIAHGHRSRIQLLRNGQRDAALEAHWAEKFRDIYIGTREHLRAEGETHHYVYDAPQGHFELSLPASCCYDIDTESTVELIADHLAKQIKVDYPQDRIEVRAFEGIGKGAVATA

SEQ ID NO: 22294 - protein, 277 aa, Marinobacterium sp.
  REGION 1..277: note = tr|A0A081G2A0|A0A081G2A0_9GAMM NADPH dependent preQ0 reductase OS=Marinobacterium sp. AK27 OX=1232683; GN = ADIMK_0607 PE=4 SV=1
MKLFVENLTHVDFSYIDPERGLLGESWAVNLILDGSLDQQGMICDFGTVKKRVKQWLDAQVDHCLVVATGLKGLNASRENGITRLSWTYPQGGEIRCSAPDQAIALIEVERVEEYSLAQWCRAQLLAIFPEQVSGVQLEFVPEHIDGAYYHYSHGLQQHAGNCQRIAHGHRSRIQLLRNGKRDFALEAQWAEALRDIYIGSRDHLQVVGDVHHYVYDAPQGHFELSLPARVCYDIETESTVERIAQHLAERIKFDYPQDAIEVRAFEGIGKGAIATA

SEQ ID NO: 22295 - protein, 107 aa, Marinobacterium sp.
  REGION 1..107: note = tr|A0A081FT93|A0A081FT93_9GAMM Putative queD like; OS = Marinobacterium sp. AK27 OX=1232683 GN=ADIMK_4205 PE=4; SV = 1
MEWIILLVVAFFVFVLVVQKLYANTPKHGEAEHRYRQRKTLFTAAERSFLGVLDSIIDPQQHRVFGKVRVADLIEPEPNRNRSQWQKAFNRISAKHFDFVICKADDL

SEQ ID NO: 22296 - protein, 280 aa, Marinobacterium stanieri
  REGION 1..280: note = tr|A0A1N6XPQ3|A0A1N6XPQ3_9GAMM 6-pyruvoyl tetrahydropterin synthase OS=Marinobacterium stanieri; OX = 49186 GN=SAMN05421647_11525 PE=4 SV=1
MKLFVDNLTHVDFSYLHPERGLLGESWAVNLVLDGSLDTQGMICDFGVVKRRVKQWLDDQVDHRLVVPAQMERLTLEQDQGRTRVEWRYPSGERFICDAPEQAIAAVPLAEIDELGLAQWCRDQLLALFPDQVRGVDLAFVPESIDGHFYHYSHGLQQHDGNCQRIAHGHRSRIEIYRNDQRDEALEGIWAERFRDIYIGTRSHLQAESAEEHHYAYTAPQGEFELILPASVCYLMDSESTVEQIAAHLAAELQAEYPHDRIIVRAFEGIGKGAIAGDIA

SEQ ID NO: 22297 - protein, 146 aa, Marinococcus halophilus
  REGION 1..146: note = tr|A0A510Y6C8|A0A510Y6C8_MARHA 6-carboxy-5,6,7,8-tetrahydropterin synthase; OS = Marinococcus halophilus OX=1371 GN=queD PE=3 SV=1
MIYSYYPQWPHNYRYELNKDMHLSAAHYIPSEEAGKCRRVHGHTYTINVTVAGDELNQNGFLIDFTVLKKWIHKRYDHTMLNDHPEFASEETEAAYPTTEVVAQVIWKTVQQKLDETSNKPKCLQVLVRETPTSYAVFRPKEGDFS

SEQ ID NO: 22298 - protein, 146 aa, Marinococcus luteus
  REGION 1..146: note = tr|A0A1H2VFC0|A0A1H2VFC0_9BACI 6-carboxy-5,6,7,8-tetrahydropterin synthase; OS = Marinococcus luteus OX=1122204 GN=SAMN05421781_2062; PE = 3 SV=1
MIYSYYPQWPHNYRYELNKDMHLSAAHYIPSEDAGKCRRVHGHTYTINVTVVGDELNRNGFLIDFTVLKKWIHKRYDHTLLNDHPEFASEETEAAYPTTEVVAQVIWKTVQQKLDETSNKPKCLQVLVRETPTSYAVFRPKEGDFA

SEQ ID NO: 22299 - protein, 293 aa, Marinomonas alcarazii
  REGION 1..293: note = tr|A0A318V725|A0A318V725_9GAMM 6-pyruvoyl tetrahydropterin synthase-like protein OS=Marinomonas alcarazii OX=491949 GN=DFP75_101650 PE=4 SV=1
MKLFVKNLTHVDFSYFDAKRGLLGESWQTDIVLTGKLNDESMICDFSIVKKQIKKWLDDNIDHMLAIPAEHNGSTLTPLAGDRVSFHFDHSKEAAGDKRVFQCDAPAQAICVLPMTEVTPDAVAKWVEAQILNLLPAELEAVSVRFSPEHISGAQYQYSHGLKKHAGNCQRIAHGHRSTVEIYANGERNAAMEHDWATRWEDIYLGTQEDLINQVTENDVSYHCFSYTSQQGLFELKIDSNQVYMLDCDTTVESLSAHIADVLAEENPGTHIEAHGFEGIGKGAISEKVKARV

SEQ ID NO: 22300 - protein, 287 aa, Marinomonas aquimarina
  REGION 1..287: note = tr|A0A1A8T4N2|A0A1A8T4N2_9GAMM 6-pyruvoyl tetrahydropterin synthase OS=Marinomonas aquimarina; OX = 295068 GN=MAQ5080_00736 PE=4 SV=1
MKLFVKNLTHVDLSYFCPARGLLGESWQADIVLTGKLNDESMVCDFSIVKKMIKQWLDAHLDHTLAVPAQHPNTQLVTLDDERLRFVFAHDNGQRFECVAPSQAIAQLPMAEITPEQAAKWVEQQILNLLPAELEAVSVRFKPEATDEAHYQYSHGLKKHSGNCQRIAHGHRSVIEIYRNGERDRTLEQDWAERWHDIYLGTQEDLIGIIEEQGERYHHFSYAANQGLFELIIRSPQVYMLACDTTVESLSAHIAEQLAKENIGDSIEVHAFEGIGKGAISEVRIEK

SEQ ID NO: 22301 - protein, 287 aa, Marinomonas aquiplantarum
  REGION 1..287: note = tr|A0A366CW48|A0A366CW48_9GAMM 6-pyruvoyl tetrahydropterin synthase-like protein OS=Marinomonas aquiplantarum OX=491951 GN=DFP76_107201 PE=4 SV=1
MKLFVKNLTHVDFSYYDAERGLLGESWQADIVLTGKLNDESMICDFSIVKKQIKKWLDDNIDHMLAIPAEHPSSQLIKLENNRVSFQFDHEDGRHFRCDAPSQAICSLPCQQITPSLAATWVEQQILDLLPAELEAVSIRFTPEPIAGAQYQYSHGLKKHAGNCQRIAHGHRSTIEIYRDGKADTALEHDWATRWQDIYLGTQEDLQEIVDINGRPHHYFSYTSQQGLFELTINSQQVYMLDCDTTVESLSAHVAYVLAHEHVGSLIEAHGFEGIGKGAISEYKVTK

SEQ ID NO: 22302 - protein, 287 aa, Marinomonas balearica
  REGION 1..287: note = tr|A0A4R6MEQ7|A0A4R6MEQ7_9GAMM 6-pyruvoyl tetrahydropterin synthase-like protein OS=Marinomonas balearica OX=491947 GN=DFP79_0947 PE=4 SV=1
MKLFVKNLTHVDLSYFCPEHGVLGESWHTDVIITGGLNDESMICDFSIVKKQIKKWLDDNIDHTLALPMNHADSTLSALDDGRLRFVFKQADGYTFECDAPEQAYCSLPFDQITPDQVATWVETQILDLLPADVQGIEVRFYKEAISGSEYQYTHGLKKHAGNCQRIAHGHRSTIEIYRNGERDSALEQDWATRWENIYLGTNEDLLGIIDSNGKRHHHFSYVSQQGKFELKTRSDRVYMLDCDTTVESLSAHVADVLANENPGDQIEVHAFEGIGKGAISVKSINR

SEQ ID NO: 22303 - protein, 287 aa, Marinomonas communis
  REGION 1..287: note = tr|A0A4R6X7J7|A0A4R6X7J7_9GAMM 6-pyruvoyl tetrahydropterin synthase-like protein OS=Marinomonas communis OX=28254 GN=C8D85_0358 PE=4 SV=1
MKLFVKNLTHVDLSYFCPTRGVLGESWQADIVLTGKLNDESMVCDFSIVKKMIKQWLDAHLDHTLAVPGKNSATHLEELSDDRVAFSFQHENGQRFQCNAPTQAISVLPVEHITPENAARWVEEQILDLLPAELEAVSVKFHPESTTEAQYQYSHGLKKHDGNCQRIAHGHRSVIEIYRNGERDRTLEQDWSTRWNDIYLGTQDDLIGIIEEDQNRYHHFTYVAKQGLFELIIRSEQVYMLSCDTTVESLSAHIAEQLAQENPNDMIEVHAFEGIGKGAISEFKVSK

SEQ ID NO: 22304 - protein, 293 aa, Marinomonas foliarum
  REGION 1..293: note = tr|A0A368ZNA1|A0A368ZNA1_9GAMM 6-pyruvoyl tetrahydropterin synthase-like protein OS=Marinomonas foliarum OX=491950 GN=DFP77_13939 PE=4 SV=1
MKLFVKNLTHVDFSYFDATRGLLGESWQTDIVLTGKLNDESMICDFSIVKKQIKKWLDDHIDHMLAIPAEHSGSAVTPLANDRVSFHFDHNKEISSDKRVFQCDAPTQAICVLPMTEITPEAVAKWVESQILNLLPAELEAVSVRFSPEHITGAQYQYSHGLKKHAGNCQRIAHGHRSTVEIYADGARNATIEHDWARRWEDIYLGTQEDLISQATENGVSYHCFSYTSQQGLFELKIDSNQVYMLDCDTTVESLSAHIADVLAEENPGVHIEAHGFEGIGKGAISEKLKART

SEQ ID NO: 22305 - protein, 287 aa, unidentified
  source 1..287: note = Marinomonas fungiae
  REGION 1..287: note = tr|A0A0K6IJS8|A0A0K6IJS8_9GAMM 6-pyruvoyl tetrahydropterin synthase OS=Marinomonas fungiae; OX = 1137284 GN=Ga0061065_103204 PE=4 SV=1
MKLFVKNLTHVDLSYFCPVRGVLGESWQADIVLTGKLNDESMVCDFSIVKKMIKQWLDAHLDHTLAIPAHHPNTRLVEMENERVSFKFQHDNGQRFECNAPSQAIAQLPVAEITPENAAQWVEQQILNLLPAELEAVSVRFHPEATDEANYQYSHGLKKHGGNCQRIAHGHRSVIEIYRNGERDRTLEQDWATRWQDIYLGTQEDLIGIIEEQGQRYHHFSYAANQGLFELTIRSPQVYMLPCDTTVESLSAHIAEQLAKENTGDTIEVHAFEGIGKGAISEMKVEK

SEQ ID NO: 22306 - protein, 287 aa, unidentified
  source 1..287: note = Marinomonas gallaica
  REGION 1..287: note = tr|A0A1C3JQ05|A0A1C3JQ05_9GAMM 6-pyruvoyl tetrahydropterin synthase OS=Marinomonas gallaica; OX = 1806667 GN=MGA5115_01351 PE=4 SV=1
MKLFVKNLTHVDLSYFCPVRGVLGESWQADIVLTGKLNDESMVCDFSIVKKMIKQWLDTHIDHKLAVPANHESSAIKTLDDGRSSFSFEHQNGQRFACTAPEQAFAQLPVDEITADNAAKWVEEQILDLLPAELEAVSVHFHPEHSNEAQYQYSHGLKKHDGNCQRIVHGHRSVIEIYRNGERDRTLDQDWSARWNDIYLGTQEDLIGIIDEDGQRYHHFSYAASQGLFELIIRSDQVYMLDCDSTVESLSSHVAQQLAKENPGDTIEVHAFEGIGKGAISEVKVEK

SEQ ID NO: 22307 - protein, 293 aa, unidentified
  source 1..293: note = Marinomonas hwangdonensis
  REGION 1..293: note = tr|A0A3M8Q7H0|A0A3M8Q7H0_9GAMM Uncharacterized protein OS=Marinomonas hwangdonensis OX=1053647; GN = EBI00_03440 PE=4 SV=1
MKLFVKNLTHVDFSYFDAKRGLLGESWQTDIVLTGKLNDESMICDFSIVKKQIKKWLDDNIDHMLAIPAEHEGSMLTPLANDRFAFLFDHSKETADDKRVFQCDAPTQAICVLPMTEVTPVAVAKWVESQILNLLPAELEAVSVRFTPEHITGAQYQYSHGLKKHAGNCQRIAHGHRSTVEIYADGARNATMEHDWAKRWEDIYLGTQEDLDKEITENDVNYHCFRYTSQQGLFELKIDSNQVYMLDCDTTVESLSAHIADVLAEENPGTHIEAHGFEGIGKGAISEKIQAKK

SEQ ID NO: 22308 - protein, 287 aa, Marinomonas mediterranea
  REGION 1..287: note = tr|F2K268|F2K268_MARM1 Uncharacterized protein; OS = Marinomonas mediterranea (strain ATCC 700492 / JCM 21426 / NBRC 103028 / MMB-1) OX=717774 GN=Marme_1893 PE=4; SV = 1
MKLFVKNLTHVDLSYFCPEQGVLGESWHTDVILDGGLNDESMICDFSIVKKQIKKWLDDNIDHTLALPMSHAKSTLRAMEDGRLHYLFEQEDGYTFECEAPEQAYCSLPFERITPDQVAQWVETQIVDLLPADIESVKVRFYKENIDGSEYQYTHGLKKHGGNCQRIAHGHRSTIEIYRNGDRDSSLEQDWAKRWEDIYLGTNEDLLGIIENNGKRHHHFAYVSMQGKFELKTRSDRVYMLDCDTTVESLSEHVAEVLAHENPGDQIEVHAFEGIGKGAISVKSINR

SEQ ID NO: 22309 - protein, 293 aa, Marinomonas polaris
  REGION 1..293: note = tr|A0A1M5CXQ6|A0A1M5CXQ6_9GAMM 6-pyruvoyl tetrahydropterin synthase OS=Marinomonas polaris DSM 16579; OX = 1122206 GN=SAMN02745753_02283 PE=4 SV=1
MKLFVKNLTHVDFSYFDATRGLLGESWQTDIVLTGKLNDESMICDFSIVKKQIKKWLDDNIDHMLAIPAEHSGSTMTPLADDRVSFHFDHSKTTADDKRVFQCDAPTQAICVLPMTEVTPEAVAKWVESQILNLLPAELEAVSVRFSPEQITGAQYQYSHGLKKHAGNCQRIAHGHRSTVEIYTDGARNAAMEHDWAKRWEDIYLGTQEDLISQVTENGVHYHCFSYTSQQGLFELKIDSNQVYMLDCDTTVESLSAHIAEVLAEENPGTHIEAHGFEGIGKGAISEKIKARI

SEQ ID NO: 22310 - protein, 287 aa, Marinomonas pollencensis
  REGION 1..287: note = tr|A0A3E0DKS4|A0A3E0DKS4_9GAMM 6-pyruvoyl tetrahydropterin synthase-like protein OS=Marinomonas pollencensis OX=491954 GN=DFP81_106204 PE=4 SV=1
MKLFVKNLTHVDLSYFDAERGLLGESWQTDIVLAGKLNDESMICDFSLVKKYIKKWLDDHIDHMLAIPTQHPNATLSPLKDDRVSFRFNHADGRRFQCDAPSQAICSLPMSEITPQAAAQWVEAQILDLLPAELEAVSVRFSSEKIDGAEYQYSHGLKKHAGNCQRIAHGHRSTIEIYEDGVRSAEREQDWAKRWEDSYLGTQEDLLGLIDEEQQHYHHFGYESAQGQFELIIDSQQVYMLDSDTTVESLSAHIANTLAMENPGKHFEVHAFEGIGKGAISEKTVSA

SEQ ID NO: 22311 - protein, 287 aa, Marinomonas posidonica
  REGION 1..287: note = tr|F6CYK7|F6CYK7_MARPP Uncharacterized protein; OS = Marinomonas posidonica (strain CECT 7376 / NCIMB 14433 / IVIA-Po-181) OX=491952 GN=Mar181_1575 PE=4 SV=1
MKLFVKNLTHVDFSYFDAERGLLGESWQTDIVLTGKLNDESMICDFSIVKKQIKKWLDDNIDHMLAIPTEHPSSRLIELDNDRVSFQFDHEDGRHFQCDAPSQAICSLPCQQITPSLAAAWVEQQILDLLPAELEAVSIRFTPESISGAQYQYSHGLKKHAGNCQRIAHGHRSTIEIYRDGKADAALEQDWAKRWQDIYLGTQEDLQKVVDINGRPHHYFSYTSQQGLFELTIDSQQVYMLNCDTTVESLSAHVAYVLAHEQVGSLIEAHGFEGIGKGAISEYKVTK

SEQ ID NO: 22312 - protein, 292 aa, Marinomonas primoryensis
  REGION 1..292: note = tr|A0A2Z4PST4|A0A2Z4PST4_9GAMM Uncharacterized protein OS=Marinomonas primoryensis OX=178399; GN = A8139_11455 PE=4 SV=1
MKLFVKNLTHVDLSYFDTERGLLGESWQTDIVLTGKLNDESMICDFSIVKKHIKKWLDDHIDHMLAIPAEHVGSSLTKLSNDRVSFRFDHSKENPDDSRRFQCDAPTQAICVLPMAKITPDAAAKWVESQILNLLPAELEAVSVRFSPEKIDGAEYQYSHGLKKHAGNCQRIAHGHRSTVGIYADGIRNDAMEKDWADRWKDIYLGTQEDLDKFIEEDGRRYHCFSYTSQQGLFELMIDSNQVYMLDCDTTVESLSAHIANVLAQENPGTHIEAHGFEGIGKGAISDHKVSL

SEQ ID NO: 22313 - protein, 293 aa, unidentified
  source 1..293: note = Marinomonas profundimaris
  REGION 1..293: note = tr|W1S4T7|W1S4T7_9GAMM Uncharacterized protein; OS = Marinomonas profundimaris OX=1208321 GN=D104_02795 PE=4; SV = 1
MKLFVKNLTHVDLSYFDAQRGLLGESWQTDIVLAGKLNDESMICDFSIVKKQIKKWLDEHIDHMLAIPAEYAGTTLTPLANDRVSFQFDHSKETPNDHRRFQCDAPTQAICVLPMNDITPDAAAKWVESQILDLLPAELEAVSVRFFPEKIDGAEYQYSHGLKKHAGNCQRIAHGHRSTVEIYADGVRNDVMEQDWATRWNDIYLGTQDDLDKIIEENGRQYHGFRYTSQQGLFELVIDSNQVYMLDCDTTVESLSAHIADVLAEENPGVHIEAHGFEGIGKGAISEKIKART

SEQ ID NO: 22314 - protein, 293 aa, Marinomonas rhizomae
  REGION 1..293: note = tr|A0A366JDD3|A0A366JDD3_9GAMM 6-pyruvoyl tetrahydropterin synthase-like protein OS=Marinomonas rhizomae OX=491948 GN=DFP80_103329 PE=4 SV=1
MKLFVKNLTHVDFSYFDAKRGLLGESWQTDIVLTGKLNDESMICDFSIVKKQIKKWLDDNIDHMLAIPAEHSGSRLTPLANDRASFLFDHSKATPDDKRVFQCDAPTQAICVLPMTDITPEAVAKWVESQILNLLPAELEAVSVHFAPEQIIGAQYQYSHGLKKHAGNCQRIAHGHRSTVEIYADGVRNQAMEHDWAQRWEDIYLGTQEDLVSQTFENGINYHGFSYTSQQGLFELKIDSNQVYMLDCDTTVESLSAHIADILAEENPGTHIEAHGFEGIGKGAISEKMKARI

SEQ ID NO: 22315 - protein, 293 aa, Marinomonas sp.
  REGION 1..293: note = tr|A0A2M8K122|A0A2M8K122_9GAMM Uncharacterized protein OS=Marinomonas sp. BSi20584 OX=1594462; GN = TY87_20065 PE=4 SV=1
MKLFVKNLTHVDFSYFDAKRGLLGESWQTDIVLTGKLNDESMICDFSIVKKQIKKWLDDNIDHMLAIPAEHSGSTMTPLADDRVSFHFDHSKATADDKRVFQCDAPTQAICVLPMTEVTPEAVAKWVESQILNLLPAELEAVSVRFSPEQITGAQYQYSHGLKKHSGNCQRIAHGHRSTVEIYTDGARNAAMEYDWAKRWEDIYLGTQEDLISQVTENGVNYHCFSYTSQQGLFELKIDSNQVYMLDCDTTVESLSAHIAEVLAEENLGTHIEAHGFEGIGKGAISEKIKARI

SEQ ID NO: 22316 - protein, 287 aa, Marinomonas sp.
  REGION 1..287: note = tr|A0A161YX46|A0A161YX46_9GAMM Uncharacterized protein OS=Marinomonas sp. TW1 OX=1561203 GN=OA79_00390; PE = 4 SV=1
MKLFVKNLTHVDFSYYDAERGLLGESWQTDIVLTGKLNDESMICDFSIVKKQIKKWLDDNIDHMLAIPAEHPSSQLIELDHDRVSFQFDHEDGRHFQCDAPSQAICSLPCQQITPSLAARWVEQQILDLLPAELDAVSIRFTPEPIAGAQYQYSHGLKKHAGNCQRIAHGHRSTIEIYRDGKADSALEHDWAKRWQDIYLGTQEDLQKIVDINGRPHHYFRYTSQQGLFELTIDSQQVYMLDCDTTVESLSAHVAYVLAHEHVGSLIEAHGFEGIGKGAISEYKVTK

SEQ ID NO: 22317 - protein, 291 aa, unidentified
  source 1..291: note = Marinomonas spartinae
  REGION 1..291: note = tr|A0A1A8TJN2|A0A1A8TJN2_9GAMM 6-pyruvoyl tetrahydropterin synthase OS=Marinomonas spartinae; OX = 1792290 GN=MSP8886_02834 PE=4 SV=1
MKLFVNNLTQVDLSYFDAQRGLLGESWQTDVVLTGKLNDESMICDFSIVKKQIKKWLDEHIDHMLAIPVNHPNAHLTDMTQGRVSFQFDHDDGSRFRCDAPVQAICALPMENITPQTAASWVESQILDLLPAELEAVSIRFTPENIEGAQYQYSHGLKKHAGNCQRIAHGHRSTIKIYSDGQQDSELENQWAQRWHDIYLGTEDDLLGIIEEHGHHYHHFGYVSQQGFFELTINSQQVYMLNGDTTVESLSAHIAQTLAEENPGKHIEVHAFEGIGKGAISEKTFLKDVDA

SEQ ID NO: 22318 - protein, 161 aa, Marinoscillum furvescens
  REGION 1..161: note = tr|A0A3D9KWH0|A0A3D9KWH0_9BACT 6-pyruvoyltetrahydropterin/6-carboxytetrahydropterin synthase OS=Marinoscillum furvescens DSM 4134 OX=1122208; GN = C7460_12910 PE=4 SV=1
MGYRLPQISFLSLQPDFSRGMIYVSRKEHFNAAHKLYNTNWSHERNVEVFGPCANENWHGHNFELITTVKGMPDPETGFVVDLKQLSNLIRRDIIEKVDHKNLNLDVDFMKGKLASCESLIVEFWKILAPQVGDLGKQCELHSLKLYETPRNFVEFFGEGL

SEQ ID NO: 22319 - protein, 135 aa, Marinoscillum furvescens
  REGION 1..135: note = tr|A0A3D9L7D2|A0A3D9L7D2_9BACT 6-pyruvoyltetrahydropterin/6-carboxytetrahydropterin synthase OS=Marinoscillum furvescens DSM 4134 OX=1122208; GN = C7460_104278 PE=4 SV= 1
MKVAVFRKEHFNAAHRLYNPDWSEEQNEKVFGKCNNPNWHGHNYELVVKLVGEPDPDTGYVYDMKKLSDLIKEHVLKKFDHKNLNLDTEEFKSVNPTAENIAVVIYNTLREHIDDNLEMKVTLYETERNFVEYPA

SEQ ID NO: 22320 - protein, 139 aa, Marinoscillum sp.; identical to SEQ ID NO: 20366
  REGION 1..139: note = tr|A0A2D7TGQ5|A0A2D7TGQ5_9BACT 6-carboxytetrahydropterin synthase QueD OS=Marinoscillum sp. OX=2024838 GN=CMG94_05230 PE=4 SV=1

SEQ ID NO: 22321 - protein, 117 aa, Marinovum algicola
  REGION 1..117: note = tr|A0A0H4L0Z1|A0A0H4L0Z1_9RHOB 6-carboxy-5,6,7,8-tetrahydropterin synthase OS=Marinovum algicola DG 898 OX=988812 GN=MALG_04175 PE=3 SV=1
MFRIRKEFHFSASHQLSHLPPDHQCARLHGHNYVVVVELAAETLNDDGFVRDYHDLKPLKSYIDDQFDHRHLNDIFDVPSTAEHMARHFYDWCAARWPETSAVMISETPKTWAEYRP

SEQ ID NO: 22322 - protein, 150 aa, Marinovum sp.; identical to SEQ ID NO: 21426
  REGION 1..150: note = tr|A0A2D7D2Q7|A0A2D7D2Q7_9RHOB 6-carboxytetrahydropterin synthase QueD OS=Marinovum sp.; OX = 2024839 GN=CMH04_08870 PE=4 SV=1

SEQ ID NO: 22323 - protein, 118 aa, Marinovum sp.
  REGION 1..118: note = tr|A0A2E7WGB0|A0A2E7WGB0_9RHOB 6-carboxy-5,6,7,8-tetrahydropterin synthase OS=Marinovum sp. OX=2024839 GN=queD PE=3 SV=1
MYRISKEFHFSASHQLIDLPEDHQCARLHGHNYIVVVELTAESLNSHGFIRDYQDLTALKQYIDNNLDHRHLNEVLGHDQTTAERLAKHLYDWCAPHWPEVSAVKVSETPKTWAEYRP

SEQ ID NO: 22324 - protein, 124 aa, unidentified
  source 1..124: note = Mariprofundus aestuarium
  REGION 1..124: note = tr|A0A2K8L4U0|A0A2K8L4U0_9PROT 6-carboxy-5,6,7,8-tetrahydropterin synthase; OS = Mariprofundus aestuarium OX=1921086 GN=Ga0123461_1591; PE = 3 SV=1
MATFELSIQTHFSAAHSLRDYPGDCARLHGHNWHVKLYVECEELDELGLGIDYKIMKTELKAALEPWDHYNLNDVAPFDSINPSSENVARELYNEMSARLDDDRVRVSRVEISETCTAKVTYRP

SEQ ID NO: 22325 - protein, 122 aa, unidentified
  source 1..122: note = Mariprofundus ferrinatatus
  REGION 1..122: note = tr|A0A2K8L5Y7|A0A2K8L5Y7_9PROT 6-carboxy-5,6,7,8-tetrahydropterin synthase; OS = Mariprofundus ferrinatatus OX=1921087 GN=Ga0123462_0789; PE = 3 SV=1
MFELSIQTHFSAAHSLRGYPGDCARLHGHNWHVKLFVECKELDEIGLGIDYKIMKTELKAALDPWDHYNLNDVPPFDTINPSSENVARELYNEMSARLDNDRIRVSRIEISETCTAKVTYRP

SEQ ID NO: 22326 - protein, 124 aa, Mariprofundus ferrooxydans
  REGION 1..124: note = tr|Q0EY66|Q0EY66_9PROT 6-carboxy-5,6,7,8-tetrahydropterin synthase; OS = Mariprofundus ferrooxydans PV-1 OX=314345 GN=SPV1_05347; PE = 3 SV=1
MARFELSIETHFSAAHSLRDYPGDCARLHGHNWHVKLYVECTELDELGLGIDYKVLKSELKEALEPWDHYNLNDVPPFDRINPSSENVAAELYKKMSSRLDNERVRVSRIEICETCTAMVTYWP

SEQ ID NO: 22327 - protein, 124 aa, unidentified
  source 1..124: note = Mariprofundus micogutta
  REGION 1..124: note = tr|A0A1L8CJM3|A0A1L8CJM3_9PROT 6-carboxy-5,6,7,8-tetrahydropterin synthase; OS = Mariprofundus micogutta OX=1921010 GN=MMIC_P0053 PE=3; SV = 1
MARFELSIETHFSAAHSLRDYPGDCARLHGHNWHVKLYVECEELDSLGLGIDYKIMKTELKAALEPWDHYNLNDVAPFDVINPSSENVALELYKEMSGRLDNARLRVSRIEISETCTAKVTYWP

SEQ ID NO: 22328 - protein, 125 aa, Mariprofundus sp.
  REGION 1..125: note = tr|A0A498DIX0|A0A498DIX0_9PROT 6-carboxy-5,6,7,8-tetrahydropterin synthase; OS = Mariprofundus sp. EBB-1 OX=2650971 GN=D8Y20_05320 PE=3; SV = 1
MSATFELSIETHFSAAHSLRDYPGDCARLHGHNWHVKLYVVCEELDELGLGIDYKIMKTELKAALEPWDHYNLNDVAPFDAINPSSENVARELYHTMSSKLDDDRIHVSRIDISETCTAKVTYRP

SEQ ID NO: 22329 - protein, 291 aa, unidentified
  source 1..291: note = Marisediminitalea aggregata
  REGION 1..291: note = tr|A0A1M5IT04|A0A1M5IT04_9ALTE 6-pyruvoyl tetrahydropterin synthase OS=Marisediminitalea aggregata; OX = 634436 GN=SAMN05216361_1797 PE=4 SV=1
MQLFVNDLTVMDFSYLCPERGMVGESWIVDVLLDGTLNEESMVQDFGIVKKNLKRLIDSYVDHKLLVPAECQATSIRHDDDTDYVEVNFTLAEQKAIQMYCPADAYAFIYAPTITMESVSEYLREVIATHLPDNVDNLTILLRTEVINTPFYHYTHGLKKHDGNCQRIAHGHRSKVDIITDGEIDLDSQAYWADRWCDIYIASEEDRISAEQLKLQQKLPSYQAHVCFAYEATQGYFEIVLPESQCEVITTDSTVECLAQFIYQQQKQRKPDTHCCVLAYEGVGKGARVSD

SEQ ID NO: 22330 - protein, 121 aa, unidentified
  source 1..121: note = Marispirochaeta aestuarii
  REGION 1..121: note = tr|A0A1Y1S031|A0A1Y1S031_9SPIO 6-carboxy-5,6,7,8-tetrahydropterin synthase; OS = Marispirochaeta aestuarii OX=1963862 GN=B4O97_05480; PE = 3 SV=1
MYQLRINGDFAAAHFLKNYHGKCENLHGHNYKVRVYLSGSRLDAGGMLIDFGIVKGHLKEVLAGLDHSNLNEHPFFSSGNPSAELIARYIYEEMAPRIPSVHLDRVEVFETENNVASYLPD

SEQ ID NO: 22331 - protein, 117 aa, Maritalea myrionectae
  REGION 1..117: note = tr|A0A2R4MHJ4|A0A2R4MHJ4_9RHIZ 6-carboxy-5,6,7,8-tetrahydropterin synthase OS=Maritalea myrionectae OX=454601 GN=MXMO3_03014 PE=3 SV=1
MFRIRKEFHFSASHQLDHLPADHQCARLHGHNYIVVVELAAETLNEDGFVRDYHDLKPLKTYIDDHFDHRHLNDVMDGPSTAENMALHFYKWCHARWPETSAVLVSETPKTWAEYRP

SEQ ID NO: 22332 - protein, 118 aa, Maritimibacter sp.
  REGION 1..118: note = tr|A0A2U2CL92|A0A2U2CL92_9RHOB 6-carboxy-5,6,7,8-tetrahydropterin synthase; OS = Maritimibacter sp. 55A14 OX=2174844 GN=queD PE=3 SV=1
MYRITKQFHFSAAHQLVGLPEDHPCARLHGHNYIAEVELSAETLDENGFVIDYRALEPLKRYIDETLDHRHLNEVFGHDGVTSEWLARRLFDWARARWPQVTAMRISETPKTWAEYRP

SEQ ID NO: 22333 - protein, 136 aa, unidentified
  source 1..136: note = Marivirga lumbricoides
  REGION 1..136: note = tr|A0A2T4DUM2|A0A2T4DUM2_9BACT 6-carboxy-5,6,7,8-tetrahydropterin synthase OS=Marivirga lumbricoides OX=1046115 GN=C9994_02600 PE=3 SV=1
MRVSVFRREHFNAAHRLHNSNWTDEKNEQVFGKCNNPNFHGHNYELEVKVTGEISPETGYVVDMKVLSDIIKSNIIDKFDHKNLNLDTEEFENLNPTAENIAVVIYQLLREKIETSLDVKIKLYETEKNYVEYPTE

SEQ ID NO: 22334 - protein, 139 aa, unidentified
  source 1..139: note = Marivirga lumbricoides
  REGION 1..139: note = tr|A0A2T4DHN2|A0A2T4DHN2_9BACT 6-carboxytetrahydropterin synthase QueD OS=Marivirga lumbricoides OX=1046115 GN=C9994_13140 PE=4 SV=1
MVYVNRKEHFNAAHKLFNPNWSREKNEEVFGPCANENWHGHNFELIVTVKGTPDPDTGFVVDLKKLSTLIREDVINKVDHKNLNLDVPFLVGKMASCEVIISEFWKILAPKVAELQKGASLHKLTLYETPRNYVEYFGE

SEQ ID NO: 22335 - protein, 138 aa, Marivirga sericea
  REGION 1..138: note = tr|A0A1X7K0R6|A0A1X7K0R6_9BACT 6-pyruvoyltetrahydropterin/6-carboxytetrahydropterin synthase OS=Marivirga sericea OX=1028; GN = SAMN05661096_02148 PE=4 SV=1
MVYVNRKEHFNAAHKLFNPNWSREKNEEVFGPCANENWHGHNFELIVTVKGEPDPDTGFVVDLKKLSNLIKSEVIDKVDHKNLNMDVPFLEGKMASCEIIIAEFWKILEPKVKDLQEGSSLHKLTLYETPRNFVEFYG

SEQ ID NO: 22336 - protein, 135 aa, Marivirga sericea
  REGION 1..135: note = tr|A0A1X7I8N7|A0A1X7I8N7_9BACT 6-carboxy-5,6,7,8-tetrahydropterin synthase OS=Marivirga sericea OX=1028 GN=SAMN05661096_00333 PE=3 SV=1
MKVAVFRKEHFNAAHRLNNPKWTEEENREVFGKCNNPNFHGHNYELIVKVTGETDPDTGYVMDMKVLSDLIKERVLDRFDHKNLNLDTKEFSNLNPTAENIAVVIFNLLRGEIDPDKELKIKLYETERNYVEYPA

SEQ ID NO: 22337 - protein, 143 aa, Marivirga tractuosa
  REGION 1..143: note = tr|E4TR27|E4TR27_MARTH 6-carboxy-5,6,7,8-tetrahydropterin synthase OS=Marivirga tractuosa (strain ATCC 23168 / DSM 4126 / NBRC 15989 / NCIMB 1408 / VKM B-1430 / H-43 ) OX=643867 GN=Ftrac_2730; PE = 3 SV=1
MKIYSDFMISITKEFSFETAHRISNHPASCKHIHGHSYRLFVTVSADEIQENDMIIDFKELKQIINEKVIKTFDHALVLKRNDENTKLAQNIDSNIFWMEFEPTVERLLDYIRKQIQNSLAEPVFLKKLKLYETATSFGEWEK

SEQ ID NO: 22338 - protein, 138 aa, Marivirga tractuosa
  REGION 1..138: note = tr|E4TP00|E4TP00_MARTH Uncharacterized protein; OS = Marivirga tractuosa (strain ATCC 23168 / DSM 4126 / NBRC 15989 / NCIMB 1408 / VKM B-1430 / H-43) OX=643867; GN = Ftrac _3564 PE=4 SV=1
MVYVNRKEHFNAAHKLFNPNWSREKNEEVFGPCANENWHGHNFELIVTVKGEPDPDTGFVVDLKKLSNLIKSEVIDKVDHKNLNMDVPFLVGKMASCEVIIAEFWKILEPKVKQLQEGSSLHKLTLYETPRNFVEYYG

SEQ ID NO: 22339 - protein, 131 aa, Marivita cryptomonadis
  REGION 1..131: note = tr|A0A1X4NVB4|A0A1X4NVB4_9RHOB 6-pyruvoyl tetrahydropterin synthase OS=Marivita cryptomonadis; OX = 505252 GN=MCRY_15635 PE=4 SV=1
MFAVEVRDHIMIGHSLPSPVFGPAQGMHGATFTVDAAFFTDDIDEHGLVVDIGLATEALAETLAPLRYKNLDEVPEFKGKFTTTEFLCGHIFKTLADHVRTGKLADNSRVKKIRIMLHESHVARAWYEAEV

SEQ ID NO: 22340 - protein, 131 aa, Marivita hallyeonensis
  REGION 1..131: note = tr|A0A1M5S755|A0A1M5S755_9RHOB 6-pyruvoyl-tetrahydropterin synthase OS=Marivita hallyeonensis OX=996342 GN=SAMN05443551_2028 PE=4 SV=1
MFAVEVRDHIMIAHSLPSPVFGPAQGMHGATFVVDAAFYTKDLDENGLVVDIGLATEALSKVLAPLNYANLDEVPAFKGKITTTEFLCHRIWTQLRETVKTTGLGDGGRVCRIKVSLEESHVARGWYEADV

SEQ ID NO: 22341 - protein, 117 aa, unidentified
  source 1..117: note = Marivivens niveibacter
  REGION 1..117: note = tr|A0A251WYF5|A0A251WYF5_9RHOB 6-carboxy-5,6,7,8-tetrahydropterin synthase OS=Marivivens niveibacter OX=1930667 GN=BVC71_11595 PE=3 SV=1
MFRISKEFHFSASHQLTHLPDDHQCARLHGHNYIVVVELSGAELNSDGFVRDYHELKPLKSYIDDNFDHRHLNDVMEGYSTAENMAKHFYDWCKARWPETSAVKVSETPKTWAEYRP

SEQ ID NO: 22342 - protein, 136 aa, Marixanthomonas ophiurae
  REGION 1..136: note = tr|A0A3E1Q677|A0A3E1Q677_9FLAO 6-carboxy-5,6,7,8-tetrahydropterin synthase; OS = Marixanthomonas ophiurae OX=387659 GN=DZ858_15040 PE=3; SV = 1
MSLTVFRKAHFNAAHRLFVKEWSDEKNREFFGKCSNPNYHGHNYELEVGVTGEIDFKTGYLIDLDFLKTIIKEEVEDPFDHKNLNVEVEQFKSLNPTVENIAIVIWNKLRKRLDDKFEISVKLYETPRNFVVYTGK

SEQ ID NO: 22343 - protein, 149 aa, Marixanthomonas ophiurae
  REGION 1..149: note = tr|A0A3E1QAS8|A0A3E1QAS8_9FLAO 6-carboxy-5,6,7,8-tetrahydropterin synthase; OS = Marixanthomonas ophiurae OX=387659 GN=DZ858_03995 PE=3; SV = 1
MSKIRITKQFSFETGHALYGYDGKCRNVHGHSYKLSVTVIGTPIDNNNNVKYGMVIDFSDLKKIVKEDIVDVFDHATVFNKNTPHVELAKELQDRDHNVLLVDYQPTSEMMVIDFAEKIKNRLPNTIQLHSLKLQETATSYAEWYASDN

SEQ ID NO: 22344 - protein, 149 aa, Marixanthomonas sp.
  REGION 1..149: note = tr|A0A2U0I298|A0A2U0I298_9FLAO 6-carboxy-5,6,7,8-tetrahydropterin synthase; OS = Marixanthomonas sp. HN-E44 OX=2174845 GN=DDV96_07410; PE = 3 SV=1
MSKIRITKQFSFETGHALYGYDGKCRNVHGHSYKLSVTVIGTPIDDTDHVKYGMVIDFGDLKKIVKEEIVDVFDHATVFNKNTPHVELAKELKNRDHNVLLVDYQPTSEMMVIDFAEKLKKRLPHNLQLHSLKLQETATSYAEWYASDN

SEQ ID NO: 22345 - protein, 135 aa, Marixanthomonas sp.
  REGION 1..135: note = tr|A0A2U0I5F2|A0A2U0I5F2_9FLAO 6-carboxy-5,6,7,8-tetrahydropterin synthase; OS = Marixanthomonas sp. HN-E44 OX=2174845 GN=DDV96_03500; PE = 3 SV=1
MSLTVFRKAHFNAAHRLYVKEWSDEKNRDYFGKCSNPNYHGHNYELEVGVTGKVDPKTGYLINLETLKTIIKEEVEVPLDHKNLNIEVEEFKTLNPTVENIAIVIWNKLRNRLDDTFEISVKLYETPRNFVIYTG

SEQ ID NO: 22346 - protein, 130 aa, unidentified
  source 1..130: note = Marmoricola pocheonensis
  REGION 1..130: note = tr|A0A3N0GRF8|A0A3N0GRF8_9ACTN 6-carboxytetrahydropterin synthase OS=Marmoricola pocheonensis OX=661485 GN=EFL26_09910 PE=4 SV=1
MFRVNVRDHVMIAHSLQGEVFGPAQRLHGATYVVDATFAGERLDTDGIVVDIGRASEEVRSVLADLNYRNLDDDPGLGNTTTEALAQLVADRLADRVHAGALGEAARDLATITVTLHESHVAWASYERAL

SEQ ID NO: 22347 - protein, 126 aa, unidentified
  source 1..126: note = Marmoricola solisilvae
  REGION 1..126: note = tr|A0A3N0DYF6|A0A3N0DYF6_9ACTN 6-carboxytetrahydropterin synthase OS=Marmoricola solisilvae OX=1542737 GN=EFL95_14720 PE=4 SV=1
MFSVTVRDHVMIAHSFTGEVFGPAQRLHGATYVVDATFRGPDLGPDGILLDIGLAASELKDVLAAVNYRNLDDEDEFKGTNTSTEAVARWVADRLADRLGDDPLLTGLQVTLHESHVAWAAYERPL

SEQ ID NO: 22348 - protein, 132 aa, unidentified
  source 1..132: note = Martelella endophytica
  REGION 1..132: note = tr|A0A0D5LQ75|A0A0D5LQ75_9RHIZ 6-pyruvoyl tetrahydropterin synthase OS=Martelella endophytica; OX = 1486262 GN=TM49_09850 PE=4 SV=1
MFAVEVRDHIMIAHSLPRPVFGPAQAMHGATFVTDAAFFTNDLDEDGLAVDIGAATTVLGEVLKPLNYQNLDELEALKGKVTTTEVIAKYIFDQLARAVSESRLGPGSGRIRKIRVTLHESHAARGWYEAEL

SEQ ID NO: 22349 - protein, 132 aa, Martelella mediterranea
  REGION 1..132: note = tr|A0A1U9Z427|A0A1U9Z427_9RHIZ Queuosine biosynthesis protein QueD OS=Martelella mediterranea DSM 17316 OX=1122214 GN=Mame_03145 PE=4 SV=1
MFAVEVRDHIMIAHSLPRPVFGPAQGMHGATFVVDAAFFTEDVDDDGLAVDIGAATETLAEVLKPLNYQNLDEVEAFNGKISTTEVIAKHIFDRLAAAVGEKKLGPGSHRIAKIRVTLHESHAARGWYEGAL

SEQ ID NO: 22350 - protein, 132 aa, Martelella mediterranea
  REGION 1..132: note = tr|A0A2T0JE88|A0A2T0JE88_9RHIZ 6-pyruvoyl-tetrahydropterin synthase OS=Martelella mediterranea OX=293089 GN=BCL66_11585 PE=4 SV=1
MFAVEVRDHIMIAHSLPRPVFGPAQAMHGATFVTDAAFFTQDLDQDGLAVDIGAATEVLSEVLKPLNYQNLDELDALKGKVTTTEVIAKFIFDRLAEAVAEGRLGAGSHRICRIRVTLHESHAARGWYEADL

SEQ ID NO: 22351 - protein, 132 aa, Martelella sp.
  REGION 1..132: note = tr|A0A127CMT6|A0A127CMT6_9RHIZ 6-pyruvoyl tetrahydropterin synthase OS=Martelella sp. AD-3 OX=686597; GN = AZF01_18955 PE=4 SV=1
MFAVEVRDHIMIAHSLPRPVFGPAQAMHGATFVTDAAFFTADLDEDGLAVDIGAATTVLGDVLKPLNYQNLDELQAFSGKVTTTEVIAKYIFDQLAEAVAEGRLGPGSDRIRKIRVTLHESHAARGWYEADL

SEQ ID NO: 22352 - protein, 132 aa, Martelella sp.
  REGION 1..132: note = tr|A0A2E1B865|A0A2E1B865_9RHIZ Uncharacterized protein OS=Martelella sp. OX=1969699 GN=CMH13_11370 PE=4; SV = 1
MFAVEVRDHIMIAHSLPRPVFGPAQGMHGATFVVDAAFFTEDVDDDGLAVDIGAATATLAEVLKPLNYQNLDEVEAFNGKISTTEVIAKHIFDQLAAAVGDKKLGPGSHRIAKIRVTLHESHAARGWYEGAL

SEQ ID NO: 22353 - protein, 148 aa, Massilia albidiflava
  REGION 1..148: note = tr|A0A411WY80|A0A411WY80_9BURK 6-carboxy-5,6,7,8-tetrahydropterin synthase OS=Massilia albidiflava OX=321983 GN=queD PE=3 SV=1
MLTITRKLEFDAGHRIPDHKSQCRNLHGHRYTLEITLTGEVIAAEGNSDNGMIMDFSDVKALAKEHLVDVWDHAFLVYEKDSAVKEFLASLPGHKTVVIDRIPTVENLAAVAFGILKAAYKDRYGTGLKLHKLVLHETPNCWAEITDA

SEQ ID NO: 22354 - protein, 148 aa, unidentified
  source 1..148: note = Massilia armeniaca
  REGION 1..148: note = tr|A0A2R4CB25|A0A2R4CB25_9BURK 6-carboxy-5,6,7,8-tetrahydropterin synthase OS=Massilia armeniaca OX=2072590 GN=queD PE=3 SV=1
MLTITRKLEFDAGHRIPDHKSQCRNLHGHRYTLEITLTGQVITAEGNSDNGMIMDFSDVKAIAKAHLVDVWDHAFLVYDKDTAVKEFLASLPNHKTVVIDRIPTVENLAAVAFGILKAAFKDRYGTGLHLHKLVLHETPNCWAEIVEG

SEQ ID NO: 22355 - protein, 147 aa, Massilia aurea
  REGION 1..147: note = tr|A0A422QN72|A0A422QN72_9BURK 6-carboxy-5,6,7,8-tetrahydropterin synthase OS=Massilia aurea OX=373040 GN=NM04_06930 PE=3 SV=1
MLTITRKLEFDAGHRIPDHKSQCRNLHGHRYTLEITLTGQVIDSDGNSDNGMIMDFSDVKALAKQHLVDVWDHAFIVYEKDDKVREFLASLPDHKTIVIDRIPTVENLAQVAFDILKAVFIDRYGTGLRLHKLVLHETPNCWAEITE

SEQ ID NO: 22356 - protein, 148 aa, unidentified
  source 1..148: note = Massilia eurypsychrophila
  REGION 1..148: note = tr|A0A2G8TGE0|A0A2G8TGE0_9BURK 6-carboxytetrahydropterin synthase QueD OS=Massilia eurypsychrophila OX=1485217 GN=queD PE=4 SV=1
MLTITRKLEFDAGHRIPDHKSQCRNLHGHRYTLEITLTGAVIDVEGSSDNGMIMDFSDIKSLAKEHLVDVWDHAFIVYERDDAVREFLATLPGHKTVVIDRIPTVENLARVAFDILKAVFKDRFGTGLHLHKLVLHETPNCWAEITDA

SEQ ID NO: 22357 - protein, 148 aa, Massilia flava
  REGION 1..148: note = tr|A0A562PQ23|A0A562PQ23_9BURK 6-carboxy-5,6,7,8-tetrahydropterin synthase OS=Massilia flava OX=871742 GN=IP92_02868 PE=3 SV=1
MLTITRKLEFDAGHRIPDHKSQCRNLHGHRYTLEITLTGQVIAAEGNSDNGMIMDFSDVKALAKEHLVDVWDHAFLVYEKDTAVKEFLASLPNHKTVVIDRIPTVENLAAVAFDILKAAYKDRYGTGLKLHKLVLHETPNCWAEITDN

SEQ ID NO: 22358 - protein, 148 aa, unidentified
  source 1..148: note = Massilia glaciei
  REGION 1..148: note = tr|A0A2U2HJP1|A0A2U2HJP1_9BURK 6-carboxytetrahydropterin synthase QueD OS=Massilia glaciei OX=1524097 GN=queD PE=4 SV=1
MLTITRKLEFDTGHRIPDHKSQCRNLHGHRYTLEITLTGAVIEVEGNSDNGMIMDFSDIKALAKEHLVDIWDHAFIVYEKDDKVREFLASLPGHKTVVIDRIPTVENLAQVAFGILKAAYSDRFGTGLRLHKLVLHETPNCWAEITDA

SEQ ID NO: 22359 - protein, 151 aa, unidentified
  source 1..151: note = Massilia lurida
  REGION 1..151: note = tr|A0A562RJT2|A0A562RJT2_9BURK 6-pyruvoyltetrahydropterin/6-carboxytetrahydropterin synthase OS=Massilia lurida OX=1036180 GN=IP91_00249 PE=4; SV = 1
MLTITRKLEFDAGHRIPDHKSQCRNLHGHRYTLEITLTGQVITAEGNSDNGMIMDFSDVKALAKAHLVDVWDHAFLVYDRDTSVKEFLSSLPDHKTVVIDRIPTVENLAAVAFDILKAAYKDRYGTGLRLHKLVLHETPNCWAEISDDGHA

SEQ ID NO: 22360 - protein, 148 aa, Massilia lutea
  REGION 1..148: note = tr|A0A4P6L4D4|A0A4P6L4D4_9BURK 6-carboxytetrahydropterin synthase QueD OS=Massilia lutea; OX = 321985 GN=queD PE=4 SV=1
MLTITRKLEFDAGHRIPDHKSQCRNLHGHRYTLEITLAGEVISAEGNSDNGMIMDFSDVKALAKEHLVDVWDHAFLVYDKDAAVKEFLASLPGHKTVVIDRIPTVENLAAVAFNILKAAYKDRYGTGLKLHKLVLHETPNCWAEITDA

SEQ ID NO: 22361 - protein, 149 aa, unidentified
  source 1..149: note = Massilia namucuonensis
  REGION 1..149: note = tr|A0A1I7M648|A0A1I7M648_9BURK 6-carboxy-5,6,7,8-tetrahydropterin synthase OS=Massilia namucuonensis OX=1035707 GN=SAMN05216552_10619 PE=3 SV=1
MLTITRKLEFDAGHRIPDHKSQCRNLHGHRYTLEITLTGQVINAEGNSDNGMIMDFSDVKALAKEHLVDVWDHAFLVYEKDSAVKEFLASLPNHKTVVIDRIPTVENLAQVAFDILKAAYKDRYGTGLHLHKLVLHETPNCWAEITDGA

SEQ ID NO: 22362 - protein, 147 aa, Massilia oculi; identical to SEQ ID NO: 22355
  REGION 1..147: note = tr|A0A2S2DQ58|A0A2S2DQ58_9BURK 6-carboxy-5,6,7,8-tetrahydropterin synthase OS=Massilia oculi OX=945844 GN=queD PE=3 SV=1

SEQ ID NO: 22363 - protein, 148 aa, unidentified
  source 1..148: note = Massilia phosphatilytica
  REGION 1..148: note = tr|A0A2S8HAD5|A0A2S8HAD5_9BURK 6-carboxy-5,6,7,8-tetrahydropterin synthase OS=Massilia phosphatilytica OX=2026176 GN=queD PE=3 SV=1
MLTITRKLEFDAGHRIPDHKSQCRNLHGHRYTLEITLTGAVIDVEGNSDNGMIMDFSDIKALAKEHLVDVWDHAFLVYEKDEAVRGFLASLPNHKTVVIDRIPTVENLAQVAWNILKAAYTDRYGTGLRLQKLVLHETPNCWAEITDV

SEQ ID NO: 22364 - protein, 148 aa, Massilia plicata
  REGION 1..148: note = tr|A0A4P7B9I4|A0A4P7B9I4_9BURK 6-carboxy-5,6,7,8-tetrahydropterin synthase OS=Massilia plicata OX=321984 GN=queD PE=3 SV=1
MLTITRKLEFDAGHRIPDHKSQCRNLHGHRYTLEITLTGQVITAEGNSDNGMIMDFSDVKAIAKAHLVDVWDHAFLVYEKDHAVKEFLASLPDHKTVVIDRIPTVENLAAVAFGILKAAFKDRYGTGLHLHKLVLHETPNCWAEIVED

SEQ ID NO: 22365 - protein, 148 aa, unidentified
  source 1..148: note = Massilia psychrophila
  REGION 1..148: note = tr|A0A2G8T3G1|A0A2G8T3G1_9BURK 6-carboxy-5,6,7,8-tetrahydropterin synthase OS=Massilia psychrophila OX=1603353 GN=queD PE=3 SV=1
MLTITRKLEFDAGHRIPDHKSQCRNLHGHRYTLEITLTGAVIEVEGNSDNGMIMDFSDIKSLAKEHLVDVWDHAFLVYQKDDAVREFLATLPGHKTVVIDRIPTVENLARVAFDILKAAYTDRFGTGLHLHKLVLHETPNCWAEITDG

SEQ ID NO: 22366 - protein, 148 aa, Massilia sp.
  REGION 1..148: note = tr|A0A0Q5HTL0|A0A0Q5HTL0_9BURK 6-carboxy-5,6,7,8-tetrahydropterin synthase OS=Massilia sp. Leaf139 OX=1736272 GN=ASF77_05450 PE=4 SV=1
MLTITRKLEFDAGHRIPDHKSQCRNLHGHRYTLEITLVGEVIQAEGNSDNGMIMDFSDIKALAKEHLVDVWDHAFIVYEKDEKVREFLASLPGHKTVVIDRIPTVENLAQVAFGILKAAYTDRFGTGLHLHKLVLHETPNCWAEITDA

SEQ ID NO: 22367 - protein, 148 aa, Massilia sp.; identical to SEQ ID NO: 20099
  REGION 1..148: note = tr|A0A344JCS5|A0A344JCS5_9BURK 6-carboxy-5,6,7,8-tetrahydropterin synthase OS=Massilia sp. YMA4 OX=1593482 GN=queD PE=3 SV=1

SEQ ID NO: 22368 - protein, 147 aa, Massilia timonae; identical to SEQ ID NO: 22355
  REGION 1..147: note = tr|A0A1S2N7V8|A0A1S2N7V8_9BURK 6-carboxy-5,6,7,8-tetrahydropterin synthase OS=Massilia timonae OX=47229 GN=queD PE=3 SV=1

SEQ ID NO: 22369 - protein, 147 aa, Massilia timonae; identical to SEQ ID NO: 22355
  REGION 1..147: note = tr|K9DRF9|K9DRF9_9BURK 6-carboxy-5,6,7,8-tetrahydropterin synthase OS=Massilia timonae CCUG 45783 OX=883126 GN=HMPREF9710_04793 PE=3 SV=1

SEQ ID NO: 22370 - protein, 148 aa, unidentified
  source 1..148: note = Massilia umbonata
  REGION 1..148: note = tr|A0A4P8HLJ7|A0A4P8HLJ7_9BURK 6-carboxytetrahydropterin synthase QueD OS=Massilia umbonata OX=864828 GN=queD PE=4 SV=1
MLTITRKLEFDAGHRIPDHKSQCRNLHGHRYTLEITLTGEVISSEGNSDNGMIMDFSDVKALAKEHLVDVWDHAFLVYDKDSAVKEFLASLPGHKTVVIDRIPTVENLAAVAFGILKAAYKDRYGTGLKLHKLVLHETPNCWAEITDA

SEQ ID NO: 22371 - protein, 148 aa, unidentified
  source 1..148: note = Massilia violaceinigra
  REGION 1..148: note = tr|A0A2D2DQ29|A0A2D2DQ29_9BURK 6-carboxytetrahydropterin synthase QueD OS=Massilia violaceinigra OX=2045208 GN=queD PE=4 SV=1
MLTITRKLEFDAGHRIPDHKSQCRNLHGHRYTLEITLTGAVIHAEGNSDNGMIMDFSDIKALAKEHLVDVWDHAFLVYEKDDKVREFLASLPGHKTVVIDRIPTVENLAQIAFDILKAAYTDRFGTGLHLHKLVLHETPNCWAEITDA

SEQ ID NO: 22372 - protein, 148 aa, unidentified
  source 1..148: note = Massilia yuzhufengensis
  REGION 1..148: note = tr|A0A1I1QXE5|A0A1I1QXE5_9BURK 6-pyruvoyltetrahydropterin/6-carboxytetrahydropterin synthase OS=Massilia yuzhufengensis OX=1164594; GN = SAMN05216204_12074 PE=4 SV=1
MLTITRKLEFDAGHRIPDHKSQCRNLHGHRYTLEITLTGEVIDAEGNSDNGMIMDFSDVKTLAKAHLVDVWDHAFLVYEKDDKVREFLASLPGHKTVVIDCIPTVENLARVAFTILKTVFTDRYGTGLRLHKLVLHETPNCWAEVTDA

SEQ ID NO: 22373 - protein, 129 aa, Mastigocladus laminosus; identical to SEQ ID NO: 21094
  REGION 1..129: note = tr|A0A4D9CEU5|A0A4D9CEU5_MASLA 6-carboxy-5,6,7,8-tetrahydropterin synthase; OS = Mastigocladus laminosus UU774 OX=1594576; GN = BLD44_019690 PE=3 SV=1

SEQ ID NO: 22374 - protein, 290 aa, Mastigocladus laminosus
  REGION 1..290: note = tr|A0A4D9CFV0|A0A4D9CFV0_MASLA 6-pyruvoyl tetrahydropterin synthase OS=Mastigocladus laminosus UU774; OX = 1594576 GN=BLD44_011750 PE=4 SV=1
MQCVVNRRAQFSASHRYWLPELSEAENLEKFGACSRFPGHGHNYVLFVSLIGELDKYGMVLNLSDVKHVIKQEVTSQLDFSYLNDVWAEFQQILPTTENIARVIWQKLAPHLPLVRVQLFENPELWADYMGNGMEAYLSVSTHFSAAHRLAHPDISDQDNFEIYGKCARPNGHGHNYHLEVTVKGEIDSRTGMIVDLGALNQVIEDYVVEPFDHTFLNKDISYFSEVVPTAENIALHISNLLRSPIEKLGAKLYKVKLIESPNNSCEIYCTDTESNSVNIAETQPVLARI

SEQ ID NO: 22375 - protein, 290 aa, Mastigocoleus testarum
  REGION 1..290: note = tr|A0A0V7ZVB6|A0A0V7ZVB6_9CYAN 6-pyruvoyl tetrahydropterin synthase OS=Mastigocoleus testarum BC008; OX = 371196 GN=BC008_33600 PE=4 SV=1
MQCIVNRRAQFSASHRYWLPELSESENKDKFGACSRFPGHGHNYVLFISLAGELDEYGMVLNLSDVKQVIKKEVTSQLDFSYLNDVWEEFQETLPTTENIARIIWQRLVPQLPLVRVQLFEHPELWAEYMGNGMESYLTVSTHFSAAHRLAHPDLSLENNFEIYGKCARPNGHGHNYHLEVTVKGEIDGRTGMIVDLGELNQVIEDLVVEPFDHTFLNKDIPHFASVVPTAENIALHISNLLQSPIKELGAKLHKVKLIESPNNSCEIYCTESGDNSQTGVQNQPVLMQV

SEQ ID NO: 22376 - protein, 129 aa, Mastigocoleus testarum
  REGION 1..129: note = tr|A0A0V7ZS14|A0A0V7ZS14_9CYAN 6-carboxy-5,6,7,8-tetrahydropterin synthase; OS = Mastigocoleus testarum BC008 OX=371196 GN=BC008_29825; PE = 3 SV=1
MPKWKLVTEFSFSSAHYIKDYDGPCGRMHGHNYTVKMEATASELHTSEYCPHPVMVADFRTLRWAKRDVTKGGLDHCILNEVMPPEYETTAEMIAKYIYDKTKKILPTGVKLKVSVSETPNSWAEYEDD

SEQ ID NO: 22377 - protein, 111 aa, unidentified
  source 1..111: note = Mediterranea sp.
  REGION 1..111: note = tr|A0A1Y4HMW3|A0A1Y4HMW3_9BACT 6-carboxy-5,6,7,8-tetrahydropterin synthase; OS = Mediterranea sp. An20 OX=1965586 GN=B5F34_06765 PE=3; SV = 1
MYTVIKRMEISAAHRLQLSYPSKCQQLHGHNWIITVYCRARELNQDGMVTDFTHIKQLVQDTLDHRNLNDILSFNPTAENIARWLCDRIEHCYRVDVQESEGNTAIYEKED

SEQ ID NO: 22378 - protein, 125 aa, Megamonas funiformis
  REGION 1..125: note = tr|H3K495|H3K495_9FIRM 6-carboxy-5,6,7,8-tetrahydropterin synthase OS=Megamonas funiformis YIT 11815 OX=742816 GN=HMPREF9454_00068 PE=3; SV = 1
MFELVVNGAFEAAHRLVDYPGKCNRLHGHSWTVEMSVSGDKLDNIGMVADFKVLKSMLMEVLDAMDHQYLNELPQFKELNPTAEHLAKYIYETIEANDLFKTNCKLNYIKVWESPKAAVIYRKDA

SEQ ID NO: 22379 - protein, 61 aa, Megamonas funiformis
  REGION 1..61: note = tr|H3K9I0|H3K9I0_9FIRM Uncharacterized protein; OS = Megamonas funiformis YIT 11815 OX=742816; GN = HMPREF9454_01903 PE=4 SV=1
MRSITKLDLQYAHRFYGFKGEAQYLHGHTGVLTIEVEGSINSGVNMVFPCNEIQKTAWEVF

SEQ ID NO: 22380 - protein, 188 aa, Megamonas hypermegale
  REGION 1..188: note = tr|A0A239U2V8|A0A239U2V8_9FIRM Queuosine biosynthesis protein QueD OS=Megamonas hypermegale; OX = 158847 GN=SAMEA4364220_01986 PE=4 SV=1
MRSITKLDLQYAHRFYGFKGEAQYLHGHTGVLTIEVEGSINSGVNMVFPCNEIQKTAWEVLKNFDHALILREDDPLLPAILDVYEKQGIKGGAPNNIMKGPAFKTELATAYPDCRLVVTKETMTVEGMIKIVYDLLKDKLNIVKLTFSSGVNLASEEYEPHLDVDRCPLCGIALENGVCPKCGYKKPN

SEQ ID NO: 22381 - protein, 188 aa, Megamonas hypermegale
  REGION 1..188: note = tr|A0A378NV65|A0A378NV65_9FIRM Queuosine biosynthesis protein QueD OS=Megamonas hypermegale; OX = 158847 GN=NCTC10571_02422 PE=4 SV=1
MRSITKLDLQYAHRFYGFKGEAQYLHGHTGVLTIEVEGSINSGVNMVFPCNEIQKTAWEVLKNFDHALILREDDPLLPAILGVYEKQGIKDGAPNNVMKGPAFKTELATAYPDCRLVVTKETMTVEGMIKIVYELLKDKLNIVKLTFSSGVNLASEEYEPHLEVDRCPLCGIALNENGVCPKCGYKKP

SEQ ID NO: 22382 - protein, 125 aa, Megamonas rupellensis; identical to SEQ ID NO: 22378
  REGION 1..125: note = tr|A0A412CEP2|A0A412CEP2_9FIRM 6-carboxy-5,6,7,8-tetrahydropterin synthase OS=Megamonas rupellensis OX=491921 GN=queD PE=3 SV=1

SEQ ID NO: 22383 - protein, 188 aa, Megamonas rupellensis
  REGION 1..188: note = tr|A0A412CD53|A0A412CD53_9FIRM Rubredoxin; OS = Megamonas rupellensis OX=491921 GN=DWY77_09465 PE=4 SV=1
MRSITKLDLQYAHRFYGFKGEAQYLHGHTGVLTIEVEGSINSGVNMVFPCNEIQKTAWEVLKNFDHALILREDDPLLPAILGVYEKQGIKDGAPNNVMKGPAFKTELATAYPDCRLVVTKETMTVEGMIKIVYELLKDKLNIVKLTFSSGVNLASEEYAPHLEVDRCPLCGIALNENGVCPKCGYKKP

SEQ ID NO: 22384 - protein, 125 aa, Megamonas sp.; identical to SEQ ID NO: 22378
  REGION 1..125: note = tr|A0A1H8G0D2|A0A1H8G0D2_9FIRM 6-carboxy-5,6,7,8-tetrahydropterin synthase OS=Megamonas sp. Calf98-2 OX=1855330 GN=SAMN05216340_11636 PE=3 SV=1

SEQ ID NO: 22385 - protein, 109 aa, Megasphaera cerevisiae
  REGION 1..109: note = tr|A0A0J6X0Y5|A0A0J6X0Y5_9FIRM 6-pyruvoyl tetrahydropterin synthase OS=Megasphaera cerevisiae DSM 20462 OX=1122219 GN=AB840_00045 PE=4 SV=1
MYTVIKKLEISAAHHLVLDYESKCENLHGHNWIIYVTCQAESLDANGMVIDFKKIKELIHGTMDHHNLNDVFDFNPTAENIAKWICDTVPNCVRAEVRESEGNTAVYEK

SEQ ID NO: 22386 - protein, 109 aa, Megasphaera elsdenii
  REGION 1..109: note = tr|G0VPJ6|G0VPJ6_MEGEL Putative queuosine biosynthesis protein QueD OS=Megasphaera elsdenii DSM 20460 OX=1064535 GN=MELS_1152 PE=4 SV=1
MYTVTKRMEVSAAHHLVLDYESKCEHLHGHNWIIYVTCQAEALDRNGMVVDFKKIKELVHAKMDHQNLNDVFDFNPTAENIAKWICDTVPHCVKVTVQESEGNVATYEL

SEQ ID NO: 22387 - protein, 109 aa, Megasphaera elsdenii
  REGION 1..109: note = tr|R7MWS5|R7MWS5_9FIRM Putative queuosine biosynthesis protein QueD OS=Megasphaera elsdenii CAG:570; OX = 1263087 GN=BN715_00675 PE=4 SV=1
MYTVTKRMEVSAAHHLVLDYESKCEHLHGHNWIIYVTCQAEALDHNGMVVDFKKIKEMVHAKMDHQNLNDVFDFNPTAENIAKWICDTVPHCVKVTVQESEGNVATYEL

SEQ ID NO: 22388 - protein, 109 aa, unidentified
  source 1..109: note = Megasphaera genomosp.
  REGION 1..109: note = tr|A0A2J8BA05|A0A2J8BA05_9FIRM 6-carboxytetrahydropterin synthase QueD OS=Megasphaera genomosp. type_2 OX=699193 GN=CAL30_05045 PE=4 SV=1
MFTVRKRLEISAAHQLHLDYESKCRHLHGHNWIIYVTCQAAELNEQGMIVDFKQIKELVHGKLDHQYLNELFPFNPTAENLAKWICDTVPYCVKVEIQESEGNVAIYEK

SEQ ID NO: 22389 - protein, 109 aa, unidentified
  source 1..109: note = Megasphaera genomosp.
  REGION 1..109: note = tr|D3LT29|D3LT29_9FIRM Putative queuosine biosynthesis protein QueD OS=Megasphaera genomosp. type_1 str. 28L OX=699218 GN=HMPREF0889_0015 PE=4 SV=1
MYTVRKRLEISAAHHLQLDYESKCTHLHGHNWIIYVTCQAETLDKNGMVIDFKQIKELVHAKMDHQDLNEIFSFNPTAENIAKWICDTVPHCVKAEVRESEGNVAVYEK

SEQ ID NO: 22390 - protein, 139 aa, unidentified
  source 1..139: note = Megasphaera hexanoica
  REGION 1..139: note = tr|A0A344MIY3|A0A344MIY3_9FIRM 6-carboxy-5,6,7,8-tetrahydropterin synthase OS=Megasphaera hexanoica OX=1675036 GN=ACT01_06290 PE=3 SV=1
MYYLKTEQSFDAAHFLKGYAGKCHNLHGHRWRVIVEIRSDKLRTDAQCRSMVVDFSDLKKSLKDICDFYDHSLIYETGSLKETTVAALKEEDFCLHEVPFRPTAEEFSRHIYETMQQQGYDVSRVDVYETPNNCASYGG

SEQ ID NO: 22391 - protein, 139 aa, Megasphaera micronuciformis
  REGION 1..139: note = tr|E2ZCX4|E2ZCX4_9FIRM Putative queuosine biosynthesis protein QueD OS=Megasphaera micronuciformis F0359 OX=706434 GN=HMPREF9429_01078 PE=4 SV=1
MYYISSEATFDGAHFLKNYEGKCHNLHGHRWLVRAHAKAEALKETRQEKGMLTDFGNLKKSLKEACDFFDHALIYEKGSLKDTTLACLEEENFLLREVSFRPTAENLSKYFYDLLKNDCPELCRVEVYETPTNKAAYEE

SEQ ID NO: 22392 - protein, 109 aa, Megasphaera sp.
  REGION 1..109: note = tr|S7HR92|S7HR92_9FIRM 6-pyruvoyl tetrahydrobiopterin synthase OS=Megasphaera sp. NM10; OX = 1273103 GN=NM10_05321 PE=4 SV=1
MYTVTKRMEISAAHYLVLDYESKCEHLHGHNWIISVTCQAETLDRNGMVVDFKKIKEMVHAKMDHQNLNDVFDFNPTAENIAKWICDTVPHCVKVTVQESEGNVATYEL

SEQ ID NO: 22393 - protein, 112 aa, Megasphaera sp.
  REGION 1..112: note = tr|A0A3C1CP23|A0A3C1CP23_9FIRM 6-carboxy-5,6,7,8-tetrahydropterin synthase OS=Megasphaera sp. OX=2023260 GN=DCP59_02875 PE=3 SV=1
MYIVEKTFTVSAAHKLRLDYESPCQNLHGHNWKITITCESPKLDVNGMVIDFKTIKRLIEKRLDHHVLNQELPGMNPTAENIAKWITEVVPYCVRAAVQETEGNVAIYDSRI

SEQ ID NO: 22394 - protein, 109 aa, unidentified
  source 1..109: note = Megasphaera stantonii
  REGION 1..109: note = tr|A0A346AZY1|A0A346AZY1_9FIRM 6-carboxytetrahydropterin synthase QueD OS=Megasphaera stantonii OX=2144175 GN=queD PE=4 SV=1
MYTVTKRLEIAAAHRLSLNYESQCENLHGHNWIIYVTCRREELNENGMVVDFKEISNIVKGKLDHAYLNDVIPGNPTAENIAKWICDSIPFCVKVSVQESEGNVATYEV

SEQ ID NO: 22395 - protein, 146 aa, unidentified
  source 1..146: note = Mehylophilales bacterium
  REGION 1..146: note = tr|A0A258LPA8|A0A258LPA8_9PROT 6-carboxy-5,6,7,8-tetrahydropterin synthase; OS = Mehylophilales bacterium 35-46-6 OX=1970535; GN = B7Y72_01215 PE=3 SV=1
MQITTRLEFDSGHRIPNHKSQCRNLHGHRYVLEITLSGDIITQENASENGMVMDFSDVKSIAKESVVNVWDHAFLVYQHDTEVLNFLNTLPDHKTVVFPTVPTAENMALEAFKILKSKYHDSYGNHLKLEKVRLYETPNSWADALG

SEQ ID NO: 22396 - protein, 128 aa, unidentified
  source 1..128: note = Melaminivora alkalimesophila
  REGION 1..128: note = tr|A0A317RFD0|A0A317RFD0_9BURK 6-carboxy-5,6,7,8-tetrahydropterin synthase; OS = Melaminivora alkalimesophila OX=1165852 GN=DFR36_102183; PE = 3 SV=1
MPHPAMPQQYTVHQRIFFDAAHTLRREIEAEGSRRIHGHTYHAEVSLTGPLDPATGMVQDLGYLRQRLAVLRERLDHHLLDEVPGLGAPTLENLCRFIAEALSDMQPPPSRVRVWRDALGDGCTLDLS

SEQ ID NO: 22397 - protein, 161 aa, unidentified
  source 1..161: note = Melghirimyces algeriensis
  REGION 1..161: note = tr|A0A521DL75|A0A521DL75_9BACL PreQ(0) biosynthesis protein QueD OS=Melghirimyces algeriensis OX=910412; GN = SAMN06264849_106119 PE=4 SV=1
MEFKIPDQVERLGVDIHRDELRYHRKRVAVTKEFTFDAAHHLHLYDGKCKNLHGHTYRLLITISGFVNEIGIVVDFGEVKRMFKEEIESRLDHRYLNEVLPNMNTSAENMVVWIWEQLEAWMDREGWSSQGHRLEELTLFETPTSRVTIKRTWMEAGDSDA

SEQ ID NO: 22398 - protein, 161 aa, unidentified
  source 1..161: note = Melghirimyces profundicolus
  REGION 1..161: note = tr|A0A2T6BW23|A0A2T6BW23_9BACL PreQ(0) biosynthesis protein QueD OS=Melghirimyces profundicolus OX=1242148; GN = C8P63_10948 PE=4 SV=1
MEFKIPDRVERLGMDIGRHELRYHRKRVAVTREFTFDAAHHLHLYEGKCKNLHGHTYRLVITVSGFVDEVGIAVDFGEIKRMYKEEIEERLDHRYLNEVLPHMNTSAENMVVWMWERLDARLERDGWKSRGHRLEELVLYETPTSRVTMKREWMEAGDPDE

SEQ ID NO: 22399 - protein, 178 aa, unidentified
  source 1..178: note = Melghirimyces thermohalophilus
  REGION 1..178: note = tr|A0A1G6K2I9|A0A1G6K2I9_9BACL 6-pyruvoyltetrahydropterin/6-carboxytetrahydropterin synthase OS=Melghirimyces thermohalophilus OX=1236220; GN = SAMN04488112_10535 PE=4SV=1
MSLPCGCFPSPWKGAFFMEFKIPDQVERLGVDIHQDELRYHRKRVAVSKEFTFDAAHHLHRYEGKCKNLHGHTYRLVITVSGFVNEIGIAIDFGELKRMYKEEIEYRLDHRYLNEVLPKMNTSAENMVVWMWEQLDARLERDGWKAAGFRLEELTLYETPTSRATIKREWMEAGDSVD

SEQ ID NO: 22400 - protein, 138 aa, unidentified
  source 1..138: note = Melioribacter roseus
  REGION 1..138: note = tr|I7A1D7|I7A1D7_MELRP 6-carboxy-5,6,7,8-tetrahydropterin synthase; OS = Melioribacter roseus (strain JCM 17771 / P3M-2); OX = 1191523 GN=MROS_0553 PE=3 SV=1
MKIAKEFKWEMGHRLPFHKGKCKNLHGHTYRCMVEIDGAPDENGMVLDYYELKRIIDPIIEEMDHSFMVCSKDTELMNILKSLETKTVVVDFDSTAENICLYLLDRIKKAGLPENIKKVKVRVLETENSYAEDELSLR

SEQ ID NO: 22401 - protein, 135 aa, unidentified
  source 1..135: note = Melioribacter roseus
  REGION 1..135: note = tr|I7A5N8|I7A5N8_MELRP 6-carboxy-5,6,7,8-tetrahydropterin synthase; OS = Melioribacter roseus (strain JCM 17771 / P3M-2); OX = 1191523 GN=MROS_1984 PE=3 SV=1
MIYITRREVFSASHRIYNPQLSDEENFSLYGKCSNPNGHGHNYTLEVTITGEVNPETGYLIDLKKLKSIIRENVIDKLDHKNLNLDVDFLKDKIPTSENIVLGIWNQLAGKIPNGKLYSIKLYETENNYIEYRGE

SEQ ID NO: 22402 - protein, 137 aa, unidentified
  source 1..137: note = Melioribacter sp.
  REGION 1..137: note = tr|A0A1G1BFB5|A0A1G1BFB5_9BACT 6-carboxy-5,6,7,8-tetrahydropterin synthase; OS = Melioribacter sp. GWF2_38_21 OX=1801612 GN=A2X65_10670; PE = 3 SV=1
MKIAKEYNWEMGHRLPFHQGKCKNLHGHSYKCMVEISGEPDANGMILDYYDMKTIIQPVIDELDHAFMVYQDDKEVLEFLDKINSRKVVVDFQSTAENICLYLLKKIKETDLPENIKSVKVKVLETENTYAEEEISF

SEQ ID NO: 22403 - protein, 137 aa, unidentified; identical to SEQ ID NO: 21328
  source 1..137: note = Melioribacter sp.
  REGION 1..137: note = tr|A0A1G1BBS3|A0A1G1BBS3_9BACT 6-carboxy-5,6,7,8-tetrahydropterin synthase; OS = Melioribacter sp. GWF2_38_21 OX=1801612 GN=A2X65_03620; PE = 3 SV=1

SEQ ID NO: 22404 - protein, 146 aa, Melittangium boletus
  REGION 1..146: note = tr|A0A250IB90|A0A250IB90_9DELT 6-pyruvoyl tetrahydrobiopterin synthase OS=Melittangium boletus DSM 14713 OX=1294270 GN=MEBOL_002464 PE=4 SV=1
MEQIHAVRRIQFAAGHRVFQHESKCRNLHGHNYVAFFHARAESGLDAIGRVIDFSVLKEKLGGWVDENWDHGFLAWEKDTEALEAIRKVPGQKVYVTKRNPTAENMALELLLEVAPKVLAGTGVTLSRVVLWETENCYAEVQVDVR

SEQ ID NO: 22405 - protein, 165 aa, Melittangium boletus
  REGION 1..165: note = tr|A0A250IJH2|A0A250IJH2_9DELT Folate biosynthesis protein OS=Melittangium boletus DSM 14713 OX=1294270; GN = MEBOL_004769 PE=4 SV=1
MARTTTIELHKEDMKFAAGHFTIFSATHRENLHGHNFAVFVSLTGEVLADGMLADYDIFKGAALKQCRAWNETFMLPGNSRHLHVEKDARGDVLARFNGEELRFLARDVTILPAENVSLEELARLFGEGLVGDGGSFRANRISHVVVKISSEPGQWCSWEWRDHG

SEQ ID NO: 22406 - protein, 149 aa, Meridianimaribacter sp.
  REGION 1..149: note = tr|A0A4Q9RWP9|A0A4Q9RWP9_9FLAO 6-carboxy-5,6,7,8-tetrahydropterin synthase; OS = Meridianimaribacter sp. CL38 OX=2213021 GN=DMZ43_04870; PE = 3 SV=1
MSNIRITKQFSFETGHALYGYDGKCKNVHGHSYKLSVTVIGQPIADNTNVKFGMVIDFSDLKKIVKEEIVDVFDHATVFNKNTPHVELAKELEDRGHNVLLVNYQPTSEMMVIDFAEKIKTRLPKNIKLHSLKLQETETSFAEWYASDN

SEQ ID NO: 22407 - protein, 136 aa, Meridianimaribacter sp.
  REGION 1..136: note = tr|A0A4Q9RWD0|A0A4Q9RWD0_9FLAO 6-carboxy-5,6,7,8-tetrahydropterin synthase; OS = Meridianimaribacter sp. CL38 OX=2213021 GN=DMZ43_00475; PE = 3 SV=1
MIVTVSRKAHFNAAHRLYRKDWSDEKNADVFGKCSNPNFHGHNYELIVSVTGPINKETGYVIDIQDLKDIIKEEVEDAFDHKNLNVEVEEFKDLNPTAENIAVVIYNKVKPRLNSTLDLEIKLFETPRNFVTYSGL

SEQ ID NO: 22408 - protein, 290 aa, Merismopedia glauca
  REGION 1..290: note = tr|A0A2T1C978|A0A2T1C978_9CYAN 6-pyruvoyl tetrahydropterin synthase OS=Merismopedia glauca CCAP 1448/3 OX=1296344 GN=C7B64_02350 PE=4 SV=1
MKCVINRRAQFSASHRYWLPELSADENVEQFEQCSAFPGHGHNYVLYISLFGELDDYGMVLNLSDVKQVIKREITSQLDYSYLNQVWAEFEETLPTTENIARVIWNRLAPHLPLVKIQLFEHPELWAEYLGNGMEAYLTIGTHFSAAHRLALNELSEDENYQIYGKCARPNGHGHNYHLEVTIKGEIDSRTGMIVNLVDLHKLVEDTVIEPFDHTFLNKDIPYFAQVVPTAENIAIHICQLIETPIRKVGAELHKVKLIESPNNSCEIYWGETGTKSLNMESSGQLLALV

SEQ ID NO: 22409 - protein, 118 aa, unidentified
  source 1..118: note = Mesoaciditoga sp.
  REGION 1..118: note = tr|A0A2J6WJ29|A0A2J6WJ29_9BACT 6-carboxy-5,6,7,8-tetrahydropterin synthase; OS = Mesoaciditoga sp. OX=2060323 GN=queD PE=3 SV=1
MLISKEFKFDAAHNLVNYHGKCEKLHGHTYKLRVTLNGKVDDEGMIIDFAELKRIVNDLVISKLDHNYINEIIPQPSAENIAMWIWNVLEKPLNGPNYRLYSVDLWETESAFVTYMGD

SEQ ID NO: 22410 - protein, 141 aa, unidentified
  source 1..141: note = Mesocricetibacter intestinalis
  REGION 1..141: note = tr|A0A4R6VB86|A0A4R6VB86_9PAST 6-carboxy-5,6,7,8-tetrahydropterin synthase; OS = Mesocricetibacter intestinalis OX=1521930 GN=EDC45_0158; PE = 3 SV=1
MFRVSKEFSFDMAHILDGHDGKCRNLHGHTYRLQVEISGELHGSGAKKGMVADFSDIKALVQRLILDPMDHAFIYDTSSERECRIAALLQELDSKTFGIPVRTTAEEMARFIFQRLSREAQLPVSAVRLWETPTSFCEYRE

SEQ ID NO: 22411 - protein, 150 aa, unidentified
  source 1..150: note = Mesoflavibacter aestuarii
  REGION 1..150: note = tr|A0A2T1NDG9|A0A2T1NDG9_9FLAO 6-carboxytetrahydropterin synthase QueD OS=Mesoflavibacter aestuarii OX=1266046 GN=C7H52_04140 PE=4 SV=1
MSQIRITKKFSFETGHALYGYDGKCKNVHGHSYKLNVTVIGTPISDQNHVKFGMVIDFTDLKKIVKEEIVDVFDHATVFNKNTPHVDLAKELKDRGHTVLLVDYQPTSEMMVIDFAEKIKQRLPENISLHSLKLQETESSFAQWFASDNE

SEQ ID NO: 22412 - protein, 136 aa, unidentified
  source 1..136: note = Mesoflavibacter aestuarii
  REGION 1..136: note = tr|A0A2T1N4V0|A0A2T1N4V0_9FLAO 6-pyruvoyl tetrahydrobiopterin synthase OS=Mesoflavibacter aestuarii; OX = 1266046 GN=C7H52_11470 PE=4 SV=1
MKVTVSRRAHFNAAHRLYRKDWSDQKNDAVFGLCNNPNYHGHNYELIASVTGEIDPETGFVIDVKVLKDYIKSEIEDAFDHKNLNLDVPEFKDLNPTAENIVVVIYNKLKAKLDQQLDLEVTLFETPRNFVKYAGK

SEQ ID NO: 22413 - protein, 150 aa, unidentified
  source 1..150: note = Mesoflavibacter sabulilitoris
  REGION 1..150: note = tr|A0A2T1N6P5|A0A2T1N6P5_9FLAO 6-carboxytetrahydropterin synthase QueD OS=Mesoflavibacter sabulilitoris OX=1520893 GN=C7H61_14300 PE=4 SV=1
MSNIRITKQFSFETGHALYGYDGKCKNVHGHSYKLDVTVIGQPITDTKNVKFGMVIDFGDLKKIVKEEIVDVFDHATVFNKNTPHVELAKELQDRGHDVLLVDYQPTSEMMVIDFAKKIKDRLPNTIKLHSLKLSETATSYAQWYASDNE

SEQ ID NO: 22414 - protein, 136 aa, unidentified
  source 1..136: note = Mesoflavibacter sabulilitoris
  REGION 1..136: note = tr|A0A2T1NPH7|A0A2T1NPH7_9FLAO 6-carboxy-5,6,7,8-tetrahydropterin synthase; OS = Mesoflavibacter sabulilitoris OX=1520893 GN=C7H61_00075; PE = 3 SV=1
MKVTVSRKAHFNAAHRLYRKDWTEDKNNDVFGKCNNPSFHGHNYELIAHVTGDIDPETGYVIDMKILKDIIKEEVEDAFDHKNLNIDVPEFKNLNPTAENIVVVVYNKIKAKLDPKFELQVTLYETPRNYVTYPSK

SEQ ID NO: 22415 - protein, 136 aa, Mesoflavibacter sp.
  REGION 1..136: note = tr|A0A2T1NKJ7|A0A2T1NKJ7_9FLAO 6-carboxy-5,6,7,8-tetrahydropterin synthase; OS = Mesoflavibacter sp. HG96 OX=2109944 GN=C7H62_13125 PE=3; SV = 1
MKVTVSRKAHFNAAHRLYRKDWDNEKNAQIFGKCNNPSYHGHNYELIAHVTGDIDPETGYVIDMKILKDIIKEEVEDAFDHKNLNVDVPEFKNLNPTAENIVVVIYNKIKAKLDSKFDLKITLYETPRNFVTYPSL

SEQ ID NO: 22416 - protein, 150 aa, Mesoflavibacter sp.; identical to SEQ ID NO: 22413
  REGION 1..150: note = tr|A0A2T1NMK4|A0A2T1NMK4_9FLAO 6-carboxytetrahydropterin synthase QueD OS=Mesoflavibacter sp. HG96 OX=2109944 GN=C7H62_06830 PE=4 SV=1

SEQ ID NO: 22417 - protein, 138 aa, Mesonia algae
  REGION 1..138: note = tr|A0A2W7HVU9|A0A2W7HVU9_9FLAO 6-carboxy-5,6,7,8-tetrahydropterin synthase OS=Mesonia algae OX=213248 GN=LX95_02545 PE=3 SV=1
MAVTVSRKAHFNAAHRLFRKDWSDEKNLKVFGKCSYPNYHGHNYELIVSVTGNIDEETGFVMDLKVLKDLIKTEIEDYLDHKNLNVDILEFKNLNPTAENIVVFIWQKLKSKLENHLSLEVVLYETPRNFVSYKGEFE

SEQ ID NO: 22418 - protein, 149 aa, Mesonia algae
  REGION 1..149: note = tr|A0A2W7IBP3|A0A2W7IBP3_9FLAO 6-carboxy-5,6,7,8-tetrahydropterin synthase OS=Mesonia algae OX=213248 GN=LX95_00454 PE=3 SV=1
MSQIRLTKQFNFETGHALYGYDGKCKNVHGHSYKLNVTVIGQPINDRNHVKNGMVIDFSDLKKIVKEEIVDQFDHATVLNKTTPHIELAEELIKRDHNVILVDYQPTSEQMIIDFAEKIKARLPKEIQLHSLKLQETETSFAEWFASDN

SEQ ID NO: 22419 - protein, 149 aa, Mesonia phycicola
  REGION 1..149: note = tr|A0A1M6EBH4|A0A1M6EBH4_9FLAO 6-carboxy-5,6,7,8-tetrahydropterin synthase OS=Mesonia phycicola OX=579105 GN=SAMN04488096_1054 PE=3 SV=1
MSNIRITKQFNFETGHALYGYDGKCKNVHGHSYKLNVTVIGQPINDANHVKFGMVIDFGDLKKIVKEEIVDKFDHATVFNKNTPHLELAKELQKRDHSVILVDYQPTSEMMVIDFAEKIKSRLPENIQLHSLKLQETETSFAEWYASDN

SEQ ID NO: 22420 - protein, 136 aa, Mesonia phycicola
  REGION 1..136: note = tr|A0A1M6GFV2|A0A1M6GFV2_9FLAO 6-pyruvoyltetrahydropterin/6-carboxytetrahydropterin synthase OS=Mesonia phycicola OX=579105; GN = SAMN04488096_10812 PE=4 SV=1
MGEVTVSRKAHFNAAHRLFKKEWSNEKNKLVFGKCSNPNYHGHNYELIVSVTGTVDKETGFVMDMKLLRDLIYEKVEKLLDHKNLNVEVDEFKNLNPTAENISIVIWNKLRTEINSNLSLEVTLYETPRNFVTYKG

SEQ ID NO: 22421 - protein, 150 aa, Mesonia sp.
  REGION 1..150: note = tr|A0A5C8L801|A0A5C8L801_9FLAO 6-carboxytetrahydropterin synthase OS=Mesonia sp. HuA40; OX = 2602761 GN=FT993_07505 PE=4 SV=1
MSKIRITKQFNFETGHALYGYDGKCKNVHGHSYKLNVTVIGTPIHDSNHVKNGMVIDFGDLKKIVKEEIVDQFDHATVLNKNTPHIELAEELMKRDHNVILVDYQPTSEKMITDFADKIKARLPKNIELFSLRLQETETSFAEWFASDQD

SEQ ID NO: 22422 - protein, 150 aa, Mesonia sp.
  REGION 1..150: note = tr|A0A2W1K4B2|A0A2W1K4B2_9FLAO 6-carboxytetrahydropterin synthase QueD OS=Mesonia sp. K7; OX = 2218606 GN=DNG35_08795 PE=4 SV=1
MATIRITKQFNFETGHALYGYDGKCKNVHGHSYKLDVTVIGQPIEDQKNVKYGMVIDFSDLKKIVKEEIVDRFDHATVLNKNTPHLELAHELQKRDHNIILVDYQPTSEMMIIDFAHKIKARLPENIQLHSLKLQETETSYAQWFATDNL

SEQ ID NO: 22423 - protein, 124 aa, Mesorhizobium albiziae
  REGION 1..124: note = tr|A0A1I4DR00|A0A1I4DR00_9RHIZ 6-carboxy-5,6,7,8-tetrahydropterin synthase; OS = Mesorhizobium albiziae OX=335020 GN=SAMN04488498_11951; PE = 3 SV=1
MKIVQAFTFEAAHRLPNVPDTHRCHRMHGHSYRVELRLEGPVDPHTGFVVDFFDVEAAFGPLLKRLDHYCLNDIEGLQNPTAENIAIWIWERVKPLLPQTTAVVVFETPDCWAEYEGTVAGSMQ

SEQ ID NO: 22424 - protein, 118 aa, Mesorhizobium albiziae
  REGION 1..118: note = tr|A0A1I4EZE8|A0A1I4EZE8_9RHIZ 6-carboxy-5,6,7,8-tetrahydropterin synthase; OS = Mesorhizobium albiziae OX=335020 GN=SAMN04488498_13330; PE = 3 SV=1
MFRITKEFHFSASHQLTSLPPDHQCARLHGHNYIVEVELAAKEMNGHGFVRDYHDLAPLKRYIDESFDHRHLNDVLGHEQVTAEYLARHFYEWCKARLPETSAVRVSETPKTWAEYRP

SEQ ID NO: 22425 - protein, 117 aa, Mesorhizobium alhagi
  REGION 1..117: note = tr|H0HUG4|H0HUG4_9RHIZ 6-carboxy-5,6,7,8-tetrahydropterin synthase; OS = Mesorhizobium alhagi CCNWXJ12-2 OX=1107882; GN = MAXJ12_19028 PE=3 SV=1
MVETYKEFTFEAAHQLQPFSGLHGHTFRVRVHFKGSPDAVFGWPANLYEVEPRISSVQKVLDHTYLNDIDGLAVPSLENVAKWIWDKLAPHSPQIDRITVSRGPDGQAEGCTYWRNP

SEQ ID NO: 22426 - protein, 117 aa, Mesorhizobium amorphae
  REGION 1..117: note = tr|A0A212DQU6|A0A212DQU6_9RHIZ 6-carboxy-5,6,7,8-tetrahydropterin synthase; OS = Mesorhizobium amorphae CCBAU 01583 OX=1449348; GN = AJ88_28155 PE=3 SV=1
MVETYKEFTFEAAHQLQPFSGLHGHTFRVRVHFKGSPDAVFGWPANLYEVEPRISSVQKVLDHTYLNDIDGLAVPSLENIAKWIWEKLAPHSPQIDRITVSRGPDGQAEGCTYSRSP

SEQ ID NO: 22427 - protein, 118 aa, Mesorhizobium amorphae
  REGION 1..118: note = tr|G6YIG0|G6YIG0_9RHIZ 6-carboxy-5,6,7,8-tetrahydropterin synthase; OS = Mesorhizobium amorphae CCNWGS0123 OX=1082933; GN = MEA186_28912 PE=3 SV=1
MFRITKEFHFSASHQLMSLPPDHQCARLHGHNYIVEVELSAKELNEHGFVRDYHDLAPLKRYIDESFDHRHLNDVLGHGQVTAEYLARHFYEWCKARLPETSAVRVSETPKTWAECRP

SEQ ID NO: 22428 - protein, 118 aa, Mesorhizobium australicum
  REGION 1..118: note = tr|L0KVB8|L0KVB8_MESAW 6-carboxy-5,6,7,8-tetrahydropterin synthase; OS = Mesorhizobium australicum (strain HAMBI 3006 / LMG 24608 / WSM2073) OX=754035 GN=Mesau_05612 PE =3 SV=1
MFRITKEFHFSASHQLTSLPPEHQCARLHGHNYIVVVELSAKELNSHGFVRDYHDLAPLKHYIDESLDHRHLNDALAHEQVTAEYLARHFYEWCKARLPETAAVRVSETPKTWAEYRP

SEQ ID NO: 22429 - protein, 118 aa, Mesorhizobium ciceri
  REGION 1..118: note = tr|A0A143NGT4|A0A143NGT4_9RHIZ 6-carboxy-5,6,7,8-tetrahydropterin synthase; OS = Mesorhizobium ciceri OX=39645 GN=A4R28_21950 PE=3 SV=1
MFHISKEFHFSASHQLTSLPPNHQCARLHGHNYVVVVELSAKELDAHGFVRDYHDLAPLKRYIDESFDHRHLNDVLGHEKVTAECLARHFYEWCKARLPQTAAVRVSETPKTWAEYRP

SEQ ID NO: 22430 - protein, 118 aa, Mesorhizobium ciceri; identical to SEQ ID NO: 18077
  REGION 1..118: note = tr|A0A3G8FVJ8|A0A3G8FVJ8_9RHIZ 6-carboxy-5,6,7,8-tetrahydropterin synthase; OS = Mesorhizobium ciceri OX=39645 GN=queD PE=3 SV=1

SEQ ID NO: 22431 - protein, 133 aa, unidentified
  source 1..133: note = Mesorhizobium delmotii
  REGION 1..133: note = tr|A0A2P9AMT2|A0A2P9AMT2_9RHIZ 6-carboxy-5,6,7,8-tetrahydropterin synthase; OS = Mesorhizobium delmotii OX=1631247 GN=BQ8482_290038 PE=3; SV = 1
MERSASVAMVETYKEFTFEAAHQLQPFSGLHGHTFRVRVHFKGSPDAVFGWPANLYEVEPRISSVQKILDHTYLNDIDGLAVPSLENIGKWIWDNLAPHCPQIDRITVSRGPDGQAEGCTYRGGPDCRGPIGP

SEQ ID NO: 22432 - protein, 118 aa, unidentified
  source 1..118: note = Mesorhizobium delmotii
  REGION 1..118: note = tr|A0A2P9ASU5|A0A2P9ASU5_9RHIZ 6-carboxy-5,6,7,8-tetrahydropterin synthase; OS = Mesorhizobium delmotii OX=1631247 GN=BQ8482_40019 PE=3; SV = 1
MYRITKEFHFSASHQLTSLPREHQCARLHGHNYIVQVELSARELSQHGFVRDYHDLAALKHYIDETLDHRHLNDVLGNDHVTAECLAKHFYDWCKAQLPETSAVRVSETPKTWAEYRP

SEQ ID NO: 22433 - protein, 118 aa, unidentified
  source 1..118: note = Mesorhizobium erdmanii
  REGION 1..118: note = tr|A0A4V1P518|A0A4V1P518_9RHIZ 6-carboxy-5,6,7,8-tetrahydropterin synthase; OS = Mesorhizobium erdmanii OX=1777866 GN=B5V01_21910 PE=3; SV = 1
MFRITKEFHFSASHQLTSLPPDHQCARLHGHNYIVEVELSANGLNDNGFVRDYHDLAPFKRYIDESFDHRHLNDVLGHEQVTAECLARHFYLWCKARLPETSAVRVSETPKTWAEYRP

SEQ ID NO: 22434 - protein, 118 aa, unidentified
  source 1..118: note = Mesorhizobium hawassense
  REGION 1..118: note = tr|A0A330H311|A0A330H311_9RHIZ 6-carboxy-5,6,7,8-tetrahydropterin synthase; OS = Mesorhizobium hawassense OX=1209954 GN=queD PE=3 SV=1
MFRITKEFHFSASHQLTSLPPDHQCARLHGHNYIVEVELSGKELNEHGFVRDYHDLAPLKRYIDDKFDHRHLNDVLGHEKVTAECLARHFYEWCKARLPETTAVRVSETPKTWAECRP

SEQ ID NO: 22435 - protein, 119 aa, unidentified
  source 1..119: note = Mesorhizobium hawassense
  REGION 1..119: note = tr|A0A330HBM9|A0A330HBM9_9RHIZ 6-carboxy-5,6,7,8-tetrahydropterin synthase; OS = Mesorhizobium hawassense OX=1209954 GN=queD PE=3 SV=1
MKITQAFTFEAAHCLPKAPENHRCHQMHGHSYHVELRLEGPVDPDTGFVVDFVHVEATFRPLLQRLDHQCLNQINGLENPTAESVAIWIWDQTKPLLPELTSVKVAETPTCWAEYEGQS

SEQ ID NO: 22436 - protein, 118 aa, unidentified
  source 1..118: note = Mesorhizobium helmanticense
  REGION 1..118: note = tr|A0A2T4INB0|A0A2T4INB0_9RHIZ 6-carboxy-5,6,7,8-tetrahydropterin synthase; OS = Mesorhizobium helmanticense OX=1776423 GN=queD PE=3 SV=1
MFRITKEFHFSASHQLTSLPPDHQCARLHGHNYIVVVELSGGELDEHGFVRDYQDLAAFKHYIDGTFDHRHLNDVLGHDHATAECLARHFYDWCKVRLPETSAVRVSETPKTWAEYRP

SEQ ID NO: 22437 - protein, 117 aa, unidentified
  source 1..117: note = Mesorhizobium helmanticense
  REGION 1..117: note = tr|A0A2T4IL89|A0A2T4IL89_9RHIZ 6-carboxy-5,6,7,8-tetrahydropterin synthase; OS = Mesorhizobium helmanticense OX=1776423 GN=queD PE=3 SV=1
MKITQAFTFEAAHCLPRVPKTHRCHRVHGHSYRVELRLEGPVDPDTGFVIDFFDVEAVFGPLLQRLDHQHLNEVEGLDNPTAENIAVWIWNQTKPLLGQMCSVTVYETPLCWAEYEG

SEQ ID NO: 22438 - protein, 118 aa, Mesorhizobium huakuii
  REGION 1..118: note = tr|A0A068DI40|A0A068DI40_9RHIZ 6-carboxy-5,6,7,8-tetrahydropterin synthase; OS = Mesorhizobium huakuii 7653R OX=763057 GN=queD PE=3 SV=1
MFRITKEFHFSASHQLTSLPPDHQCARLHGHNYIVEVELSAKELNDDGFVRDYHDLAPFKRYIDEGFDHRHLNDVLGHEQVTAECLARHFYLWCKARLPEASAVRVSETPKTWAEYRP

SEQ ID NO: 22439 - protein, 118 aa, unidentified; identical to SEQ ID NO: 22433
  source 1..118: note = Mesorhizobium japonicum
  REGION 1..118: note = tr|A0A3M9X433|A0A3M9X433_9RHIZ 6-carboxy-5,6,7,8-tetrahydropterin synthase; OS = Mesorhizobium japonicum OX=2066070 GN=queD PE=3 SV=1

SEQ ID NO: 22440 - protein, 117 aa, unidentified
  source 1..117: note = Mesorhizobium japonicum
  REGION 1..117: note = tr|Q98AM2|Q98AM2_RHILO 6-carboxy-5,6,7,8-tetrahydropterin synthase; OS = Mesorhizobium japonicum (strain LMG 29417 / CECT 9101 / MAFF 303099) OX=266835 GN=mll8751 PE=3SV=1
MKITQAFTFEAAHCLPRVPATHRCHRIHGHSYRVELRLEGPVDPDTGFVIDFFDVEAVFGPLLQRLDHQYLNEIEGLDNPTAENIAVWIWNQTKPLLGQMCSVTVYETPLCWAEYEG

SEQ ID NO: 22441 - protein, 118 aa, unidentified; identical to SEQ ID NO: 22438
  source 1..118: note = Mesorhizobium kowhaii
  REGION 1..118: note = tr|A0A2W7BXS2|A0A2W7BXS2_9RHIZ 6-carboxy-5,6,7,8-tetrahydropterin synthase; OS = Mesorhizobium kowhaii OX=1300272 GN=B5V02_29970 PE=3; SV = 1

SEQ ID NO: 22442 - protein, 118 aa, Mesorhizobium mediterraneum; identical to SEQ ID NO: 22429
  REGION 1..118: note = tr|A0A271KSE6|A0A271KSE6_9RHIZ 6-carboxy-5,6,7,8-tetrahydropterin synthase; OS = Mesorhizobium mediterraneum OX=43617 GN=queD PE=3 SV=1

SEQ ID NO: 22443 - protein, 69 aa, Mesorhizobium metallidurans
  REGION 1..69: note = tr|M5F1V1|M5F1V1_9RHIZ Uncharacterized protein; OS = Mesorhizobium metallidurans STM 2683 OX=1297569; GN = MESS2_1670005 PE=4 SV=1
MRDYHDLAPLKRYIDESLDHRHLNEVLGHEQVTAEYLARHFYEWCKARLPETAAVRVSETPKTWAEYRP

SEQ ID NO: 22444 - protein, 133 aa, Mesorhizobium metallidurans; identical to SEQ ID NO: 22431
  REGION 1..133: note = tr|M5EFE0|M5EFE0_9RHIZ 6-carboxy-5,6,7,8-tetrahydropterin synthase; OS = Mesorhizobium metallidurans STM 2683 OX=1297569; GN = MESS2_1000076 PE=3 SV=1

SEQ ID NO: 22445 - protein, 118 aa, unidentified; identical to SEQ ID NO: 22429
  source 1..118: note = Mesorhizobium muleiense
  REGION 1..118: note = tr|A0A1G9GN31|A0A1G9GN31_9RHIZ 6-carboxy-5,6,7,8-tetrahydropterin synthase; OS = Mesorhizobium muleiense OX=1004279; GN = SAMN05428953_12531 PE=3 SV=1

SEQ ID NO: 22446 - protein, 118 aa, Mesorhizobium opportunistum; identical to SEQ ID NO: 22428
  REGION 1..118: note = tr|F7Y1I6|F7Y1I6_MESOW 6-carboxy-5,6,7,8-tetrahydropterin synthase; OS = Mesorhizobium opportunistum (strain LMG 24607 / HAMBI 3007 / WSM2075) OX=536019 GN=Mesop_6143 P E=3 SV=1

SEQ ID NO: 22447 - protein, 118 aa, Mesorhizobium plurifarium
  REGION 1..118: note = tr|A0A090EP81|A0A090EP81_MESPL 6-carboxy-5,6,7,8-tetrahydropterin synthase; OS = Mesorhizobium plurifarium OX=69974 GN=MPLDJ20_130082; PE = 3 SV=1
MFRITKEFHFSASHQLTSLPPDHQCARLHGHNYIVEVELSGEQLNEHGFVRDYHDLAPLKRYIDENFDHRHLNDVLGHEQVTAECLARHFYEWCKARLPETSAVRVSETPKTWAECRP

SEQ ID NO: 22448 - protein, 118 aa, Mesorhizobium plurifarium; identical to SEQ ID NO: 22434
  REGION 1..118: note = tr|A0A090FYW4|A0A090FYW4_MESPL 6-carboxy-5,6,7,8-tetrahydropterin synthase; OS = Mesorhizobium plurifarium OX=69974 GN=MPL3356_270083; PE = 3 SV=1

SEQ ID NO: 22449 - protein, 118 aa, unidentified
  source 1..118: note = Mesorhizobium prunaredense
  REGION 1..118: note = tr|A0A1R3V7P5|A0A1R3V7P5_9RHIZ 6-carboxy-5,6,7,8-tetrahydropterin synthase; OS = Mesorhizobium prunaredense OX=1631249 GN=BQ8794_180160; PE = 3 SV=1
MFRITKEFHFSASHQLTSLPPDHQCARLHGHNYIVEVELSAKDLDAHGFVRDYHDLAPLKRYIDESLDHRHLNEVLGHEQVTAEYLARHFYEWCKARLPETAAVRVSETPKTWAEYRP

SEQ ID NO: 22450 - protein, 118 aa, unidentified; identical to SEQ ID NO: 22438
  source 1..118: note = Mesorhizobium qingshengii
  REGION 1..118: note = tr|A0A1G5ZZ18|A0A1G5ZZ18_9RHIZ 6-carboxy-5,6,7,8-tetrahydropterin synthase; OS = Mesorhizobium qingshengii OX=1165689; GN = SAMN02927914_06795 PE=3 SV=1

SEQ ID NO: 22451 - protein, 118 aa, unidentified
  source 1..118: note = Mesorhizobium sanjuanii
  REGION 1..118: note = tr|A0A2A6FAG5|A0A2A6FAG5_9RHIZ 6-carboxy-5,6,7,8-tetrahydropterin synthase; OS = Mesorhizobium sanjuanii OX=2037900 GN=queD PE=3 SV=1
MFRITKEFHFSASHQLTSLPPDHQCARLHGHNYIVVVELSGGELNEHGFVRDYQDLAALKHYIDGTFDHRHLNDVLGHDRVTAECLARHFYDWCKVRLPQTSAVRVSETPKTWAEYRP

SEQ ID NO: 22452 - protein, 117 aa, unidentified
  source 1..117: note = Mesorhizobium sanjuanii
  REGION 1..117: note = tr|A0A2A6FDR3|A0A2A6FDR3_9RHIZ 6-carboxy-5,6,7,8-tetrahydropterin synthase; OS = Mesorhizobium sanjuanii OX=2037900 GN=queD PE=3 SV=1
MKITQAFTFEAAHRLPHVPLTHRCHRMHGHSYRIELRLEGPVDAHTGFVVDFFDVEAAFNPLLLQLDHYCLNDVEGLENPTAENIAIWIWNRIKPAVPQTSAVVVYETPDCWAEYEG

SEQ ID NO: 22453 - protein, 118 aa, Mesorhizobium sp.
  REGION 1..118: note = tr|X5PS54|X5PS54_9RHIZ 6-carboxy-5,6,7,8-tetrahydropterin synthase; OS = Mesorhizobium sp. LSJC280B00 OX=1287336 GN=X772_29695; PE = 3 SV=1
MFRITKEFHFSASHQLTSLPPDHQCARLHGHNYIVEVELSANGLNENGFVRDYHDLAPFKRYIDESFDHRHLNDVLGHEQVTAEYLARHFYEWCKARLPETSAVRVSETPKTWAEYRP

SEQ ID NO: 22454 - protein, 118 aa, Mesorhizobium sp.; identical to SEQ ID NO: 18073
  REGION 1..118: note = tr|A0A5F2J8U5|A0A5F2J8U5_9RHIZ 6-carboxy-5,6,7,8-tetrahydropterin synthase; OS = Mesorhizobium sp. M2D.F.Ca.ET.148.01.1.1 OX=2496665; GN = queD PE=3 SV=1

SEQ ID NO: 22455 - protein, 118 aa, unidentified
  source 1..118: note = Mesorhizobium tamadayense
  REGION 1..118: note = tr|A0A3P3FS86|A0A3P3FS86_9RHIZ 6-carboxytetrahydropterin synthase QueD OS=Mesorhizobium tamadayense OX=425306 GN=queD PE=4 SV=1
MFRITKEFHFSASHQLTSLPPDHQCARLHGHNYIVEVELSAKELNEHGFVRDYHELAPLKRYIDEGFDHRHLNDVLGHKQVTAEYLARHFYQWCKARLPETAAVRVSETPKTWAEYRP

SEQ ID NO: 22456 - protein, 118 aa, Mesorhizobium temperatum
  REGION 1..118: note = tr|A0A271LSL4|A0A271LSL4_9RHIZ 6-carboxy-5,6,7,8-tetrahydropterin synthase; OS = Mesorhizobium temperatum OX=241416 GN=queD PE=3 SV=1
MFRITKEFHFSASHQLTSLPPDHQCARLHGHNYIVVVELSGGELDEHGFVRDYQDLAALKHYIDETFDHRHLNDVLGHDRVTAECLARHFYDWCKVRLPQTSAVRVSETPKTWAEYRP

SEQ ID NO: 22457 - protein, 117 aa, Mesorhizobium temperatum; identical to SEQ ID NO: 22426
  REGION 1..117: note = tr|A0A271LS61|A0A271LS61_9RHIZ 6-carboxy-5,6,7,8-tetrahydropterin synthase; OS = Mesorhizobium temperatum OX=241416 GN=CIT26_09060 PE=3; SV = 1

SEQ ID NO: 22458 - protein, 118 aa, Mesorhizobium tianshanense
  REGION 1..118: note = tr|A0A562N4D2|A0A562N4D2_9RHIZ 6-carboxy-5,6,7,8-tetrahydropterin synthase; OS = Mesorhizobium tianshanense OX=39844 GN=IQ26_05700 PE=3; SV = 1
MFRITKEFHFSASHQLTSLPPDHQCARLHGHNYIVEVELSAKELNEHGFVRDYRDLAPLKRYIDESFDHRHLNDVLGHEQVTAEYLARHFYEWCKARLPETSAVRVSETPKTWAEYRP

SEQ ID NO: 22459 - protein, 118 aa, unidentified
  source 1..118: note = Mesorhizobium waimense
  REGION 1..118: note = tr|A0A3A5K369|A0A3A5K369_9RHIZ 6-carboxy-5,6,7,8-tetrahydropterin synthase; OS = Mesorhizobium waimense OX=1300307 GN=queD PE=3 SV=1
MFRITKEFHFSASHQLTSLPPDHQCARLHGHNYIVEVELSAKELNEHGFVRDYHDLALLKRYIDQSFDHRHLNDVLGHAQVTAEYLARHFYEWCKARLPETSAVRVSETPKTWAEWRP

SEQ ID NO: 22460 - protein, 118 aa, unidentified
  source 1..118: note = Mesorhizobium wenxiniae
  REGION 1..118: note = tr|A0A271KNT3|A0A271KNT3_9RHIZ 6-carboxy-5,6,7,8-tetrahydropterin synthase; OS = Mesorhizobium wenxiniae OX=2014805 GN=queD PE=3 SV=1
MFHISKEFHFSASHQLTSLPPNHQCARQHGHNYIVVVELSAKELDALGFVRDYHDLAPLKRYIDESFDHRHLNDVLGHEKVTAECLARHFYEWCKARLPQTTAVRVSETPKTWAEYRP

SEQ ID NO: 22461 - protein, 137 aa, unidentified
  source 1..137: note = Mesosutterella multiformis
  REGION 1..137: note = tr|A0A388SD99|A0A388SD99_9BURK 6-pyruvoyl tetrahydrobiopterin synthase OS=Mesosutterella multiformis; OX = 2259133 GN=MESMUL_15600 PE=4 SV=1
MFTVTRYHDISCGHRVCGHENKCSHLHGHNYRITFCCAGELDSLGRVIDFSVIKEKLCVWLEEHFDHRFLIWTEDPLADALLSLDPKVVQVPFNPTAENIAEYLVTVVGPEQLRGTGVKLIRCDVEETRKCTATFTL

SEQ ID NO: 22462 - protein, 122 aa, unidentified
  source 1..122: note = Mesotoga infera
  REGION 1..122: note = tr|A0A101I7W0|A0A101I7W0_9BACT 6-carboxy-5,6,7,8-tetrahydropterin synthase OS=Mesotoga infera OX=1236046 GN=queD PE=3 SV=1
MFFLTKEFTFDAAHNLTSYHGKCEKLHGHTYKLQITVAGEKNQEDMVVDFLQLKDIVKSEVLNLLDHAYINDVIPQPTAENIAEWIFKRLASKVGGSYYELYEVAVWETPTNFVRYRERDVW

SEQ ID NO: 22463 - protein, 122 aa, unidentified
  source 1..122: note = Mesotoga prima
  REGION 1..122: note = tr|I2F6H0|I2F6H0_9BACT 6-carboxy-5,6,7,8-tetrahydropterin synthase OS=Mesotoga prima MesG1.Ag.4.2 OX=660470 GN=Theba_1873 PE=3 SV=1
MFFITKEFTFDAAHNLTMYHGKCEKLHGHTYKLQVTVAGEKQEEDMVIDFLKMKEIVRDEVLSVLDHSYINDVLSQPTAENIAEWIFNKLAGKIRGNSFELYEVALWETPTSFVRYRERDGW

SEQ ID NO: 22464 - protein, 122 aa, unidentified
  source 1..122: note = Mesotoga prima
  REGION 1..122: note = tr|A0A117M3E0|A0A117M3E0_9BACT 6-carboxy-5,6,7,8-tetrahydropterin synthase OS=Mesotoga prima OX=1184387 GN=XD94_0117 PE=3 SV=1
MFFLTKEFTFDAAHNLTSYHGKCEKLHGHTYKLQITVAGEKNQEDMVIDFLRLKDIVKSEVLSLLDHAYINDVIPQPTAENIAEWIFKRLASRVGGSDYELYEVAVWETPTSFVRYRERDVW

SEQ ID NO: 22465 - protein, 122 aa, unidentified; identical to SEQ ID NO: 22463
  source 1..122: note = Mesotoga sp.
  REGION 1..122: note = tr|A0A421CED2|A0A421CED2_9BACT 6-carboxy-5,6,7,8-tetrahydropterin synthase OS=Mesotoga sp. H07pep.5.4 OX=1463664 GN=Y696_12100 PE=3 SV=1

SEQ ID NO: 22466 - protein, 122 aa, unidentified; identical to SEQ ID NO: 22464
  source 1..122: note = Mesotoga sp.
  REGION 1..122: note = tr|A0A318CHN9|A0A318CHN9_9BACT 6-carboxy-5,6,7,8-tetrahydropterin synthase OS=Mesotoga sp. SC_NapDC OX=1499972 GN=EU77_08980 PE=3 SV=1

SEQ ID NO: 22467 - protein, 120 aa, unidentified; identical to SEQ ID NO: 20906
  source 1..120: note = Metakosakonia sp.
  REGION 1..120: note = tr|A0A348D910|A0A348D910_9ENTR 6-carboxy-5,6,7,8-tetrahydropterin synthase; OS = Metakosakonia sp. MRY16-398 OX=2487150 GN=ygcM PE=3 SV=1

SEQ ID NO: 22468 - protein, 118 aa, unidentified
  source 1..118: note = Metallibacterium scheffleri
  REGION 1..118: note = tr|A0A4S3KHY8|A0A4S3KHY8_9GAMM 6-carboxy-5,6,7,8-tetrahydropterin synthase; OS = Metallibacterium scheffleri OX=993689 GN=B1806_13240; PE = 3 SV=1
MDIFKVFTIEAAHRLTAVPPGHKCARLHGHSIRIEVHVSGEPDPALGWVCDFADIKRAFRPLYAQLDHNYLNDLPGLDNPTSELIARWIWQRLKPELPSLSCIVVHETCTAGASYRGD

SEQ ID NO: 22469 - protein, 126 aa, unidentified
  source 1..126: note = Methylacidimicrobium cyclopophantes
  REGION 1..126: note = tr|A0A5E6MPV7|A0A5E6MPV7_9BACT 6-carboxy-5,6,7,8-tetrahydropterin synthase; OS = Methylacidimicrobium cyclopophantes OX=1041766 GN=queD; PE = 3 SV=1
MRVTIEKDFRFEAAQQLPGFPEGHKCRRLHGHSFELRVAVEGEVDPATGILYDHARISRAVEPLLAQLDHRFLNEIPGLENPTIESMARWFWEKLESLLPGLAQITICETPRVRCLYRGPASSIRS

SEQ ID NO: 22470 - protein, 127 aa, unidentified
  source 1..127: note = Methylacidimicrobium tartarophylax
  REGION 1..127: note = tr|A0A5E6MG99|A0A5E6MG99_9BACT 6-carboxy-5,6,7,8-tetrahydropterin synthase; OS = Methylacidimicrobium tartarophylax OX=1041768 GN=queD; PE = 3 SV=1
MRVTIEKDFRFEAAQQLPGFPEGHKCRRLHGHSFEVRVAIEGEVDPATGILYDHARISRAVEPLLTELDHRFLNEIPGLENPTIESMAHWFWERLVPLLPGLAQITICETPRVRCLYRGPTSSPARS

SEQ ID NO: 22471 - protein, 120 aa, unidentified
  source 1..120: note = Methylacidiphilum fumariolicum
  REGION 1..120: note = tr|A0A5F0I1P6|A0A5F0I1P6_9BACT 6-carboxy-5,6,7,8-tetrahydropterin synthase; OS = Methylacidiphilum fumariolicum OX=591154 GN=A7K73_08305; PE = 3 SV=1
MQVILSKDFDFEAAQALPSFPEGHKCRRVHGHSFKLTVAVRGEVDPIRGILYDHAKISEAVIPLIEQLDHSYLNDIEGLQNPTIENMAGWFWKKLQDKLPGLYEITVQETARTRCIYRGE

SEQ ID NO: 22472 - protein, 120 aa, unidentified; identical to SEQ ID NO: 22471
  source 1..120: note = Methylacidiphilum fumariolicum
  REGION 1..120: note = tr|I0JYI7|I0JYI7_METFB 6-carboxy-5,6,7,8-tetrahydropterin synthase; OS = Methylacidiphilum fumariolicum (strain SolV) OX=1156937; GN = ygcM PE=3 SV=1

SEQ ID NO: 22473 - protein, 161 aa, unidentified
  source 1..161: note = Methylacidiphilum infernorum
  REGION 1..161: note = tr|B3DVJ6|B3DVJ6_METI4 6-pyruvoyl-tetrahydropterin synthase OS=Methylacidiphilum infernorum (isolate V4); OX = 481448 GN=Minf_1295 PE=4 SV=1
MMGFLIFLFYRKALKVMPYYCIVYFFVCPKLTLGNNQEKDSMHVILSKDFDFEAAQALPSFPEGHKCRRTHGHSFKLTVSVRGEVDPQKGVLYDHGKISEAVCPLIEQLDHYYLNDIEGLSNPTIENMAGWFWNKLKDKLPGLYEITIQETARTRCIYRGD

SEQ ID NO: 22474 - protein, 120 aa, unidentified
  source 1..120: note = Methylacidiphilum kamchatkense
  REGION 1..120: note = tr|A0A0C1V6W4|A0A0C1V6W4_9BACT 6-carboxy-5,6,7,8-tetrahydropterin synthase; OS = Methylacidiphilum kamchatkense Kam1 OX=1202785; GN = kam1_1283 PE=3 SV=1
MQVILSKDFDFEAAQALPSFPEGHKCRKIHGHSFKLTVAVRGEVDPTRGILYDHAKISEAVIPLIEQLDHSYLNDIEGLQNPTIENMAGWFWKKLQDKLPGLYEITVQETARTRCIYRGE

SEQ ID NO: 22475 - protein, 120 aa, unidentified
  source 1..120: note = Methylacidiphilum sp.
  REGION 1..120: note = tr|A0A4Y8P7J5|A0A4Y8P7J5_9BACT 6-carboxy-5,6,7,8-tetrahydropterin synthase; OS = Methylacidiphilum sp. Phi OX=1847729 GN=A7Q10_02625; PE = 3 SV=1
MHVILSKDFDFEAAQALPSFPEGHKCQRIHGHSFKLTVAVRGEVDPQKGILYDHGKISEAVSPLIDQLDHQYLNDIEGLKNPTIENLAGWFWNKLKDKLPGLFEITIQETARTRCIYRGD

SEQ ID NO: 22476 - protein, 120 aa, unidentified
  source 1..120: note = Methylacidiphilum sp.
  REGION 1..120: note = tr|A0A4Y8P873|A0A4Y8P873_9BACT 6-carboxy-5,6,7,8-tetrahydropterin synthase; OS = Methylacidiphilum sp. Yel OX=1847730 GN=A7Q09_09735; PE = 3 SV=1
MQVILSKDFDFEAAQALPSFPEGHKCRRIHGHSFKLTVAVRGEVDPSRGILYDHAKISEAVIPLIEQLDHSYLNDIEGLQNPTIENMAGWFWKKLQDKLPGLYEITVQETARTRCIYRGE

SEQ ID NO: 22477 - protein, 117 aa, Methylarcula marina
  REGION 1..117: note = tr|A0A422QXS9|A0A422QXS9_9RHOB 6-carboxy-5,6,7,8-tetrahydropterin synthase; OS = Methylarcula marina OX=72022 GN=A7A09_010280 PE=3 SV=1
MYRIAKEFHFSASHQLSHLPPEHQCARLHGHNYVVIVELAAQELNAAGFVRDYHELGLLKAYIDENFDHRHLNDIIDGPSTAENLAKHFFDWCKARWPETAAVRVSETPKTWAEYRP

SEQ ID NO: 22478 - protein, 129 aa, Methylibium petroleiphilum
  REGION 1..129: note = tr|A2SD50|A2SD50_METPP 6-carboxy-5,6,7,8-tetrahydropterin synthase OS=Methylibium petroleiphilum (strain ATCC BAA-1232 / LMG 22953 / PM1); OX = 420662 GN=Mpe_A0527 PE=3SV=1
MFELSQSFYFESAHTLRRQVERNEADGSRRVHGHTYTAEVTVRGEADPATGMVVDLALLRSAIATVREQLDHHFLDEVPGLGLPTLENLCRFIHERLLTTVPAIASVSVGRQSSGDRCTFRPVLADRRR

SEQ ID NO: 22479 - protein, 129 aa, Methylibium sp.
  REGION 1..129: note = tr|A0A0Q7CM24|A0A0Q7CM24_9BURK 6-carboxy-5,6,7,8-tetrahydropterin synthase OS=Methylibium sp. Root1272 OX=1736441 GN=ASC67_15185 PE=3 SV=1
MFELSQSFYFESAHTLRRQVERNEADGSRRVHGHTYTAEVTVRGEADPATGMVVDLALLRSAIAAVREQLDHHFLDEVPGLGLPTLENLCRFIHERLLPTVPAIASVSVGRQSSGDRCVFRPVPADCRR

SEQ ID NO: 22480 - protein, 129 aa, Methylibium sp.; identical to SEQ ID NO: 22478
  REGION 1..129: note = tr|W7WNY4|W7WNY4_9BURK 6-carboxy-5,6,7,8-tetrahydropterin synthase OS=Methylibium sp. T29-B OX=1437443 GN=queD PE=3 SV=1

SEQ ID NO: 22481 - protein, 146 aa, Methylobacillus flagellatus
  REGION 1..146: note = tr|Q1H192|Q1H192_METFK 6-carboxy-5,6,7,8-tetrahydropterin synthase; OS = Methylobacillus flagellatus (strain KT / ATCC 51484 / DSM 6875) OX=265072 GN=Mfla_1477 PE=3 SV= 1
MQITTRLEFDAGHRIPSHKSQCRNLHGHRYALEITLSGNIIEQEGASDHGMVMDFSDVKAIAKRCVVDQWDHAFLVYEGDKVVLEFLRSLPNHKTVIFSSVPTAENMAAEAFRILKAQYHDTYGTQLKLERVRLYETPNSWADALA

SEQ ID NO: 22482 - protein, 146 aa, unidentified
  source 1..146: note = Methylobacillus rhizosphaerae
  REGION 1..146: note = tr|A0A238ZU04|A0A238ZU04_9PROT 6-carboxy-5,6,7,8-tetrahydropterin synthase; OS = Methylobacillus rhizosphaerae OX=551994; GN = SAMN05192560_1508 PE=3 SV=1
MQITTRLEFDAGHRIPHHKSQCRNLHGHRYAMEITLSGNIIELDGASDNGMVMDFSDVKAIAKRCVVDVWDHAFLVYKDDTVVLEFLRSLPDHKTVIFNQVPTAENMAAEAFRILKAEYHDTYGTQLQLERVRLYETPNSWADALS

SEQ ID NO: 22483 - protein, 147 aa, Methylobacillus sp.
  REGION 1..147: note = tr|A0A1A9NRG0|A0A1A9NRG0_9PROT 6-carboxy-5,6,7,8-tetrahydropterin synthase; OS = Methylobacillus sp. MM3 OX=1848039 GN=A7976_09215 PE=3; SV = 1
MQITTRLEFDAGHRIPCHKSQCRNLHGHRYAIEITLSGDVIQQEGSSEQGMVMDFSDVKAIARKAVVDVWDHAFLVYQGDTAVREFLETLPDHKTVIMQSVPTAENMAAEAFRILDALYRDTYGNHLRLERVRLFETPNSWADALSR

SEQ ID NO: 22484 - protein, 134 aa, Methylobacter sp.
  REGION 1..134: note = tr|A0A522WWA0|A0A522WWA0_9GAMM 6-carboxy-5,6,7,8-tetrahydropterin synthase; OS = Methylobacter sp. OX=2051955 GN=EPN17_07335 PE=3 SV=1
MYTITKEVYFCYGHRLMNHPGKCRNLHGHSVKASISIEQEQLNDQAMVCDFSDIRDCVEAYIDRQLDHNFLLHKDDPIIPMLTANKERFLALDEHPTAEVLSKMIYQHLKQSGFNVAQVVLWETASAHACYREN

SEQ ID NO: 22485 - protein, 134 aa, Methylobacter sp.
  REGION 1..134: note = tr|A0A2P5MFI5|A0A2P5MFI5_9GAMM 6-carboxy-5,6,7,8-tetrahydropterin synthase; OS = Methylobacter sp. OX=2051955 GN=CTY24_03240 PE=3 SV=1
MYTITKEVYFCYGHRLMNHGGKCRNLHGHSVKAAISVEQPQLNEQSMVCDFAEIRDCVESFVDKHLDHNFLLHKDDPLIPALIANNERFWALDEHPTAEVLSKMIYRHLKVSGFNVTQVVLWETASAYASYHES

SEQ ID NO: 22486 - protein, 118 aa, Methylobacter tundripaludum
  REGION 1..118: note = tr|A0A2S6GXY7|A0A2S6GXY7_9GAMM 6-carboxy-5,6,7,8-tetrahydropterin synthase; OS = Methylobacter tundripaludum OX=173365 GN=B0F88_109185; PE = 3 SV=1
MNHPGKCRNLHGHSVKASISIEQEQLNDQGMVCDFSDIRDSVEAFIDQTLDHNFLLHKDDPIIPMLIANKERFLALDEHPTAEVLSKMIYRHLKQSGFNVAQVVLWETASAHACYREN

SEQ ID NO: 22487 - protein, 134 aa, Methylobacter tundripaludum
  REGION 1..134: note = tr|G3IUC3|G3IUC3_METTV 6-carboxy-5,6,7,8-tetrahydropterin synthase; OS = Methylobacter tundripaludum (strain ATCC BAA-1195 / DSM 17260 / SV96) OX=697282 GN=Mettu_0299 P E=3 SV=1
MYTITKEVYFCYGHRLMNHPGKCRNLHGHSVKASISIEQEQLNDQGMVCDFSDIRDSVEAFIDQKLDHNFLLHKDDPIIPMLIANKERFLALDEHPTAEVLSKMIYQHLKQSGFNVAQVVLWETASAHACYREN

SEQ ID NO: 22488 - protein, 133 aa, Methylobacterium aquaticum
  REGION 1..133: note = tr|A0A0J6SWH4|A0A0J6SWH4_9RHIZ 6-pyruvoyl tetrahydropterin synthase OS=Methylobacterium aquaticum; OX = 270351 GN=VP06_07280 PE=4 SV=1
MYAVEVRDHVMIAHSFKGELFGPAQALHGATFVVDVAFFRETLTADGVVVDIGRASEALKTILAPLTFRNLDDLPEFAGQNTTTEFLCGHIHRAMAAATRAGDLGPGGEGVSRLRVTLHESHLARAWFEAPLA

SEQ ID NO: 22489 - protein, 118 aa, Methylobacterium aquaticum
  REGION 1..118: note = tr|A0A0J6V9S7|A0A0J6V9S7_9RHIZ 6-carboxy-5,6,7,8-tetrahydropterin synthase; OS = Methylobacterium aquaticum OX=270351 GN=VP06_11120 PE=3; SV = 1
MKITQAFTFEAAHRLPNVPETHRCHRMHGHSYRVELTLDGPVDPETGWVVDFFDVEAAFGPVLERLDHYCLNEVPGLENPTAEHIAIWIWEKTRPALPLLSSVKVFETPMSWAEYTGV

SEQ ID NO: 22490 - protein, 118 aa, Methylobacterium brachiatum
  REGION 1..118: note = tr|A0A1I3G257|A0A1I3G257_9RHIZ 6-carboxy-5,6,7,8-tetrahydropterin synthase; OS = Methylobacterium brachiatum OX=269660 GN=queD PE=3 SV=1
MNITQAFTFEAAHRLPNVPATHRCHRMHGHSYRVELTVSGPVDPHTGWVIDFYDIESIFGPLLARLDHHCLNEIEGLENPTAENIAAWIWHRLRPDLPGLARVRVAETPMSWAEYDGD

SEQ ID NO: 22491 - protein, 118 aa, unidentified
  source 1..118: note = Methylobacterium currus
  REGION 1..118: note = tr|A0A2R4WSQ2|A0A2R4WSQ2_9RHIZ 6-carboxy-5,6,7,8-tetrahydropterin synthase; OS = Methylobacterium currus OX=2051553 GN=queD PE=3 SV=1
MKITQAFTFEAAHRLPNVPPTHRCHRMHGHSYRVELTLDGPVDPATGWVVDFFDVEAAFGPVLARLDHYCLNEVPGLENPTAEHIAVWIWEKTRPALPLLSSVKVFETPMSWAEYTGA

SEQ ID NO: 22492 - protein, 133 aa, unidentified
  source 1..133: note = Methylobacterium currus
  REGION 1..133: note = tr|A0A2R4WL41|A0A2R4WL41_9RHIZ 6-carboxytetrahydropterin synthase OS=Methylobacterium currus OX=2051553 GN=DA075_16115 PE=4 SV=1
MYAVEVRDHVMIAHSFRGELFGPAQGLHGATFVVDVAFFRESLTPDGVVVDIGRASEALKAILAPLNYRNLDDLPEFSGENTTTEFLCGHIHRAMAAATRAGALGPGGEGVSRLRVTLHESHLARAWFEAPLA

SEQ ID NO: 22493 - protein, 132 aa, unidentified
  source 1..132: note = Methylobacterium dankookense
  REGION 1..132: note = tr|A0A564G1J0|A0A564G1J0_9RHIZ 6-carboxy-5,6,7,8-tetrahydropterin synthase; OS = Methylobacterium dankookense OX=560405 GN=queD PE=3 SV=1
MPGIADIADLKNKAMKITQAFTFEAAHRLPNVPETHRCHRMHGHSYRVELTVAGAIDPHSGWVIDFYDVEDIFRPLLERLDHHTLNDIEGLENPTAENIAAWIWHRAKAGLPGLALVRVYETPMSWAEYAGE

SEQ ID NO: 22494 - protein, 118 aa, unidentified
  source 1..118: note = Methylobacterium frigidaeris
  REGION 1..118: note = tr|A0A2G8MBG9|A0A2G8MBG9_9RHIZ 6-carboxy-5,6,7,8-tetrahydropterin synthase; OS = Methylobacterium frigidaeris OX=2038277 GN=queD PE=3; SV = 1
MKITQAFTFEAAHRLPNVPPTHRCHRMHGHSYRVELTLDGPVDPETGWVVDFFDVEAAFGPVLERLDHYCLNEVPGLENPTAEHIAVWIWEKTRPALPLLSSVKVFETPMSWAEYTGA

SEQ ID NO: 22495 - protein, 114 aa, unidentified
  source 1..114: note = Methylobacterium frigidaeris
  REGION 1..114: note = tr|A0A2G8MI08|A0A2G8MI08_9RHIZ Uncharacterized protein OS=Methylobacterium frigidaeris OX=2038277; GN = CS379_15575 PE=4 SV=1
MFGPAQGLHGATFVVDVAFFRESLTPDGVVVDIGRASEALKTILAPLNYRNLDDLPDFSGKNTTTEFLCGHIHAAMAAATRAGALGPGGEGVSRLRVTLHESHLARAWFEAPLA

SEQ ID NO: 22496 - protein, 118 aa, unidentified
  source 1..118: note = Methylobacterium gnaphalii
  REGION 1..118: note = tr|A0A512JLS4|A0A512JLS4_9RHIZ 6-carboxy-5,6,7,8-tetrahydropterin synthase; OS = Methylobacterium gnaphalii OX=1010610 GN=ptps PE=3 SV=1
MKITQAFTFEAAHRLPNVPQTHRCSRMHGHSYRVELTVSGPVDATSGWVIDFYDVESAFKPILERLDHHTLNEIEGLENPTAEHIAAWIWQRTKPLLPGLTNVKVMETPLSWADYDGD

SEQ ID NO: 22497 - protein, 127 aa, Methylobacterium gossipiicola
  REGION 1..127: note = tr|A0A1I2REC4|A0A1I2REC4_9RHIZ 6-carboxy-5,6,7,8-tetrahydropterin synthase; OS = Methylobacterium gossipiicola OX=582675; GN = SAMN05192565_102106 PE=3 SV=1
MKITQAFTFEAAHRLPNVPETHRCHRMHGHSYRVELTLTGAVDPQTGWVVDFFDVEHAFAPVLLQLDHYCLNDIPGLENPTAEHIAAWVWTRIKGALPALSSVKVYETPMSWAEYEGEGAPKGGGHP

SEQ ID NO: 22498 - protein, 118 aa, unidentified
  source 1..118: note = Methylobacterium haplocladii
  REGION 1..118: note = tr|A0A512IJ67|A0A512IJ67_9RHIZ 6-carboxy-5,6,7,8-tetrahydropterin synthase; OS = Methylobacterium haplocladii OX=1176176 GN=ptps PE=3; SV = 1
MKITQAFTFEAAHRLPNVPQTHRCFRMHGHSYRVELQVSGPVDHTSGWVIDFYDVESAFAPILDQLDHHCLNEIEGLDNPTAEHIAAWIWHRTKPLLPGLSSVKVMETPLSWAEYDGD

SEQ ID NO: 22499 - protein, 118 aa, unidentified
  source 1..118: note = Methylobacterium indicum
  REGION 1..118: note = tr|A0A0J6R683|A0A0J6R683_9RHIZ 6-carboxy-5,6,7,8-tetrahydropterin synthase; OS = Methylobacterium indicum OX=1775910 GN=NS229_02125 PE=3; SV = 1
MKITQAFTFEAAHRLPTVPATHRCARMHGHSYRVELTLDGPVDPQTGWVVDFYDVEHAFRPVLERLDHHCLNEVPGLEVPTAEHIAMWIWEQTRPAMPLLALVKVFETPMCWAEYSGA

SEQ ID NO: 22500 - protein, 133 aa, unidentified
  source 1..133: note = Methylobacterium indicum
  REGION 1..133: note = tr|A0A0J6RBR7|A0A0J6RBR7_9RHIZ 6-pyruvoyl tetrahydropterin synthase OS=Methylobacterium indicum; OX = 1775910 GN=NS229_04845 PE=4 SV=1
MYAVEVRDHVMIAHSFRGDLFGPAQALHGATFVVDVAFFRESLTPDGVVVDIGRASEALKRILAPLNYRNLDDLPEFSGENTTTEFLCGHIHRAMAAATRAGDLGPGGEGVSRLRVTLHESHLARAWFEAPLA

SEQ ID NO: 22501 - protein, 118 aa, Methylobacterium mesophilicum
  REGION 1..118: note = tr|M7YGV1|M7YGV1_9RHIZ 6-carboxy-5,6,7,8-tetrahydropterin synthase; OS = Methylobacterium mesophilicum SR1.6/6 OX=908290; GN = MmSR116_5169 PE=3 SV=1
MKITQAFTFEAAHRLPNVPETHRCHRMHGHSYRVELTVAGPVDPHTGWVIDFYDIESIFGPLLARLDHHCLNEIEGLENPTAENIAAWIWHRLRPDLPGLARVRVAETPMSWAEYDGE

SEQ ID NO: 22502 - protein, 118 aa, Methylobacterium nodulans
  REGION 1..118: note = tr|B8IG27|B8IG27_METNO 6-carboxy-5,6,7,8-tetrahydropterin synthase; OS = Methylobacterium nodulans (strain LMG 21967 / CNCM I-2342 / ORS 2060) OX=460265 GN=Mnod_6746 PE =3 SV=1
MKITQAFTFEAAHWLPNVPETHRCRRMHGHSYRVELTLDGPVDPHTGWVVDFYDVEHAFAPLLAELDHHCLNDLPGLENPTAEHIAIWIWNRARPALPALSSVKVFETPLSWAEYTGD

SEQ ID NO: 22503 - protein, 134 aa, Methylobacterium nodulans
  REGION 1..134: note = tr|B8IEF8|B8IEF8_METNO Uncharacterized protein; OS = Methylobacterium nodulans (strain LMG 21967 / CNCM I-2342 / ORS 2060) OX=460265 GN=Mnod_4663 PE=4 SV=1
MYAVEVRDHVMIAHSFRGALFGPAQALHGATFVVDVAFFRESLTPEGVVVDIGRAGEVLKRILAPLNYCNLDDLPDFAGINTTTEFLCGHIHRAMAAAVRAGDLGPGGEGVSRLRVTLHESHVARAWCEGPLDP

SEQ ID NO: 22504 - protein, 118 aa, Methylobacterium organophilum
  REGION 1..118: note = tr|A0A2U1EWN7|A0A2U1EWN7_METOR 6-carboxy-5,6,7,8-tetrahydropterin synthase; OS = Methylobacterium organophilum OX=410 GN=C7388_10744; PE = 3 SV=1
MKITQAFTFEAAHRLPNVPETHRCHRMHGHSYRVELTVAGPVDPRTGWVIDFYDIESIFGPLLARLDHHCLNEIEGLENPTAENIAAWIWHRLRPDLPGLALVRVAETPMSWAEYDGE

SEQ ID NO: 22505 - protein, 118 aa, Methylobacterium oryzae
  REGION 1..118: note = tr|A0A089Q6C1|A0A089Q6C1_9RHIZ 6-carboxy-5,6,7,8-tetrahydropterin synthase; OS = Methylobacterium oryzae CBMB20 OX=693986 GN=queD PE=3; SV = 1
MKITQAFTFEAAHRLPNVPETHRCHRMHGHSYRVELTVAGPVDAHTGWVIDFYDIESIFGPLLARLDHHCLNEIEGLENPTAENIAAWIWQRLRPDLPGLALVRVAETPMSWAEYDGE

SEQ ID NO: 22506 - protein, 118 aa, unidentified
  source 1..118: note = Methylobacterium oxalidis
  REGION 1..118: note = tr|A0A512IXC1|A0A512IXC1_9RHIZ 6-carboxy-5,6,7,8-tetrahydropterin synthase; OS = Methylobacterium oxalidis OX=944322 GN=MOX02_02870 PE=3; SV = 1
MKITQAFTFEAAHRLPNVPETHRCHRMHGHSYRVELTVEGEVDPHTGWIVDFYDMERVFAPILARLDHHTLNEIEGLENPTAENIAAWIWHRTKGGLPGLSRVKVCETPMSWAEYEGD

SEQ ID NO: 22507 - protein, 118 aa, unidentified
  source 1..118: note = Methylobacterium phyllostachyos
  REGION 1..118: note = tr|A0A1G9Y1S3|A0A1G9Y1S3_9RHIZ 6-carboxy-5,6,7,8-tetrahydropterin synthase; OS = Methylobacterium phyllostachyos OX=582672; GN = SAMN05216360_105111 PE=3 SV=1
MKITQAFTFEAAHRLPNVPATHRCHRMHGHSYRVELTVAGPVDPHTGWVIDFYDIESIFGPLLARLDHHCLNEIEGLENPTAENIAAWIWHRLRPDLPGLARVRVAETPMSWAEYDGD

SEQ ID NO: 22508 - protein, 133 aa, Methylobacterium platani
  REGION 1..133: note = tr|A0A179SAF7|A0A179SAF7_9RHIZ 6-pyruvoyl tetrahydropterin synthase OS=Methylobacterium platani; OX = 427683 GN=A5481_12695 PE=4 SV=1
MYAVEVREHVMIAHSFRGALFGPAQGLHGATFVVDVAFFRESLTADGVVVDIGRAGEALKAVLAPLNYRNLDDLPDFAGTNTTTEFLCGHIHGAMAAAARAGALGPGGEGVSRIRVTLHESHLARAWFEAPLA

SEQ ID NO: 22509 - protein, 118 aa, Methylobacterium platani
  REGION 1..118: note = tr|A0A179SAT9|A0A179SAT9_9RHIZ 6-carboxy-5,6,7,8-tetrahydropterin synthase; OS = Methylobacterium platani OX=427683 GN=A5481_11615 PE=3; SV = 1
MKITQAFTFEAAHRLPNVPPTHRCHRMHGHSYRVELTLDGPVDPATGWVVDFFDVEAAFAPVLARLDHYCLNEVPGLENPTAEHIAAWIWNETKPALPLLASVKVFETPMSWAEYAGA

SEQ ID NO: 22510 - protein, 118 aa, unidentified
  source 1..118: note = Methylobacterium pseudosasicola
  REGION 1..118: note = tr|A0A1I4HXR4|A0A1I4HXR4_9RHIZ 6-carboxy-5,6,7,8-tetrahydropterin synthase; OS = Methylobacterium pseudosasicola OX=582667; GN = SAMN05192568_1005121 PE=3 SV=1
MNITQAFTFEAAHRLPNVPATHRCHRMHGHSYRVELTVAGPVDPHTGWVIDFYDIEKIFGPLLERLDHHCLNEIEGLENPTAENIAAWIWHRLRPDLPGLARVRVAETPMSWAEYDGD

SEQ ID NO: 22511 - protein, 118 aa, Methylobacterium radiotolerans; identical to SEQ ID NO: 22504
  REGION 1..118: note = tr|B1LTL7|B1LTL7_METRJ 6-carboxy-5,6,7,8-tetrahydropterin synthase; OS = Methylobacterium radiotolerans (strain ATCC 27329 / DSM 1819 / JCM 2831 / NBRC 15690 / NCIMB 10 815 / 0-1); OX = 426355 GN=Mrad2831_1968 PE=3 SV=1

SEQ ID NO: 22512 - protein, 118 aa, Methylobacterium radiotolerans; identical to SEQ ID NO: 22504
  REGION 1..118: note = tr|A0A2M8V928|A0A2M8V928_9RHIZ 6-carboxy-5,6,7,8-tetrahydropterin synthase; OS = Methylobacterium radiotolerans OX=31998 GN=queD PE=3; SV = 1

SEQ ID NO: 22513 - protein, 118 aa, Methylobacterium sp.
  REGION 1..118: note = tr|A0A0Q5YU13|A0A0Q5YU13_9RHIZ 6-carboxy-5,6,7,8-tetrahydropterin synthase; OS = Methylobacterium sp. Leaf399 OX=1736364 GN=ASG40_10930; PE = 3 SV=1
MKITQAFTFEAAHRLPNVPESHRCHRMHGHSYRVELTLTAPVDPHTGWVVDFFDVETAFAPILARLDHYCLNEVEGLENPTAEHIAAWIWHRTKPSLPVLSSVRVFETPMSWAEYEGD

SEQ ID NO: 22514 - protein, 133 aa, Methylobacterium sp.
  REGION 1..133: note = tr|A0A4Z0NXP7|A0A4Z0NXP7_9RHIZ 6-carboxytetrahydropterin synthase OS=Methylobacterium sp. 6HR-1 OX=1141884 GN=EU555_00240 PE=4 SV=1
MYAVEVRDHVMIAHSFKGALFGPAQGLHGATFVVDVAFFRDSLTADGVVVDIGRAGEALKAVLAPLNYRNLDDLPEFAGRNTTTEFLCGHIHGAMAAAARAGALGPGGEGVSRIRVTLHESHLARAWFEAPVA

SEQ ID NO: 22515 - protein, 133 aa, unidentified
  source 1..133: note = Methylobacterium tarhaniae
  REGION 1..133: note = tr|A0A0J6T6N3|A0A0J6T6N3_9RHIZ 6-pyruvoyl tetrahydropterin synthase OS=Methylobacterium tarhaniae; OX = 1187852 GN=VQ03_09455 PE=4 SV=1
MYAVEVRDHVMIAHSFRGELFGPAQGLHGATFVVDVAFFRESLTPDGVVVDIGRASEALKAILAPLNYRNLDDLPDFSGQNTTTEFLCGHIHAAMAAATRAGDLGPGGEGVSRLRVTLHESHLARAWFEAPPA

SEQ ID NO: 22516 - protein, 118 aa, unidentified
  source 1..118: note = Methylobacterium tarhaniae
  REGION 1..118: note = tr|A0A0J6SJ15|A0A0J6SJ15_9RHIZ 6-carboxy-5,6,7,8-tetrahydropterin synthase; OS = Methylobacterium tarhaniae OX=1187852 GN=VQ03_24855; PE = 3 SV=1
MKITQAFTFEAAHRLPNVPATHRCHRMHGHSYRVELTLDGPVDPETGWVVDFFDVEAAFGPVLERLDHYCLNEVPGLENPTAEHIAVWIWEKTRPALPLLSSVKVFETPMSWAEYTGV

SEQ ID NO: 22517 - protein, 118 aa, Methylobacterium variabile
  REGION 1..118: note = tr|A0A0J6SBP8|A0A0J6SBP8_9RHIZ 6-carboxy-5,6,7,8-tetrahydropterin synthase; OS = Methylobacterium variabile OX=298794 GN=VQ02_26915 PE=3; SV = 1
MKITQAFTFEAAHRLPNVPPTHRCHRMHGHSYRVELTLDGPVDPATGWVVDFFDVESAFAPVLARLDHYCLNEVPGLENPTAEHIAVWIWEKTRPALPLLASVKVFETPMSWAEYTGV

SEQ ID NO: 22518 - protein, 133 aa, Methylobacterium variabile
  REGION 1..133: note = tr|A0A0J6TB50|A0A0J6TB50_9RHIZ 6-pyruvoyl tetrahydropterin synthase OS=Methylobacterium variabile; OX = 298794 GN=VQ02_00835 PE=4 SV=1
MYAVEVRDHVMIAHSFKGDLFGPAQGLHGATFVVDVAFFRESLTPDGVVVDIGRASEALRRVLAPLNYRNLDDLPDFAGQNTTTEFLCGYIHGAMAAAVRAGDLGPGGEGVSRIRVTLHESHLARAWFEAPLA

SEQ ID NO: 22519 - protein, 132 aa, unidentified
  source 1..132: note = Methylobrevis pamukkalensis
  REGION 1..132: note = tr|A0A1E3H5B5|A0A1E3H5B5_9RHIZ 6-carboxy-5,6,7,8-tetrahydropterin synthase; OS = Methylobrevis pamukkalensis OX=1439726 GN=queD PE=4 SV=1
MYAVEVRDHVMIAHSLNRPVFGPARGLHGATYVVDAAFCADELDEDGLVVDIGLATTALRGILKPLDYANLDERPEFAGKITTTEFLARHIFDGLAAAAKGGDLGPAGRALARLKVTLHESHVARAWYEAAL

SEQ ID NO: 22520 - protein, 124 aa, unidentified
  source 1..124: note = Methylocaldum marinum
  REGION 1..124: note = tr|A0A250L160|A0A250L160_9GAMM 6-pyruvoyl tetrahydrobiopterin synthase OS=Methylocaldum marinum; OX = 1432792 GN=sS8_3887 PE=4 SV=1
MYQLAITRDFIARHFLIGGDWGDETLEHSHHYKAEVLIEGEQLDRHGYLIDIVDLEQATMTLIGEFRDRVLNDLEPFRGLNPSLERFARIFWERLRDRLTLRGVKMTVKLWENETDWAAFGGSL

SEQ ID NO: 22521 - protein, 138 aa, unidentified
  source 1..138: note = Methylocaldum marinum
  REGION 1..138: note = tr|A0A250KP12|A0A250KP12_9GAMM 6-carboxy-5,6,7,8-tetrahydropterin synthase; OS = Methylocaldum marinum OX=1432792 GN=sS8_1347 PE=3 SV=1
MSRFMFTITKEVYFCYGHRLMKHTGKCRHLHGHSVKAAITVVAESLNEQGMVCDFADIGAAASEYIDRQLDHNLLLHKDDPLLPALASAGERFLALDEHPTAEYLAKLIFGHVASRGYKVRSVTLWETSSACATYSEY

SEQ ID NO: 22522 - protein, 124 aa, Methylocaldum sp.
  REGION 1..124: note = tr|A0A4V3DR94|A0A4V3DR94_9GAMM 6-pyruvoyltetrahydropterin/6-carboxytetrahydropterin synthase OS=Methylocaldum sp. 0917 OX=2485163; GN = EDE06_11950 PE=4 SV=1
MYQLAITRDFIARHFLIGGDWGAENHEHSHHYKAEVLIEGEQLDRHGYLIDIVDLEQATMALIGEFKDRVLNDLEPFRGLNPSLERFARIFWERLRDRVTLHGVKMTIKLWENDRDWAAFGGTL

SEQ ID NO: 22523 - protein, 134 aa, Methylocaldum sp.
  REGION 1..134: note = tr|A0A4R7AKQ2|A0A4R7AKQ2_9GAMM 6-carboxy-5,6,7,8-tetrahydropterin synthase; OS = Methylocaldum sp. 0917 OX=2485163 GN=EDE06_10175 PE=3; SV = 1
MFTITKEVYFCYGHRLMEHTGKCRHLHGHSVKAAITVIAESLNEQGMVCDFAEISAVASEYIDRQLDHNLLLHKDDPLLPALVSAGERFLALDEHPTAEYLAKLIFGHVASRGYNVRSVTLWETSSACATYSEF

SEQ ID NO: 22524 - protein, 118 aa, unidentified
  source 1..118: note = Methylocapsa palsarum
  REGION 1..118: note = tr|A0A1I3ZVA8|A0A1I3ZVA8_9RHIZ 6-carboxy-5,6,7,8-tetrahydropterin synthase; OS = Methylocapsa palsarum OX=1612308 GN=SAMN05444581_108175; PE = 3 SV=1
MKITQAFSFEAAHRLPNVPEKHRCHRLHGHSYRVELKLEGPVDPFTGFVVDFFDIEAVFGPLLEQLDHQYLNEIEGLQNPTAENISIFIFERIVKTLPQLASVVVFETPDCWAEYNGQ

SEQ ID NO: 22525 - protein, 126 aa, unidentified
  source 1..126: note = Methyloceanibacter caenitepidi
  REGION 1..126: note = tr|A0A0A8K4T9|A0A0A8K4T9_9RHIZ 6-carboxy-5,6,7,8-tetrahydropterin synthase; OS = Methyloceanibacter caenitepidi OX=1384459 GN=GL4_2124; PE = 3 SV=1
MRIYKEFFFEAAHFLPSAPPGHPNARVHGHSFRARITVDGQPDEETGIIIHFGELEAAVQDAKDALDHRMLNEIEGLAAPTLERIAMWLWDRLHNRLPGLVEVVVARDSCHEGCVYHGPPMRLAAE

SEQ ID NO: 22526 - protein, 126 aa, unidentified
  source 1..126: note = Methyloceanibacter marginalis
  REGION 1..126: note = tr|A0A1E3W399|A0A1E3W399_9RHIZ 6-carboxy-5,6,7,8-tetrahydropterin synthase; OS = Methyloceanibacter marginalis OX=1774971 GN=AUC71_03535; PE = 3 SV=1
MRIYKEFFFEAAHFLPSAPPGHPNARVHGHSFRVRVTVDGEPDEDTGIVVHFDDLETAVADARDALDHRMLNDVEGLAYPTLERIAMWLWDRLHNRLPGLAEIVVARDSCHEGCVYQGPPMRLAAE

SEQ ID NO: 22527 - protein, 126 aa, unidentified
  source 1..126: note = Methyloceanibacter methanicus
  REGION 1..126: note = tr|A0A1E3W5C8|A0A1E3W5C8_9RHIZ 6-carboxy-5,6,7,8-tetrahydropterin synthase; OS = Methyloceanibacter methanicus OX=1774968 GN=AUC68_13405; PE = 3 SV=1
MRIYKEFLFEAAHFLPSAPPGHPNARLHGHSFRARITVDGQPDEETGIVLHFDELEAAVAEARDALDHRMLNEIEGLSAPTLERIAMWLWDRLHNRLPGLVEIVVARDSCHEGCVYYGPPLRLAAE

SEQ ID NO: 22528 - protein, 126 aa, unidentified
  source 1..126: note = Methyloceanibacter sp.
  REGION 1..126: note = tr|A0A353IQZ7|A0A353IQZ7_9RHIZ 6-carboxy-5,6,7,8-tetrahydropterin synthase; OS = Methyloceanibacter sp. OX=1965321 GN=DDW48_09780 PE=3; SV = 1
MRIYKEFFFEAAHFLPSAPPGHPNARVHGHSFRARISVDGQPDEDTGIIVHFDELEAAVSDARDALDHRMLNEIEGLSAPTLERIAMWLWDRLHNRLPGLVEIVVARDSCHEGCVYHGPPMRLAAE

SEQ ID NO: 22529 - protein, 126 aa, unidentified
  source 1..126: note = Methyloceanibacter stevinii
  REGION 1..126: note = tr|A0A1E3VLI6|A0A1E3VLI6_9RHIZ 6-carboxy-5,6,7,8-tetrahydropterin synthase; OS = Methyloceanibacter stevinii OX=1774970 GN=AUC70_06795; PE = 3 SV=1
MRIYKEFFFEAAHFLPSAPPGHPNARVHGHSFRARITVDGQPDEDTGIIIHFGELEAAVQDAKDALDHRMLNDIEGLSAPTLERIAMWLWDRLHNRLPGLVEVVVARDSCHEGCVYHGPPMRLAAE

SEQ ID NO: 22530 - protein, 126 aa, unidentified
  source 1..126: note = Methyloceanibacter superfactus
  REGION 1..126: note = tr|A0A1E3VP96|A0A1E3VP96_9RHIZ 6-carboxy-5,6,7,8-tetrahydropterin synthase; OS = Methyloceanibacter superfactus OX=1774969; GN = AUC69_02290 PE=3 SV=1
MRIYKEFFFEAAHFLPSAPPGHPNSRVHGHSFRARITVDGEPDEETGIIVHFDELEAAVADARAALDHRMLNDVEGLAFPTLERIAMWLWDRLHNRLPGLVEIVVARDSCHEGCVYNGPPMRLAAE

SEQ ID NO: 22531 - protein, 118 aa, Methylocella silvestris
  REGION 1..118: note = tr|B8ESN9|B8ESN9_METSB 6-carboxy-5,6,7,8-tetrahydropterin synthase; OS = Methylocella silvestris (strain DSM 15510 / CIP 108128 / LMG 27833 / NCIMB 13906 / BL2) OX=3959 65 GN=Msil_1409; PE = 3 SV=1
MKITQAFHFEAAHRLPHVAETHRCHRLHGHSYRVELELQGPVDPVTGFVVDFFDIEAAFGPLLARLDHHFLNEIEGLENPTAELIAIWIFERIRGPLPQLSCVKVFETPDCWAEYEGA

SEQ ID NO: 22532 - protein, 118 aa, Methylocella silvestris
  REGION 1..118: note = tr|A0A2J7TJV2|A0A2J7TJV2_METSI 6-carboxy-5,6,7,8-tetrahydropterin synthase; OS = Methylocella silvestris OX=199596 GN=queD PE=3 SV=1
MKITQAFHFEAAHRLPHVAETHRCHRLHGHSYRVELELQGPVDPVTGFVVDFFDIEAAFGPLLARLDHHYLNEIEGLENPTAELIAIWIFERIRGPLPQLSCVKVFETPDCWAEYEGV

SEQ ID NO: 22533 - protein, 118 aa, Methylocella tundrae
  REGION 1..118: note = tr|A0A4U8Z191|A0A4U8Z191_METTU 6-carboxy-5,6,7,8-tetrahydropterin synthase; OS = Methylocella tundrae OX=227605 GN=ygcM PE=3 SV=1
MKITQAFHFEAAHRLPHVGEKHRCYRLHGHSYRVEVNLEGAVDQKSGFVVDFFDIEAAFGPLLERLDHHYLNEIEGLENPTAELIAVWIFDRIKPKLPQLAGVKVFETPDCWADYDGA

SEQ ID NO: 22534 - protein, 118 aa, unidentified
  source 1..118: note = Methylococcaceae bacterium
  REGION 1..118: note = tr|A0A1Z9UHW0|A0A1Z9UHW0_9GAMM 6-carboxy-5,6,7,8-tetrahydropterin synthase; OS = Methylococcaceae bacterium TMED282 OX=1986758; GN = CBE42_03225 PE=3 SV=1
MEIFVKFDFAASRRLTKLPEAHPCSRVHGHTFEVQITLVGEVDPSTGFMVDFSFVEQKLDDVKAVVDHRYLNDINGLENPTTEILAQWLWQYLSRDLSTLTTISVQEHYSRGVTYRGD

SEQ ID NO: 22535 - protein, 364 aa, unidentified
  source 1..364: note = Methylococcaceae bacterium
  REGION 1..364: note = tr|A0A4Q5L778|A0A4Q5L778_9GAMM 6-pyruvoyl tetrahydropterin synthase OS=Methylococcaceae bacterium FWC3 OX=2516328 GN=EWI61_06325 PE=4 SV=1
MNTRLLHVAATNFEAACRIPVLPDGHRSRRLHGHSFLARVRAAVPEDWGGFRGAGTSALSTALGACLAPLDYADLNEHLPIPTDENLARWIRERLEVSGIESVGVQSTSEQGADLDPHDRAHIWRRFRFEAAHQLPNVPPGHRCGRMHGHGFEVIVHAEQELTQRDMGVDFDHLGRLWEPLQAELHYACLNDVPGLENPTSEKLAAWIWRRLAAVLPELSWVTVYETHTAGCHYDGRHYRIWKEHRFESALRLIQAPDGDPRRRLHGHSYIVRLHLTAPLDVVHGWTVDYGDVKELFTPVYRQLDHDLLNELPGLVDADPGSLALWIRSAMATRLPSLDRIDLYETPGCGVLLSWGEEGPALPA

SEQ ID NO: 22536 - protein, 134 aa, unidentified
  source 1..134: note = Methylococcales bacterium
  REGION 1..134: note = tr|A0A3A2J143|A0A3A2J143_9GAMM 6-carboxy-5,6,7,8-tetrahydropterin synthase; OS = Methylococcales bacterium OX=2304002 GN=D0530_04480; PE = 3 SV=1
MFTITKEVYFCYGHRLMNHPGKCRNLHGHSVKAAISIQQEQLNDQGMVCDFSDIRDCVEAYIDDQLDHNFLLYKDDPIIPMLTANNERFLALDEHPTAEVLSKMIYKHLKQAGFNVAEVTLWETASAHACYREN

SEQ ID NO: 22537 - protein, 150 aa, unidentified
  source 1..150: note = Methylococcales bacterium
  REGION 1..150: note = tr|A0A418RRI3|A0A418RRI3_9GAMM 6-carboxytetrahydropterin synthase OS=Methylococcales bacterium OX=2304002 GN=D0528_05205 PE=4 SV=1
MTINQKIEHWLTAHKRNLSQAKRPFVTLSYAQSWDGSIHYLIGGDWGSENQPHAHHYVVEVSIEGKQLDQQGYLVDIVAIEAGLDEIVGHFRDVLLNDQAEFAGLNPSIEHFSRIITEQLLAAINPPGSGALRVKLWENATCWAAFRQEF

SEQ ID NO: 22538 - protein, 137 aa, Methylococcus capsulatus
  REGION 1..137: note = tr|Q604L2|Q604L2_METCA 6-carboxy-5,6,7,8-tetrahydropterin synthase; OS = Methylococcus capsulatus (strain ATCC 33009 / NCIMB 11132 / Bath) OX=243233 GN=MCA2527 PE=3 SV= 1
MYSVTKEIFFCYGHRLMHHSGKCRHLHGHSVRAAITVSASDLNFQGMVCDFADISAAARDFIDTHLDHNLLLHRDDPLLPLLQQAGERVLALEQHPTAEALAEMIYRDLRRKGFAVQNVTLWETSSACASYREGSPP

SEQ ID NO: 22539 - protein, 124 aa, Methylococcus sp.
  REGION 1..124: note = tr|A0A3N9UU76|A0A3N9UU76_9GAMM 6-carboxytetrahydropterin synthase OS=Methylococcus sp.; OX = 39769 GN=EHM62_06555 PE=4 SV=1
MYQLAITRDFIARHFLVGGDWGTENQEHSHHYRAEVIVAGEQLDRHGYLIDIVALDAALLDIIGGYADRILNQQPAFAGLNPSIEHFSRILWEALRDAVDLPGRRLTVKLWENDLDWAAYDGVL

SEQ ID NO: 22540 - protein, 123 aa, Methylococcus sp.
  REGION 1..123: note = tr|A0A432RJG3|A0A432RJG3_9GAMM 6-carboxytetrahydropterin synthase OS=Methylococcus sp.; OX = 39769 GN=DSY87_07000 PE=4 SV=1
MYQLAITRDFIAQHYLIGGDWGRENERHSHHYKVEVRVQQQDLDQHGYLIDIVDLESSLGRIIDSYQENTLNDLVPFKDLNPSLERFARVLWEELVSRLDIDGSVLSVRLWENENDWAAYRQP

SEQ ID NO: 22541 - protein, 126 aa, unidentified
  source 1..126: note = Methylocystaceae bacterium
  REGION 1..126: note = tr|A0A5C9D408|A0A5C9D408_9RHIZ 6-carboxy-5,6,7,8-tetrahydropterin synthase; OS = Methylocystaceae bacterium OX=2052174 GN=FD139_2247; PE = 3 SV=1
MTVSSFEVFREFYFEAAHALYDPEAPEGGKYRNLHGHSFRVRVTLRGAPSLEEQWVMDLGKLGRRLAELRERLDHSFLNDLEGLGKPTLENLCAYIWRDLSPTLPGLAEVGVFRDSCFEGCVYRGD

SEQ ID NO: 22542 - protein, 125 aa, unidentified
  source 1..125: note = Methylocystaceae bacterium
  REGION 1..125: note = tr|A0A395CV31|A0A395CV31_9RHIZ 6-carboxy-5,6,7,8-tetrahydropterin synthase; OS = Methylocystaceae bacterium OX=2052174 GN=C3F11_14685; PE = 3 SV=1
MTTLFEVYREFCFEAAHALYDPEHPTGGKYRNLHGHSFRVRVTLRGPRLEGEEWVIDLGKLGRRLQELRERLDHSFLNELEGLGKPTLENLCAYIWRDLEPSLPNIHEVGIFRDTCDEGCVLKKQ

SEQ ID NO: 22543 - protein, 124 aa, unidentified
  source 1..124: note = Methylocystis bryophila
  REGION 1..124: note = tr|A0A1W6MS18|A0A1W6MS18_9RHIZ 6-carboxy-5,6,7,8-tetrahydropterin synthase; OS = Methylocystis bryophila OX=655015 GN=B1812_03820 PE=3; SV = 1
MASFEIFREFYFEAAHALYDPEHPTGGKYRNLHGHSFRVRVTLRGAPSPEDEWVMDLGKLGRRLAELRERLDHSFLNDLEGLGKPTLENLSLYIWRDLQPFALGLSEVGVFRDSCFEGCVYRGD

SEQ ID NO: 22544 - protein, 132 aa, unidentified
  source 1..132: note = Methylocystis bryophila
  REGION 1..132: note = tr|A0A1W6N0Y9|A0A1W6N0Y9_9RHIZ Uncharacterized protein OS=Methylocystis bryophila OX=655015; GN = B1812_08755 PE=4 SV=1
MYAVEVRDHIMIAHSFRGELFGPAQRLHGATFVVDVAFFRESLTEDAVVVDIGRAHAALKSVLEPLNYRNLDEIEAFAGKQTTTEFLSRHIFDAMAAAARSGALGPGGEGIARIRVTLHESHVARAWFEDSL

SEQ ID NO: 22545 - protein, 124 aa, Methylocystis heyeri
  REGION 1..124: note = tr|A0A4S4MH94|A0A4S4MH94_9RHIZ 6-carboxy-5,6,7,8-tetrahydropterin synthase; OS = Methylocystis heyeri OX=391905 GN=H2LOC_01827 PE=3 SV=1
MASFEVFREFYFEAAHALYDPEHPTGGKYRNLHGHSFRVRVTLRGERHPEEQWVMDLGRLGRRLAELREKLDHSFLNDLEGLGKPTLENLCVYVWRDLAPFAPGLCEVGIFRDSCFEGCVYRGD

SEQ ID NO: 22546 - protein, 115 aa, Methylocystis heyeri
  REGION 1..115: note = tr|A0A4S4MRM7|A0A4S4MRM7_9RHIZ 6-carboxytetrahydropterin synthase OS=Methylocystis heyeri; OX = 391905 GN=H2LOC_02778 PE=4 SV=1
MYAVEVRDHIMIAHSFRGELFGPAQRLHGATFVVDVAFFRERLTEDNIVVDIGRAHEALKATLAPLNYRNLDEVEAFKGQQTTTEFLTRHVFEAIALAARSGALGPGGTAFPAFA

SEQ ID NO: 22547 - protein, 124 aa, Methylocystis hirsuta
  REGION 1..124: note = tr|A0A3M9XN90|A0A3M9XN90_9RHIZ 6-carboxy-5,6,7,8-tetrahydropterin synthase; OS = Methylocystis hirsuta OX=369798 GN=D1O30_01855 PE=3 SV=1
MSSFEVFREFYFEAAHALYDPEAPEGGKYRNLHGHSFRVRVTLRGEPSVEEQWVMDLGKLGRRLNELRERLDHSFLNDLEGLGKPTLENLCAYIWRDLAPDLPAIAEVGVFRDSCFEGCVYRGD

SEQ ID NO: 22548 - protein, 124 aa, Methylocystis rosea
  REGION 1..124: note = tr|A0A3G8MAT2|A0A3G8MAT2_9RHIZ 6-carboxytetrahydropterin synthase OS=Methylocystis rosea; OX = 173366 GN=EHO51_14150 PE=4 SV=1
MSSFEVFREFYFEAAHALYDPEAPEGGKYRNLHGHSFRVRVTLRGAPTLEEQWVMDLGKLGRRLAELRESLDHSFLNDLEGLGKPTLENLCAYIWRDLSPTLPGLAEVGVFRDSCFEGCVYRGD

SEQ ID NO: 22549 - protein, 124 aa, Methylocystis sp.
  REGION 1..124: note = tr|A0A2P5NTQ2|A0A2P5NTQ2_9RHIZ 6-carboxy-5,6,7,8-tetrahydropterin synthase; OS = Methylocystis sp. OX=1911079 GN=CTY15_00140 PE=3 SV=1
MPTFEVHREFYFEAAHALYDPEAKDGGKYRNLHGHSFRVRVTLRGERHPEEQWVIDLGKLGRRLAELRERLDHSFLNDLEGLGKPTLENLCLYIWGDLAASLPGLSEVGVFRDSCFEGCVYRGD

SEQ ID NO: 22550 - protein, 124 aa, Methylocystis sp.
  REGION 1..124: note = tr|J7Q4P3|J7Q4P3_METSZ 6-carboxy-5,6,7,8-tetrahydropterin synthase; OS = Methylocystis sp. (strain SC2) OX=187303 GN=BN69_2258; PE = 3 SV=1
MSTFEVFREFYFEAAHALYDPEAPEGGKYRNLHGHSFRVRVTLRGEPTLEEQWVMDLGKLGRRLAELRERLDHSFLNDLEGLGKPTLENLCAYVWRDLAPDLPGLAEVGIFRDSCFEGCVYRGD

SEQ ID NO: 22551 - protein, 136 aa, unidentified
  source 1..136: note = Methyloglobulus morosus
  REGION 1..136: note = tr|V5BWJ0|V5BWJ0_9GAMM 6-carboxy-5,6,7,8-tetrahydropterin synthase; OS = Methyloglobulus morosus KoM1 OX=1116472; GN = MGMO_66c00630 PE=3 SV=1
MTMFTITKEVYFCYGHRLMNHAGKCRNLHGHSVKAAISVVQETLNEQGMVCDFADIRECVETYIDGHLDHNFLLHKDDPLIPALKANNERFCALDEHPTAEVLSKMIYLHLKESGFNVSQVVLWETASAYASYKEG

SEQ ID NO: 22552 - protein, 134 aa, unidentified
  source 1..134: note = Methylomagnum ishizawai
  REGION 1..134: note = tr|A0A1Y6D9T8|A0A1Y6D9T8_9GAMM 6-carboxy-5,6,7,8-tetrahydropterin synthase; OS = Methylomagnum ishizawai OX=1760988 GN=SAMN02949497_3885; PE = 3 SV=1
MFTITKEVYFCYGHRLMRHPGKCRHLHGHSVKAAITVQAAGLNEQGMVCDFADIARIASDYIDRELDHNLLLHRDDPLVPLLAAAGERYSLLDEHPTAEYLAQLIYRHAQSQGLAVASVTLWETASACATYSEP

SEQ ID NO: 22553 - protein, 138 aa, Methylomicrobium album
  REGION 1..138: note = tr|H8GIE3|H8GIE3_METAL 6-carboxy-5,6,7,8-tetrahydropterin synthase; OS = Methylomicrobium album BG8 OX=686340 GN=Metal_3813 PE=3; SV = 1
MYTITKEVYFCYGHRLMNHPGKCRHLHGHSVKASISIRQEQLNDQGMVCDFSDIRDAVEAYIDQYLDHNFLLHKDDPIIPMLIANNERFLALDEHPTAEVLSKMIYRYLRQAGLNVAQVVLWETASAHACYSEDSPRL

SEQ ID NO: 22554 - protein, 137 aa, Methylomicrobium album
  REGION 1..137: note = tr|H8GK10|H8GK10_METAL 6-carboxy-5,6,7,8-tetrahydropterin synthase; OS = Methylomicrobium album BG8 OX=686340 GN=Metal_0100 PE=3; SV = 1
MTRSVQTQPTCGLYTLKVHAQFCSAHALRDYPGDCRRLHGHNWKVETEVQARVLNDIGIAIDFKAIKAATRQLADSLDHRFLNDIEPFDRINPTAENLAAWFFRQLSAALNSTHVKVNAVTLWETDTACVRYTEVAA

SEQ ID NO: 22555 - protein, 134 aa, Methylomicrobium alcaliphilum
  REGION 1..134: note = tr|G4SVR1|G4SVR1_META2 6-carboxy-5,6,7,8-tetrahydropterin synthase; OS = Methylomicrobium alcaliphilum (strain DSM 19304 / NCIMB 14124 / VKM B-2133 / 20Z) OX=1091494 GN =MEALZ_2440 PE=3; SV = 1
MYTITKEVYFCYGHRLMNHPGKCRHLHGHSVKAAITIKQEHLNEQGMVCDFSDIKACVEDYINEHLDHNFLLHKNDPIIPYLTETQERFMALDEHPTAEVLSQMIYQHIKEQGFDVDQVTLWETASAHACYRED

SEQ ID NO: 22556 - protein, 122 aa, Methylomicrobium alcaliphilum
  REGION 1..122: note = tr|G4T1J2|G4T1J2_META2 Putative 6-pyruvoyl tetrahydrobiopterin synthase OS=Methylomicrobium alcaliphilum (strain DSM 19304 / NCIMB 14124 / VKM B-2133 / 20Z) OX=10914 94 GN=ygcM PE=4 SV=1
MYQLAICRDFIAQHYLVGGDWGAENQRHSHHYRVEIQIEHDRLDSHGYLIDIVDLENALSAVIERFKDVTLNDLSEFDGLNPSLEHFARIIHEGLQSRLDFGEQKLIVKLWENERDWAGYRE

SEQ ID NO: 22557 - protein, 134 aa, Methylomicrobium buryatense
  REGION 1..134: note = tr|A0A4P9UP36|A0A4P9UP36_9GAMM 6-carboxy-5,6,7,8-tetrahydropterin synthase; OS = Methylomicrobium buryatense OX=95641 GN=EQU24_08610; PE = 3 SV=1
MYTITKEVYFCYGHRLMNHPGKCRHLHGHSVKAAITIKQQHLNEQGMVCDFSDIKACVERYIDEHLDHNFLLHKNDPIIPYLTETQERFMALEEHPTAEVLSQMIYQHIKEQGFDVDQVTLWETASAHACYRED

SEQ ID NO: 22558 - protein, 122 aa, Methylomicrobium buryatense
  REGION 1..122: note = tr|A0A4P9ULZ1|A0A4P9ULZ1_9GAMM 6-carboxytetrahydropterin synthase OS=Methylomicrobium buryatense OX=95641 GN=EQU24_03540 PE=4 SV=1
MYQLAICRDFIAQHYLVGGDWGAENQRHSHHYRVEIQIEHDRLDSHGYLVDIVDLENALSAVIERFKDVTLNDLSEFDGLNPSLEHFARIIHEGLQSRLDFGEQKLTVKLWENERDWAGYRE

SEQ ID NO: 22559 - protein, 134 aa, Methylomicrobium kenyense
  REGION 1..134: note = tr|A0A543VF56|A0A543VF56_9GAMM 6-carboxy-5,6,7,8-tetrahydropterin synthase; OS = Methylomicrobium kenyense OX=269709 GN=IQ34_3918 PE=3; SV = 1
MYMITKEVYFCYGHRLMNHPGKCRHLHGHSVKAAITIKQQRLNEQGMVCDFSDIKACVERYIDEHLDHNFLLHKNDPIIPYLIETNERFMALDEHPTAEVLSQMIYQHIKEQGFEVDQVTLWETASAHACYRED

SEQ ID NO: 22560 - protein, 122 aa, Methylomicrobium kenyense
  REGION 1..122: note = tr|A0A543VCC3|A0A543VCC3_9GAMM 6-pyruvoyltetrahydropterin/6-carboxytetrahydropterin synthase OS=Methylomicrobium kenyense OX=269709; GN = IQ34_2872 PE=4 SV=1
MYQLAICRDFIAQHYLVGGDWGAENQRHSHHYRLEIQIEHDQLDKHGYLVDIVDLENALAGVIDRFKDVTLNDLSEFDGLNPSLEHFARIIHDGLRSRLDFGEQKLTVKLWENDRDWAAYRE

SEQ ID NO: 22561 - protein, 134 aa, unidentified
  source 1..134: note = Methylomonas denitrificans
  REGION 1..134: note = tr|A0A126T773|A0A126T773_9GAMM 6-carboxy-5,6,7,8-tetrahydropterin synthase; OS = Methylomonas denitrificans OX=1538553 GN=JT25_015580; PE = 3 SV=1
MYIITKEVYFCYGHRLMNHPGKCRNLHGHSVKASISIKQNQLNDQGMVCDFSDVKDCVDGFINKVLDHNFLLHKEDPIIPALIANNEQFLAIDEHPTAEVLSKMIYNHVKQQGFNVDQVVLWETASANACYREE

SEQ ID NO: 22562 - protein, 125 aa, unidentified
  source 1..125: note = Methylomonas denitrificans
  REGION 1..125: note = tr|A0A140E3K0|A0A140E3K0_9GAMM 6-pyruvoyl tetrahydropterin synthase OS=Methylomonas denitrificans; OX = 1538553 GN=JT25_000475 PE=4 SV=1
MYSVAVSRDFIANHYLIGGDWGSENQPHAHHYIAEVRIDGQQLDRHGYLVDIVAIEAALDAIVADFRDQMLNDKAEFAGLNPSIEHFSRIICEKIAAAINPPGTGRLRVKLWENATCWAAYRLAF

SEQ ID NO: 22563 - protein, 134 aa, unidentified
  source 1..134: note = Methylomonas koyamae
  REGION 1..134: note = tr|A0A177P7I2|A0A177P7I2_9GAMM 6-carboxy-5,6,7,8-tetrahydropterin synthase; OS = Methylomonas koyamae OX=702114 GN=A1355_19070 PE=3 SV=1
MFVITKEVYFCYGHRLMNHPGKCRNLHGHSVKASISIRAAQLNEQAMVCDFSDVKACVETFIDDVLDHNFLLHKDDPLIPALTAHNEQFLALDEHPTAEVLSKMIYQYVKQRGFDVDQVVLWETSSACACYRED

SEQ ID NO: 22564 - protein, 125 aa, unidentified
  source 1..125: note = Methylomonas koyamae
  REGION 1..125: note = tr|A0A177NLB5|A0A177NLB5_9GAMM 6-pyruvoyl tetrahydropterin synthase OS=Methylomonas koyamae; OX = 702114 GN=A1355_06990 PE=4 SV=1
MYSVAVSRDFIANHYLIGGDWGSENQAHAHHYIAEVRIDGETLDRHGYLVDIVAIEAALDAAVADFRDRLLNDCPEFAGLNPSIEHFSRILCQRLFAEIQLPGNGRLRVKLWENPQCWAAFSRTF

SEQ ID NO: 22565 - protein, 137 aa, unidentified
  source 1..137: note = Methylomonas lenta
  REGION 1..137: note = tr|A0A177NE64|A0A177NE64_9GAMM 6-carboxy-5,6,7,8-tetrahydropterin synthase; OS = Methylomonas lenta OX=980561 GN=A1359_09140 PE=3 SV=1
MTNAEQTPPSCGLYTLKVHAQFCSAHALRDYPGDCRRIHGHNWKVETEMTAQVLDDIGIAIDFKAIKAVTRQLADSLDHQLLNDIEPFDRINPTAENLAAWFYRQLSATLNSTHVKVAAVTLWETDNACVRYSEVAA

SEQ ID NO: 22566 - protein, 134 aa, unidentified
  source 1..134: note = Methylomonas lenta
  REGION 1..134: note = tr|A0A177NFS5|A0A177NFS5_9GAMM 6-carboxy-5,6,7,8-tetrahydropterin synthase; OS = Methylomonas lenta OX=980561 GN=A1359_08125 PE=3 SV=1
MHVITKEVYFCYGHRLMNHAGKCRNLHGHSVKASISIKSEQLNQQGMVCDFADVRDAVESFVDQHLDHNFLLHKDDPIIPALVANNERFLAIDEHPTAEVLSKMIYQHLKQEGLAVDQVVLWETASAYACYRED

SEQ ID NO: 22567 - protein, 134 aa, Methylomonas methanica
  REGION 1..134: note = tr|A0A177MLI0|A0A177MLI0_METMH 6-carboxy-5,6,7,8-tetrahydropterin synthase; OS = Methylomonas methanica OX=421 GN=A1332_11685 PE=3 SV=1
MYIITKEVYFCYGHRLMNHPGKCRNLHGHSVKASISIKQNQLNDQGMVCDFSDVKDCVDGFINKVLDHNFLLHKDDPIIPALVANNEQFLAIDEHPTAEVLSKMIYQHVKQQGFNVDQVVLWETASANACYREE

SEQ ID NO: 22568 - protein, 134 aa, Methylomonas methanica
  REGION 1..134: note = tr|G0A4G7|G0A4G7_METMM 6-carboxy-5,6,7,8-tetrahydropterin synthase; OS = Methylomonas methanica (strain MC09) OX=857087; GN = Metme_3183 PE=3 SV=1
MHIITKEVYFCYGHRLMNHPGKCRNLHGHSVKASISIQSDQLNGQGMVCDFADVRDAVESFVDQHLDHNFLLHKDDPIIPALLANNERFLALDEHPTAEVLSKMIYRHLKQEGLNVDQVVLWETASAYACYRED

SEQ ID NO: 22569 - protein, 134 aa, Methylomonas sp.; identical to SEQ ID NO: 22485
  REGION 1..134: note = tr|A0A2P5N278|A0A2P5N278_METSP 6-carboxy-5,6,7,8-tetrahydropterin synthase; OS = Methylomonas sp. OX=418 GN=CTY18_08440 PE=3 SV=1

SEQ ID NO: 22570 - protein, 134 aa, Methylomonas sp.
  REGION 1..134: note = tr|A0A172UAJ0|A0A172UAJ0_9GAMM 6-carboxy-5,6,7,8-tetrahydropterin synthase; OS = Methylomonas sp. DH-1 OX=1727196 GN=AYM39_14935 PE=3; SV = 1
MYIITKEVYFCYGHRLMNHPGKCRNLHGHSVKASISIRQEQLNPQGMVCDFSDVKACVESFIDDVLDHNFLLHKDDPIIPALIANNEQYLAIDEHPTAEVLSKMIYQYVKQQGFNVDQVVLWETASANACYRED

SEQ ID NO: 22571 - protein, 127 aa, unidentified
  source 1..127: note = Methylomusa anaerophila
  REGION 1..127: note = tr|A0A348APR4|A0A348APR4_9FIRM 6-carboxy-5,6,7,8-tetrahydropterin synthase OS=Methylomusa anaerophila OX=1930071 GN=queD PE=3 SV=1
MYELTIIAEFEAAHRLPEYPGKCCRLHGHNWKVEVTIAGTKLNKQGMVIDFREFKSAVGKVIDQLDHYYLNELEAFQEVYPTAENIAKYIYDKLNDHPSFTDASDLNVRCITVWESPRSAVKYCPGE

SEQ ID NO: 22572 - protein, 99 aa, Methylophaga aminisulfidivorans
  REGION 1..99: note = tr|F5SUN7|F5SUN7_9GAMM 6-pyruvoyl-tetrahydropterin synthase OS=Methylophaga aminisulfidivorans MP OX=1026882; GN = MAMP_02977 PE=4 SV=1
MHGHNWKLEVEVTAIDLNEHGMGMDFKTIKTATRELAKTLDHRYLNDIPPFDTINPTAENIARFFYQKLSDTLNNDIAKVSGVTLWETDRACVKYSEDN

SEQ ID NO: 22573 - protein, 126 aa, unidentified
  source 1..126: note = Methylophaga frappieri
  REGION 1..126: note = tr|I1YG07|I1YG07_METFJ 6-carboxy-5,6,7,8-tetrahydropterin synthase; OS = Methylophaga frappieri (strain ATCC BAA-2434 / DSM 25690 / JAM7) OX=754477 GN=Q7C_679 PE=3 SV=1
MSAFYTLKILADFASAHTLRDYPGDCRRMHGHNWKVEVEVVASALNQHGMGMDFKTIKTATRELAKTLDHRYLNDIPPFDEINPTAENIARYFFQQLSQTLNDDIARVSGVTLWETDRACVKYSED

SEQ ID NO: 22574 - protein, 102 aa, unidentified
  source 1..102: note = Methylophaga lonarensis
  REGION 1..102: note = tr|M7NYD0|M7NYD0_9GAMM Queuosine biosynthesis protein QueD OS=Methylophaga lonarensis MPL OX=1286106; GN = MPL1_02748 PE=4 SV=1
MHGHNWKLEVEVTATALNQHGMGMDFKTMKTATRELAKTLDHRYLNDIPPFDEINPTAENIARFFYQRLSSTLNTDTAKVSGVTVWETDRACVKYSEETPTP

SEQ ID NO: 22575 - protein, 126 aa, Methylophaga muralis
  REGION 1..126: note = tr|A0A1E3GSS1|A0A1E3GSS1_9GAMM 6-carboxy-5,6,7,8-tetrahydropterin synthase; OS = Methylophaga muralis OX=291169 GN=queD PE=3 SV=1
MSATYTLKILADFASAHTLRDYPGDCKRMHGHNWKLEVEVTANALNQHGMGMDFKAIKTATRELAKTLDHRYLNDIPPFDEINPTAENIAQFFYQRLSNTLNTDTAKVSGVTVWETDRACVKYSED

SEQ ID NO: 22576 - protein, 98 aa, unidentified
  source 1..98: note = Methylophaga nitratireducenticrescens
  REGION 1..98: note = tr|I1XHZ0|I1XHZ0_METNJ Queuosine biosynthesis QueD, PTPS-I OS=Methylophaga nitratireducenticrescens OX=754476; GN = Q7A_1171 PE=4 SV=1
MHGHNWKLEVEVTANTLNQHGMAMDFKTIKIATRELAKKLDHRYLNEIPPFDEINPTAENIAQFFYQHLSDTLNTDTARVSGVTVWETDRACVKYSED

SEQ ID NO: 22577 - protein, 126 aa, Methylophaga sp.
  REGION 1..126: note = tr|A0A1Y5EWU2|A0A1Y5EWU2_9GAMM 6-carboxy-5,6,7,8-tetrahydropterin synthase; OS = Methylophaga sp. 42_8_T64 OX=1856286 GN=A9Q92_03735; PE = 3 SV=1
MSATYTLKILADFASAHTLREYPGDCSRMHGHNWKLEVEVSATSLNDHGMGMDFKTIKTATRKLAKTLDHRYLNDIPPFDTINPTAENIAQYFYQNLSKTLNIDTAKISGVTLWETDRACVRYSED

SEQ ID NO: 22578 - protein, 126 aa, Methylophaga sp.
  REGION 1..126: note = tr|A0A2G2ESP5|A0A2G2ESP5_9GAMM 6-carboxy-5,6,7,8-tetrahydropterin synthase; OS = Methylophaga sp. OX=2024840 GN=queD PE=3 SV=1
MSATYTLKILADFASAHTLRDYPGDCRRMHGHNWKLEVEVTANALNQHGMGMDFKTIKTATRELAKTLDHRYLNDIPPFDEINPTAENIAQFFYQRLSDTLNNDTARVSGVTVWETDRACVKYSED

SEQ ID NO: 22579 - protein, 127 aa, Methylophaga sulfidovorans
  REGION 1..127: note = tr|A0A1I3V4I8|A0A1I3V4I8_9GAMM 6-carboxy-5,6,7,8-tetrahydropterin synthase; OS = Methylophaga sulfidovorans OX=45496; GN = SAMN04488079_102231 PE=3 SV=1
MSATYTLKILADFASAHTLRDYPGDCRRMHGHNWKLEVEVTAIDLNEHGMGMDFKTIKTATRELAKTLDHRYLNDIPPFDTINPTAENIARFFYQKLSDTLNNDIAKVSGVTLWETDRACVKYSEDN

SEQ ID NO: 22580 - protein, 98 aa, Methylophaga thiooxydans
  REGION 1..98: note = tr|C0N3T5|C0N3T5_9GAMM 6-pyruvoyl tetrahydropterin synthase superfamily OS=Methylophaga thiooxydans DMS010; OX = 637616 GN=MDMS009_889 PE=4 SV=1
MHGHNWKLEVEVTATALNEHGMGMDFKTIKTAARELAKTLDHRYLNDIPPFDTVNPTAENIAQYFYQKLSGTLNNETAKISGVTLWETDRACVKYSEE

SEQ ID NO: 22581 - protein, 98 aa, Methylophaga thiooxydans; identical to SEQ ID NO: 22580
  REGION 1..98: note = tr|A0A0A0BHB8|A0A0A0BHB8_9GAMM Queuosine biosynthesis QueD, PTPS-I OS=Methylophaga thiooxydans; OX = 392484 GN=LP43_1731 PE=4 SV=1

SEQ ID NO: 22582 - protein, 145 aa, unidentified
  source 1..145: note = Methylophilaceae bacterium
  REGION 1..145: note = tr|A0A356CTB5|A0A356CTB5_9PROT 6-carboxytetrahydropterin synthase QueD; OS = Methylophilaceae bacterium OX=2030816 GN=queD PE=4 SV=1
MDITTRLEFDTGHRIPNHKSNCKNLHGHRYAIEVTVTGPVHDDKKSSDFGMVIDFSDVKKIIKNLIVEPWDHAFIVYKEDKEIVNFLNTLPNHKTVIFPLVPTAENMASEAYRILNNEFNMRFDHQLKIKQIRIYETPNSWADAI

SEQ ID NO: 22583 - protein, 145 aa, unidentified
  source 1..145: note = Methylophilaceae bacterium
  REGION 1..145: note = tr|A0A4P5UA65|A0A4P5UA65_9PROT 6-carboxy-5,6,7,8-tetrahydropterin synthase; OS = Methylophilaceae bacterium OX=2030816 GN=LBMAG28_03430; PE = 3 SV=1
MDITTRLEFDAGHRIPNHKSNCKNLHGHRYAIEVTVTGPIHDDRKSSDFGMVIDFSDVKQIIKDLVVEPWDHAFIVYQDDKEVVNFLKTLPDHKTVIFPVVPTAENMASEAHRILNSEFNKRFDGQLKIKQIRMYETPNSWADAI

SEQ ID NO: 22584 - protein, 145 aa, unidentified
  source 1..145: note = Methylophilales bacterium
  REGION 1..145: note = tr|A0A0R2V8T9|A0A0R2V8T9_9PROT 6-carboxy-5,6,7,8-tetrahydropterin synthase; OS = Methylophilales bacterium BACL14 MAG-120920-bin58; OX = 1655631 GN=ABS29_03460 PE=4 SV=1
MEITTRMEFDAGHRIPNHKSTCRNLHGHRYAIEVTISGDIINQENESDFGMVMDFKDAKDVIKRLIVEPWDHAFIVFEKDLEVLDFLNSMKDHKTIVFPKVPTAENMALVAFDILSQAFLKEFKGLIKPINVRLYETPNNWADAS

SEQ ID NO: 22585 - protein, 132 aa, unidentified
  source 1..132: note = Methylophilales bacterium
  REGION 1..132: note = tr|A0A258SUA1|A0A258SUA1_9PROT 6-carboxytetrahydropterin synthase QueD OS=Methylophilales bacterium 16-45-9 OX=1970537 GN=B7Y34_02350 PE=4 SV=1
MPNHKSQCRNLHGHRYVLEITLSGDIITQENASENGMVMDFSDVKSIAKESVVNVWDHAFLVYQHDTEVLNFLNTLPDHKTVVFPTVPTAENMALEAFKILKSKYHDSYGNHLKLEKVRLYETPNSWADALG

SEQ ID NO: 22586 - protein, 148 aa, unidentified
  source 1..148: note = Methylophilus medardicus
  REGION 1..148: note = tr|A0A5B8CS37|A0A5B8CS37_9PROT 6-carboxy-5,6,7,8-tetrahydropterin synthase; OS = Methylophilus medardicus OX=2588534 GN=queD PE=3 SV=1
MEITTRLEFDAGHRIPDHKSQCRNLHGHRYALEITLSGEIIDAEHASENGMVMDFADVKRIARETIVDRWDHAFLVYRGDTVVLDFLNSLPSHKTVIFPSVPTAENMAAEAFKLLKAQYQDTFGNQLKLVKVRLYETPNSWTDAFDLI

SEQ ID NO: 22587 - protein, 148 aa, Methylophilus rhizosphaerae
  REGION 1..148: note = tr|A0A1G9ATR6|A0A1G9ATR6_9PROT 6-pyruvoyltetrahydropterin/6-carboxytetrahydropterin synthase OS=Methylophilus rhizosphaerae OX=492660; GN = SAMN05192566_0808 PE=4 SV=1
MEITTRLEFDAGHRIPDHKSQCRNLHGHRYAIEITLSGDIIQAEHASDNGMVMDFADVKRIARETIVDRWDHAFLVYQGDTAVLDFLNSLPNHKTVVFPTIPTAENMAAEAFKLLKARYQGTFDNHLRLVKVRLYETPNSWTDAFNHA

SEQ ID NO: 22588 - protein, 152 aa, Methylophilus sp.
  REGION 1..152: note = tr|A0A3D5D024|A0A3D5D024_9PROT 6-carboxytetrahydropterin synthase QueD OS=Methylophilus sp. OX=29541 GN=queD PE=4 SV=1
  VARIANT 139: note = Xaa can be any naturally occurring amino acid
MEITTRLEFDAGHRIPDHKSQCRNLHGHRYAIEITLSGDIIHAEHASENGMVMDFADVKRIARETIVDRWDHAFLVYQGDATVLDFLNSLPNHKTIVFPTIPTAENMAAEAFRLLKAQYRDTFGNHLKLMKVRLYETPXRQGHTKRLLKLGG

SEQ ID NO: 22589 - protein, 148 aa, Methylophilus sp.
  REGION 1..148: note = tr|A0A0Q6BM51|A0A0Q6BM51_9PROT 6-carboxy-5,6,7,8-tetrahydropterin synthase; OS = Methylophilus sp. Leaf416 OX=1736373 GN=ASG34_00240; PE = 4 SV=1
MEITTRLEFDAGHRIPDHKSQCRNLHGHRYAIEITLSGDIIQAEHASENGMVMDFADVKRIARETIVDRWDHAFLVYQGDTAVIDFLNSLPNHKTVIFPTIPTAENMAAEAFKLLKAQYHGTFDNHLKLMKVRLYETPNSWTDAFDQA

SEQ ID NO: 22590 - protein, 133 aa, Methylopila sp.
  REGION 1..133: note = tr|A0A2H6BGA7|A0A2H6BGA7_9RHIZ Uncharacterized protein OS=Methylopila sp. Yamaguchi OX=1437817; GN = METY_2415 PE=4 SV=1
MYAVEVRDHIMIAHSLKGETFGPAQALHGATFVVDVAFFREELDADDIVVDIGRATDALKAALAPINYANLDEALPGKRTTTEFLAKHIFDAMAEAARTGALGPNAAGLTKIRVTLNESHVARAWYEGPLGHG

SEQ ID NO: 22591 - protein, 118 aa, Methylopila sp.
  REGION 1..118: note = tr|A0A2H6BFW2|A0A2H6BFW2_9RHIZ 6-carboxy-5,6,7,8-tetrahydropterin synthase OS=Methylopila sp. Yamaguchi OX=1437817 GN=METY_2300 PE=3 SV=1
MRIVQAFTFEAAHRLPNVAPTHRCHRMHGHSYRVELALEGPIDPVTGFVVDFFDVEAAFGPVLKRLDHHTLNEIEGLENPTAELIALWIWDKVKPDLPQLAQVKVFETPFCWAEHDGA

SEQ ID NO: 22592 - protein, 117 aa, unidentified
  source 1..117: note = Methyloprofundus sedimenti
  REGION 1..117: note = tr|A0A1V8M8M0|A0A1V8M8M0_9GAMM 6-carboxy-5,6,7,8-tetrahydropterin synthase; OS = Methyloprofundus sedimenti OX=1420851 GN=AU255_08350; PE = 3 SV=1
MYTISKQFNFSASHIIEGLPEQHPCSRLHGHNYVVELVLAAEELNATGFVVDYNDLAVFKTMIDETLDHRHLNDVLTGPTTAESIAKYLYDHAKHIWHEVISVSVSETPKTNATYRP

SEQ ID NO: 22593 - protein, 118 aa, unidentified
  source 1..118: note = Methylorubrum extorquens
  REGION 1..118: note = tr|H1KQE1|H1KQE1_METEX 6-carboxy-5,6,7,8-tetrahydropterin synthase; OS = Methylorubrum extorquens DSM 13060 OX=882800; GN = MetexDRAFT_4854 PE=3 SV=1
MKITQAFTFEAAHRLPNVPQTHRCHRMHGHSYRVELTVSGAVDPTSGWVVDFYDIESAFAPLLERLDHHCLNEIEGLENPTAEHIAAWIWHRAKPAIPGLSSVRIFETPYSWAEYEGD

SEQ ID NO: 22594 - protein, 118 aa, unidentified; identical to SEQ ID NO: 22593
  source 1..118: note = Methylorubrum extorquens
  REGION 1..118: note = tr|A0A1S1P5U8|A0A1S1P5U8_METEX 6-carboxy-5,6,7,8-tetrahydropterin synthase; OS = Methylorubrum extorquens OX=408 GN=ptpS PE=3 SV=1

SEQ ID NO: 22595 - protein, 118 aa, unidentified
  source 1..118: note = Methylorubrum populi
  REGION 1..118: note = tr|B1ZBZ1|B1ZBZ1_METPB 6-carboxy-5,6,7,8-tetrahydropterin synthase; OS = Methylorubrum populi (strain ATCC BAA-705 / NCIMB 13946 / BJ001) OX=441620 GN=Mpop_1162 PE=3 SV =1
MKITQAFTFEAAHRLPNVPETHRCHRMHGHSYRVELTVAGAVDPTTGWVVDFYDIESAFAPLLERLDHHCLNEIEGLENPTAEHIAAWIWHRAKPAIPGLASVRIFETPYSWAEYEGT

SEQ ID NO: 22596 - protein, 118 aa, unidentified
  source 1..118: note = Methylorubrum populi
  REGION 1..118: note = tr|A0A514KK82|A0A514KK82_9RHIZ 6-carboxy-5,6,7,8-tetrahydropterin synthase; OS = Methylorubrum populi OX=223967 GN=queD PE=3 SV=1
MKITQAFTFEAAHRLPNVPETHRCHRMHGHSYRVELTVAGAVDPTTGWVVDFYDIESAFAPLLERLDHHCLNEIEGLENPTAEHIAAWIWHRAKPAIPGLASVRIFETPYSWAEYEGA

SEQ ID NO: 22597 - protein, 118 aa, unidentified
  source 1..118: note = Methylorubrum salsuginis
  REGION 1..118: note = tr|A0A1I3ZVD5|A0A1I3ZVD5_9RHIZ 6-carboxy-5,6,7,8-tetrahydropterin synthase; OS = Methylorubrum salsuginis OX=414703; GN = SAMN04488125_10293 PE=3 SV=1
MKITQAFTFEAAHRLPNVPVTHRCHRMHGHSYRVELTVSGEIDATTGWVVDFYDIESAFAPLLERLDHHCLNEIEGLENPTAEHIAAWIWHRAKPSIPGLSSVRVFETPLSWAEYEGT

SEQ ID NO: 22598 - protein, 118 aa, unidentified
  source 1..118: note = Methylorubrum sp.
  REGION 1..118: note = tr|A0A4Z0E6Y0|A0A4Z0E6Y0_9RHIZ 6-carboxy-5,6,7,8-tetrahydropterin synthase; OS = Methylorubrum sp. Q1 OX=2562453 GN=queD PE=3 SV=1
MKITQAFTFEAAHRLPNVPQTHRCHRMHGHSYRVELTVAGAVDPTSGWVVDFYDIESAFAPLLERLDHHCLNEIEGLENPTAEHIAAWIWHRAKPAIPGLSSVRIFETPYSWAEYEGD

SEQ ID NO: 22599 - protein, 118 aa, unidentified; identical to SEQ ID NO: 22593
  source 1..118: note = Methylorubrum zatmanii
  REGION 1..118: note = tr|A0A1W6RJG5|A0A1W6RJG5_9RHIZ 6-carboxy-5,6,7,8-tetrahydropterin synthase; OS = Methylorubrum zatmanii OX=29429 GN=B2G69_13400 PE=3 SV=1

SEQ ID NO: 22600 - protein, 132 aa, Methylosinus sp.
  REGION 1..132: note = tr|A0A177PJD5|A0A177PJD5_9RHIZ 6-pyruvoyl tetrahydropterin synthase OS=Methylosinus sp. R-45379; OX = 980563 GN=A1351_08865 PE=4 SV=1
MYAVEVRDHIMIAHSFKGELFGPAQRMHGATFVVDVAFFRETLTVDEVVVDIGRAHDALKATLAPLNYQNLDEIEQFKGRQTTTEFLSRHIFDAMAAAARTGALGPGGEGISRIRVTLHESHVARAWFEGAV

SEQ ID NO: 22601 - protein, 125 aa, Methylosinus sp.
  REGION 1..125: note = tr|A0A1A6FI49|A0A1A6FI49_9RHIZ 6-carboxy-5,6,7,8-tetrahydropterin synthase; OS = Methylosinus sp. 3S-1 OX=1849840 GN=A8B73_21430 PE=3; SV = 1
MTLEFEVYREFCFEAAHALCDPEHPTGGIYRNLHGHSFRVRVTLRGPRVEGEDWVMDLGKLGRRLALLRETLDHSFLNELDGLGKPTLENLCVFIWRDLEADLPAIFEVGVFRDTCNEGCVLRKR

SEQ ID NO: 22602 - protein, 125 aa, Methylosinus sporium
  REGION 1..125: note = tr|A0A549SDC6|A0A549SDC6_METSR 6-carboxy-5,6,7,8-tetrahydropterin synthase; OS = Methylosinus sporium OX=428 GN=FM996_19925 PE=3 SV=1
MTVLFEVYREFCFEAAHALYDPDHPTGGKYRNLHGHSFRVRVTLRGPRQDGDEWVMDLGKLGARLQQLRERLDHSFLNELEGLGKPTLENLCVYIWKDLEPSLPAIHEVGIFRDTCNEGCVLKKP

SEQ ID NO: 22603 - protein, 132 aa, Methylosinus sporium
  REGION 1..132: note = tr|A0A2U1ST17|A0A2U1ST17_METSR Uncharacterized protein OS=Methylosinus sporium OX=428 GN=C5689_06780 PE=4; SV = 1
MYAVEVRDHIMIAHSFKGELFGPAQRLHGATFVVDVAFFRETLTADEVVVDIGRAHDALKATLAPLNYRNLDEIEQFEGRQTTTEFLSRHIFDAMAAAARSGALGPGGEGISRIRVTLHESHVARAWFEGPV

SEQ ID NO: 22604 - protein, 134 aa, Methylosinus trichosporium
  REGION 1..134: note = tr|A0A2D2D6P8|A0A2D2D6P8_METTR 6-carboxytetrahydropterin synthase OS=Methylosinus trichosporium OB3b OX=595536 GN=CQW49_22175 PE=4 SV=1
MYAVEVRDHIMIAHSFRGELFGPAQRLHGATFVVDVAFFREQLTEDNVVVDIGRAHDALKAILAPLAYRNLDEVETFEGVQTTTEFLSRHIFDALAQAARAGALGPGGEGVSRIRVTLHESHVARAWFEGPVAG

SEQ ID NO: 22605 - protein, 125 aa, Methylosinus trichosporium; identical to SEQ ID NO: 22601
  REGION 1..125: note = tr|A0A2D2D3E2|A0A2D2D3E2_METTR 6-carboxy-5,6,7,8-tetrahydropterin synthase; OS = Methylosinus trichosporium OB3b OX=595536; GN = CQW49_17765 PE=3 SV=1

SEQ ID NO: 22606 - protein, 146 aa, Methylotenera mobilis
  REGION 1..146: note = tr|C6WWG7|C6WWG7_METML Uncharacterized protein; OS = Methylotenera mobilis (strain JLW8 / ATCC BAA-1282 / DSM 17540) OX=583345 GN=Mmol_1360 PE=4 SV=1
MHITTRLEFDAGHRIPHHKSQCKNLHGHRYAIEITLSGDIITAENSSDNGMVMDFSDVKTIAKEAVVNVWDHAFLVYEHDTDVLNFLNTLPNHKTVVFPTVPTAENMAAEAFRILKARYQDTYGNHLKLEKVRLYETPNSWADALG

SEQ ID NO: 22607 - protein, 146 aa, Methylotenera mobilis
  REGION 1..146: note = tr|A0A351R927|A0A351R927_9PROT 6-carboxytetrahydropterin synthase QueD OS=Methylotenera mobilis OX=359408 GN=queD PE=4 SV=1
MHITTRLEFDAGHRIPNHKSQCKNLHGHRYAIEITLSGDIITAENTSDNGMVMDFSDVKAIAKDAVVNVWDHAFLVYQHDTEVLNFLNTLKNHKTVVFPTVPTAENMAAEAFRILKARYQDTYGNHLKLEKVRLYETPNSWADALG

SEQ ID NO: 22608 - protein, 146 aa, Methylotenera sp.
  REGION 1..146: note = tr|A0A2S5LXW2|A0A2S5LXW2_9PROT 6-carboxy-5,6,7,8-tetrahydropterin synthase; OS = Methylotenera sp. OX=2051956 GN=queD PE=3 SV=1
MQITTRLEFDAGHRIPHHKSQCKNLHGHRYAMEITLSGDIISQENVSENGMVMDFSDVKAIAKMAIVDVWDHAFLVYQHDLEVLSFLNSLPDHKTVVFPTVPTAENMASEAFRILKSRYQDTYGNHLKLEKVRLYETPNNWADALQ

SEQ ID NO: 22609 - protein, 146 aa, Methylotenera sp.; identical to SEQ ID NO: 22607
  REGION 1..146: note = tr|A0A2S5LY83|A0A2S5LY83_9PROT 6-carboxytetrahydropterin synthase QueD OS=Methylotenera sp. OX=2051956 GN=queD PE=4 SV=1

SEQ ID NO: 22610 - protein, 146 aa, Methylotenera versatilis
  REGION 1..146: note = tr|D7DIL3|D7DIL3_METV0 6-carboxy-5,6,7,8-tetrahydropterin synthase; OS = Methylotenera versatilis (strain 301) OX=666681; GN = M301_1518 PE=3 SV=1
MQITTRLEFDAGHRIPSHKSQCKNLHGHRYAIEITLSGDIITLENASENGMVMDFSDVKAIAKRAVVDVWDHAFLVYQHDAEILDFLNSLPDHKTVVFPTVPTAENMAAEAFKILKNQYQDTYGNHLKLEKVRLYETPNNWADALS

SEQ ID NO: 22611 - protein, 135 aa, unidentified
  source 1..135: note = Methylothermaceae bacteria
  REGION 1..135: note = tr|A0A148N768|A0A148N768_9GAMM 6-carboxy-5,6,7,8-tetrahydropterin synthase; OS = Methylothermaceae bacteria B42 OX=1798802; GN = AXA67_10935 PE=3 SV=1
MGHYAVTKEVRFCYGHRLMNHPGKCKHLHGHSVRAAVTVATESLNDQGMVCDFADLKIAIASFVRQHLDHNLLLHESDPLVPLLREASERFLTLSQHPTAEVLAKLIYDHVKGKGYNVTEVILWETDSSYASYRE

SEQ ID NO: 22612 - protein, 363 aa, Methyloversatilis sp.
  REGION 1..363: note = tr|A0A1B3LMS2|A0A1B3LMS2_9PROT Queuosine biosynthesis protein QueD OS=Methyloversatilis sp. RAC08; OX = 1842540 GN=queD PE=4 SV=1
MNDTLLHVAAADFEAARRLDHLPTAHRAHALHGHSFTGCVRAALPEGWGGVAGGEVDALAARLRTVLAPLDYRLLNDTVTRPGDEDLARWLRGQLDLPDAYAVGVRSTSQAGVQLDRHGDAHVWRRYVFQSAHQLPRVAPGHKCGRMHGHGFEVLLHAKPAPDAAVDPERIDAVWAPLHAQLHLACLNDIAGLDNPTSENIAAWIWHQLKPALPGLRWVTVYETASCGAQFDGRQHRVWKEFTLDSAVRLKRAPDGDPRRRIHGHTFTLRLHLAAPLDPIMGWTVDFGDVKAQFAPLFDRLDHAPLHELMEGGGSDADTASLARRIMTLATPLIPSLERLDLYETRGCGIILQRGGSEPALPV

SEQ ID NO: 22613 - protein, 121 aa, Methyloversatilis sp.
  REGION 1..121: note = tr|A0A1B3LQM1|A0A1B3LQM1_9PROT 6-carboxy-5,6,7,8-tetrahydropterin synthase; OS = Methyloversatilis sp. RAC08 OX=1842540 GN=BSY238_1605; PE = 3 SV=1
MVVELSQRFYFEAAHTLRRKVDADSSLRIHGHTYHAEVMLRGEPDPVSGMLVDLALLRAALAGVRDALDHRFLDEVAGLGPATLENLCQFIWRALAPQLPQLARVTVERQASGDKCALCAA

SEQ ID NO: 22614 - protein, 121 aa, Methyloversatilis universalis
  REGION 1..121: note = tr|F5RFC0|F5RFC0_METUF 6-carboxy-5,6,7,8-tetrahydropterin synthase; OS = Methyloversatilis universalis (strain ATCC BAA-1314 / JCM 13912 / FAM5) OX=1000565 GN=METUNv1_0 3046 PE=3 SV=1
MVVELSQRFFFEAAHTLRRKVETESSLRIHGHTYHAEVSLRGEPDPASGMLMDLAVFRAALAEVRAKLDHRFLDEVEGIGPATLENLCHYLWRELAPQLPQLARVTVERQASGDKCTLSAC

SEQ ID NO: 22615 - protein, 118 aa, Methylovirgula ligni
  REGION 1..118: note = tr|A0A3D9Z5Q4|A0A3D9Z5Q4_9RHIZ 6-carboxy-5,6,7,8-tetrahydropterin synthase; OS = Methylovirgula ligni OX=569860 GN=DES32_2553 PE=3 SV=1
MKITQAFTFEAAHFLPKVAPSHRCRNLHGHSYRVELRLEGPVDSGTGFVIDFFDIEKAFAPLHAQLDHHCLNEIAGLENPTAENIAVWIYEKIRPALPQLAAVTVFETRDCYAEYEGR

SEQ ID NO: 22616 - protein, 132 aa, Methylovirgula sp.
  REGION 1..132: note = tr|A0A371WQZ8|A0A371WQZ8_9RHIZ 6-carboxytetrahydropterin synthase OS=Methylovirgula sp. 4M-Z18 OX=2293567 GN=DYH55_12215 PE=4 SV=1
MFAVEVRDHIMIAHSFKGDLFGPAQNLHGATFVVDVAFFRETLTVDNVVVDIGRAHEALKKTLAPLNYQNLDTLPQFAGQLTTTEFLCKHIFDTMAAAARNGALGPGGEGISRIKVSLHESHVARAWYEGAL

SEQ ID NO: 22617 - protein, 118 aa, Methylovirgula sp.
  REGION 1..118: note = tr|A0A371WTS0|A0A371WTS0_9RHIZ 6-carboxy-5,6,7,8-tetrahydropterin synthase; OS = Methylovirgula sp. 4M-Z18 OX=2293567 GN=queD PE=3 SV=1
MKITQGFTFEAAHQLPKVPQTHRCYRMHGHSYRVEVCLEGPVDPETGFVVDFFEVEAAFDPLLRRLDHYCLNDIAGLENPTAENIAVWIWERTKPLLPLLQKITVYETPHSWAEYQGV

SEQ ID NO: 22618 - protein, 146 aa, unidentified
  source 1..146: note = Methylovorus glucosetrophus
  REGION 1..146: note = tr|C6XDR3|C6XDR3_METGS 6-carboxy-5,6,7,8-tetrahydropterin synthase; OS = Methylovorus glucosetrophus (strain SIP3-4) OX=582744; GN = Msip34_1443 PE=3 SV=1
MQITTRLEFDAGHRIPCHKSQCRNLHGHRYAMEITLSGDIIQQDGSSDNGMVMDFSDVKAIARESVVDVWDHAFLVYKGDADVLNFLNSLPNHKTVVMESVPTAENMAAEAFRILNSRYQDVYGNHLKLERVRLYETPNSWADALA

SEQ ID NO: 22619 - protein, 146 aa, Methylovorus sp.
  REGION 1..146: note = tr|A0A1A9T4K8|A0A1A9T4K8_9PROT 6-carboxytetrahydropterin synthase QueD OS=Methylovorus sp. MM2 OX=1848038 GN=A7981_05865 PE=4 SV=1
MQITTRLEFDAGHRIPCHKSQCRNLHGHRYAIEITLSGDIIQKEDASENGMVMDFSDVKSIARQAVVDVWDHAFLVYKDDKEVLTFLNSLPDHKTVVMNSVPTAENMAAEAFKILNSYYQDTYGNHLKLERVRLYETPNSWADALA

SEQ ID NO: 22620 - protein, 134 aa, unidentified
  source 1..134: note = Methylovulum psychrotolerans
  REGION 1..134: note = tr|A0A2S5CT18|A0A2S5CT18_9GAMM 6-carboxy-5,6,7,8-tetrahydropterin synthase; OS = Methylovulum psychrotolerans OX=1704499; GN = AADEFJLK_01013 PE=3 SV=1
MFTITKEVYFCYGHRLMNHAGKCRHLHGHSVKASISIQQEQLNADGMVCDFADIRACVESYVDEYLDHNFLLHKNDPIIPMLTAQNERFMALDEHPTAEVLSKMLYHHIKQAGFNVAQVTLWETASAYASYRED

SEQ ID NO: 22621 - protein, 134 aa, unidentified
  source 1..134: note = Methylovulum psychrotolerans
  REGION 1..134: note = tr|A0A1Z4BUQ8|A0A1Z4BUQ8_9GAMM 6-carboxy-5,6,7,8-tetrahydropterin synthase; OS = Methylovulum psychrotolerans OX=1704499 GN=CEK71_02020; PE = 3 SV=1
MFTITKEVYFCYGHRLMNHAGKCRHLHGHSVKASISIQQEQLNADGMVCDFADIRACVESYVDEYLDHNFLLHKNDPIIPMLTAQNERFMALDEHPTAEVLSKMLYRHIKQAGFNVAQVTLWETASAYASYRED

SEQ ID NO: 22622 - protein, 134 aa, Methylovulum sp.
  REGION 1..134: note = tr|A0A522E5A1|A0A522E5A1_9GAMM 6-carboxy-5,6,7,8-tetrahydropterin synthase; OS = Methylovulum sp. OX=1916980 GN=EPN89_05885 PE=3 SV=1
MFTITKEVYFCYGHRLMNHAGKCRNLHGHSVKASISIQQEQLNDQGMVCDFADIKDCVEAYIDRYLDHNFLLHKDDPIIPVLIEGNEQFLALDEHPTAEVLSKMIYRHLQQSGFNVAQVALWETASAYACYSED

SEQ ID NO: 22623 - protein, 118 aa, Micavibrio sp.
  REGION 1..118: note = tr|A0A1Z8KQX0|A0A1Z8KQX0_9PROT 6-carboxy-5,6,7,8-tetrahydropterin synthase OS=Micavibrio sp. TMED2 OX=1986633 GN=CBB62_11840 PE=3 SV=1
MYRIWKEFHFSASHQLTGVPEGHPCARLHGHNYVVEVELQSETLDSAGFVRDYLELGAFKAYVDDTLDHRHLNEVLGDHMVTAEQLARHFYDWCHARWPEVCAVRVKETPKTTAEYRP

SEQ ID NO: 22624 - protein, 121 aa, Micavibrio sp.
  REGION 1..121: note = tr|A0A2D5Y333|A0A2D5Y333_9PROT 6-carboxy-5,6,7,8-tetrahydropterin synthase OS=Micavibrio sp. OX=2024841 GN=CMH27_05920 PE=3 SV=1
MYIIKKEFSFSASHLIHGLPDTHPCSRLHGHNYRVEVVLGSDTLDSVGFVRDYRELGAFKDYLDQNLDHRHLNDVLGDENVTAERMAKLFYDWCRSRWPEVCAVRVSETPKTWAEYRAEHE

SEQ ID NO: 22625 - protein, 131 aa, unidentified
  source 1..131: note = Microbacteriaceae bacterium
  REGION 1..131: note = tr|A0A522P048|A0A522P048_9MICO 6-carboxytetrahydropterin synthase OS=Microbacteriaceae bacterium OX=1873462 GN=EPN48_07035 PE=4 SV=1
MPFSTTVRDHMMIAHSFAGETFGPAQRLHGATFIVDATFGADELDEDGVVVDIGRAAAALSEITGSLNYRNLDDEPDFVGMNTTTERLCQVIADRLAARVEDGSLGGKRLTSVTVTLHESHIAWASFSRPL

SEQ ID NO: 22626 - protein, 131 aa, Microbacterium azadirachtae
  REGION 1..131: note = tr|A0A0F0LEP9|A0A0F0LEP9_9MICO 6-pyruvoyl tetrahydropterin synthase OS=Microbacterium azadirachtae; OX = 582680 GN=RS86_02947 PE=4 SV=1
MTFAVTVRDHLMIAHSLRGEVFGPAQRLHGATYVVDASFRAAALDPHGIVVDIGRASEALREIVGALSYRNLDDEPDLEGVNTTTERLCQIIGDRLAERVRDGGLGDARLTGIAVTLHESHIAWASYEVTM

SEQ ID NO: 22627 - protein, 129 aa, Microbacterium chocolatum
  REGION 1..129: note = tr|A0A0M9VM27|A0A0M9VM27_9MICO 6-pyruvoyl tetrahydrobiopterin synthase OS=Microbacterium chocolatum; OX = 84292 GN=XI38_02995 PE=4 SV=1
MFGLTVRDHVMIAHSLPDEFFGPAQGLHGATLVVEATWRSPRLDDHAVVIDIGEASRHLSEVLDPLRYANLDEHPAFAGTLSTTEAVAAHIARALAERLDPAAGITGIGIVVREHPDAWVTYDLDVAGR

SEQ ID NO: 22628 - protein, 131 aa, unidentified
  source 1..131: note = Microbacterium kyungheense
  REGION 1..131: note = tr|A0A543EDY4|A0A543EDY4_9MICO 6-pyruvoyl-tetrahydropterin synthase OS=Microbacterium kyungheense OX=1263636 GN=FB391_3642 PE=4 SV=1
MTFTVTVRDHLMIAHSLRGKFFGPAQRLHGATYVVDAAFRADVLDEHGVVVDIGKASDEVRAIVGALSYRNLDDEPDLQGVNTTTERLCQVIGDRLAARVRDGAFGAAALTGIAVTLHESHIAWASYEVAL

SEQ ID NO: 22629 - protein, 145 aa, unidentified
  source 1..145: note = Microbacterium mangrovi
  REGION 1..145: note = tr|A0A0B2A290|A0A0B2A290_9MICO 6-pyruvoyl tetrahydropterin synthase OS=Microbacterium mangrovi; OX = 1348253 GN=LK09_18600 PE=4 SV=1
MTDPRPSRFSVTVRDHLMVAHSLRGEVFGPAQRLHGATFVVDAAFRADDLDADGLVVDIGRASGVLAGIVAALSYRNLDDEPGLQGVNTTTERLCQIIGDRLADAVRAGDLGDAALTGIGVTLHESHVAWASYEVVLPAADGGSR

SEQ ID NO: 22630 - protein, 131 aa, Microbacterium sp.
  REGION 1..131: note = tr|A0A2S8ZMS3|A0A2S8ZMS3_9MICO Uncharacterized protein OS=Microbacterium sp. MYb64 OX=1848691; GN = CQ044_15220 PE=4 SV=1
MTFAVTVRDHLMIAHSLRGEVFGPAQRLHGATYVVDASFRAAALDPNGIVVDIGRASDALREIVGALSYRNLDDEPDLEGVNTTTERLCQIIGDRLAERVRDGGLGDARLTGIAVTLHESHIAWASYEVTM

SEQ ID NO: 22631 - protein, 129 aa, Microbacterium sp.; identical to SEQ ID NO: 22627
  REGION 1..129: note = tr|A0A1E4BKY8|A0A1E4BKY8_9MICO 6-pyruvoyl tetrahydrobiopterin synthase OS=Microbacterium sp. SCN 70-18 OX=1660112 GN=ABS61_10155 PE=4 SV=1

SEQ ID NO: 22632 - protein, 131 aa, Microbacterium trichothecenolyticum
  REGION 1..131: note = tr|A0A0M2H5K0|A0A0M2H5K0_9MICO 6-pyruvoyl tetrahydropterin synthase OS=Microbacterium trichothecenolyticum OX=69370 GN=RS82_02841 PE=4 SV=1
MSFSVTVRDHIMIAHSLRGDVFGPAQQLHGATFLVDATFRADELDGHGVVVDIGRASEVLRDIASALTYRNLDEEPDLQGMNTTTERLCQIIGDRLAARVKDGGVGEANLSGIVVTLHESHVAWASYEVTL

SEQ ID NO: 22633 - protein, 131 aa, Microbacterium trichothecenolyticum
  REGION 1..131: note = tr|A0A3D9U4J1|A0A3D9U4J1_9MICO 6-pyruvoyl-tetrahydropterin synthase OS=Microbacterium trichothecenolyticum OX=69370 GN=C7321_3647 PE=4 SV=1
MSFSVTVRDHLMIAHSLRGDVFGPAQQLHGATFLVDATFRADELDEHGVVVDIGRASDVLREIVGALTYRNLDDEPDLQGVNTTTERLCQIIGDRLATRVRDGDVGEAHLSGIVVTLHESHVAWASYEVAL

SEQ ID NO: 22634 - protein, 81 aa, Microbispora rosea
  REGION 1..81: note = tr|A0A1N7HHP2|A0A1N7HHP2_9ACTN 6-pyruvoyltetrahydropterin/6-carboxytetrahydropterin synthase OS=Microbispora rosea OX=58117; GN = SAMN05421833_15110 PE=4 SV=1
MQGDVDSATGWVMDFAEIKAAFKPVLDQLDHYYLNEVPGLENPTSEVLARWVWDRLSGELPLSAIHVRETCTSGCIYRGEN

SEQ ID NO: 22635 - protein, 118 aa, unidentified
  source 1..118: note = Microbispora triticiradicis
  REGION 1..118: note = tr|A0A372PCF8|A0A372PCF8_9ACTN 6-carboxy-5,6,7,8-tetrahydropterin synthase; OS = Microbispora triticiradicis OX=2200763 GN=queD PE=3 SV=1
MEIFREFTFEAAHRLPNVPAGHKCARLHGHSYRIQVHLQGTVDPHAGWLMDFGDIKAAFRPIKEQLDHYYLNDIPGLENPTSEVLAKWIWDRLADQLPLTAIQVMETCTSGCIYRGEG

SEQ ID NO: 22636 - protein, 136 aa, unidentified
  source 1..136: note = Microbispora triticiradicis
  REGION 1..136: note = tr|A0A372PC69|A0A372PC69_9ACTN 6-carboxy-5,6,7,8-tetrahydropterin synthase; OS = Microbispora triticiradicis OX=2200763 GN=DI270_014755; PE = 3 SV=1
MDFSSVSLPPGKHTIGKLFDFEAGHRLPSLAPEHKCSRQHGHSYEVEVILTAAALESPGFVTDFGDLAPFRRFLDTELDHHNLHEIMPVEPTSEHLAQFLAGWFIQNVEPGIPGRLVAVQVRETEHSWARFDVEER

SEQ ID NO: 22637 - protein, 165 aa, Microbulbifer agarilyticus
  REGION 1..165: note = tr|A0A1Q2M214|A0A1Q2M214_9GAMM Uncharacterized protein OS=Microbulbifer agarilyticus OX=260552; GN = Mag101_00360 PE=4 SV=1
MAYKITKTFKLDMGHRTWSQDMRKGRGKEFYTDDMPYPYNKCANLHGHSLLVSVTLTSDTVDQQNFVMDTDLFKAPFQKIIDQMDHSFIIDKHDPLFPDIKNIVEKDNLRLYVVDFSPSFEGLSKYFFECMCEIIGRTEHAEDIEVSEVTVTGEHMAVEARYNAA

SEQ ID NO: 22638 - protein, 284 aa, Microbulbifer agarilyticus
  REGION 1..284: note = tr|A0A1Q2M7Q7|A0A1Q2M7Q7_9GAMM Uncharacterized protein OS=Microbulbifer agarilyticus OX=260552; GN = Mag101_12295 PE=4 SV=1
MHLFVDSLTNVDFSYLHHTRGVVGETWLANAALDGALDHQGMVCDFGIVKKTLRNWLDHELDHRLLVPTRSPHLTMQQDGDQIQLTWALPDGEHITVGGPAQAFALVAVESITPKSVAAWCVNELDGIFPTSVDKLSLSFSVESIDSPFYHYSHGLKKHDGNCQRIAHGHRSRIRIDIDSERSPALESQWAERWADIYLGTREDLTGEDTQGQTTQLHFAYKAQQGEFTLTIPASRCEILDCDTTVEQLAQYIADVLAAENAGKQITVRAYEGIGKGAVAFAGR

SEQ ID NO: 22639 - protein, 281 aa, unidentified
  source 1..281: note = Microbulbifer aggregans
  REGION 1..281: note = tr|A0A1C9W8C4|A0A1C9W8C4_9GAMM 6-pyruvoyl tetrahydropterin synthase OS=Microbulbifer aggregans; OX = 1769779 GN=AUP74_01977 PE=4 SV=1
MHLFVDNLTNVDFSYLDHARGLVGETWLASAALDGALDDQGMVCDFGIVKKTLRNWLDDEVDHRLLVPVQSPHLELQRSGDTLALTWKLKDGGEITVGGPEQAFALVEAEEIFEESAAAWCVTQLSGAFPGSVAKLQLKFCSEHIDDPYYHYSHGLKKHDGNCQRIAHGHRSRIQIFVDGTRDPEWEERWAERWRDIYLGTREDLHGSEGGDQLGFAYTARQGKFTLTLPASRCELVTCDTTVEQLAQYIAETIAEEEKGRIVRVRAYEGLGKGAEASASR

SEQ ID NO: 22640 - protein, 281 aa, Microbulbifer donghaiensis
  REGION 1..281: note = tr|A0A1M5G047|A0A1M5G047_9GAMM 6-pyruvoyl tetrahydropterin synthase OS=Microbulbifer donghaiensis; OX = 494016 GN=SAMN04487965_3033 PE=4 SV=1
MHLFVDNLTNVDFSYLDHRRGVVGETWLANAALDGALDSQGMVCDFGVVKKTLRHWLDDQLDHRLLVPTRSPHLTLKQDGEQTALTWQLDDDEVISIAGPEQAFALVEAELISADSVARWSVQQLASAFPTSVERLSLSFTSEEIADPYYHYSHGLKKHDGNCQRIAHGHRSRIQIFLDGERSPEWERNWAERWRDIYLGTREDLLDESDGNTLRFAYRAQQGQFSLGIPAQRCELVDCDTTVEQLAQYIATTIATELPNTEVQVRAYEGIGKGAVAKAKG

SEQ ID NO: 22641 - protein, 281 aa, Microbulbifer marinus
  REGION 1..281: note = tr|A0A1H4A3S7|A0A1H4A3S7_9GAMM 6-pyruvoyl-tetrahydropterin synthase OS=Microbulbifer marinus OX=658218 GN=SAMN05216562_2510 PE=4 SV=1
MHLFVDNLTNVDFSYLDYRRGLVGETWLANAALDGALDSQGMVCDFGVVKKTLRHWLDDQLDHRLLVPTRSPHLKLERNPQGVGITWQVQSGEVIAVSGPEQAFAFVEAESVTADSVAAWSVQQLASAFPTSVEQLQLSFTCEEIASPYYHYSHGLKKHEGNCQRIAHGHRSRIQIFLDGERSGEWESNWADRWRDIYLGTREDLQVESDEQTLHFAYQAQQGRFTLAIPANHCELVDCDTTVEQLAQYIAETISAERPGTEVRVRAYEGIGKGAVASAKS

SEQ ID NO: 22642 - protein, 286 aa, Microbulbifer sp.
  REGION 1..286: note = tr|A0A2S1JPP7|A0A2S1JPP7_9GAMM Uncharacterized protein OS=Microbulbifer sp. A4B17 OX=359370; GN = BTJ40_05900 PE=4 SV=1
MHLFVDNLTNVDFSYLDHKRGIVGETWLANAALDGALDEQGMVCDFGIVKKTLRHWLDDQVDHRLLVPTRSPQLTLEHTEDQVNMTWLLESGASISVSGPEQAFALVDAEAITAESVATWCVLQLASHFPDSVEKLKLSFHCEVIEDAFYHYSHGLKKHLGNCQRIAHGHRSRIQITTGDQRDIELEKYWAERWEDIYLGTREDLVSTTTDNRGEQIHNFAYSAQQGNFTLSIPAAACEILDCDTTVEQLAQYIANNLAAKEQGKAITVRAYEGIGKGAIASAQTS

SEQ ID NO: 22643 - protein, 281 aa, Microbulbifer sp.
  REGION 1..281: note = tr|A0A0X3U0Q2|A0A0X3U0Q2_9GAMM Uncharacterized protein OS=Microbulbifer sp. ZGT114 OX=1685377; GN = AVO43_13750 PE=4 SV=1
MHLFVDNLINVDFSYLDHTRGLVGETWLASAALDGALDEQGMVCDFGIVKKTLRNWLDSELDHRLLVPVQSPHLELQRSDDKLSLTWSLADGGQITVSGPEQAFALVEAEEIFEESVAAWCVTQLDSAFPSSVARLQLRFRSESIDDAYYHYSHGLKKHDGNCQRIAHGHRSRIQIFIDGTRDPDWEARWAERWRDIYLGTGEDLVGGSNSNQFEFAYRARQGEFTLGLPASRCELVQCDTTVEQLAQYIADTIAAEEQGRIVRVRAYEGLGKGAEASTSS

SEQ ID NO: 22644 - protein, 281 aa, Microbulbifer thermotolerans
  REGION 1..281: note = tr|A0A143HNB2|A0A143HNB2_9GAMM 6-pyruvoyl tetrahydropterin synthase OS=Microbulbifer thermotolerans; OX = 252514 GN=A3224_10770 PE=4 SV=1
MHLFVDNLTNVDFSYLDHQRGLVGETWLASASLDGALDSQGMVCDFGIVKKTLRRWLDEQLDHRLLVPILSPHLQLQKNAGGIALTWALHSGGQICVSGPEQAFALVEAEAINADSVAAWSIRQLTIAFPASIERLNLCFASEKISTPYYHYSHGLKKHAGNCQRIAHGHRSRIEIYLDGERCPEWERRWAERWRDIYLGTREDLCNDSSEQVLHFAYSAQQGEFSLEIPAERCELVECDTTVEQLAQHIADTIARAQPDTEVRVRAYEGLGKGAVAAAKI

SEQ ID NO: 22645 - protein, 281 aa, Microbulbifer yueqingensis
  REGION 1..281: note = tr|A0A1G9E029|A0A1G9E029_9GAMM 6-pyruvoyl tetrahydropterin synthase OS=Microbulbifer yueqingensis; OX = 658219 GN=SAMN05216212_2963 PE=4 SV=1
MHLFVDNLINIDFSFLDHRRGLVGETWLANAALDGALDEQGMVCDFGVVKKTLRHWLDEELDHRLLVPRHSPHLELKEENGSVSLKWHLADGGRISVSGPRQAFALVDTETIEMESVAAWSVAQLASAFPTRVEKLQLSFSCEEITDAFYHYSHGLKKHDGNCQRIAHGHRSRIQVSINGERSALWEERWAERWRDIYLGTREDLQSGGDEAQLRFAYQARQGEFGLEIPATRCELLDCDTTVEQLATHIATTIATEEPGHEVQVRAFEGLGKGAVASARR

SEQ ID NO: 22646 - protein, 112 aa, unidentified
  source 1..112: note = Micrococcales bacterium
  REGION 1..112: note = tr|A0A1Q4A0Z9|A0A1Q4A0Z9_9MICO 6-carboxy-5,6,7,8-tetrahydropterin synthase; OS = Micrococcales bacterium 72-143 OX=1895790; GN = BGO94_08320 PE=3 SV=1
MTYEFEFQAAHQLHWHPGPCRSMHGHSYRCELTFGGELNENGVIVDFDEVAVFVNDTLMPRLDHTYLNDVLDNPTAERIAALVFEDVETAALPIVSARLWETRTSSAVVSRT

SEQ ID NO: 22647 - protein, 126 aa, Micrococcus endophyticus; identical to SEQ ID NO: 21464
  REGION 1..126: note = tr|A0A4Y8ZJV5|A0A4Y8ZJV5_9MICC 6-carboxytetrahydropterin synthase OS=Micrococcus endophyticus OX=455343 GN=E4A41_00020 PE=4 SV=1

SEQ ID NO: 22648 - protein, 127 aa, Micrococcus luteus
  REGION 1..127: note = tr|A0A378NH03|A0A378NH03_MICLU 6-pyruvoyl tetrahydropterin synthase OS=Micrococcus luteus OX=1270; GN = NCTC7563_00134 PE=4 SV=1
MFGLTVNDHVMIAHSLPDEFFGPAQGLHGATLEVSATFTRASLDEHSVVLDIGEAMSLLDAALTPLRYANLDEHPDFSERLSTTEAVAEYIGRKLAESLTERPEIGISIELRENPRAAITYTVPERT

SEQ ID NO: 22649 - protein, 137 aa, Micrococcus lylae; identical to SEQ ID NO: 22108
  REGION 1..137: note = tr|A0A378P0J8|A0A378P0J8_9MICC 6-carboxy-5,6,7,8-tetrahydropterin synthase OS=Micrococcus lylae OX=1273 GN=queD PE=3 SV=1

SEQ ID NO: 22650 - protein, 135 aa, Micrococcus sp.
  REGION 1..135: note = tr|A0A2J9ILF2|A0A2J9ILF2_9MICC 6-carboxy-5,6,7,8-tetrahydropterin synthase OS=Micrococcus sp. FDAARGOS_333 OX=1930558 GN=CEQ11_005240 PE=3 SV=1
MYAEISKDFDFSASHRLDGLPGDHQCSRLHGHNYRVRLSIAGSIVAPGFVVDYGELAFFKGWIDQTLDHRHLNDVMDGNPTAENLAAWMISLVSERLQAMGHENVAVVKVAVSETPKTWAIVTRTLAPHTLEEQR

SEQ ID NO: 22651 - protein, 126 aa, Micrococcus sp.; identical to SEQ ID NO: 21464
  REGION 1..126: note = tr|A0A229HCA6|A0A229HCA6_9MICC 6-carboxytetrahydropterin synthase OS=Micrococcus sp. KBS0714 OX=1179670 GN=B1A86_00004195 PE=4 SV=1

SEQ ID NO: 22652 - protein, 127 aa, Micrococcus terreus
  REGION 1..127: note = tr|A0A1I7MJ22|A0A1I7MJ22_9MICC 6-pyruvoyltetrahydropterin/6-carboxytetrahydropterin synthase OS=Micrococcus terreus OX=574650; GN = SAMN04487966_103110 PE=4 SV=1
MYSLTVNDHVMIAHSLPNEFFGPAQGMHGATLAVEATFSRAELDEHAVVLDIGAATEMLDEALSPLRYANLDEHPDFAGRLSTTEATAEYIGSRLEDALADQPDVGITVTLTENPRAKVSYTVPGRP

SEQ ID NO: 22653 - protein, 290 aa, unidentified
  source 1..290: note = Microcoleaceae bacterium
  REGION 1..290: note = tr|A0A3D5GCB5|A0A3D5GCB5_9CYAN 6-pyruvoyl tetrahydropterin synthase OS=Microcoleaceae bacterium UBA9251 OX=2055794 GN=DGO89_18595 PE=4 SV=1
MQCIINRRAQFSASHRYWLPELSEAENFERFGPTARAPGHGHNYVVYVSMVGELDEYGMVLNLSDVKHVIKREVTNHLDFSYLNEAWPEFEQTLPTTENIARQIWLRLAPHLPLSKIQLFEHPELWAEYLGNGMEAYLTLSTHFSAAHRLARPDLSFAENSEIYGKCARPHGHGHNYHLEVTVKGEIDARTGMIADLGALQKAVDDYVVEPLDHTFLNKDIAYFEKIVPTAENIAVYIGQLLRSPIRELGAQLHKIKLTESPNNSCEIYCADLESAATENQQLAAILAAV

SEQ ID NO: 22654 - protein, 129 aa, Microcoleus sp.
  REGION 1..129: note = tr|K9WQ89|K9WQ89_9CYAN 6-carboxy-5,6,7,8-tetrahydropterin synthase OS=Microcoleus sp. PCC 7113 OX=1173027 GN=Mic7113_6783 PE=3 SV=1
MPKWKLVTEFTFDSAHFIKDYDGSCGRMHGHTYKVRVEATSSKLHPSQYCPHPIMVADFRSLRWAKQDMTKGGLDHSVLNEVLPEGYETTAEMIAQYIYEETKKRVPDDVRLKVVVSETPNSWVEYEGD

SEQ ID NO: 22655 - protein, 290 aa, Microcoleus sp.
  REGION 1..290: note = tr|K9WNM8|K9WNM8_9CYAN 6-pyruvoyl-tetrahydropterin synthase OS=Microcoleus sp. PCC 7113 OX=1173027; GN = Mic7113_5480 PE=4 SV=1
MECIINRRAQFSASHRYWLPELSEAENSQQFGLGSRFPGHGHNYVLFVSLVGELDEYGMVQNLSEVKKVIKREVTSQLDSAYLNQTWPEFQQTLPTTENIARVIWHRLIPHLPIVRIQLFEHPELWADYQGNGMEAHLTISTHFSAAHRLAHPDLSYEENSEIYGKCARPNGHGHNYHLEVTVTGEIDPRTGMIVDLGALHQVVEDYVVEPFDHTFLNKDIPYFSQVVPTAENIAIHIRQLLQQPIQELGAQLYKVKLVESPNNSCEVYCSQATSSSALTQESQALVTSV

SEQ ID NO: 22656 - protein, 290 aa, Microcoleus vaginatus
  REGION 1..290: note = tr|F5UNH9|F5UNH9_9CYAN Uncharacterized protein; OS = Microcoleus vaginatus FGP-2 OX=756067; GN = MicvaDRAFT_0354 PE=4 SV=1
MQCIINRRAQFSASHRYWLPELSEAENFERFGPTARAPGHGHNYLLYVSMIGELDEYGMVLNLSDVKHVIKREVIKELDFSYLNEAWPEFEQTLPTTENIARQIWLRLAPHLPVSKIQLFEHPELWAEYLGNGMEAYLTLSTHFSAAHRLARPDLSFEENSEIYGKCARPNGHGHNYHLEVTVKGEIDARTGMIADLGALQKAVDDYVVEPFDHTFLNKDIAYFENVVPTAENIAVRIGQLLRSPVRELGAELHKIKLIESPNNSCEIYGADLEEVVAELQQPQAILAGV

SEQ ID NO: 22657 - protein, 288 aa, Microcystis aeruginosa
  REGION 1..288: note = tr|A0A552DM89|A0A552DM89_MICAE 6-carboxytetrahydropterin synthase OS=Microcystis aeruginosa Ma_QC_B_20070730_S2 OX=2486256 GN=EWV80_13030; PE = 4 SV=1
MDCIINRRARFSASHRYYLPEWDEAENQRLFGLGSRFPGHGHNYELYVSLYKELNLYGMVENLSTVKQVIKREITSQLDYSYLNQVWPEFQQTLPTTENIARVIWQRLAPYLPLVKIQLFEHPELWAEYQGKDMEATLTIKTHFSAAHRLALPQLTLEQNSEIYGKCARVNGHGHNYHLEVSVAGEIDPRTGMIVDLGDLQKAIDELVVEPFDHTFLNNDIPYFAEVVPTAENIALHIAQLLEEPIRQLGAELDKVKLIESPNNSAEIHCRGSVQAPRQLLEKTLTAV

SEQ ID NO: 22658 - protein, 144 aa, Microcystis aeruginosa
  REGION 1..144: note = tr|A0A5A5SI11|A0A5A5SI11_MICAE 6-carboxy-5,6,7,8-tetrahydropterin synthase OS=Microcystis aeruginosa NIES-2522 OX=2303984 GN=queD_2 PE=3 SV=1
MTIGGQINKADLTDSIDGLTMAEWIIYKEFRFEAAHHLPHYEGKCRRLHGHSWLGRVYVKSNHLQPQGSQQGMVMDFGEIKQYLQPLLDNFLDHHYLNETTGLENPTSEELSRWIYEKLAKAGLPNLHAVEICETCTSGCTYYP

SEQ ID NO: 22659 - protein, 288 aa, Microcystis flosaquae
  REGION 1..288: note = tr|A0A552KTN7|A0A552KTN7_9CHRO 6-carboxytetrahydropterin synthase OS=Microcystis flos-aquae Mf_QC_C_20070823_S10D OX=2486236 GN=EWV45_11575; PE = 4 SV=1
MDCIINRRARFSASHRYYLPEWDEAENQRLFGLGSRFPGHGHNYELYVSLYKELNLYGMVENLSTVKQVIKREITSQLDYSYLNQVWPEFQQTLPTTENIARVIWQRLAPYLPLVKIQLFEHPELWAEYQGKDMEATLTVKTHFSAAHRLALPQLTLEQNSEIYGKCARVNGHGHNYHLEVSVAGEIDPRTGMIVDLGDLQKAIDELVVEPFDHAFLNKDIPYFAEVVPTAENIALHIAQLLEERIRQLGAELDKVKLIESPNNSAEIHCRGSVQAPRQLLEKTLTAV

SEQ ID NO: 22660 - protein, 124 aa, Microcystis flosaquae
  REGION 1..124: note = tr|A0A552M1M7|A0A552M1M7_9CHRO 6-carboxy-5,6,7,8-tetrahydropterin synthase OS=Microcystis flos-aquae Mf_WU_F_19750830_S460 OX=2486237 GN=queD PE=3; SV = 1
MAEWIIYKEFRFEAAHHLPHYEGKCRRLHGHSWLGRVYVKSNHLQSQGSQQGMVMDFGEIKQYLQPLLDNFLDHHYLNETTGLENPTSEELSRWIYEKLAKAGLPNLHAVEICETCTSGCTYYP

SEQ ID NO: 22661 - protein, 124 aa, unidentified
  source 1..124: note = Microcystis novacekii
  REGION 1..124: note = tr|A0A552IVL8|A0A552IVL8_9CHRO 6-carboxy-5,6,7,8-tetrahydropterin synthase OS=Microcystis novacekii Mn_MB_F_20050700_S1D OX=2486266 GN=queD PE=3 SV=1
MAEWIIYKEFRFEAAHRLPHYEGKCHRLHGHSWLGRVYVKGNHLQSQGSQEGMVMDFGEIKQYLQPLLDNFLDHHYLNETTGLENPTSEELSRWIYEKLAKAGLPGLHAVEIRETCTSGCTYYP

SEQ ID NO: 22662 - protein, 288 aa, unidentified
  source 1..288: note = Microcystis novacekii
  REGION 1..288: note = tr|A0A552IHI6|A0A552IHI6_9CHRO 6-carboxytetrahydropterin synthase OS=Microcystis novacekii Mn_MB_F_20050700_S1D OX=2486266 GN=EWV54_21105; PE = 4 SV=1
MDCIINRRARFSASHRYYLPEWDEAENQRLFGLGSRFPGHGHNYELYVSLYKELNLYGMVENLSTVKQVIKREITSQLDYSYLNQVWPEFQQTLPTTENIARVIWQRLAPYLPLVKIQLFEHPELWAEYQGKDMEATLTIKTHFSAAHRLALPQLTLEQNSEIYGKCARVNGHGHNYHLEVSVAGEIDPRTGMIVDLGDLQKAIDELVVEPFDHAFLNKDIPYFAEVVPTAENIALHIAQLLEERIRQLGAQLDKVKLIESPNNSAEIHCRGSVQTPRQLLEKTLTAV

SEQ ID NO: 22663 - protein, 288 aa, unidentified
  source 1..288: note = Microcystis panniformis
  REGION 1..288: note = tr|A0A0K1S2H5|A0A0K1S2H5_9CHRO 6-pyruvoyl tetrahydrobiopterin synthase OS=Microcystis panniformis FACHB-1757 OX=1638788 GN=VL20_3345 PE=4 SV=1
MDCIINRRARFSASHRYYLPEWDEAENQRLFGLGSRFPGHGHNYELYVSLHKELNPYGMVENLSTVKQVIKREITSQLDYSYLNQVWPEFQQTLPTTENIARVIWQRLAPYLPLVKIQLFEHPELWAEYQGKDMEATLTVKTHFSAAHRLALPQLTLEQNSEIYGKCARVNGHGHNYHLEVSVAGEIDPRTGMIVDLGDLQKAIDELVVEPFDHAFLNKDIPYFAEVVPTAENIALHIAQLLGERIRQLGAELDKVKLIESPNNSAEIHCRGLVQAPRQLLEKTLTAV

SEQ ID NO: 22664 - protein, 288 aa, unidentified
  source 1..288: note = Microcystis panniformis
  REGION 1..288: note = tr|A0A552Q5M1|A0A552Q5M1_9CHRO 6-carboxytetrahydropterin synthase OS=Microcystis panniformis Mp_MB_F_20051200_S9 OX=2486223 GN=EWV53_06350; PE = 4 SV=1
MDCIINRRARFSASHRYYLPEWDEAENQRLFGLGSRFPGHGHNYELYVSLYKELNLYGMVENLSTVKQVIKREITSQLDYSYLNQVWPEFQQTLPTTENIARVIWQRLAPHLPLVKIQLFEHPELWAEYQGKDMEATLTIKTHFSAAHRLALPQLTLEQNSEIYGKCARVNGHGHNYHLEVSVAGEIDPRTGMIVDLGDLQKAIDELVVEPFDHTFLNKDIPYFAEVVPTAENIALHIAQLLGERIRQLGAELDKVKLIESPNNSAEIHCRGSVQAPRQLLEKTLTAV

SEQ ID NO: 22665 - protein, 307 aa, Microcystis sp.
  REGION 1..307: note = tr|A0A2L2XTS0|A0A2L2XTS0_9CHRO 6-pyruvoyl tetrahydrobiopterin synthase OS=Microcystis sp. 0824; OX = 1502726 GN=N0824_03614 PE=4 SV=1
MLERVTLNVTLQSHRSPTFMDCIINRRARFSASHRYYLPEWDEAENQRLFGLGSRFPGHGHNYELYVSLYKELNLYGMVENLSTVKQVIKREITSQLDYSYLNQVWPEFQQTLPTTENIARVIWQRLAPYLPLVKIQLFEHPELWAEYQGKDMEATLTIKTHFSAAHRLALPQLTLEQNSEIYGKCARVNGHGHNYHLEVSVAGEIDPRTGMIVDLGDLQKAVDELVVEPFDHAFLNKDIPYFAEVVPTAENIALYIAQLLEERIRQLGAELDKVKLIESPNNSAEIHCRGSVQAPRQLLEKTLTAV

SEQ ID NO: 22666 - protein, 288 aa, Microcystis sp.
  REGION 1..288: note = tr|A0A552CZR7|A0A552CZR7_9CHRO 6-carboxytetrahydropterin synthase OS=Microcystis sp. Msp_OC_L_20101000_S702 OX=2486218 GN=EWV60_00915 PE=4 SV=1
MDCIINRRARFSASHRYYLPEWDEAENQRLFGLGSRFPGHGHNYELYVSLYKELNLYGMVENLSTVKQVIKREITSQLDYSYLNQVWPEFQQTLPTTENIARVIWQRLAPYLPLVKIQLFEHPELWAEYQGKDMEATLTIKTHFSAAHRLALPQLTLEQNSEIYGKCARVNGHGHNYHLEVSVAGEIDPRTGMIVDLGDLQKAIDELVVEPFDHTFLNKDIPYFAEVVPTAENIALHIAQLLEEPIRQLGAELDKVKLIESPNNSAEIHCRGSVQAPRQLLEKTLTAV

SEQ ID NO: 22667 - protein, 307 aa, unidentified
  source 1..307: note = Microcystis viridis
  REGION 1..307: note = tr|A0A3G9K116|A0A3G9K116_MICVR Uncharacterized protein OS=Microcystis viridis NIES-102 OX=213615; GN = myaer102_46140 PE=4 SV=1
MLERVALNVTLQSHRSPTFMDCIINRRARFSASHRYYLPEWDEAENQRRFGLGSRFPGHGHNYELYVSLHKELNPYGMVENLSTVKQVIKREITSQLDYSYLNQVWPEFQQTLPTTENIARVIWQRLAPYLPLVKIQLFEHPELWAEYQGKDMEATLTIKTHFSAAHRLALPQLTLEQNSEIYGKCARVNGHGHNYHLEVSVAGEIDPRTGMIVDLGDLQKAIDELVVEPFDHAFLNKDIPYFAEVVPTAENIALHIAQLLGERIRQLGAELDKVKLIESPNNSAEIHCRGLVQAPRQLLEKTLTAV

SEQ ID NO: 22668 - protein, 288 aa, unidentified
  source 1..288: note = Microcystis viridis
  REGION 1..288: note = tr|A0A552HDK3|A0A552HDK3_MICVR 6-carboxytetrahydropterin synthase OS=Microcystis viridis Mv_BB_P_19951000_S68D OX=2486270 GN=EWV77_18830 PE=4 SV=1
MDCIINRRARFSASHRYYLPEWDEAENQRLFGLGSRFPGHGHNYELYVSLYKELNLYGMVENLSTVKQVIKREITSQLDYSYLNQVWPEFQQTLPTTENIARVIWQRLAPYLPLVKIQLFEHPELWAEYQGKDMEATLTIKTHFSAAHRLALPQLTLEQNSEIYGKCARVNGHGHNYHLEVSVAGEIDPRTGMIVDLGDLQKAIDELVVEPFDHTFLNNDIPYFAEVVPTAENIALHIAQLLEERIRQLGAQLDKVKLIESPNNSAEIHCRGSVQAPRQLLEKTLTAV

SEQ ID NO: 22669 - protein, 288 aa, unidentified
  source 1..288: note = Microcystis wesenbergii
  REGION 1..288: note = tr|A0A552M8D3|A0A552M8D3_9CHRO 6-carboxytetrahydropterin synthase OS=Microcystis wesenbergii Mw_MB_S_20031200_S109D OX=2486241; GN = EWV88_02695 PE=4 SV=1
MDCIINRRARFSASHRYYLPEWDEAENQRLFGLGSRFPGHGHNYELYVSLYQELNLYGMVENLSTVKQVIKREITSQLDYSYLNQVWPEFQQTLPTTENIARVIWQRLAPYLPLVKIQLFEHPELWAEYQGKDMEATLTIKTHFSAAHRLALPQLTLEQNAEIYGKCARVNGHGHNYHLEVSVAGEIDPRTGMIVDLGDLQKAIDELVVEPFDHAFLNKDIPYFAEVVPTAENIALHIAQLLEERIRQLGAQLDKVKLIESPNNSAEIHCRGSVQAPRQLLEKTLTAV

SEQ ID NO: 22670 - protein, 288 aa, unidentified
  source 1..288: note = Microcystis wesenbergii
  REGION 1..288: note = tr|A0A3E0LWL3|A0A3E0LWL3_9CHRO 6-carboxytetrahydropterin synthase OS=Microcystis wesenbergii TW10 OX=2060474 GN=DWQ51_12755 PE=4 SV=1
MDCIINRRARFSASHRYYLPEWDEAENQRRFGLGSRFPGHGHNYELYVSLYKELNPYGMVENLSTVKQVIKREITSQLDYSYLNQVWPEFQQTLPTTENIARVIWQRLAPYLPLVKIQLFEHPELWAEYQGKDMEATLTIKTHFSAAHRLALPQLTLEQNSEIYGKCARVNGHGHNYHLEVSVAGEIDPRTGMIVDLGDLQKAIDELVVEPFDHAFLNKDIPYFAEVVPTAENIALHIAQLLEEPIRQLGAELDKVKLIESPNNSAEIHCRGSVQAPRQLLEKTLTAV

SEQ ID NO: 22671 - protein, 132 aa, Microlunatus phosphovorus
  REGION 1..132: note = tr|F5XHJ3|F5XHJ3_MICPN Uncharacterized protein; OS = Microlunatus phosphovorus (strain ATCC 700054 / DSM 10555 / JCM 9379 / NBRC 101784 / NCIMB 13414 / VKM Ac-1990 / NM -1) OX=1032480 GN=MLP_01240 PE=4 SV=1
MFTVTVRDHLMVAHSLRGEAFGPAQRLHGATYVIDATFHAADLDDNGIVLDIGLASAELHRIAEGLSYRNLDDEPAFAGQNTTTEVLAQAIADRLADRLHAGALGRPASEIARIGVTLHESPVASAGYEREP

SEQ ID NO: 22672 - protein, 132 aa, unidentified
  source 1..132: note = Micromonospora arborensis
  REGION 1..132: note = tr|A0A318NET1|A0A318NET1_9ACTN Uncharacterized protein OS=Micromonospora arborensis OX=2116518; GN = C7C45_31065 PE=4 SV=1
MFSVTVRDHMMIAHSFRGDVFGPAQRLHGATFVVDATFRRADLDSDGIVVDIGLATEQLRAVLGELTYRNLDEEPAFAGVNTTTEVLARTVADRLAERVHAGELGAGARELAGITVTLHESHVAWASYERSL

SEQ ID NO: 22673 - protein, 132 aa, unidentified
  source 1..132: note = Micromonospora arida
  REGION 1..132: note = tr|A0A3N9XN49|A0A3N9XN49_9ACTN Uncharacterized protein OS=Micromonospora arida OX=2203715 GN=DLJ58_19475; PE = 4 SV=1
MFSVTVRDHMMIAHSFRGEVFGPAQRLHGATFVVDATFRRPDLDADGIVVDIGLATEQLRAVLSELTYRNLDDEAAFAGVNTTTEVLARTVADRLVERVHAGELGAGARDLAGITVTLHESHIAWASYERSL

SEQ ID NO: 22674 - protein, 132 aa, Micromonospora aurantiaca
  REGION 1..132: note = tr|D9SZ04|D9SZ04_MICAI Uncharacterized protein; OS = Micromonospora aurantiaca (strain ATCC 27029 / DSM 43813 / BCRC 12538 / CBS 129.76 / JCM 10878 / NBRC 16125 / NRRLB-16091 / INA 9442) OX=644283 GN=Micau_3614 PE=4
MFSVTVRDHMMVAHSFRGEVFGPAQRLHGATFVVDATFRRAELDDDGIVVDIGLATEQLKAVLAELNYRNLDDEPAFAGVNTTTEVLARTIADRLADAVHAGRLGEGARGLAGITVTLHESHIAWASYERSL

SEQ ID NO: 22675 - protein, 132 aa, Micromonospora aurantiaca; identical to SEQ ID NO: 22674
  REGION 1..132: note = tr|A0A1C6S334|A0A1C6S334_9ACTN 6-carboxytetrahydropterin synthase OS=Micromonospora aurantiaca OX=47850 GN=EEZ25_01020 PE=4 SV=1

SEQ ID NO: 22676 - protein, 132 aa, Micromonospora auratinigra
  REGION 1..132: note = tr|A0A1A8ZFL6|A0A1A8ZFL6_9ACTN 6-pyruvoyl-tetrahydropterin synthase OS=Micromonospora auratinigra OX=261654 GN=GA0070611_2054 PE=4 SV=1
MFSVTVRDHIMIAHSFRGEVFGPAQRLHGATFVVDATFRRPELDADGIVVDIGLATEQLKAVLGELNYRNLDDEPAFAGTNTTTEVLCRTIADRLAEAVHGGRLGDGARGLAGIAVTLHESHVAWASYERAL

SEQ ID NO: 22677 - protein, 132 aa, unidentified
  source 1..132: note = Micromonospora avicenniae
  REGION 1..132: note = tr|A0A1N6V7S1|A0A1N6V7S1_9ACTN 6-pyruvoyl-tetrahydropterin synthase OS=Micromonospora avicenniae OX=1198245 GN=SAMN05444858_10410 PE=4 SV=1
MFSVTVRDHMMIAHSFRGEVFGPAQRLHGATFVVDATFRRAELDGDGIVVDIGLATDQLKAVLGELTYRNLDDEPAFAGVNTTTEVLARTIADRLVERVHAGQLGAGARHLAGITVTLHESHVAWASYERAL

SEQ ID NO: 22678 - protein, 132 aa, Micromonospora carbonacea
  REGION 1..132: note = tr|A0A1C5AWX8|A0A1C5AWX8_9ACTN 6-pyruvoyl-tetrahydropterin synthase OS=Micromonospora carbonacea OX=47853 GN=GA0070563_12362 PE=4 SV=1
MFSVTVRDHMMIAHSFRGDVFGPAQRLHGATFVVDATFRRPDLDADGIVVDIGLATEQLRAVLGELTYRNLDDEPAFAGVNTTTEVLARTVADRLADRVHAGDLGAGAQGLAGITVTLHESHVAWASYERPL

SEQ ID NO: 22679 - protein, 132 aa, Micromonospora chaiyaphumensis
  REGION 1..132: note = tr|A0A1C4UL83|A0A1C4UL83_9ACTN 6-pyruvoyl-tetrahydropterin synthase OS=Micromonospora chaiyaphumensis OX=307119 GN=GA0070214_101800 PE=4 SV=1
MFSVTVRDHMMVAHSFRGEVFGPAQRLHGATFVVDATFRRPELDADGIVVDIGLATEQLKAVLGALTYRNLDDEPDFAGVNTTTEVLARTVADRLAEAVHDGRLGEGARGLAGITVTLHESHVAWASYERSL

SEQ ID NO: 22680 - protein, 132 aa, Micromonospora chalcea
  REGION 1..132: note = tr|A0A365USH4|A0A365USH4_MICCH 6-carboxytetrahydropterin synthase OS=Micromonospora chalcea OX=1874 GN=DRA43_26625 PE=4 SV=1
MFSVTVRDHMMVAHSFRGEVFGPAQRLHGATFVVDAGFRRAELDDDGIVVDIGLATEQLRAVLAELNYRNLDDEPAFAGVNTTTEVLARTIADRLADAVHDGRLGEGARGLAGITVTLHESHIAWASYERSL

SEQ ID NO: 22681 - protein, 132 aa, Micromonospora chersina
  REGION 1..132: note = tr|A0A1C6TWM0|A0A1C6TWM0_9ACTN 6-pyruvoyl-tetrahydropterin synthase OS=Micromonospora chersina OX=47854 GN=GA0070603_0109 PE=4 SV=1
MFSVTVRDHMMVAHSFRGEVFGPAQRLHGATFVVDATFRRPDLDADGIVVDIGLATEQLKAVLGALTYRNLDDEPDFAGVNTTTEVLARTVADRLADAVHAGRLGEGARGLAGITVTLHESHVAWASYERSL

SEQ ID NO: 22682 - protein, 118 aa, Micromonospora chokoriensis
  REGION 1..118: note = tr|A0A1C4UQ09|A0A1C4UQ09_9ACTN 6-carboxy-5,6,7,8-tetrahydropterin synthase; OS = Micromonospora chokoriensis OX=356851 GN=GA0070612_0635; PE = 3 SV=1
MEIFREFTFEAAHRLPNVPVGHKCARLHGHSYRVQVHVHGDVDPEAGWVMDFGELKKAFQPLLDQLDHYYLNEVPGLENPTSEVLARWIWDRLIDQLPLSTVMVRETCTSGCIYRGER

SEQ ID NO: 22683 - protein, 132 aa, Micromonospora chokoriensis
  REGION 1..132: note = tr|A0A1C4XVW3|A0A1C4XVW3_9ACTN 6-pyruvoyl-tetrahydropterin synthase OS=Micromonospora chokoriensis OX=356851 GN=GA0070612_3982 PE=4 SV=1
MFSVTVRDHIMIAHSFRGEVFGPAQRLHGATFVVDATFRRPDLDADGIVVDIGLATEQLRAVLGELTYRNLDDEPAFAGLNTTTEVLARTIADRLVERVQAGDLGAGARDLTGITVTLHESHIAWASYERSL

SEQ ID NO: 22684 - protein, 132 aa, Micromonospora citrea
  REGION 1..132: note = tr|A0A1C6TXC2|A0A1C6TXC2_9ACTN 6-pyruvoyl-tetrahydropterin synthase OS=Micromonospora citrea OX=47855 GN=GA0070606_0967 PE=4 SV=1
MFSVTVRDHMMIAHSFRGEVFGPAQRLHGATFVVDATFRRADLDADGVVVDIGLATEQLRAVLGELTYRNLDDEPAFAGVNTTTEVLARTVADRLAERARGGDLGAGARALAGITVTLHESHVAWASCERSL

SEQ ID NO: 22685 - protein, 132 aa, Micromonospora coriariae
  REGION 1..132: note = tr|A0A1C4XKH6|A0A1C4XKH6_9ACTN 6-pyruvoyl-tetrahydropterin synthase OS=Micromonospora coriariae OX=285665 GN=GA0070607_5399 PE=4 SV=1
MFSVTVRDHMMIAHSFRGEVFGPAQRLHGATFVVDATFRRPDLDADGIVVDIGLATEQLRAVVGELSYRNLDDEPAFAGVNTTTEVLARTVADRLAERVHAGELGDGARELVGITVTLHESHVAWASYERAL

SEQ ID NO: 22686 - protein, 132 aa, unidentified
  source 1..132: note = Micromonospora costi
  REGION 1..132: note = tr|A0A3B0A078|A0A3B0A078_9ACTN 6-carboxytetrahydropterin synthase OS=Micromonospora costi; OX = 1530042 GN=D7193_23145 PE=4 SV=1
MFSVTVRDHMMIAHSFRGDVFGPAQRLHGATFVVDATFRRAEVDADGIVVDIGLATEQLKAVLGDLTYRNLDDEPAFAGVNTTTEVLARTVADRLVERVHAGQLGEGARQLAGITVTLHESHVAWASYERTL

SEQ ID NO: 22687 - protein, 132 aa, Micromonospora coxensis
  REGION 1..132: note = tr|A0A1C5HBJ2|A0A1C5HBJ2_9ACTN 6-pyruvoyl-tetrahydropterin synthase OS=Micromonospora coxensis OX=356852 GN=GA0070614_1079 PE=4 SV=1
MFSVTVRDHIMIAHSFRGEVFGPAQKLHGATFVVDATFRRADLDADGIVVDIGLATTELKAVLAELNYRNLDDEPAFAGVNTTTEVLCRTIADRLAERVHAGSLGEGARQLAGITVTLHESHVAWAAYERSL

SEQ ID NO: 22688 - protein, 132 aa, unidentified
  source 1..132: note = Micromonospora cremea
  REGION 1..132: note = tr|A0A1N5W332|A0A1N5W332_9ACTN 6-pyruvoyl-tetrahydropterin synthase OS=Micromonospora cremea OX=709881 GN=SAMN04489832_2035 PE=4 SV=1
MFSVTVRDHMMIAHSFRGEVFGPAQRLHGATFVVDATFRRPDLDADGIVVDIGLATEQLRAVLGELTYRNLDDEAAFAGVNTTTEVLARTVADRLAERVHAGELGAGARGLAGITVTLHESHVAWASYERSL

SEQ ID NO: 22689 - protein, 146 aa, unidentified
  source 1..146: note = Micromonospora deserti
  REGION 1..146: note = tr|A0A2W2C0N4|A0A2W2C0N4_9ACTN Uncharacterized protein OS=Micromonospora deserti OX=2070366; GN = C1I99_31865 PE=4 SV=1
MSWVTVYETGSSGANFNGQSYRIWKEMTLDSAVRLRHAPGGHPLAGTHGHTFTLRLHLAAPLDAVMGWTVDFGDVKALFNPIFKRLDHHPLYEIANLPDGDAASIAAWVLREGGAVLPAIDRVDLYETRGCGAIVSRADSEELIPV

SEQ ID NO: 22690 - protein, 132 aa, unidentified
  source 1..132: note = Micromonospora deserti
  REGION 1..132: note = tr|A0A2W2C6I5|A0A2W2C6I5_9ACTN Uncharacterized protein OS=Micromonospora deserti OX=2070366; GN = C1I99_19600 PE=4 SV=1
MFNVTVRDHMMVAHSFRGEVFGPAQRLHGATFVVDATFRRADLDADGVVVDIGRATEQLKAVLGELTYRNLDDDPAFAGVNTTTEVLARAVADRLAERVHAGELGANAREMAGITVTLHESHVAWASYERSL

SEQ ID NO: 22691 - protein, 132 aa, Micromonospora eburnea
  REGION 1..132: note = tr|A0A1C6UI41|A0A1C6UI41_9ACTN 6-pyruvoyl-tetrahydropterin synthase OS=Micromonospora eburnea OX=227316 GN=GA0070604_2794 PE=4 SV=1
MFSVTVRDHMMVAHSFRGEVFGPAQRLHGATFVVDATFRRPELDADGIVVDIGLATEQLKAVLGALTYRNLDDEPAFAGVNTTTEVLARTVADRLAEAVHAGRLGAGAHGLAGITVTLHESHVAWASYERSL

SEQ ID NO: 22692 - protein, 132 aa, Micromonospora echinaurantiaca
  REGION 1..132: note = tr|A0A1C5HKH7|A0A1C5HKH7_9ACTN 6-pyruvoyl-tetrahydropterin synthase OS=Micromonospora echinaurantiaca OX=47857 GN=GA0070609_1788 PE=4 SV=1
MFSVTVRDHMMIAHSFRGEVFGPAQRLHGATFVVDATFRRADLDADGIVVDIGLATEQLKAVLAELTYRNLDDEPAFAGVNTTTEVLARTVADRLADRVRAGDLGPGARGLAGITVTLHESHIAWASYERSL

SEQ ID NO: 22693 - protein, 132 aa, Micromonospora echinofusca
  REGION 1..132: note = tr|A0A1C5G7P2|A0A1C5G7P2_9ACTN 6-pyruvoyl-tetrahydropterin synthase OS=Micromonospora echinofusca OX=47858 GN=GA0070610_2145 PE=4 SV=1
MFSVTVRDHMMIAHSFRGEVFGPAQRLHGATFVVDATFRRRELDADGVVVDIGLATAQLRAVLGELTYRNLDDDPAFAGVNTTTEVLARAVADRLAARVRAGDLGAGARALAGITVTLHESHVAWASYERSL

SEQ ID NO: 22694 - protein, 117 aa, Micromonospora echinospora
  REGION 1..117: note = tr|A0A0K0K539|A0A0K0K539_MICEC 6-carboxy-5,6,7,8-tetrahydropterin synthase; OS = Micromonospora echinospora OX=1877 GN=genG PE=3 SV=1
MEIFREFTFEAAHRLPNVPEGHKCARLHGHSYRVAVHVSGDVDPQAGWVMDFGDLKQAFEPVRDQLDHHYLNEVPGLENPTSETLARWIWDRLADRLPLSAVSVRETCTSGCVYRGD

SEQ ID NO: 22695 - protein, 117 aa, Micromonospora echinospora
  REGION 1..117: note = tr|Q2MG77|Q2MG77_MICEC 6-carboxy-5,6,7,8-tetrahydropterin synthase; OS = Micromonospora echinospora OX=1877 GN=genG PE=3 SV=1
MEIFREFTFEAAHRLPNVPEGHKCARLHGHSYRVAVHVSGDVDPQAGWVMDFGDLKRAFEPVRDQLDHHYLNEVPGLENPTSETLARWIWDRLADRLPLSAVSVRETCTSGCVYRGD

SEQ ID NO: 22696 - protein, 132 aa, Micromonospora endolithica
  REGION 1..132: note = tr|A0A3A9ZJA3|A0A3A9ZJA3_9ACTN 6-carboxytetrahydropterin synthase OS=Micromonospora endolithica OX=230091 GN=D7223_14075 PE=4 SV=1
MFSVTVRDHMMIAHSFRGEVFGPAQRLHGATFVVDATFRRADLDADGIVVDIGRATEQLRAVLGELSYRNLDEEPAFAGVNTTTEVLARTVADRLADRVHAGDLGDGARGLAGITVTLHESHVAWASYERPL

SEQ ID NO: 22697 - protein, 132 aa, unidentified
  source 1..132: note = Micromonospora globbae
  REGION 1..132: note = tr|A0A420F843|A0A420F843_9ACTN 6-carboxytetrahydropterin synthase OS=Micromonospora globbae OX=1894969 GN=D7I43_00490 PE=4 SV=1
MFSVTVRDHMMIAHSFRGEVFGPAQRLHGATFVVDATFRRAELDADGIVVDIGLATEQLKEILGELTYRNLDEEPAFAGMNTTTEVLARTVADRLAERVHAGRLGEGARGLAGLTVTLHESHVAWASYERTL

SEQ ID NO: 22698 - protein, 132 aa, unidentified
  source 1..132: note = Micromonospora globispora
  REGION 1..132: note = tr|A0A317KDL5|A0A317KDL5_9ACTN Uncharacterized protein OS=Micromonospora globispora OX=1450148; GN = DKL51_28890 PE=4 SV=1
MFSVTVRDHMMVAHSFRGEVFGPAQRLHGATFVVDATFRRPDLDADGIVVDIGLATTQLKAVLGELTYRNLDDEPAFAGVNTTTEVLARTVADRLAERVHAGELGNGARGLAGITVTLHESHVAWASYERSL

SEQ ID NO: 22699 - protein, 132 aa, unidentified
  source 1..132: note = Micromonospora haikouensis
  REGION 1..132: note = tr|A0A0D0W0U0|A0A0D0W0U0_9ACTN 6-pyruvoyl-tetrahydropterin synthase OS=Micromonospora haikouensis OX=686309 GN=GA0070558_1319 PE=4 SV=1
MFSVTVRDHMMIAHSFRGDVFGPAQRLHGATFVVDATFRRPDLDADGIVVDIGLATEQLRAVLGELTYRNLDDEPAFAGVNTTTEVLARTVADRLADRVHAGDLGAGARGLAGITVTLHESHVAWASYERPL

SEQ ID NO: 22700 - protein, 118 aa, unidentified
  source 1..118: note = Micromonospora haikouensis
  REGION 1..118: note = tr|A0A1C4YJL0|A0A1C4YJL0_9ACTN 6-carboxy-5,6,7,8-tetrahydropterin synthase; OS = Micromonospora haikouensis OX=686309 GN=GA0070558_15110; PE = 3 SV=1
MEIFREFTFEAAHRLPNVPVGHKCARLHGHSYRVQVHVRGDVDPEAGWVMDFGELKKAFQPLLDQLDHYYLNEVPGLENPTSEVLARWIWDRLIGRLPLSTVMVRETCTSGCIYRGER

SEQ ID NO: 22701 - protein, 132 aa, Micromonospora halophytica; identical to SEQ ID NO: 22687
  REGION 1..132: note = tr|A0A1C5HJL9|A0A1C5HJL9_9ACTN 6-pyruvoyl-tetrahydropterin synthase OS=Micromonospora halophytica OX=47864 GN=GA0070560_104287 PE=4 SV=1

SEQ ID NO: 22702 - protein, 132 aa, Micromonospora humi
  REGION 1..132: note = tr|A0A1C5GMR7|A0A1C5GMR7_9ACTN 6-pyruvoyl-tetrahydropterin synthase OS=Micromonospora humi OX=745366 GN=GA0070213_101218 PE=4 SV=1
MFSVTVRDHMMVAHSFRGEVFGPAQRLHGATFVVDATFRRTELDDDGIVVDIGLATEQLKAVLGELTYRNLDDEPAFAGVNTTTEMLARTVADRLADAVHAGRLGEGARGLAGITVTLHESHVAWASYERSL

SEQ ID NO: 22703 - protein, 132 aa, unidentified
  source 1..132: note = Micromonospora inaquosa
  REGION 1..132: note = tr|A0A3N9W8L0|A0A3N9W8L0_9ACTN Uncharacterized protein OS=Micromonospora inaquosa OX=2203716; GN = DLJ59_29635 PE=4 SV=1
MFSVTVRDHMMIAHSFRGEVFGPAQRLHGATFVVDATFRRPDLDADGIVVDIGLATEQLRAVLSELTYRNLDDEPAFAGVNTTTEVLARTVADRLVDRVHAGELGPGARDLTGITITLHESHIAWASYERSL

SEQ ID NO: 22704 - protein, 132 aa, Micromonospora inositola
  REGION 1..132: note = tr|A0A1C5J8B0|A0A1C5J8B0_9ACTN 6-pyruvoyl-tetrahydropterin synthase OS=Micromonospora inositola OX=47865 GN=GA0070613_4208 PE=4 SV=1
MFSVTVRDHMMVAHSFTGEVFGPAQRLHGATFVVDATFRRADLDADGIVVDIGLATEQLKAVLGELTYRNLDDEPDFAGVNTTTEVLARTVADRLAERVHAGRLGDGARGLAGITVTLHESHVAWASYERSL

SEQ ID NO: 22705 - protein, 118 aa, Micromonospora inyonensis
  REGION 1..118: note = tr|A0A1C6RDY7|A0A1C6RDY7_9ACTN 6-carboxy-5,6,7,8-tetrahydropterin synthase; OS = Micromonospora inyonensis OX=47866 GN=GA0074694_1133; PE = 3 SV=1
MEIFREFTFEAAHRLPNVPEGHKCARLHGHSYRVAVHVSGDVDPRTGWVMDFGDLKRAFEPVRDELDHYYLNDVPGLENPTSEVLARWIWHRLADRLPLSAVSVRETCTSGCVYRGEG

SEQ ID NO: 22706 - protein, 132 aa, unidentified
  source 1..132: note = Micromonospora kangleipakensis
  REGION 1..132: note = tr|A0A4Q8BF87|A0A4Q8BF87_9ACTN 6-pyruvoyl-tetrahydropterin synthase OS=Micromonospora kangleipakensis OX=1077942 GN=EV384_5288 PE=4 SV=1
MFSVTVRDHMMVAHSFTGEVFGPAQRLHGATFVVDATFRRPDLDADGIVVDIGLATEQLKAVLAELTYRNLDDEPDFAGVNTTTEVLARTVADRLAERMHAGRLGDGARGLAGITVTLHESHVAWASYERPL

SEQ ID NO: 22707 - protein, 132 aa, Micromonospora krabiensis
  REGION 1..132: note = tr|A0A1C3MYQ6|A0A1C3MYQ6_9ACTN 6-pyruvoyl-tetrahydropterin synthase OS=Micromonospora krabiensis OX=307121 GN=GA0070620_0948 PE=4 SV=1
MFSVTVRDHMMIAHSFRGEVFGPAQRLHGATFVVDATFRRAELDADGIVVDIGLATEQLKAVLGELTYRNLDDEPAFAGVNTTTEVLARTVADRLAEAVHAGRLGEGARGLAGITVTLHESHVAWAGYERAL

SEQ ID NO: 22708 - protein, 132 aa, Micromonospora lupini
  REGION 1..132: note = tr|I0L5T3|I0L5T3_9ACTN Uncharacterized protein; OS = Micromonospora lupini str. Lupac 08 OX=1150864; GN = MILUP08_44098 PE=4 SV=1
MFSVTVRDHMMIAHSFRGEVFGPAQRLHGATFVVDAMFRRPDLDADGIVVDIGLATEQLRAVVGELSYRNLDDEPAFAGMNTTTEVLARTVADRLAERVHAGELGPGARELAGITVTLHESHVAWASYERSL

SEQ ID NO: 22709 - protein, 126 aa, Micromonospora lupini
  REGION 1..126: note = tr|I0L1T7|I0L1T7_9ACTN 6-carboxy-5,6,7,8-tetrahydropterin synthase; OS = Micromonospora lupini str. Lupac 08 OX=1150864 GN=queD; PE = 3 SV=1
MFRIGKQFRFEAAHSLPDLSEGHQCARVHGHSYTVEVHLVSDGELTRPGFVVDFAELGPFSAHIRDHFDHRDLNTVLDAPPTSEHLAAYFYKWCRDHLRLPEPVRVEKVRVSETASTFAEYGPDLP

SEQ ID NO: 22710 - protein, 132 aa, Micromonospora marina
  REGION 1..132: note = tr|A0A1C4VM99|A0A1C4VM99_9ACTN 6-pyruvoyl-tetrahydropterin synthase OS=Micromonospora marina OX=307120 GN=GA0070215_103264 PE=4 SV=1
MFSVTVRDHMMVAHSFRGEVFGPAQRLHGATFVVDATFRRAELDDDGIVVDIGLATEQLKAVLAELNYRNLDDEPAFAGVNTTTEVLARTVADRLADAVAAGRLGEGARGLAGITVTLHESHIAWASYERSL

SEQ ID NO: 22711 - protein, 132 aa, Micromonospora matsumotoense
  REGION 1..132: note = tr|A0A1C4WZN8|A0A1C4WZN8_9ACTN 6-pyruvoyl-tetrahydropterin synthase OS=Micromonospora matsumotoense OX=121616 GN=GA0070216_10439 PE=4 SV=1
MFSVTVRDHIMIAHSFRGEVFGPAQKLHGATFVVDATFRRPELDDDGIVVDIGRAIDELKAVLADLTYRNLDDEPAFAGQNTTTEVLCRAIADRLADRVHAGGLGAGARELAGITVTLHESHIAWASYERSL

SEQ ID NO: 22712 - protein, 137 aa, Micromonospora mirobrigensis
  REGION 1..137: note = tr|A0A1C4WQX7|A0A1C4WQX7_9ACTN 6-pyruvoyl-tetrahydropterin synthase OS=Micromonospora mirobrigensis OX=262898 GN=GA0070564_102443 PE=4 SV=1
MFSVTVRDHIMIAHSFRGEVFGPAQRLHGATFVVDASFRRPGLDSDGIVVDIGLATEQLRAVLGELTYRNLDEEPAFHGVNTTTEVLCRTIADRLADRVRAGDLGPGARELAGITVTLHESHIAWASYERSLGEREE

SEQ ID NO: 22713 - protein, 132 aa, unidentified
  source 1..132: note = Micromonospora musae
  REGION 1..132: note = tr|A0A3A9XYE7|A0A3A9XYE7_9ACTN 6-carboxytetrahydropterin synthase OS=Micromonospora musae; OX = 1894970 GN=D7044_19140 PE=4 SV=1
MFSVTVRDHMMIAHSFRGDVFGPAQRLHGATFVVDATFRRAELDEDGIVVDIGLATDQLKAVLGELTYRNLDDEPAFAGVNTTTEVLARTVADRLVERVHAGQLGAGARHLDGITVTLHESHVAWASYERSL

SEQ ID NO: 22714 - protein, 143 aa, Micromonospora narathiwatensis
  REGION 1..143: note = tr|A0A1A8Z9X4|A0A1A8Z9X4_9ACTN 6-carboxy-5,6,7,8-tetrahydropterin synthase; OS = Micromonospora narathiwatensis OX=299146; GN = GA0070621_1053 PE=3 SV=1
MSGPASAGSGPVTAIGPGIYRIYKSFMFEAAHQLGGLPEGHKCGRLHGHGYTVEVTIASRRLTGPGFVVDFAELDLLKRHLDGEFDHRFLNDVVDVEPTSENLARVLFDWCAAHLALPDGAFVEAVRVRETAASWAEYRQDNP

SEQ ID NO: 22715 - protein, 132 aa, Micromonospora narathiwatensis
  REGION 1..132: note = tr|A0A1A8ZI05|A0A1A8ZI05_9ACTN 6-pyruvoyl-tetrahydropterin synthase OS=Micromonospora narathiwatensis OX=299146 GN=GA0070621_1809 PE=4 SV=1
MFSVTVRDHMMVAHSFRGEVFGPAQRLHGATFVVDATFRRPELDADGIVVDIGLATEQLKAVLGALTYRNLDDEPAFAGVNTTTEVLARTVADRLAEAVHAGRLGDGAHGLAGITVTLHESHVAWASYERSL

SEQ ID NO: 22716 - protein, 133 aa, Micromonospora nigra
  REGION 1..133: note = tr|A0A1C6SYS0|A0A1C6SYS0_9ACTN 6-pyruvoyl-tetrahydropterin synthase OS=Micromonospora nigra OX=145857 GN=GA0070616_5029 PE=4 SV=1
MFSVTVRDHIMVAHSFSGAVFGPAQRLHGATFVVDATFRRPDLDDDGVVVDIGLATEQLKAVLGELNYRNLDDEPAFAGTNTTTEVLARTVADRLAARVAAGDLGVGAHGLTGLTVTLHESHVAWAAYERSLP

SEQ ID NO: 22717 - protein, 143 aa, Micromonospora nigra
  REGION 1..143: note = tr|A0A1C6R7X1|A0A1C6R7X1_9ACTN 6-carboxy-5,6,7,8-tetrahydropterin synthase; OS = Micromonospora nigra OX=145857 GN=GA0070616_0136 PE=3; SV = 1
MSRPALANSTAMNVAGPGIYRIGKAFTFEGAHLLGGLPEGHKCGRLHGHRYTVEITLASRQLTGPGFVVDFAELDPLKRHLDGSFDHRLLNDAINVEPTSEHLAHVLFDWCAAHLALPDGVVIEAVRVRETATSWAEYRQDVP

SEQ ID NO: 22718 - protein, 132 aa, unidentified
  source 1..132: note = Micromonospora noduli
  REGION 1..132: note = tr|A0A328MZV9|A0A328MZV9_9ACTN 6-pyruvoyltetrahydropterin synthase OS=Micromonospora noduli OX=709876 GN=LAH08_06499 PE=4 SV=1
MFSVTVRDHMMIAHSFRGEVFGPAQRLHGATFVVDATFRRPDLDADGIVVDIGLATEQLRAVLSELTYRNLDDEAAFAGVNTTTEVLARTVADRLVERVHAGELGAGARDLTGITVTLHESHIAWASYERSL

SEQ ID NO: 22719 - protein, 132 aa, Micromonospora olivasterospora
  REGION 1..132: note = tr|A0A562IID0|A0A562IID0_MICOL 6-pyruvoyl-tetrahydropterin synthase OS=Micromonospora olivasterospora OX=1880 GN=JD77_05389 PE=4 SV=1
MFSVTVRDHMMIAHSFRGEVFGPAQRLHGATFVVDATFRRPDLDADGIVVDIGRATDALKEILGELTYRNLDDEPAFAGTNTTTEVLARTVADRLADRVRAGDLGAGASGLTAIAVTLHESHVAWASYERPL

SEQ ID NO: 22720 - protein, 118 aa, Micromonospora olivasterospora
  REGION 1..118: note = tr|Q2MFZ0|Q2MFZ0_MICOL 6-carboxy-5,6,7,8-tetrahydropterin synthase; OS = Micromonospora olivasterospora OX=1880 GN=fosG PE=3 SV=1
MEIFREFTFEAAHRLPNVPEGHKCARLHGHSYRVTVHVSGDVDPHSGWVMDFGDLKKAVEPIRDRLDHHYLNEVPGLENPTSEVLARWIWDRLAGSLPLSAVGVRETCTSGCVYRGDR

SEQ ID NO: 22721 - protein, 132 aa, unidentified
  source 1..132: note = Micromonospora orduensis
  REGION 1..132: note = tr|A0A5C4QTK2|A0A5C4QTK2_9ACTN 6-carboxytetrahydropterin synthase OS=Micromonospora orduensis OX=1420891 GN=FHG89_13685 PE=4 SV=1
MFSVTVRDHMMIAHSFRGEVFGPAQRLHGATFVVDATFRRPDLDADGIVVDIGLATEQLRVVLGELTYRNLDDEAAFAGVNTTTEVLARTIADRLAERAHAGQLGAGARELTGITVTLHESHIAWASYERSL

SEQ ID NO: 22722 - protein, 118 aa, Micromonospora pallida
  REGION 1..118: note = tr|A0A1C6TCZ7|A0A1C6TCZ7_9ACTN 6-carboxy-5,6,7,8-tetrahydropterin synthase; OS = Micromonospora pallida OX=145854 GN=GA0074692_5411 PE=3; SV = 1
MEIFREFTFEAAHRLPNVPEGHKCARLHGHSYRVAVHVSGDVDPRTGWVMDFGDLKRAFEPVREQLDHYYLNEVPGLENPTSEVLARWIWRRLADRLPLSAVTVRETCTSGCVYRGEN

SEQ ID NO: 22723 - protein, 132 aa, unidentified
  source 1..132: note = Micromonospora palomenae
  REGION 1..132: note = tr|A0A561WTN6|A0A561WTN6_9ACTN 6-pyruvoyl-tetrahydropterin synthase OS=Micromonospora palomenae OX=1461247 GN=FHX75_11340 PE=4 SV=1
MFSVTVRDHMMVAHSFRGEVFGPAQRLHGATFVVDATFRRAELDADGIVVDIGRATEELRAVLAELTYRNLDDEPAFAGVNTTTEVLCRTVADRLAERAHAGGLGPGARELAGITVTLHESHIAWASYERSL

SEQ ID NO: 22724 - protein, 132 aa, Micromonospora pattaloongensis
  REGION 1..132: note = tr|A0A1H3JKI5|A0A1H3JKI5_9ACTN 6-pyruvoyl-tetrahydropterin synthase OS=Micromonospora pattaloongensis OX=405436 GN=SAMN05444365_102145 PE=4 SV=1
MFSVTVRDHIMIAHSFRGEVFGPAQRLHGATFVVDATFRRAELDADGIVVDIGLAAQQLNAVLGELTYRNLDDEPAFAGVNTTTEVLARTIADRLADRVHAGDLGDGARGLAGITVTLHESHIAWASYERPL

SEQ ID NO: 22725 - protein, 132 aa, Micromonospora peucetia
  REGION 1..132: note = tr|A0A1C6VXU3|A0A1C6VXU3_9ACTN 6-pyruvoyl-tetrahydropterin synthase OS=Micromonospora peucetia OX=47871 GN=GA0070608_4522 PE=4 SV=1
MFSVTVRDHMMIAHSFRGEVFGPAQRLHGATFVVDATFRRPDLDTDGVVVDIGLAAAQLKAVLGELTYRNLDDDPAFAGVNTTTEMLARTVADRLAERVRVGDLGVGARALAGITVTLHESHVAWASYERSL

SEQ ID NO: 22726 - protein, 132 aa, Micromonospora pisi
  REGION 1..132: note = tr|A0A495JBQ1|A0A495JBQ1_9ACTN 6-pyruvoyl-tetrahydropterin synthase OS=Micromonospora pisi OX=589240 GN=BDK92_0569 PE=4 SV=1
MFSVTVRDHIMIAHSFRGEVFGPAQRLHGATFVVDATFRRPELDADNIVVDMGLAAQELKGVLAPLNYRNLDDEAAFAGVNTSTEALAQVIADRLVERVRVGALGEGAHGLTGITVTLRESHVAWASYERSL

SEQ ID NO: 22727 - protein, 132 aa, Micromonospora purpureochromogenes; identical to SEQ ID NO: 22723
  REGION 1..132: note = tr|A0A1C4XVY5|A0A1C4XVY5_9ACTN 6-pyruvoyl-tetrahydropterin synthase OS=Micromonospora purpureochromogenes OX=47872 GN=GA0074696_2880 PE=4 SV=1

SEQ ID NO: 22728 - protein, 141 aa, unidentified
  source 1..141: note = Micromonospora radicis
  REGION 1..141: note = tr|A0A418MTJ2|A0A418MTJ2_9ACTN 6-carboxytetrahydropterin synthase OS=Micromonospora radicis OX=1894971 GN=D2L64_16290 PE=4 SV=1
MFSVTVRDHIMIAHSFRGDVFGPAQRLHGATFVVDATFRRPDLDADGIVVDIGLATDQLKAVLAELNYRNLDDEPAFAGTNTTTEVLARTIADRLADRVRAGDLGPGAHGLTGLTVTLHESHVAWASYERSLPAAGAGDTA

SEQ ID NO: 22729 - protein, 132 aa, Micromonospora rhizosphaerae
  REGION 1..132: note = tr|A0A1C6SWL5|A0A1C6SWL5_9ACTN 6-pyruvoyl-tetrahydropterin synthase OS=Micromonospora rhizosphaerae OX=568872 GN=GA0070624_4851 PE=4 SV=1
MFSVTVRDHMMIAHSFRGEVFGPAQRLHGATFVVDANFRRPDLDADGIVVDIGLATEQLKAVLGELTYRNLDDEPTFAGVNTTTEVLARTVADRLAERVHAGRLGEGARDLAGITVTLHESHVAWASYERSL

SEQ ID NO: 22730 - protein, 118 aa, Micromonospora rifamycinica
  REGION 1..118: note = tr|A0A109IPP3|A0A109IPP3_9ACTN 6-carboxy-5,6,7,8-tetrahydropterin synthase; OS = Micromonospora rifamycinica OX=291594 GN=AWV63_01570; PE = 3 SV=1
MEIFREFTFEAAHRLPHVPAGHKCARLHGHSYRVQVHVEGDVDPVAGWVMDFGDLKKAFAPLRDQLDHHYLNEVPGLENPTSEVLARWIWDRLADQVPLSAVMVRETCTSGCVYRGER

SEQ ID NO: 22731 - protein, 132 aa, Micromonospora rifamycinica
  REGION 1..132: note = tr|A0A109ILK2|A0A109ILK2_9ACTN 6-pyruvoyl-tetrahydropterin synthase OS=Micromonospora rifamycinica OX=291594 GN=AWV63_10875 PE=4 SV=1
MFSVTVRDHIMIAHSFRGEVFGPAQKLHGATFVVDATFRRPELDDDGIVVDIGRAIDELKAVLADLTYRNLDDEPAFAGQNTTTEVLCRAIADRLADRVHAGGLGTGARELSGITVTLHESHIAWASYERSL

SEQ ID NO: 22732 - protein, 105 aa, Micromonospora rosaria
  REGION 1..105: note = tr|A0A136PI54|A0A136PI54_9ACTN 6-pyruvoyl tetrahydropterin synthase (Fragment) OS=Micromonospora rosaria OX=47874 GN=AWW66_31965 PE=4 SV=1
MFSVTVRDHIMIAHSFRGEVFGPAQRLHGATFVVDATFRRPDLDADGIVVDIGRATDELRAVLGDLTYRNLDEEPDFAGVNTTTEVLARTIADRLADRARAGALG

SEQ ID NO: 22733 - protein, 132 aa, Micromonospora saelicesensis
  REGION 1..132: note = tr|A0A328P1K3|A0A328P1K3_9ACTN 6-pyruvoyltetrahydropterin synthase OS=Micromonospora saelicesensis OX=285676 GN=PSN13_00186 PE=4 SV=1
MFSVTVRDHMMIAHSFRGEVFGPAQRLHGATFVVDATFRRPDVDADGIVVDIGLATEQLRAVLSELTYRNLDDEAAFAGVNTTTEVLARTVADRLVERVHAGELGAGARDLTGITVTLHESHIAWASYERSL

SEQ ID NO: 22734 - protein, 132 aa, Micromonospora saelicesensis
  REGION 1..132: note = tr|A0A1C4W640|A0A1C4W640_9ACTN 6-pyruvoyl-tetrahydropterin synthase OS=Micromonospora saelicesensis OX=285676 GN=GA0070561_2401 PE=4 SV=1
MFSVTVRDHMMIAHSFRGEVFGPAQRLHGATFVVDATFRRPDLDADGIVVDIGLATEQLRAVLSELTYRNLDDEAAFAGVNTTTEVLARTVADRLVERVHVGELGAGARDLAGITVTLHESHIAWASYERSL

SEQ ID NO: 22735 - protein, 117 aa, Micromonospora sagamiensis
  REGION 1..117: note = tr|A0A562W996|A0A562W996_9ACTN 6-carboxy-5,6,7,8-tetrahydropterin synthase; OS = Micromonospora sagamiensis OX=47875 GN=JD81_00026 PE=3; SV = 1
MEIFREFTFEAAHRLPNVPEGHKCARLHGHSYRVAVHVSGDVDPQAGWVMDFGDLKAAFEPVRDQLDHHYLNEVPGLSNPTSEVLARWIWNRLADRLPLSAVSVRETCTSGCVYRGD

SEQ ID NO: 22736 - protein, 132 aa, unidentified
  source 1..132: note = Micromonospora sediminicola
  REGION 1..132: note = tr|A0A1A9BAN4|A0A1A9BAN4_9ACTN 6-pyruvoyl-tetrahydropterin synthase OS=Micromonospora sediminicola OX=946078 GN=GA0070622_3230 PE=4 SV=1
MFSVTVRDHMMVAHSFRGEVFGPAQRLHGATFVVDATFRRPDLDADGIVVDIGLATEQLRAVLGELTYRNLDDEPAFAGVNTTTEVLARTVADRLADAVHAGRLGEGARGLAGITVTLHESHVAWASYERSL

SEQ ID NO: 22737 - protein, 132 aa, Micromonospora siamensis
  REGION 1..132: note = tr|A0A1C5J1B4|A0A1C5J1B4_9ACTN 6-pyruvoyl-tetrahydropterin synthase OS=Micromonospora siamensis OX=299152 GN=GA0074704_4020 PE=4 SV=1
MFSVTVRDHIMIAHSFQGEVFGPAQRLHGATFVVDASFRRPGLDADGIVVDIGLATEQLKAVLAELTYRNLDEEPAFHGVNTTTEVLCRTIADRLADRVHAGDLGPGARELTGITVTLHESHIAWASYERSL

SEQ ID NO: 22738 - protein, 132 aa, Micromonospora sp.; identical to SEQ ID NO: 22713
  REGION 1..132: note = tr|A0A5D0TM29|A0A5D0TM29_9ACTN 6-carboxytetrahydropterin synthase OS=Micromonospora sp. WP24 OX=2604469 GN=FXF53_03075 PE=4 SV=1

SEQ ID NO: 22739 - protein, 132 aa, Micromonospora sp.
  REGION 1..132: note = tr|A0A2T3VIA7|A0A2T3VIA7_9ACTN Uncharacterized protein OS=Micromonospora sp. RP3T OX=2135446; GN = C8054_14670 PE=4 SV=1
MFSVTVRDHMMVAHSFRGEVFGPAQRLHGATFVVDATFRRAELDADGIVVDIGLATEQLKAVLGELTYRNLDDEPAFAGVNTTTEVLARTVADRLADAVHAGRLGEGARGLAGITVTLHESHVAWASYERPL

SEQ ID NO: 22740 - protein, 132 aa, unidentified
  source 1..132: note = Micromonospora taraxaci
  REGION 1..132: note = tr|A0A561W1P1|A0A561W1P1_9ACTN 6-pyruvoyl-tetrahydropterin synthase OS=Micromonospora taraxaci OX=1316803 GN=FHU34_113125 PE=4 SV=1
MFSVTVRDHIMIAHSFWGEVFGPAQRLHGATFVVDATFRRPDLDADGIVVDIGLATEQLRAVLGDLTYRNLDDEPAFAGVNTTTEVLARTIADRLVERVHAGDLGAGARDLTGITVTLHESHIAWASYERSL

SEQ ID NO: 22741 - protein, 132 aa, Micromonospora tulbaghiae
  REGION 1..132: note = tr|A0A1C4UWD4|A0A1C4UWD4_9ACTN 6-pyruvoyl-tetrahydropterin synthase OS=Micromonospora tulbaghiae OX=479978 GN=GA0070562_2406 PE=4 SV=1
MFSVTVRDHMMVAHSFRGEVFGPAQRLHGATFVVDATFRRAELDDDGIVVDIGLATGQLKAVLAELNYRNLDDEPAFAGVNTTTEVLARTIADRLADAVHDGRLGEGARGLAGITVTLHESHIAWASYERSL

SEQ ID NO: 22742 - protein, 132 aa, Micromonospora tulbaghiae
  REGION 1..132: note = tr|A0A386WKE9|A0A386WKE9_9ACTN Uncharacterized protein OS=Micromonospora tulbaghiae OX=479978; GN = CSH63_06990 PE=4 SV=1
MFSVTVRDHMMVAHSFRGEVFGPAQRLHGATFVVDATFRRAELDDDGIVVDIGLATEQLKAVLAELNYRNLDDEPAFAGVNTTTEVLARTIADRLADGVHDGRLGEGARGLAGITVTLHESHIAWASYERSL

SEQ ID NO: 22743 - protein, 132 aa, unidentified
  source 1..132: note = Micromonospora ureilytica
  REGION 1..132: note = tr|A0A3N9XCG8|A0A3N9XCG8_9ACTN Uncharacterized protein OS=Micromonospora ureilytica OX=709868; GN = DDE19_31775 PE=4 SV=1
MFSVTVRDHMMIAHSFRGEVFGPAQRLHGATFVVDATFRRPDLDADGIVVDIGLATEQLRAVLGELTYRNLDDEAAFAGVNTTTEVLARTVADRLVERVHAGELGAGARDLTGIAVTLHESHIAWASYERSL

SEQ ID NO: 22744 - protein, 132 aa, unidentified
  source 1..132: note = Micromonospora violae
  REGION 1..132: note = tr|A0A4Q7UH78|A0A4Q7UH78_9ACTN 6-pyruvoyl-tetrahydropterin synthase OS=Micromonospora violae OX=1278207 GN=EV382_2026 PE=4 SV=1
MFSVTVRDHMMIAHSFRGEVFGPAQRLHGATFVVDATFRRPDLDADGIVVDIGLATEQLRAVLGELTYRNLDDEAAFAGVNTTTEVLARTVADRLVERVHAGQLGAGARDLTGITVTLHESHIAWASYERSL

SEQ ID NO: 22745 - protein, 132 aa, Micromonospora viridifaciens
  REGION 1..132: note = tr|A0A1C4XJF4|A0A1C4XJF4_MICVI 6-pyruvoyl-tetrahydropterin synthase OS=Micromonospora viridifaciens OX=1881 GN=GA0074695_3359 PE=4 SV=1
MFSVTVRDHMMIAHSFRGEVFGPAQRLHGATFVVDATFRRAELDADGIVVDIGLATEQLKAILGALTYRNLDDEPAFAGVNTTTEVLARTVADRLAEAVHAGRLGAGARGLAGITVTLHESHVAWASYERSL

SEQ ID NO: 22746 - protein, 132 aa, unidentified
  source 1..132: note = Micromonospora wenchangensis
  REGION 1..132: note = tr|A0A246RMV2|A0A246RMV2_9ACTN Uncharacterized protein OS=Micromonospora wenchangensis OX=1185415; GN = B5D80_13170 PE=4 SV=1
MFSVTVRDHIMIAHSFRGEVFGPAQKLHGATFVVDATFRRAELDDDGIVVDIGRATDELKAVLAELTYRNLDDEPAFAGQNTTTEVLCRTVADRLADRVHAGGLGAGARELAGITVTLHESHIAWASYERSL

SEQ ID NO: 22747 - protein, 120 aa, unidentified
  source 1..120: note = Micromonospora wenchangensis
  REGION 1..120: note = tr|A0A246RK05|A0A246RK05_9ACTN 6-carboxy-5,6,7,8-tetrahydropterin synthase; OS = Micromonospora wenchangensis OX=1185415 GN=B5D80_17825; PE = 3 SV=1
MTFRISKEFHFSASHSLAGLAAEHPCSRMHGHNYVVELELAADRDALSDVGFVRDYGDLAAFSRWLDQEVDHRHLNDVVDRNPSAENLSRWIYDKWHERYPELSSVRVSETPKTWAEYRP

SEQ ID NO: 22748 - protein, 132 aa, Micromonospora yangpuensis
  REGION 1..132: note = tr|A0A1C6UPM7|A0A1C6UPM7_9ACTN 6-pyruvoyl-tetrahydropterin synthase OS=Micromonospora yangpuensis OX=683228 GN=GA0070617_3112 PE=4 SV=1
MFSVTVRDHIMIAHSFQGEVFGPAQKLHGATFVVDATLRRAELDDNGIVADIGLVTDELKAVLAQLNYRNLDDEPDFAGQNTTTEVLARTIADRLADRAHAGALGESARDLAGITVTLHESHVAWCSYERTL

SEQ ID NO: 22749 - protein, 132 aa, unidentified
  source 1..132: note = Micromonospora zamorensis
  REGION 1..132: note = tr|A0A1C5I5Y9|A0A1C5I5Y9_9ACTN 6-pyruvoyl-tetrahydropterin synthase OS=Micromonospora zamorensis OX=709883 GN=GA0070619_2950 PE=4 SV=1
MFSVTVRDHMMIAHSFRGDVFGPAQRLHGATFVVDATFRRPDLDADGIVVDIGLATEQLRAVLGELTYRNLDDEPAFAGVNTTTEVLARTIADRLVERVHAGDLGAGARDLTGITVTLHESHIAWASYERSL

SEQ ID NO: 22750 - protein, 143 aa, unidentified
  source 1..143: note = Micromonospora zingiberis
  REGION 1..143: note = tr|A0A4R0GWX5|A0A4R0GWX5_9ACTN 6-carboxytetrahydropterin synthase OS=Micromonospora zingiberis OX=2053011 GN=E0H26_01240 PE=4 SV=1
MFSVTVRDHIMIAHSFRGDVFGPAQRLHGATFVVDASFRRPDLDADGIVVDIGLATDQLKAVLGELNYRNLDDEPAFAGTNTTTEVLARTIADRLADRVHAGHLGAGAHGLTGITVTLHESHVAWASYERSLPGANGAGEGTG

SEQ ID NO: 22751 - protein, 132 aa, unidentified
  source 1..132: note = Micromonosporaceae bacterium
  REGION 1..132: note = tr|A0A3D4X1U0|A0A3D4X1U0_9ACTN Uncharacterized protein OS=Micromonosporaceae bacterium OX=1873464; GN = DGT23_32170 PE=4 SV=1
MFSVTVRDHMMIAHSFRGEVFGPAQRLHGATFIVDATFRRAGLDADGIVVDIARAAEELKTVLGQFNLRNLDDDPAFAGMNTTTEVLAQVIADRLAERVNAGALGEGAHGLAGITVTLHESHVAWASYERPL

SEQ ID NO: 22752 - protein, 136 aa, Microscilla marina
  REGION 1..136: note = tr|A1ZQ85|A1ZQ85_9BACT 6-pyruvoyl tetrahydrobiopterin synthase OS=Microscilla marina ATCC 23134 OX=313606 GN=M23134_06895 PE=4 SV=1
MRAIIARKEHFNAAYRLHNPDWSEEKNQDIFGPYNNPNYHGCNFDLEVQVIGEINPITGYVMRTEDLAVLVKTQVLNKFDHKNLNLDLEEFERLNPTIENIAMVIWRILREKLDPKLDLKIRLYETERNFVEFPAS

SEQ ID NO: 22753 - protein, 158 aa, Microscilla marina
  REGION 1..158: note = tr|A1ZSU4|A1ZSU4_9BACT 6-pyruvoyl tetrahydrobiopterin synthase OS=Microscilla marina ATCC 23134 OX=313606 GN=M23134_01678 PE=4 SV=1
MVYICRRETFNASHKLYNPNWSKEQNEALFGVCANQNWHGHNFELVVTVKGMPDLETGMVIDYKVLSKIVRREIIEKVHYKNLNLDVDFLAGKMPSCEILIIEFWKRLAPAIQQESPRTTLHHLKLVETKNNSVEYMGEGLEHYQDLRLQEPNVVKQD

SEQ ID NO: 22754 - protein, 158 aa, unidentified
  source 1..158: note = Microscillaceae bacterium
  REGION 1..158: note = tr|A0A349DUA6|A0A349DUA6_9BACT 6-carboxytetrahydropterin synthase QueD OS=Microscillaceae bacterium OX=2053581 GN=DCS93_25555 PE=4 SV=1
MVYICRRETFNASHKLYNPNWSKEQNEAMFGVCANENWHGHNFELVVTVKGIPDLESGMVIDYKVLSKIIRREIIEKVHYKNLNLDVDFLQNKMPSCEILIIEFWKKLAPAVRAASPRAELHHLKLIETKNNFVEYTGEGLELYQDLTITNQTVNDIV

SEQ ID NO: 22755 - protein, 143 aa, unidentified
  source 1..143: note = Microscillaceae bacterium
  REGION 1..143: note = tr|A0A3C0ICI0|A0A3C0ICI0_9BACT 6-carboxytetrahydropterin synthase QueD OS=Microscillaceae bacterium OX=2053581 GN=DCM08_08985 PE=4 SV=1
MVYLCRRESFQAAHRLFNPAWSDAENEEAFGVCANPNWHGHNFELIVTVKGQPLPETGCVIDLKRLSRIIRQEVIERLDHKNLNLDVDFLQGKIPSCEIIVIEIWKILAQALRPYANVQLHALKLIETKNNFVEYFGEPVVAQ

SEQ ID NO: 22756 - protein, 167 aa, Microvirga aerophila
  REGION 1..167: note = tr|A0A512BM41|A0A512BM41_9RHIZ Uncharacterized protein OS=Microvirga aerophila OX=670291 GN=MAE02_07260; PE = 4 SV=1
MNLPVAMPGISPDTIPQAREIFRSTKYYDHNEGLSCCFRQWRATHSHCRLIHGYALAFKFVFATFELDERNWCFDFGGLKPVKAWLKDLFDHTMLVAQDDPELARFEALHRDGLVNLRVLPAVGCEATAKHVFGHVAAFVHEETKGRVWLESVEVKEHGGNSAIYSR

SEQ ID NO: 22757 - protein, 135 aa, Microvirga aerophila
  REGION 1..135: note = tr|A0A512BSK7|A0A512BSK7_9RHIZ Uncharacterized protein OS=Microvirga aerophila OX=670291 GN=ptpS PE=4 SV=1
MYAVEVRDHIMIAHSFRDPLFGPAQALHGATFVVDVAFYREHLTEEGIVVDIGRAHDVLKALLTPLNYRNLDDMPEFSGKNTTTEFLCRHVFDAIAAAVRKGELGPGSDRVSHLRVTLHESHLAKAWFEGPLSDD

SEQ ID NO: 22758 - protein, 129 aa, Microvirga guangxiensis
  REGION 1..129: note = tr|A0A1G5GEH5|A0A1G5GEH5_9RHIZ 6-pyruvoyl-tetrahydropterin synthase OS=Microvirga guangxiensis OX=549386 GN=SAMN02927923_01480 PE=4 SV=1
MKTYCEFTFEAAHSVHPYSELHGHTFIAKLTFGGPVDEVYNWPVNLYDVENYIDELKGKHGTGLDHTNLDLKQNEIGLASLENITIYIWRKVKERFPNLEEVELKRGMTGSTEGCVYRGEDLKAADLAA

SEQ ID NO: 22759 - protein, 125 aa, unidentified
  source 1..125: note = Microvirga lotononidis
  REGION 1..125: note = tr|I4Z3X4|I4Z3X4_9RHIZ 6-carboxy-5,6,7,8-tetrahydropterin synthase OS=Microvirga lotononidis OX=864069 GN=MicloDRAFT_00004430 PE=3 SV=1
MWELTKSFNFEAAHTLTGTTLGPASEEIHGHSFRAEVAVRGLPDPETGMLIDLGLLEGKLAEMRRTLDHKFLNRIEGLERPTLENITRFIFERVQPIGPIARVTIYRDSCGETCTYYAPADHERR

SEQ ID NO: 22760 - protein, 161 aa, unidentified
  source 1..161: note = Microvirga lotononidis
  REGION 1..161: note = tr|I4YK76|I4YK76_9RHIZ 6-pyruvoyl-tetrahydropterin synthase OS=Microvirga lotononidis OX=864069; GN = MicloDRAFT_00070210 PE=4 SV=1
MSWQAKRYHDISCGHRVVGHEGKCGHLHGHNYRVHFTCEADELDNLGRVIDFSEIKSKLCMWLEENWDHKMLLWEHDPVANVLIDNTTGTGDGTTLGDGIVLVPFNPTAENIAQHLVLVVGPQQLKGTGIKLRHCEVEETRKCSAVYTLRPQKNDFGQIER

SEQ ID NO: 22761 - protein, 129 aa, unidentified
  source 1..129: note = Microvirga ossetica
  REGION 1..129: note = tr|A0A1B2EZD3|A0A1B2EZD3_9RHIZ Uncharacterized protein OS=Microvirga ossetica OX=1882682 GN=BB934_11630; PE = 4 SV=1
MKTYCEFTFDAAHSVAPYSGLHGHTFIVKLTFGGAVDEVYGWPVNLYDVENYIKEIKGEHGSGLDHGNLDLNPAIGVASLENVTKYVWKLVKERFPGLEEVELKRGMAGSQEGCIYRGEEAARAGSLAA

SEQ ID NO: 22762 - protein, 125 aa, Microvirga sp.
  REGION 1..125: note = tr|A0A2T7TSD5|A0A2T7TSD5_9RHIZ 6-carboxy-5,6,7,8-tetrahydropterin synthase OS=Microvirga sp. KLBC 81 OX=1862707 GN=DC522_29365 PE=3 SV=1
MWELTKSFNFEAAHTLTGTTLGAASEEIHGHSFRAEVAVRGLPDPQTGMLIDLGLLEGKLTEMRRTLDHKFLNRIEGLERPTLENITRFIFERVQHVGPIARVTIYRDSCGETCTYYAPVDHERR

SEQ ID NO: 22763 - protein, 129 aa, Microvirga sp.
  REGION 1..129: note = tr|A0A086MGL1|A0A086MGL1_9RHIZ Uncharacterized protein OS=Microvirga sp. BSC39 OX=1549810 GN=JH26_19125; PE = 4 SV=1
MKTYCEFTFEAAHSVAPYSGLHGHTFIVKLTFGGPVDDVYGWPVNLYDVENYIKEIKGEHGSGLDHGNLDLNPEIGIASLENVTTYIWRLVKERFPGLEEVELKRGMAGSSEGCIYRGEAAAAQGSLAA

SEQ ID NO: 22764 - protein, 167 aa, Microvirga subterranea
  REGION 1..167: note = tr|A0A370HUF3|A0A370HUF3_9RHIZ 6-pyruvoyltetrahydropterin/6-carboxytetrahydropterin synthase OS=Microvirga subterranea OX=186651; GN = DES45_101413 PE=4 SV=1
MNLSVAIPALAAENRPRGREIYRSTKAYDHAEGLSCCFRQWRATHSHCRLIHGYALAFKFVFATFELDERNWCFDFGGMKPVKAWLKDLFDHTMLVAEDDPELERFEAMHRDGLINLRVLPAVGCEATAKHVFDHVASFVHEETNGRVWLESVEVKEHGGNSAIYSR

SEQ ID NO: 22765 - protein, 118 aa, unidentified
  source 1..118: note = Microvirga vignae
  REGION 1..118: note = tr|A0A0H1R8Z1|A0A0H1R8Z1_9RHIZ 6-carboxy-5,6,7,8-tetrahydropterin synthase OS=Microvirga vignae OX=1225564 GN=AA309_18605 PE=3 SV=1
MYTIAKRFAFSASHLIGGLPAEHPCARLHGHNYEVEVILQSAELDRVGFVRDYRELSELKTFIDNTLDHRHLNEVLGHDQTTAEVIAQWLYDWCKARWPEVAAVRVSETPKTWAEYRP

SEQ ID NO: 22766 - protein, 125 aa, unidentified
  source 1..125: note = Microvirga vignae
  REGION 1..125: note = tr|A0A0H1RBS9|A0A0H1RBS9_9RHIZ 6-carboxy-5,6,7,8-tetrahydropterin synthase OS=Microvirga vignae OX=1225564 GN=AA309_14310 PE=3 SV=1
MWELTKSFNFEAAHTLTGTTLGPASEEIHGHSFRAEVAVRGLPDPETGMLIDLGLLEGKLAETRRTLDHKFLNRIEGLERPTLENITRFIFERVQHVGPIARVTIYRDSCGETCTYYAPADHERR

SEQ ID NO: 22767 - protein, 326 aa, Microvirgula aerodenitrificans
  REGION 1..326: note = tr|A0A2S0PD55|A0A2S0PD55_9NEIS 6-pyruvoyl tetrahydrobiopterin synthase OS=Microvirgula aerodenitrificans OX=57480 GN=DAI18_15685 PE=4 SV=1
MRIVHCAAAGFESARRLASDEAHGHSFTVSAHAATGLASLRARLHEATQALDYRDLNQVLPSPDDAALADWIAARLPMAADLVLRSAPDRGVERDADGTRRIWLKSGFEAAHQLPHVPAGHQCGRLHGHGFGVRLLADADRQDIAALQAAWAPLHAQLNHAYLNALPGLDNPTSENLAAWLWQRLGAVVPGLRAVDVFETATAGSRYDGHRFRIWKEMRFEAAVPFDGHGRYTGHSYLVRLHLAGQVDARGWVRDFGEVKARFKPCYARLDHHPLDQLPGIGATDCAGIAGWIAAQFAAGVPELCRVDVLENDHDGAECRLAGEGA

SEQ ID NO: 22768 - protein, 326 aa, Microvirgula sp.
  REGION 1..326: note = tr|A0A329B037|A0A329B037_9NEIS 6-pyruvoyltetrahydropterin/6-carboxytetrahydropterin synthase OS=Microvirgula sp. AG722 OX=2183901; GN = DFO50_12122 PE=4 SV=1
MRIVHCAAAGFESARRLASDEAHGHSFTVSAHAATGLASLRARLHEVTQALDYRDLNQVLPSPDDAALADWIAARLPMAADLVLRSAPDRGVERDADGTRRVWLKSGFEAAHQLPHVPAGHQCGRLHGHGFGVRLLADADRQDIAALQAAWAPLHAQLNHAYLNALPGLDNPTSENLAAWLWQRLGAVVPGLRAVDVFETATAGSRYDGHRFRIWKEMRFEAAVPFDGHGRYTGHSYLVRLHLAGQVDARGWVRDFGEVKARFKPCYARLDHHPLDQLPGIGATDCAGIAGWIAAQFAAGVPELCRVDVLENDHDGAECRLAGEGA

SEQ ID NO: 22769 - protein, 141 aa, unidentified
  source 1..141: note = Midichloria mitochondrii
  REGION 1..141: note = tr|F7XVK3|F7XVK3_MIDMI Putative 6-pyruvoyl tetrahydropterin synthase OS=Midichloria mitochondrii (strain IricVA) OX=696127 GN=midi_00392 PE=4 SV=1
MISCTRKIEFDAAHRVVGHQGKCYKLHGHRYIVEATFVAKELSDIGMVIDFSDIKEKLGGWVGKNWDHNAILNISDKILGDQISSNIEQTIYYMDQNPTAENMAKHLLHVICPQLFKDSGIKCIKIRLYETPNCYAEAEKQ

SEQ ID NO: 22770 - protein, 120 aa, unidentified
  source 1..120: note = Minicystis rosea
  REGION 1..120: note = tr|A0A1L6LPU8|A0A1L6LPU8_9DELT 6-carboxy-5,6,7,8-tetrahydropterin synthase OS=Minicystis rosea OX=888845 GN=A7982_09150 PE=3 SV=1
MKVRLVHEFRFEAAHFLPKVPSGHKCARMHGHSYRIEVAVSGPVNEETGWFIDYQRLYDAWQPLFMQLDHHCLNEVKGLENPTSEILARWLWEKLLPDLPQLERITVFETHDARCEYEGH

SEQ ID NO: 22771 - protein, 373 aa, Mitsuaria sp.
  REGION 1..373: note = tr|A0A1A9HP76|A0A1A9HP76_9BURK 6-pyruvoyl tetrahydropterin synthase OS=Mitsuaria sp. 7 OX=1658665; GN = ABE85_22860 PE=4 SV=1
MSALPASPASLFTASAGFESACQIDALPPGHRSRSLHGHSYLATVRAELPSGWAPFPGGEVSALRDCLERCIAPLDHALLNQHITQPTDENIARWIRHRLETEFEVPGITQVGIQSTSNSGVDLDANGHAHVWRRYRFQAAHQLPNVPMGHKCGRMHGHGFELILHANQDLGERDLSIDYDHLDELWAPFHAQLNYQCLNEIDGLSNPTSELISSWLWARLKPQLPELSWVTVYETGSSGANFDGERYRIWKEFTLDSAVKLNRAPSEHPLAGIHGHTFTLRLHLSAALDQVFGWAMDFSDVKLLFDPIYKAMDHHPLHELAGLPDSDTASLAAWVLQQAKAQLPPLERVDLYETRGSGVIVSHGPFEELIPV

SEQ ID NO: 22772 - protein, 370 aa, Mitsuaria sp.
  REGION 1..370: note = tr|A0A1I6KSC1|A0A1I6KSC1_9BURK 6-pyruvoyltetrahydropterin/6-carboxytetrahydropterin synthase OS=Mitsuaria sp. PDC51 OX=1881035; GN = SAMN05428960_3648 PE=4 SV=1
MSAFPASLFTASAGFESACQIDALPPGHRSRGLHGHSYLATIRAELPAGWAPFPGAEVSALRDCLERCIAPLDHGLLNTHIPQPTDENIARWIRQRLESEFQVPGITQVGIQSTSNSGVDLDANGHAHVWRRYRFQAAHQLPNVPMGHKCGRMHGHGFELILHANQDLGERDLSIDYDHLDELWAPFHAQLNYRCLNEIEGLSNPTSELISSWLWARLKPQLPELSWVTVYETGSSGANFDGERYRIWKEFTLDSAVQLNRAPADHPLAGIHGHTFTLRLHLSAALDQVFGWAMDFSDVKLLFGPIFKAMDHHPLHELAGLPDADTASLAAWVLRQAKAQLPPLERVDLYETRGSGVIVSHGPFEELIPV

SEQ ID NO: 22773 - protein, 125 aa, Mitsuokella jalaludinii
  REGION 1..125: note = tr|A0A174BZ42|A0A174BZ42_9FIRM 6-carboxy-5,6,7,8-tetrahydropterin synthase OS=Mitsuokella jalaludinii OX=187979 GN=queD PE=3 SV=1
MYTLKVEGAFEAAHRVVNYPGKCDRLHGHNWKVEALVKGTELDELGMLVDFKAIKGALKEALERFDHRFLNELEPFASGINPTAENLARIIFDELATSPVFVRDSHLAAITVYETPASSVTYTRD

SEQ ID NO: 22774 - protein, 59 aa, Mitsuokella multacida
  REGION 1..59: note = tr|A0A356US36|A0A356US36_9FIRM 6-carboxytetrahydropterin synthase QueD (Fragment); OS = Mitsuokella multacida OX=52226 GN=DD660_08120 PE=4 SV=1
PRFLNELEPFSAGINPTAENLARIIFGELAGSDAFVRDSELFAITVYETPTSSVTYTRD

SEQ ID NO: 22775 - protein, 125 aa, Mitsuokella multacida; identical to SEQ ID NO: 22773
  REGION 1..125: note = tr|A0A414NZI3|A0A414NZI3_9FIRM 6-carboxy-5,6,7,8-tetrahydropterin synthase OS=Mitsuokella multacida OX=52226 GN=queD PE=3 SV=1

SEQ ID NO: 22776 - protein, 125 aa, Mitsuokella sp.
  REGION 1..125: note = tr|A0A412L0G3|A0A412L0G3_9FIRM 6-carboxy-5,6,7,8-tetrahydropterin synthase OS=Mitsuokella sp. AF21-1AC OX=2292235 GN=queD PE=3 SV=1
MYTLKVEGAFEAAHRVVNYPGKCDRLHGHNWLVEAEVRGTELDELGMLVDFKLVKQALKSVLDRFDHRFLNELEPFSSGLNPTAENLARIIFEELEPHEAFVRDSHLYAITVYETPKSSVTYTKE

SEQ ID NO: 22777 - protein, 141 aa, Mitsuokella sp.
  REGION 1..141: note = tr|U2V3I6|U2V3I6_9FIRM 6-carboxy-5,6,7,8-tetrahydropterin synthase OS=Mitsuokella sp. oral taxon 131 str. W9106 OX=1321781; GN = HMPREF1985_00486 PE=3 SV=1
MRKAFPSWGRLFYEGEKMYTVKVEGAFEAAHRVVGYPGKCDRLHGHNWVVELSLRGTELDPLGMFLDFKVAKRVLGEILKAYDHRFLNELAPFSNGVNPTAENLARIIYEAVEKKEELPKGSLAAVTVFESPKTSVTYTKD

SEQ ID NO: 22778 - protein, 120 aa, unidentified
  source 1..120: note = Mixta gaviniae
  REGION 1..120: note = tr|A0A2L0IJ24|A0A2L0IJ24_9GAMM 6-carboxy-5,6,7,8-tetrahydropterin synthase OS=Mixta gaviniae OX=665914 GN=queD PE=3 SV=1
MATTLFKDFQFEAAHRLPHVPEGHKCGRLHGHSFLVRLEITGDVDPYTGWIMDFAELKAAFKPLYDRLDHYYLNDIPGLENPTSEVLAQWIWQQMKPIVPLLSAVMIKETCTAGCVYRGE

SEQ ID NO: 22779 - protein, 120 aa, unidentified
  source 1..120: note = Mixta sp.
  REGION 1..120: note = tr|A0A506V808|A0A506V808_9GAMM 6-carboxy-5,6,7,8-tetrahydropterin synthase OS=Mixta sp. BIT-26 OX=2562439 GN=queD PE=3 SV=1
MATTLFKDFQFEAAHHLPHVPEGHKCGRLHGHSFLVRLEITGDVDPHTGWIMDFAELKAAFKPVYDRLDHYYLNDIPGLENPTSEVLAAWIWQQMKPVVPLLSAVTVKETCTAGCVYRGE

SEQ ID NO: 22780 - protein, 120 aa, unidentified
  source 1..120: note = Mixta theicola
  REGION 1..120: note = tr|A0A2K1Q7Q2|A0A2K1Q7Q2_9GAMM 6-carboxy-5,6,7,8-tetrahydropterin synthase OS=Mixta theicola OX=1458355 GN=queD PE=3 SV=1
MATTLFKDFLFEAAHRLPHVPEGHKCGRLHGHSFLVRLEITGDVDPYTGWIMDFAELKAAFKPVYDRLDHYYLNDIPGLENPTSEVLAQWIWQQMKPVVPLLSAVMIKETCTAGCVYRGE

SEQ ID NO: 22781 - protein, 119 aa, unidentified
  source 1..119: note = Mizugakiibacter sediminis
  REGION 1..119: note = tr|A0A0K8QJ65|A0A0K8QJ65_9GAMM 6-carboxy-5,6,7,8-tetrahydropterin synthase; OS = Mizugakiibacter sediminis OX=1475481 GN=MBSD_1580 PE=3; SV = 1
MDIFKVFHIEAAHRLPHVPPGHKCARLHGHSFRIEIHVGGEPDPRLGWVMDFGDIKAAFAPLFEALDHRYLNDVPGLENPTSEQLARWVWERLKPALPGLSAVVVHETCTAGARYAGGS

SEQ ID NO: 22782 - protein, 126 aa, Mobilicoccus pelagius
  REGION 1..126: note = tr|H5UNZ1|H5UNZ1_9MICO Uncharacterized protein; OS = Mobilicoccus pelagius NBRC 104925 OX=1089455; GN = MOPEL_011_00310 PE=4 SV=1
MYRLTVRDHVMIAHSLPDPFFGPAQGVHGATFVVEATWSRADLDEHGVVLDIGAATAALKEVLGDIDYRNLDDHPAFEGRISTTEVVARHIADELASRLTDPALTSLEVVLREHPDAWASYTRDLP

SEQ ID NO: 22783 - protein, 146 aa, unidentified
  source 1..146: note = Mobilisporobacter senegalensis
  REGION 1..146: note = tr|A0A3N1XQ31|A0A3N1XQ31_9FIRM 6-pyruvoyltetrahydropterin/6-carboxytetrahydropterin synthase OS=Mobilisporobacter senegalensis OX=1329262; GN = EDD66_104315 PE=4 SV=1
MRYSQYRFKFYLNASHAIFIQGILGDKHPHTWEIQIDVIKQQGEFVKFENVENSIDKFLEQYQNTFLNDCEPFNSINPTLENITEFFLKEIQEVLKPYGWNIFSIEISETPTRSFIISLVENNIITDLQRKNLAQDIIDKSFANKQ

SEQ ID NO: 22784 - protein, 1023 aa, unidentified
  source 1..1023: note = Mobilisporobacter senegalensis
  REGION 1..1023: note = tr|A0A3N1XRG1|A0A3N1XRG1_9FIRM 6-pyruvoyl tetrahydropterin synthase-like protein; OS = Mobilisporobacter senegalensis OX=1329262; GN = EDD66_104320 PE=4 SV=1
MGFRGYKFRFELHASHSGLHNSLKDQHFHNFTIILYISNLETMYDELILYENIESHITQWMDQYQNRHLGDVGPFQYNDTTIESIGEIFFTKIQRDLKNLELELLRLEIFENPTRIYSVSEKILDNSVNELRLEPVSFNLDQKIEKEFPETDVQEEVAAAMAESGYGEISIEPLESFVPKEKDKTGKNMEAVNNKYKVMKLLAAFTLLLFGAGVIMYIIKISGSYPRGSDTLCHIYRADFIYNSFKSGVAYPLYDSRWYNGVEIMRYWGPVPLYVLAFMEFFTNGNVLDAYILFIGLLVVLGGCGWLLFGWKNNRIGIAAILSLLWFLYPENIRVVITDGNLPRALISALVPFLLYCIWEFINEERWHFIISIIFLFSFIGLCHVGIAAMLLFSLLIFILIDSAYRKNFKLHKYILIGLFLSFINGGIWIVPSLHGGAVSKGESTNQVMKYFFNSVFDSLNPAYRMQGDLECFYYGISIFIIIIAGILLGNKKVKPGFLSALLIFFGTSKSAYFIFSNLPFSQFLWMIRFIPFSLAFAFMSFLMWKNLKKSVIGIMCILLILDTIPAYQYIFVKEEYRIRDVEASQYEKADTLSINEAKEITNQRMAVFDLSRYGSFAPYYIARMNPKVQYTFGAGWEGAKTATNIVQINSAFSGGNYYYLFDRCLELGNDTVLIPIEFLNENGTGARIEEMIRAGEKSGYRFVGQNNNSFLFHLDNDFKSFGTIVEYDCIAIGDSARSISLLFPVFKEGNSSNINDYTIEELRKYNKIYLSGFTYGDKAETEQMLSELAKSGIKIYIDMNKIPVNMKTNRHELFGVCAQAISFQEIYPNIHYKNQKYKPKEFSNEPEEKENSLITWNTVYLDGIKNIDGYCTLNDMDLTFSGTMDNPNIHFLGLNLQYHAQISRDMEIMKLLEEILEESKEDLPQRAIVPLDIEFKGDQIVIDSQYDNVNTSLSFIDIFHTEDTVMEENNLLVVNNGRTTINLKYPYWLEGFVVSSIGIVFTIIFIIYIYKRMNKRKSVSIK

SEQ ID NO: 22785 - protein, 122 aa, Moellerella wisconsensis
  REGION 1..122: note = tr|A0A0N0ICA6|A0A0N0ICA6_9GAMM 6-carboxy-5,6,7,8-tetrahydropterin synthase OS=Moellerella wisconsensis ATCC 35017 OX=1354267 GN=M992_0019 PE=3 SV=1
MSTTIFKDFHFEAAHRLPHVPEDHKCGRLHGHSFMVRLELTGEVDSKSGWLVDFSDVKRIFKPIWQQLDHHYLNEIEGLENPTSEVLAQWIWHKTKPLLPLLSAVMVQETCNAGCIYRGDAG

SEQ ID NO: 22786 - protein, 122 aa, Moellerella wisconsensis; identical to SEQ ID NO: 22785
  REGION 1..122: note = tr|A0A0H2Q7P4|A0A0H2Q7P4_9GAMM 6-carboxy-5,6,7,8-tetrahydropterin synthase OS=Moellerella wisconsensis OX=158849 GN=VK86_13895 PE=3 SV=1

SEQ ID NO: 22787 - protein, 150 aa, unidentified
  source 1..150: note = Moheibacter sediminis
  REGION 1..150: note = tr|A0A1W1YBB2|A0A1W1YBB2_9FLAO 6-pyruvoyltetrahydropterin/6-carboxytetrahydropterin synthase OS=Moheibacter sediminis OX=1434700; GN = SAMN06296427_101217 PE=4 SV=1
MNKVRVTKSFNFETAHALYGYDGKCKNIHGHSYKLFVTVKGIPNQNQDDPKFGMVIDFGDIKSIVKSEVIDEFDHAILLNENSPHKQLGDNLMKEGHKVIFTSYQPSCENMLLDMVARISPKLPEFIQLQSLRLHETETSYAEWLAEDNL

SEQ ID NO: 22788 - protein, 136 aa, unidentified
  source 1..136: note = Moheibacter sediminis
  REGION 1..136: note = tr|A0A1W2AJS2|A0A1W2AJS2_9FLAO 6-carboxy-5,6,7,8-tetrahydropterin synthase OS=Moheibacter sediminis OX=1434700 GN=SAMN06296427_104201 PE=3 SV=1
MKVTISRKAHFNAAHRLFNPTWDDERNYEVFGKCSNPNFHGHNYEMIVSIKGEINPETGFVMNLDDLKAIILTQVEEYLDHKNLNIEVEEFQKLNPTVENIAVVIWNRIRAKLDAGLELKITLFETPRNFVEYDGN

SEQ ID NO: 22789 - protein, 130 aa, unidentified
  source 1..130: note = Monaibacterium marinum
  REGION 1..130: note = tr|A0A2C9CLZ5|A0A2C9CLZ5_9RHOB 6-pyruvoyl-tetrahydropterin synthase OS=Monaibacterium marinum OX=1690039 GN=SAMN06273572_101378 PE=4 SV=1
MFAVEVRDHIMIAHSLKGDVFGPAQKMHGATFVVDVTFFRETLSPDNIVVDMGRAHDVLKAVLGPLNYGNLDEVFPGEVTTTEFLCRHIHGEIAAAAAKGALGPGSDGLSALRVTLNESHVAKAWYEAAL

SEQ ID NO: 22790 - protein, 139 aa, unidentified
  source 1..139: note = Mongoliibacter ruber
  REGION 1..139: note = tr|A0A2T0WBY4|A0A2T0WBY4_9BACT 6-pyruvoyltetrahydropterin/6-carboxytetrahydropterin synthase OS=Mongoliibacter ruber OX=1750599 GN=CLW00_12417; PE = 4 SV=1
MIHVCRKEHFNAAHKLWNPKWSEEKNKEVFGPCSNVNWHGHNFELIVTVKGMPDPETGFVVDLKELSSIIKKLVIDKVDHKNLNMDVDFMEGKMASCENLVVEFWKILQPAINEIVAHGSLYKLTLYETPRNFVEYYGE

SEQ ID NO: 22791 - protein, 136 aa, unidentified
  source 1..136: note = Mongoliibacter ruber
  REGION 1..136: note = tr|A0A2T0WEP4|A0A2T0WEP4_9BACT 6-carboxy-5,6,7,8-tetrahydropterin synthase; OS = Mongoliibacter ruber OX=1750599 GN=CLW00_11535 PE=3 SV=1
MKVAVYRKEHFNAAHRLNNPNWSDEKNQEIFGKCNNPNFHGHNYELIVKLLGPVDPETGYVYDMKVLSDLIKEKVLNRFDHKNLNLDTDEFKNLNPTAENIAVVIWNILRKEIDNKLELIIRLYETERNFVEYDGN

SEQ ID NO: 22792 - protein, 140 aa, unidentified
  source 1..140: note = Monoglobus pectinilyticus
  REGION 1..140: note = tr|A0A2K9P4I6|A0A2K9P4I6_9FIRM 6-carboxy-5,6,7,8-tetrahydropterin synthase OS=Monoglobus pectinilyticus OX=1981510 GN=B9O19_02034 PE=3 SV=1
MYTVSCETHFDSAHFLLGYKGGCKNIHGHRWVVSASVSSETLIEEGGNRGMVIDFNEVKPVLNELVECFDHRLVVERDTLRSTTMLMLEEEEFEVAEVDFRPTVENFSKYFYDELKKRGVPVSKVRVYETPESYAEYCED

SEQ ID NO: 22793 - protein, 290 aa, unidentified
  source 1..290: note = Moorea bouillonii
  REGION 1..290: note = tr|A0A1U7MXQ3|A0A1U7MXQ3_9CYAN 6-pyruvoyl tetrahydropterin synthase OS=Moorea bouillonii PNG; OX = 568701 GN=BJP37_04850 PE=4 SV=1
MECVIKRRAEFSASHRYWLPELTEAENLQRFGLGSRFPGHGHNYVLFVFLTAQLDKYGMVENFSEVKTVIQREVTSQLDYAYLNEVWSEFQQTLPTTENIARVIWQHLVTYLPLLKIQLFEHPKLWADYQGNGMEVYLTISNHFSAAHRLAHPDLSDQENYQIYGKCARPNGHGHNYHIEVTVKGEMDPRTGMIVDLDSLHQVIDEYVLEPFDHTFLNKDIPYFARVVPTAENIAIYICQLLQQPIQELDVQLHKVKLIESPNNSCEVYCTPETTKPAATSSRETLLTLI

SEQ ID NO: 22794 - protein, 131 aa, unidentified
  source 1..131: note = Moorea producens
  REGION 1..131: note = tr|A0A1D8TWM0|A0A1D8TWM0_9CYAN 6-carboxy-5,6,7,8-tetrahydropterin synthase OS=Moorea producens PAL-8-15-08-1 OX=1458985 GN=BJP34_23355 PE=3 SV=1
MMEEWLIYKEFRFEAAHRLPHHDGKCSRLHGHSWVGRVYVKGNQLIEEGSKQGMIMDYGDIKTYLKPLLDNFLDHYYLNETTGLENPSSEAIAKWVFERLEEAGLPGLYAVEIQETCTSGTRYMKPNIKSG

SEQ ID NO: 22795 - protein, 141 aa, unidentified
  source 1..141: note = Moorea producens
  REGION 1..141: note = tr|A0A1D9G462|A0A1D9G462_9CYAN 6-carboxy-5,6,7,8-tetrahydropterin synthase OS=Moorea producens JHB OX=1454205 GN=BJP36_23360 PE=3 SV=1
MEEWLIYKEFRFEAAHRLPHHDGKCSRLHGHSWVGRVYVKGNQLIEEGSKQGMIMDYGDIKTYLKPLLDNFLDHYYLNETTGLENPSSEAIAKWVFERLEEAGLPGLYAVEIQETCTSGTRYSRSQKSEVRSQKRCDPGDF

SEQ ID NO: 22796 - protein, 125 aa, Moorella glycerini
  REGION 1..125: note = tr|A0A0C7NIZ1|A0A0C7NIZ1_9THEO 6-carboxy-5,6,7,8-tetrahydropterin synthase OS=Moorella glycerini OX=55779 GN=2344 PE=3 SV=1
MVALTYIFTFEAAHCLEGYAGDCAHLHGHSYRLEVTVKGPVQADGMVIDFAVLKTLVEESIINRVDHQYLNEVVSFVPTCENLLLWFWKELGAALKPYPHLVLERLVLWETSNARAEITREMESR

SEQ ID NO: 22797 - protein, 202 aa, Moraxella atlantae
  REGION 1..202: note = tr|A0A1B8QGV1|A0A1B8QGV1_9GAMM 6-carboxy-5,6,7,8-tetrahydropterin synthase OS=Moraxella atlantae OX=34059 GN=A9306_06235 PE=4 SV=1
MRIRKLFKFENAHIVRNCSSTRCKYSIHGHSYQIELILQANRLDHGQMVYDFGLLKGAIKDIIDSFDHAICFWNQDNPDYISACKQFSQRWVSLPVSPSAEQFSRVIFFWAREILKQTQMQNGEADVEVYSVIAHETATGYAQCFAEDVDNAHMGALKLSDFEFSEQVKAEWTDPLMYDKLINGERFVNPQVDLQVIDNQND

SEQ ID NO: 22798 - protein, 202 aa, Moraxella atlantae
  REGION 1..202: note = tr|A0A1B8QBZ4|A0A1B8QBZ4_9GAMM 6-carboxy-5,6,7,8-tetrahydropterin synthase OS=Moraxella atlantae OX=34059 GN=A9308_07095 PE=4 SV=1
MRIRKLFKFENAHVVRNCSSTRCKFSIHGHSYQIELILQANRLDHGQMVYDFGLLKGAIKDIIDSFDHAICFWNQDNPDYISACKQFSQRWVSLPVSPSAEQFSRVIFFWAREILKQTQMQNGEADVEVYSVIAHETATGYAQCFAEDVDNAHMGALKLSDFEFSEQVKAEWTDPLMYDKLINGERFVNPQVDLQVIDNQNG

SEQ ID NO: 22799 - protein, 198 aa, Moraxella bovis
  REGION 1..198: note = tr|A0A1T0A5C4|A0A1T0A5C4_MORBO 6-carboxytetrahydropterin synthase OS=Moraxella bovis; OX = 476 GN=DQF64_08435 PE=4 SV=1
MRIRKLFKFENAHIVRNCTSDRCSRSIHGHSYQVELILEAHALDNGQMVYDFGLLKSHIKDLIDSFDHAITFWDKDDGDYIRACKDFSARWISLPVSPSAEQFSRVIFYWADKVMQNTTTQNGETDVSVYSVIVHETATGYAQCFREDIENDRMGKLSLDMFEFSEQVKAEWGDSELFDKLKRGEKFVNPQPLRQVNF

SEQ ID NO: 22800 - protein, 198 aa, Moraxella bovoculi
  REGION 1..198: note = tr|A0A3F3A6K7|A0A3F3A6K7_9GAMM 6-carboxytetrahydropterin synthase OS=Moraxella bovoculi; OX = 386891 GN=AAX10_04085 PE=4 SV=1
MRIRKLFKFENAHIVRNCTSDRCSRSIHGHSYQVELILEAHALDNGQMAYDFGLLKSHIKDLIDSFDHAITFWDKDDGDYIRACKDFSARWISLPVSPSAEQFSRVIFYWADKVMQNTTTQNGETDVSVYSVIVHETATGYAQCFREDVESERMGKLSLDMFEFSEQVKAEWGDSELFDKLKRGEKFVNPKPLRQVEV

SEQ ID NO: 22801 - protein, 198 aa, Moraxella bovoculi
  REGION 1..198: note = tr|A0A066UNN8|A0A066UNN8_9GAMM 6-pyruvoyl tetrahydrobiopterin synthase OS=Moraxella bovoculi 237; OX = 743974 GN=MBO_01465 PE=4 SV=1
MRIRKLFKFENAHIVRNCTSDRCSRSIHGHSYQVELILEAHALDNGQMVYDFGLLKSHIKDLIDSFDHAITFWDKDDGDYIRACKDFSARWISLPVSPSAEQFSRVIFYWADKVMQNTTTQNGETDVSVYSVIVHETATGYAQCFREDVESERMGKLSLDMFEFSEQVKAEWGDSELFDKLKRGEKFVNPKPLRQVEV

SEQ ID NO: 22802 - protein, 198 aa, Moraxella canis
  REGION 1..198: note = tr|A0A1S9ZII0|A0A1S9ZII0_9GAMM 6-carboxytetrahydropterin synthase QueD OS=Moraxella canis; OX = 90239 GN=B0180_07215 PE=4 SV=1
MRIRKLFKFENAHIVRNCSSDRCKRSIHGHSYEVELILEAHRLDHGQMVYDFGLLKHNIKDIIDSFDHAITFWDKDDPGYIQACKDFSARWVSLPVSPSAEQFSRVIFFWADAILSQTIMQNGEQDISVYSVIVHETATGYAQCFRQDVLNEQMGKLSLADFEFSEQVKSEWGDPQMYDKLLKGESFVNPKVDLQVQV

SEQ ID NO: 22803 - protein, 202 aa, Moraxella caprae
  REGION 1..202: note = tr|A0A378R183|A0A378R183_9GAMM Queuosine biosynthesis protein QueD OS=Moraxella caprae OX=90240; GN = NCTC12877_02011 PE=4 SV=1
MRIRKLFKFENAHIVRNCTSDRCSRSIHGHSYQVELILEAHAFDNGQMVYDFGLLKSHIKDLIDSFDHAITFWDKDDGDYIRACKDFSARWISLPVSPSAEQFSRVIFYWADKVLANTTTQNGETDVSVYSVIVHETATGYAQCFKEDVDNERMGKLSLDMFEFSEQVKAEWGDSELFDKLKRGEKFVNPQPLRQVNFKDKL

SEQ ID NO: 22804 - protein, 198 aa, Moraxella catarrhalis
  REGION 1..198: note = tr|A0A3A9R9G2|A0A3A9R9G2_MORCA 6-pyruvoyl tetrahydropterin synthase family protein OS=Moraxella catarrhalis OX=480 GN=EJK53_1025 PE=4 SV=1
MRIRKLFKFENAHIVRNCSSDRCKRSIHGHSYEVELILEAHRLDHGQMVYDFGLLKHHIKDIIDSFDHAITFWDQDDTRYIQACKDFSARWISLPVSPSAEQFSRVIFFWADAILNQTVMQNGEQDISVYSVIVHETATGYAQCFKQDVENEQMGVLSLADFEFSEQVKSEWSDPQMYDKLLKGDAFVNPKVDLQVQV

SEQ ID NO: 22805 - protein, 198 aa, Moraxella catarrhalis
  REGION 1..198: note = tr|A0A198WRJ0|A0A198WRJ0_MORCA 6-carboxytetrahydropterin synthase OS=Moraxella catarrhalis OX=480 GN=AO370_1555 PE=4 SV=1
MRIRKLFKFENAHIVRNCSSDRCKRSIHGHSYEVELILEAHRLDHGQMVYDFGLLKHHIKDIIDSFDHAITFWNQDDTRYIQACKDFSARWVSLPVSPSAEQFSRVIFFWADAILNQTVMQNGEQDISVYSVIVHETATGYAQCFKQDVQNEQMGVLHLADFKFSEQVKSEWSDPQMYDKLLKGDAFVNPKVDLQVQV

SEQ ID NO: 22806 - protein, 198 aa, Moraxella caviae
  REGION 1..198: note = tr|A0A1T0A8M2|A0A1T0A8M2_9GAMM 6-carboxytetrahydropterin synthase QueD OS=Moraxella caviae OX=34060 GN=B0181_02045 PE=4 SV=1
MLIRKLFKFENAHIVRNCTSDRCSRSIHGHSYEVELILEAHRLDNGQMVYDFGLLKSHIKELIDSFDHAITFWDKDDKDYIAACKAFSARWVSLPVSPSAEQFSRVIFCWADALLKNTVMQNGEDGVRVHSVIVHETATGYAQCFLEDVQNPQMGELRLTDFEFSEQVRTEWSDSLMFDKLINGEAIINPKPQRQVAL

SEQ ID NO: 22807 - protein, 199 aa, Moraxella cuniculi
  REGION 1..199: note = tr|A0A3S4QQM6|A0A3S4QQM6_9GAMM Queuosine biosynthesis protein QueD OS=Moraxella cuniculi OX=34061; GN = NCTC10297_01741 PE=4 SV=1
MRIRKLFKFENAHIVRNCSSNRCKYSIHGHSYQVELILQANRLDHGQMVYDFGLLKSAIKDIIDSFDHAITFWQKDDPEYIAACKNFSARWVAMPVSPSAEQFSRVIFFWADAILQQTQMQNGESDVMVYSVIVHETATGYAQCFIEDVQNEQMGKLNLADFEFSDEVRAEWHDPLMYNKLINGEKFINPKVALQVDVS

SEQ ID NO: 22808 - protein, 199 aa, Moraxella cuniculi
  REGION 1..199: note = tr|A0A1N7FJK8|A0A1N7FJK8_9GAMM 6-pyruvoyltetrahydropterin/6-carboxytetrahydropterin synthase OS=Moraxella cuniculi DSM 21768 OX=1122245; GN = SAMN02745664_11355 PE=4 SV =1
MRIRKLFKFENAHIVRNCSSNRCKYSIHGHSYQVELILQANRLDHGQMVYDFGLLKSAIKDIIDSFDHAITFWQKDDPEYIAACKNFSARWVAMPVSPSAEQFSRVIFFWADAILQQTQMQNGESDVMVYSVIVHETATGYAQCFIEDVQNEQMGKLNLADFEFSDEVRAEWHDPLMYDKLISGEKFINPKVALQVDVS

SEQ ID NO: 22809 - protein, 198 aa, Moraxella equi
  REGION 1..198: note = tr|A0A378QML7|A0A378QML7_9GAMM Queuosine biosynthesis protein QueD OS=Moraxella equi OX=60442; GN = NCTC11012_00353 PE=4 SV=1
MRIRKLFKFENAHIVRNCTSDRCSRSIHGHSYQVELILEAHAFDNGQMVYDFGLLKSHIKDLIDSFDHAITFWDKDDSDYIRACKDFSARWISLPVSPSAEQFSRVIFYWADKVLANTTTQNGETDVSVYSVIVHETATGYAQCFKEDIENDRMGKLSLDMFEFSEQVKAEWGDSELFDKLKRGEKFVNPQPLRQVNF

SEQ ID NO: 22810 - protein, 198 aa, Moraxella lacunata
  REGION 1..198: note = tr|A0A1B8PXS2|A0A1B8PXS2_MORLA 6-carboxy-5,6,7,8-tetrahydropterin synthase OS=Moraxella lacunata OX=477 GN=A9309_00665 PE=4 SV=1
MRIRKLFKFENAHIVRNCTSDRCSRSIHGHSYQVELILEAHALDNGQMVYDFGLLKSHIKDLIDSFDHAITFWDKDDSDYIRACKDFSARWISLPVSPSAEQFSRVIFYWADKVMQNTTTQNGETGVSVYSVIVHETATGYAQCFKEDVENERMGKLSLDMFDFSEQVKAEWGDSELFDKLKRGEKFVNPQPLRQVKV

SEQ ID NO: 22811 - protein, 198 aa, Moraxella lacunata
  REGION 1..198: note = tr|A0A1V4GYT2|A0A1V4GYT2_MORLA 6-carboxytetrahydropterin synthase QueD OS=Moraxella lacunata OX=477 GN=B5J94_05250 PE=4 SV=1
MRIRKLFKFENAHIVRNCTSDRCSRSIHGHSYQVELILEAHALDNGQMVYDFGLLKSHIKDLIDSFDHAITFWDKDDGDYIRACKDFSARWISLPVSPSAEQFSRVIFYWADKVMQNTTTQNGETGVSVYSVIVHETATGYAQCFKEDVENERMGKLSLDMFEFSEQVKAEWGDGELFDKLKRGEKFVNPQPLRQVNF

SEQ ID NO: 22812 - protein, 199 aa, Moraxella lincolnii
  REGION 1..199: note = tr|A0A1T0CHI9|A0A1T0CHI9_9GAMM 6-carboxytetrahydropterin synthase QueD OS=Moraxella lincolnii OX=90241 GN=B0682_03970 PE=4 SV=1
MRIRKLFKFENAHIVRNCSSERCKYSIHGHSYQIELILQAHRLDHGQMVYDFGLLKSSIKDIIDSFDHAICFWNKDDSDYIDACKKFSNRWVSLPVSPSAEQFSRVIFFWVKQILEQTHMQNGEADVSVYSVIAHETATGYAQCFEDDVLNAQMGELRLTDFDFSDAVKAEWSDPLMYDKLIHGEKFVNPTVSLQVNAN

SEQ ID NO: 22813 - protein, 201 aa, unidentified
  source 1..201: note = Moraxella macacae
  REGION 1..201: note = tr|L2F6M2|L2F6M2_9GAMM 6-pyruvoyl tetrahydrobiopterin synthase OS=Moraxella macacae 0408225; OX = 1230338 GN=MOMA_05916 PE=4 SV=1
MRIRKLFKFENAHIVRNCSSDRCKFSIHGHSYQVELILEAYALDNGQMVYDFGLLKSSIKDMIDSFDHAITFWNKDDSEYIRACKNFSARWVSLPVSPSAEQFSRVIFFWARHILKQTQMQNGESLVKVYSVIVHETATGYAQCFEYDVDNEQMGKLHLTEFAFSDQVKAEWSDPKMYEKLLQGEKFVNPLVKAQVVNAKL

SEQ ID NO: 22814 - protein, 198 aa, Moraxella nonliquefaciens
  REGION 1..198: note = tr|A0A1B8PND4|A0A1B8PND4_MORNO 6-carboxy-5,6,7,8-tetrahydropterin synthase OS=Moraxella nonliquefaciens OX=478 GN=A7456_05115 PE=4 SV=1
MRIRKLFKFENAHIVRNCTSERCSRSIHGHSYQVELILEAHALDNGQMVYDFGLLKSHIKDLIDSFDHAITFWNKDDPDYVRACKRFSARWISLPVSPSAEQFSRVIFYWADKVLTNTITQNGEMGVSVYSVIVHETATGYAQCFGEDVANESMGKLSLDEFEFSEQVKAEWGDGELFDKLKRGEKFVNPQPLRQVRV

SEQ ID NO: 22815 - protein, 197 aa, Moraxella osloensis
  REGION 1..197: note = tr|A0A1B8PZZ2|A0A1B8PZZ2_9GAMM 6-carboxy-5,6,7,8-tetrahydropterin synthase OS=Moraxella osloensis OX=34062 GN=A9299_02230 PE=4 SV=1
MRIRKLFKFENAHIVRNCSSDRCKYSIHGHSYQIELILEAHRLDHGQMVYDFGLLKSSIKDIIDSFDHAICFWDKDDPNYIDACKKFSARWISLPVSPSAEQFSRVVFFWAREILKQTQMQNGETDVKVYSVIAHETATGYAQCFEDDVDNVQMGALTLGDFEFSEQVKAEWHDPLMYDKLKKGEKFVNPTVVLQVD

SEQ ID NO: 22816 - protein, 197 aa, Moraxella osloensis
  REGION 1..197: note = tr|A0A0X8K7T7|A0A0X8K7T7_9GAMM 6-carboxy-5,6,7,8-tetrahydropterin synthase OS=Moraxella osloensis OX=34062 GN=A9Z61_00760 PE=4 SV=1
MRIRKLFKFENAHIVRNCSSDRCKYSIHGHSYQIELILEAHRLDHGQMVYDFGLLKSSIKDIIDSFDHAICFWDKDDPDYIDACKKFSARWISLPVSPSAEQFSRVVFFWAREILKQTQMQNGETDVKVYSVIAHETATGYAQCFEDDVDNAQMGALTLGDFEFSEQVKAEWHDPLMYDKLKKGEKFVNPTVVLQVD

SEQ ID NO: 22817 - protein, 198 aa, Moraxella ovis
  REGION 1..198: note = tr|A0A378PPX7|A0A378PPX7_9GAMM Queuosine biosynthesis protein QueD OS=Moraxella ovis OX=29433; GN = NCTC11227_00968 PE=4 SV=1
MRIRKLFKFENAHIVRNCTSDRCSRSIHGHSYQVELILEAHALDNGQMVYDFGLLKSHIKDLIDSFDHAITFWDKDDPDYIRACKDFSARWISLPVSPSAEQFSRVIFYWADKVMQNTTTQNGETDVSVYSVIVHETATGYAQCFREDVESERMGKLSLDMFEFSEQVKAEWGDSELFDKLKRGEKFVNPRLLRQVEV

SEQ ID NO: 22818 - protein, 197 aa, Moraxella pluranimalium
  REGION 1..197: note = tr|A0A1T0CV59|A0A1T0CV59_9GAMM 6-carboxytetrahydropterin synthase QueD OS=Moraxella pluranimalium OX=470453 GN=B0680_00225 PE=4 SV=1
MRIRKLFKFENAHIVRNCSSDRCKRSIHGHSYQVELILEAHRLDHGQMVYDFGLLKGNIKDIIDSFDHAITFWDKDDPSYIEACKDFSARWVSLPVSPSAEQFSRVIYFWVNEILKQTQMQNGEADVSVYSVIVHETATGYAQCFSDDVANEQMGKLELADFEFSEQVRAEWSDPQMYDKLVRGEKFYNPQVSLQVK

SEQ ID NO: 22819 - protein, 198 aa, Moraxella porci
  REGION 1..198: note = tr|A0A1T0CWP1|A0A1T0CWP1_9GAMM 6-carboxytetrahydropterin synthase QueD OS=Moraxella porci DSM 25326 OX=573983 GN=B0681_02605 PE=4 SV=1
MRIRKLFKFENAHIVRNCSSDRCKRSIHGHSYQVELILEAHRLDHGQMVYDFGLLKGNIKDIIDSFDHAITFWDKDDPSYIQACKDFSARWVSLPVSPSAEQFSRVIFFWADAILKQTQMQNGEQDVHLHSVIVHETATGYAQCFGDDVTNEQMGKLDLADFEFSEQVKAEWGDPMMYDKLKSGKSFINPSVDLQVQV

SEQ ID NO: 22820 - protein, 205 aa, Moraxella sp.
  REGION 1..205: note = tr|A0A229GRV6|A0A229GRV6_9GAMM 6-carboxytetrahydropterin synthase QueD OS=Moraxella sp. VT-16-12 OX=2014877 GN=CEW93_07830 PE=4 SV=1
MRIRKLFKFENAHIVRNCTSQRCSRSIHGHSYQVELILEAHALDNGQMVYDFGLLKSHIKELIDSFDHAITFWDKDNTDYINACKAFSARWVSLPVSPSAEQFSRVIFYWVDCVLKNTITQNGEKDVQIYSVIVHETDTGYAQCFREDVENARMGRLSLDMFEFSEQVKAEWSDDKLFDKLKRGEKFVNPSPLKQVKTDDHSDFK

SEQ ID NO: 22821 - protein, 198 aa, Moraxella sp.; identical to SEQ ID NO: 22804
  REGION 1..198: note = tr|A0A1E9VU26|A0A1E9VU26_9GAMM 6-carboxy-5,6,7,8-tetrahydropterin synthase OS=Moraxella sp. HMSC061H09 OX=1715217 GN=HMPREF2573_07375 PE=4 SV=1

SEQ ID NO: 22822 - protein, 200 aa, unidentified
  source 1..200: note = Moraxellaceae bacterium
  REGION 1..200: note = tr|A0A345P675|A0A345P675_9GAMM 6-carboxytetrahydropterin synthase OS=Moraxellaceae bacterium HYN0046 OX=2283318 GN=HYN46_08015 PE=4 SV=1
MLIRKLFKFENAHIVRNCTSDRCRRSIHGHSYQVELILEAHRLDHGQMVYDFGLLKGQIRDIIDSFDHAICFWNQDDEGYIASCKQYSARWISLPVSPSAEQFSRFFFFLADTILRQTITHNGEGDVTVHSVIVHETATGYAQCFRADVENEQMGLLKLQDFEFSEQVQIEWADPQMFEKMKQGLTFENPLVEHSVRVDG

SEQ ID NO: 22823 - protein, 197 aa, unidentified
  source 1..197: note = Moraxellaceae bacterium
  REGION 1..197: note = tr|A0A3D4UEP6|A0A3D4UEP6_9GAMM 6-carboxytetrahydropterin synthase QueD OS=Moraxellaceae bacterium OX=1889775 GN=DF427_10945 PE=4 SV=1
MLIRKLFGFENAHVVRNCTSDRCSRSIHGHSYKVEVILEAHALDHGQMVYDFGLMKGYIRTLIDSFDHAICFWDKDDAAYIEACKAFSARWIALPISPSAEQFSRLFFVLADAVLKQTDMRNGEADVTLQSIIVHETATGYAQCFREDVLNPRMGEIPLQSIVFSDQVRAEWSDADLYERLKRGERFVNPVAGRQVQ

SEQ ID NO: 22824 - protein, 120 aa, Morganella morganii
  REGION 1..120: note = tr|A0A422UDZ2|A0A422UDZ2_MORMO 6-carboxy-5,6,7,8-tetrahydropterin synthase OS=Morganella morganii subsp. morganii OX=180434 GN=queD PE=3 SV=1
MSTMIFKEFQFEAAHHLPHVPEGHKCGRLHGHSFLVRLELSGEVDAHTGWLIDFAEVKQAFKPIYDRLDHHYLNEIPGLENPTSEVLAEWIWQQTKPLLPMLSAVLVKETCTAGCIYRGE

SEQ ID NO: 22825 - protein, 120 aa, Morganella morganii
  REGION 1..120: note = tr|A0A2C5TNP7|A0A2C5TNP7_MORMO 6-carboxy-5,6,7,8-tetrahydropterin synthase OS=Morganella morganii OX=582 GN=queD PE=3 SV=1
MSTTIFKEFQFEAAHRLPHVPEGHKCGRLHGHSFLVRLELSGEVDAHTGWLIDFAEVKQAFKPIYDRLDHHYLNEIPGLENPTSEVLAEWIWQQTKPLLPMLSAVLVKETCTAGCIYRGE

SEQ ID NO: 22826 - protein, 120 aa, Morganella psychrotolerans
  REGION 1..120: note = tr|A0A1B8HAJ8|A0A1B8HAJ8_9GAMM 6-carboxy-5,6,7,8-tetrahydropterin synthase OS=Morganella psychrotolerans OX=368603 GN=AYY18_06290 PE=3 SV=1
MTTTIFKEFQFEAAHHLPHVPEGHKCGRLHGHSFLVRLELSGNVDAHTGWLIDFAEVKQAFKPVYDRLDHHYLNEIAGLENPTSEVLAHWIWQQTKPLLPLLSAVMVKETCTAGCVYRGE

SEQ ID NO: 22827 - protein, 120 aa, Morganella psychrotolerans
  REGION 1..120: note = tr|A0A1B8H6E4|A0A1B8H6E4_9GAMM 6-carboxy-5,6,7,8-tetrahydropterin synthase OS=Morganella psychrotolerans OX=368603 GN=AYY16_12940 PE=3 SV=1
MTTTIFKEFQFEAAHHLPHVPEGHKCGRLHGHSFLVRLELSGNVDAHTGWLIDFAEVKQAFKPIYDRLDHHYLNEIAGLENPTSEVLAHWIWQQTKPLLPLLSAVMVKETCTAGCIYRGE

SEQ ID NO: 22828 - protein, 120 aa, Morganella sp.
  REGION 1..120: note = tr|A0A3D3HLH0|A0A3D3HLH0_9GAMM 6-carboxy-5,6,7,8-tetrahydropterin synthase OS=Morganella sp. (in: Bacteria) OX=1912315 GN=queD PE=3 SV=1
MTTTIFKEFQFEAAHHLPHVPEGHKCGRLHGHSFLVRLELSGDVDAHTGWLIDFAEVKQAFKPIYDQLDHHYLNEIAGLENPTSEVLAHWIWQQTKPLLPLLSAVMVKETCTAGCVYRGE

SEQ ID NO: 22829 - protein, 290 aa, Moritella sp.
  REGION 1..290: note = tr|A0A2G2IK00|A0A2G2IK00_9GAMM Uncharacterized protein OS=Moritella sp. OX=78556 GN=COA76_15565 PE=4 SV=1
MKLFVKDLTVIDSSVLDYSRGIIGQSWLVDIVLHGDLNEQSMILDFGIVKKLIKSTVDELVDHKLIVPAHAKFCDVMSDGAFTYVDAWREHSESIHLACPDQAFALIPAEQITLASLETYLTEQLMLRLPNNVKKLDVKLREEKIDGADYCYSHGLRKHLGNCQRIAHGHRSTIEILRNDERDTALEFSWAERWRDIYLAEHCDMVSASELSLSRAGMAALTPEHYCFKYQAPQGEFQLALSKSIVEIMPTETTVENIAQYIADTLAKDCNDSLTVFAYEGVGKGAIASA

SEQ ID NO: 22830 - protein, 290 aa, Moritella sp.
  REGION 1..290: note = tr|A6FEQ7|A6FEQ7_9GAMM Uncharacterized protein; OS = Moritella sp. PE36 OX=58051 GN=PE36_02454 PE=4 SV=1
MKLFVKDLTVIDSSVLDYSRGIIGQSWLVDIVLHGDLNEQSMILDFGIVKKLIKSTVDELVDHKLIVPAHAKFCDVMSDGAFTYVDAWREHSESIHLACPDQAFALIPAEQITLASLETYLTEQLMLRLPNNVKKLDVKLREEKIDGADYCYSHGLRKHLGNCQRIAHGHRSTIEILRNDERDTALEFSWAERWRDIYLAEHCDMVSASELSLSRAGMAALTPEHYCFKYQAPQGEFQLAISKSIVEIMPTETTVENIAQYIADTLAKDCNDSLTVFAYEGVGKGAIASA

SEQ ID NO: 22831 - protein, 290 aa, Moritella viscosa
  REGION 1..290: note = tr|A0A090IEX5|A0A090IEX5_9GAMM Uncharacterized protein OS=Moritella viscosa OX=80854 GN=MVIS_3058 PE=4; SV = 1
MKLFVKDLTVIDSSVLDYSRGIIGQSWLVDIVLHGDLNEQSMILDFGIVKKLIKSTVDELVDHKLIVPAHAKFCDVMSDGAFTYVDAWREHSESIHLACPDQAFALIPTEQITLANLEMYLTEQLMLRLPNNVKKLDVKLREEKIDGAEYCYSHGLRKHLGNCQRIAHGHRSTIEILRNDERDAALEASWAERWKDIYLAEHCDMVSASEVSLSRAGMAALTPEHYCFKYQAPQGEFQLAISKSIVEIMPTETTVENIAQYIADTLAKDCSDPLTVFAYEGVGKGAIASA

SEQ ID NO: 22832 - protein, 290 aa, Moritella yayanosii
  REGION 1..290: note = tr|A0A330LI51|A0A330LI51_9GAMM Uncharacterized protein OS=Moritella yayanosii OX=69539 GN=MORIYA_0106; PE = 4 SV=1
MKLFVKDLTVIDSSVLDYSRGIIGQSWLVDIVLHGDLNEQSMILDFGIVKKLIKSTVDELIDHKLIVPAHAKFCDVMSDGAFTYVDAWREHSESIHLACPDQAFALIPAEEITLASLETYLTEQLMLRLPNNVKQLDVKLREEKIDGADYCYSHGLRQHLGNCQRIAHGHRSTIEILRNDERDTALEFSWAERWRDIYLAEHCDMVSASELSLSRAGMAALTPEHYCFKYQAPQGEFQLALSKSIVEIMPTETTVENIAQFIADTLAKDCNDSLTVFAYEGVGKGAIASA

SEQ ID NO: 22833 - protein, 140 aa, Morococcus cerebrosus
  REGION 1..140: note = tr|A0A0C1E4Q7|A0A0C1E4Q7_9NEIS 6-carboxy-5,6,7,8-tetrahydropterin synthase OS=Morococcus cerebrosus OX=1056807 GN=MCC93_16280 PE=3 SV=1
MKITKIFTFDSSHMLDGHDGKCQNLHGHTYKLEITVSDDPIRGGAKDGMVMDFTDLKAAVKKHITDPFDHAFIYNGGNERECQIAALLEGWNMKTLCLPCRTTAENMAVEMYDRLQNAGLKVCSVKLWETPTSCAEYEGE

SEQ ID NO: 22834 - protein, 290 aa, unidentified
  source 1..290: note = Motilimonas sp.
  REGION 1..290: note = tr|A0A418YBZ0|A0A418YBZ0_9GAMM Uncharacterized protein OS=Motilimonas sp. PLHSC7-2 OX=2303987; GN = D1Z90_15210 PE=4 SV=1
MKLFVRALTVIDSSFLDVQRGMVGESYQVDVELDGQVNEQNMLLDFSLVKKQIKQIIDAEVDHRLIVPMKVSGIDKQVADDEGQQTELHFPLSSGQYISLSCPEQAFCYLPAEQVNVRTLTTHLESIILAKLPDNISGLTINLSHEIIATPFYHYSHGLKKHDGNCQRIAHGHRSRLDIYVDDLWHKDSVNLWAERWQDIYLGSLEDQVALQKLSIANLNSAESFGFRYQAQQGMFELIMPAHMCDVIDIDTTIESIAEYLCQQVKQSHPDSKVKVLGYEGIGKGAIFEL

SEQ ID NO: 22835 - protein, 118 aa, unidentified
  source 1..118: note = Motiliproteus coralliicola
  REGION 1..118: note = tr|A0A369WQD8|A0A369WQD8_9GAMM 6-carboxy-5,6,7,8-tetrahydropterin synthase; OS = Motiliproteus coralliicola OX=2283196 GN=queD PE=3 SV=1
MEIYKEFTFEAAHLLPHVPEGHKCGRLHGHSFFVRIYVSGEVDSHTGWIVDFADIKAAFKPIYDRLDHYYLNDIEGLENPTSEVLAKWIWKELKPSLPQLSKILIKETCTSGCVYEGD

SEQ ID NO: 22836 - protein, 285 aa, unidentified
  source 1..285: note = Motiliproteus coralliicola
  REGION 1..285: note = tr|A0A369WBK5|A0A369WBK5_9GAMM 6-pyruvoyl tetrahydropterin reductase OS=Motiliproteus coralliicola; OX = 2283196 GN=DV711_10810 PE=4 SV=1
MARLFVNNLTVMDFSFLDVERGLVGESWIVDVELIGDLDDQGMVFDFGDVKKQIKRFFDAQADHRLLVPVRSPGCRIQEDNDRLSVEFPLNSGAIVSHQSPPDTVLLVDSQAIVPDQIAQQLQRQLKTLLPGNVSNLFIGLRPEKIDGPYYHYTHGLQQHLGQCQRIAHGHRSRIEIYIDDERSQQLEQHWASRLADSYIATKSHVVEELDCNGIPHTRLAYTAQQGEFAVSVPSSQVLLIPYVSTVENIARYLAETIAQQQSGQVTVRAFEGVEKGAVAEAGSD

SEQ ID NO: 22837 - protein, 118 aa, unidentified
  source 1..118: note = Motiliproteus sp.
  REGION 1..118: note = tr|A0A1R1MG02|A0A1R1MG02_9GAMM 6-carboxy-5,6,7,8-tetrahydropterin synthase; OS = Motiliproteus sp. MSK22-1 OX=1897630 GN=BGP75_06125; PE = 3 SV=1
MEIYKEFTFEAAHLLPNVPKGHKCGRLHGHSFMVQVHVSGEVDPRTGWIMDFAQLKAAFRPIYDRLDHYYLNDIAGLENPTSEVLARWIWNELKPSLPELSKIVIKETCTSGCVYKGD

SEQ ID NO: 22838 - protein, 138 aa, unidentified
  source 1..138: note = Mucilaginibacter auburnensis
  REGION 1..138: note = tr|A0A2H9VPI9|A0A2H9VPI9_9SPHI 6-pyruvoyltetrahydropterin/6-carboxytetrahydropterin synthase OS=Mucilaginibacter auburnensis OX=1457233; GN = CLV57_3384 PE=4 SV=1
MIHVTRREHFNAAHRMYREEWSAEKNAEVFGKCANPNWHGHNYNLFVTVKGEITHATGYLIDLKELKEIINEHVIEKLDHKNLNMDVDFMKGKMASTELLCIEIFNQLKGPIEAYEGVFLHSVRLFETENNSAEYFGD

SEQ ID NO: 22839 - protein, 123 aa, Mucilaginibacter frigoritolerans
  REGION 1..123: note = tr|A0A562TUL6|A0A562TUL6_9SPHI 6-pyruvoyltetrahydropterin/6-carboxytetrahydropterin synthase OS=Mucilaginibacter frigoritolerans OX=652788; GN = JN11_03723 PE=4 SV=1
MYREEWSEEKNAEVFGKCANPNWHGHNYNLFVTVKGEITHATGYLIDLKDLKVIINDYVIEKLDHKNINKDVPFMAGKMASTELLCIEIFNQLKAPIEAHEGVFLHSVKLHETENNSAEYFGD

SEQ ID NO: 22840 - protein, 134 aa, unidentified
  source 1..134: note = Mucilaginibacter ginsenosidivorans
  REGION 1..134: note = tr|A0A5B8UTG4|A0A5B8UTG4_9SPHI 6-carboxy-5,6,7,8-tetrahydropterin synthase; OS = Mucilaginibacter ginsenosidivorans OX=398053; GN = FRZ54_06755 PE=3 SV=1
MITTICRKFHFNAAHRLHNTHWTDEKNQDVFGKCNNPNYHGHNYELIVKVTGEIDPDTGYVMDIKALKEIVRQVVTERFDHRNLNLDLPEFTTLNPTAENIAGVIYTLLKPQIQNKLTIILYETERNFVEYSGE

SEQ ID NO: 22841 - protein, 144 aa, unidentified
  source 1..144: note = Mucilaginibacter ginsenosidivorans
  REGION 1..144: note = tr|A0A5B8UUC1|A0A5B8UUC1_9SPHI 6-carboxytetrahydropterin synthase OS=Mucilaginibacter ginsenosidivorans OX=398053 GN=FRZ54_07085 PE=4 SV=1
MIRITKIFYFEMAHALHGYNGACRHIHGHSYELHVTIASVKGEDTYLQSPGFIIDFKELKKIINLAVIEKFDHKLVLSQAYLSKFPAVMLQENLEILEVEPSVENLLLFSRKAICKVLPPLLSLQGLKLYETRDSYAEWLASIN

SEQ ID NO: 22842 - protein, 138 aa, unidentified
  source 1..138: note = Mucilaginibacter ginsenosidivorax
  REGION 1..138: note = tr|A0A5B8WD93|A0A5B8WD93_9SPHI 6-carboxytetrahydropterin synthase OS=Mucilaginibacter ginsenosidivorax OX=862126 GN=FSB76_13660 PE=4 SV=1
MIHITRKEHFNAAHRMYREEWSAEKNNEVFGKCANPNWHGHNYNLFVTVKGEVTHATGYLMDLKELKVIINEHVIEKLDHKNINLDVEFMAGKMASTELLCIEIFNQLKAPIEAYEGVFLHSVKLYETENNSAEYFGG

SEQ ID NO: 22843 - protein, 118 aa, unidentified
  source 1..118: note = Mucilaginibacter ginsenosidivorax
  REGION 1..118: note = tr|A0A5B8VUU2|A0A5B8VUU2_9SPHI 6-carboxy-5,6,7,8-tetrahydropterin synthase; OS = Mucilaginibacter ginsenosidivorax OX=862126 GN=queD; PE = 3 SV=1
MIIYKQFTFDAAHFSPNVPEGHKCKKLHGHTYQVTIFLEAAVLESDGWVMDFTELKAIVKPLVAQLDHSLLNDIEGLENPTTENLAIWLWQKIYPQLQILKRIELKETPTSGVIYEGK

SEQ ID NO: 22844 - protein, 138 aa, Mucilaginibacter gossypii
  REGION 1..138: note = tr|A0A5C1ISW5|A0A5C1ISW5_9SPHI 6-carboxytetrahydropterin synthase OS=Mucilaginibacter gossypii OX=551996 GN=DIU38_024780 PE=4 SV=1
MIHITRKEHFNAAHRMYREEWSAEKNFEVFGKCANPNWHGHNYNLFVTVKGEVTHATGYLIDLKELKIIINEYVIEKLDHKNINKDVDFMAGKMASTELLCIEIFNQLKGPIEAYEGVFLHSVKLYETENNSAEYFGG

SEQ ID NO: 22845 - protein, 118 aa, Mucilaginibacter gossypii
  REGION 1..118: note = tr|A0A1G8C3U0|A0A1G8C3U0_9SPHI 6-carboxy-5,6,7,8-tetrahydropterin synthase; OS = Mucilaginibacter gossypii OX=551996; GN = SAMN05192573_109129 PE=3 SV=1
MIVYKSFTFDSAHFLPNVPLHHKCRNIHGHTYHLTVYFEGEVTSPEGWVLDFALIKNAVKPIVDQLDHTILNEVPGLENPTAENLAIWIWKSITDKLDGLNKIELKETPTSGVIYEGK

SEQ ID NO: 22846 - protein, 149 aa, Mucilaginibacter gossypiicola
  REGION 1..149: note = tr|A0A1H8A2R8|A0A1H8A2R8_9SPHI 6-carboxy-5,6,7,8-tetrahydropterin synthase; OS = Mucilaginibacter gossypiicola OX=551995; GN = SAMN05192574_101339 PE=3 SV=1
MIKVTIANDPGHMIINKFGLTLQRYYLSNLFMIIYQHFTFDAAHFLPHVPEGHKCRNLHGHTYHLTLYIAGEILEREGWILDFSDLKAIAAPVIGMLDHALLNSIEGLENPTAELLAIWIWRQIKPLLPGLRKIELKETPASGVIYEGE

SEQ ID NO: 22847 - protein, 123 aa, Mucilaginibacter gossypiicola
  REGION 1..123: note = tr|A0A1H8QLI0|A0A1H8QLI0_9SPHI 6-pyruvoyltetrahydropterin/6-carboxytetrahydropterin synthase OS=Mucilaginibacter gossypiicola OX=551995; GN = SAMN05192574_10947 PE=4 SV =1
MYREEWSAEKNFEVFGKCANPNWHGHNYNLFVTVKGEVTHATGYLIDLKELKIIINEYVIEKLDHKNINKDVDFMAGKMASTELLCIEIFNQLKGPIEAYEGVFLHSVKLYETENNSAEYFGG

SEQ ID NO: 22848 - protein, 139 aa, unidentified
  source 1..139: note = Mucilaginibacter gotjawali
  REGION 1..139: note = tr|A0A125T1Z5|A0A125T1Z5_9SPHI 6-carboxy-5,6,7,8-tetrahydropterin synthase; OS = Mucilaginibacter gotjawali OX=1550579 GN=MgSA37_00266; PE = 3 SV=1
MMIFITRKEHFNAAHRMYREEWSEEKNAEVFGKCANPNWHGHNYNLFVTVKGEVTHATGYLMDLKELKIIINDYVIEKLDHKNINKDVDFMTGKMASTELLCIEIFNQLKKPIEAYEGVFLHSVKLYETENNSAEYFGD

SEQ ID NO: 22849 - protein, 138 aa, Mucilaginibacter gracilis
  REGION 1..138: note = tr|A0A495IXK2|A0A495IXK2_9SPHI 6-pyruvoyltetrahydropterin/6-carboxytetrahydropterin synthase OS=Mucilaginibacter gracilis OX=423350; GN = BDD43_1255 PE=4 SV=1
MIYITRKEHFNAAHRMYRDEWSAEKNNEVFGKCANPNWHGHNYNIFVTVKGEISHATGYLIDLKDLKVIINDYVIEKLDHKNINLDVPFMQGKMASTELLCIEIFNQLKAPIEANEGVFLHSVKLYETENNSAEYFGD

SEQ ID NO: 22850 - protein, 118 aa, Mucilaginibacter gracilis
  REGION 1..118: note = tr|A0A495J3M7|A0A495J3M7_9SPHI 6-carboxy-5,6,7,8-tetrahydropterin synthase; OS = Mucilaginibacter gracilis OX=423350 GN=BDD43_3790 PE=3; SV = 1
MIIFKKFTFDCAHYLPKVPVGHKCRNMHGHTYHVTFFIDGPIDDNLGWVMDFTDLKNIVKPVIQQLDHAVLNEIPGLENPTAENLAVWLWNELKPAIPQLDKIELMETPTSGVIYNGS

SEQ ID NO: 22851 - protein, 138 aa, Mucilaginibacter lappiensis
  REGION 1..138: note = tr|A0A1N6ZTB9|A0A1N6ZTB9_9SPHI 6-pyruvoyltetrahydropterin/6-carboxytetrahydropterin synthase OS=Mucilaginibacter lappiensis OX=354630; GN = SAMN05421821_106122 PE=4 SV= 1
MIHITRKEHFNAAHRMYREEWSAEKNFEVFGKCANPNWHGHNYNLFVTVKGEVTHATGYLIDLKELKTIINDYVIEKLDHKNINKDVPFMEGKMASTELLCIEIFNQLKAPIEAYEGVFLHSVKLYETENNSAEYFGG

SEQ ID NO: 22852 - protein, 123 aa, Mucilaginibacter lappiensis
  REGION 1..123: note = tr|A0A1N6VRA0|A0A1N6VRA0_9SPHI 6-pyruvoyltetrahydropterin/6-carboxytetrahydropterin synthase OS=Mucilaginibacter lappiensis OX=354630; GN = SAMN05421821_103447 PE=4 SV= 1
MYREEWSAEKNEEIFGKCANPNWHGHNYNLFVTVKGEVSYTNGYLIDLKQLKAIIQENAIEKLDHKNLNLDVDFMQGKMATTELLCMEIFNQLKTPIEINKGVFLHSVRLYETENNSAEYFGG

SEQ ID NO: 22853 - protein, 138 aa, Mucilaginibacter mallensis
  REGION 1..138: note = tr|A0A1H2BWX7|A0A1H2BWX7_9SPHI 6-pyruvoyltetrahydropterin/6-carboxytetrahydropterin synthase OS=Mucilaginibacter mallensis OX=652787; GN = SAMN05216490_4424 PE=4 SV=1
MIYITRKEHFNAAHRMYREEWSAEKNNEVFGKCANPNWHGHNYNLFVTVKGQVTHATGYLIDLKELKIIINDYVIEKLDHKNINKDVEFMAGKMASTELLCIEIFNQLKAPIETYDGVFLHSVKLYETENNSAEYFGD

SEQ ID NO: 22854 - protein, 123 aa, Mucilaginibacter oryzae
  REGION 1..123: note = tr|A0A316H616|A0A316H616_9SPHI 6-pyruvoyltetrahydropterin/6-carboxytetrahydropterin synthase OS=Mucilaginibacter oryzae OX=468058; GN = LX99_03845 PE=4 SV=1
MYREEWSAEKNFEVFGKCANPNWHGHNYNLFVTVKGEITHATGYLIDLKELKAIINEYVIEKLDHKNINKDVDFMAGKMASTELLCIEIFNQLKGPIEAYEGVFLHSVKLYETENNSAEYFGG

SEQ ID NO: 22855 - protein, 120 aa, Mucilaginibacter oryzae
  REGION 1..120: note = tr|A0A316HIK4|A0A316HIK4_9SPHI 6-carboxy-5,6,7,8-tetrahydropterin synthase; OS = Mucilaginibacter oryzae OX=468058 GN=LX99_00601 PE=3; SV = 1
MTIYKQFTFDAAHFLPNVPEGHRCRRVHGHTYHLTVYVSGAVSAEEGWVIDFKDLKAVVKPLVDQLDHAMLNEIAGLQNPTAENVARWLWRGIQPEIPGLSRIELKETPTSGVIYEGGAD

SEQ ID NO: 22856 - protein, 138 aa, Mucilaginibacter paludis
  REGION 1..138: note = tr|H1YIP5|H1YIP5_9SPHI Uncharacterized protein; OS = Mucilaginibacter paludis DSM 18603 OX=714943; GN = Mucpa_3492 PE=4 SV=1
MIYITRKEHFNAAHRMYREEWSAEKNEEMFGKCANPNWHGHNYNLFVTVKGEVTHATGYLMDLKDLKVIINDCVIEKLDHKNINLDVPFMKGKMASTELLCIEIFNQLKAPIEAYQGVFLHSVKLYETENNSAEYFGD

SEQ ID NO: 22857 - protein, 118 aa, Mucilaginibacter paludis
  REGION 1..118: note = tr|H1Y2E8|H1Y2E8_9SPHI 6-carboxy-5,6,7,8-tetrahydropterin synthase; OS = Mucilaginibacter paludis DSM 18603 OX=714943; GN = Mucpa_3832 PE=3 SV=1
MILYKQFTFDSAHFLSRVPDGHKCKAIHGHTYHLTVYAEGDVKEQEGWVFDFGDMTSVVKPIIETLDHAMLNNIEGLENPTAELLAVWLWKKIKPELPALSKIELKETPTSGVIYEGD

SEQ ID NO: 22858 - protein, 138 aa, unidentified
  source 1..138: note = Mucilaginibacter pedocola
  REGION 1..138: note = tr|A0A1S9PA78|A0A1S9PA78_9SPHI 6-pyruvoyl tetrahydrobiopterin synthase OS=Mucilaginibacter pedocola; OX = 1792845 GN=BC343_12435 PE=4 SV=1
MIHITRKEHFNAAHRMYREEWSAEKNAEVFGKCANPNWHGHNYNLYVTVKGEITHATGYLIDLKELKEIINEYIIDKLDHKNLNLDVDFMKGKMASTELLTIEIFNQLKGPIEAYPGVFLHSVRLFETENNSAEYFGE

SEQ ID NO: 22859 - protein, 138 aa, unidentified
  source 1..138: note = Mucilaginibacter phyllosphaerae
  REGION 1..138: note = tr|A0A4Y8AEG8|A0A4Y8AEG8_9SPHI 6-carboxy-5,6,7,8-tetrahydropterin synthase; OS = Mucilaginibacter phyllosphaerae OX=1812349; GN = E2R65_09490 PE=3 SV=1
MIHITRKEHFNAAHRMYREEWSAEKNNEVFGKCANPNWHGHNYNLFVTVKGEITHATGYLMDLKELKQIINEYVIEKLDHKNINMDVEFMKGIMASTELLCIGIFNQLKAPIEAYPGVFLHSVKLYETENNSAEYFGG

SEQ ID NO: 22860 - protein, 138 aa, unidentified
  source 1..138: note = Mucilaginibacter pineti
  REGION 1..138: note = tr|A0A1G7DJY0|A0A1G7DJY0_9SPHI 6-pyruvoyltetrahydropterin/6-carboxytetrahydropterin synthase OS=Mucilaginibacter pineti OX=1391627; GN = SAMN05216464_10715 PE=4 SV=1
MIYITRKEHFNAAHRMYREEWSAEKNNEVFGKCANPNWHGHNYNLFVTIKGEVTHATGYLMDLKDLKVVINEHVIEKLDHKNINMDVEFMKGIMASTELLCIGIFNQLKGPIEVNEGVFLHSVKLYETENNSAEYFGG

SEQ ID NO: 22861 - protein, 123 aa, unidentified
  source 1..123: note = Mucilaginibacter polytrichastri
  REGION 1..123: note = tr|A0A1Q6A3L6|A0A1Q6A3L6_9SPHI 6-pyruvoyl tetrahydrobiopterin synthase OS=Mucilaginibacter polytrichastri OX=1302689 GN=RG47T_4072 PE=4 SV=1
MYREEWSAEKNQEVFGKCANPNWHGHNYNLFVTVKGEITHATGYLIDLKELKEIINEHVIEKLDHKNLNLDVPFMAGKMASTELLTIEIFNQLKGPIEAYEGVFLHSVRLFETENNSAEYFGD

SEQ ID NO: 22862 - protein, 138 aa, unidentified
  source 1..138: note = Mucilaginibacter psychrotolerans
  REGION 1..138: note = tr|A0A4Y8SMZ9|A0A4Y8SMZ9_9SPHI 6-carboxytetrahydropterin synthase OS=Mucilaginibacter psychrotolerans OX=1524096 GN=E2R66_03295 PE=4 SV=1
MIHITRKEHFNAAHRMYREEWSAEKNAEVFGKCANPNWHGHNYNLFVTVKGEITHATGYLIDLKDLKVIINEYVIEKLDHKNLNLDVDFMRGKMASTELLTIEIFNQLKGPIEAYPGVFLHSVRLFETDNNSAEYFGD

SEQ ID NO: 22863 - protein, 118 aa, unidentified
  source 1..118: note = Mucilaginibacter psychrotolerans
  REGION 1..118: note = tr|A0A4Y8S7Z4|A0A4Y8S7Z4_9SPHI 6-carboxy-5,6,7,8-tetrahydropterin synthase; OS = Mucilaginibacter psychrotolerans OX=1524096 GN=queD; PE = 3 SV=1
MTIYQHFTFDAAHFLPHVPAGHKCKNLHGHTYHLTIYIAGELLEKEGWIIDFSDVKATLAPIISVLDHHLLNEVPGLENPTAELLAKWIWDKTRPLLSGLQKIELKETPGTGVMYEGN

SEQ ID NO: 22864 - protein, 138 aa, unidentified
  source 1..138: note = Mucilaginibacter rubeus
  REGION 1..138: note = tr|A0A5C1I9K2|A0A5C1I9K2_9SPHI 6-carboxytetrahydropterin synthase OS=Mucilaginibacter rubeus OX=2027860 GN=DEO27_028785 PE=4 SV=1
MIHITRKEHFNAAHRMYREEWSAEKNFEVFGKCANPNWHGHNYNLFVTVKGEVTHATGYLIDLKELKTIINEYVIEKLDHKNINKDVDFMAGKMASTELLCIEIFNQLKAPIEAYEGVFLHSVKLYETENNSAEYFGG

SEQ ID NO: 22865 - protein, 118 aa, unidentified
  source 1..118: note = Mucilaginibacter rubeus
  REGION 1..118: note = tr|A0A5C1I028|A0A5C1I028_9SPHI 6-carboxy-5,6,7,8-tetrahydropterin synthase; OS = Mucilaginibacter rubeus OX=2027860 GN=queD PE=3 SV=1
MIIYQHFTFDAAHFLPHVPEGHKCRNLHGHTYHLTLYITGDVLEQEGWILDFSDLKAIVAPVIGMLDHTLLNNIEGLENPTAELLATWIWKKVKPLLPGLKKIELKETPSSGVIYEGE

SEQ ID NO: 22866 - protein, 138 aa, Mucilaginibacter sp.
  REGION 1..138: note = tr|A0A1Q3ULC7|A0A1Q3ULC7_9SPHI 6-pyruvoyl tetrahydrobiopterin synthase OS=Mucilaginibacter sp. 44-25; OX = 1895794 GN=BGO48_06420 PE=4 SV=1
MIHITRREHFNAAHRMYREEWSAEKNFEVFGKCANPNWHGHNYNLFVTVKGEITHATGYLIDLKDLKKIINEYVIEKLDHKNINKDVDFMAGKMASTELLTIEIFNQLKGPIEAHEGVFLHSVKLYETENNSAEYFGG

SEQ ID NO: 22867 - protein, 139 aa, Mucilaginibacter sp.
  REGION 1..139: note = tr|A0A1C2GFU1|A0A1C2GFU1_9SPHI 6-pyruvoyl tetrahydrobiopterin synthase OS=Mucilaginibacter sp. PPCGB 2223 OX=1886027 GN=BEL04_23530 PE=4 SV=1
MIYITRKEHFNAAHKMYRDEWSLEKNLEVFGKCANPNWHGHNYNLFVTVKGHVTHATGYLIDLKDLKVIINEHVIEKLDHKNINLDVEFMKGKMASTELLCIEIFNQLKAPIEAHEGVFLHSVKLYETENNSAEYFGEE

SEQ ID NO: 22868 - protein, 139 aa, unidentified
  source 1..139: note = Mucilaginibacter yixingensis
  REGION 1..139: note = tr|A0A2T5JEE8|A0A2T5JEE8_9SPHI 6-carboxy-5,6,7,8-tetrahydropterin synthase; OS = Mucilaginibacter yixingensis OX=1295612 GN=C8P68_10138; PE = 3 SV=1
MMIYITRREQFNAAHRMYREDWSEEKNAEVFGKCANPNWHGHNYNLFVTVKGNLSYETGYLIDLKDLKQIIKDYVVEKLDHKNLNRDVDFMEGKMASTELLCIEIFKQLKAPIEAYEGVFLHSVKLFETENNSAEYFGE

SEQ ID NO: 22869 - protein, 152 aa, unidentified
  source 1..152: note = Mucinivorans hirudinis
  REGION 1..152: note = tr|A0A060RDP0|A0A060RDP0_9BACT 6-carboxytetrahydropterin synthase OS=Mucinivorans hirudinis OX=1433126 GN=BN938_1915 PE=4 SV=1
MERQKIRLTREFSFEAAHALDGYDGLCRNVHGHSYKLFVTVRGVPCGDETNPKLGMVVDFSDIKRIVKQHIVDRLDHSLVLADNRDNRQFREQNINKWQRIEIVPYQPTCENMLTEFAHILRQELPKCVELVALKLYETEKSYAEWLAQDNC

SEQ ID NO: 22870 - protein, 120 aa, Mucispirillum schaedleri
  REGION 1..120: note = tr|V2QE85|V2QE85_9BACT 6-carboxy-5,6,7,8-tetrahydropterin synthase; OS = Mucispirillum schaedleri ASF457 OX=1379858; GN = N508_01472 PE=3 SV=1
MYKVRIKSHFSSAHNLREYQGACERLHGHNWKVEAYLKSKTLDKLGMVEDFKMFKKHLNVIMDELDHEYINELEYFKTVNPTSENIAKYIFDKLAIHYGEKVDKVIVWETDTSAAEYTKD

SEQ ID NO: 22871 - protein, 140 aa, unidentified
  source 1..140: note = Muribacter muris
  REGION 1..140: note = tr|A0A4Y9JWB5|A0A4Y9JWB5_9PAST 6-carboxy-5,6,7,8-tetrahydropterin synthase OS=Muribacter muris OX=67855 GN=queD PE=3 SV=1
MFKIAKEFSFDMAHMLDGHDGKCQNLHGHTYTLQVEIRGGLHTEGAKRGMVMDYSDLKSIVKTEILDKMDHAFIYDTTSEKECKVAQLLAELNSKTFGIPARTTAEQMAKHIFDTLSDVGLPVSLIRLWETPTSYCEYQR

SEQ ID NO: 22872 - protein, 140 aa, unidentified
  source 1..140: note = Muribacter muris
  REGION 1..140: note = tr|A0A0J5P3P2|A0A0J5P3P2_9PAST 6-carboxy-5,6,7,8-tetrahydropterin synthase OS=Muribacter muris OX=67855 GN=RO21_09180 PE=3 SV=1
MFKIAKEFSFDMAHMLDGHDGKCQNLHGHTYTLQVEICGGLHTEGAKRGMVMDYSDLKSIVKTEILDKMDHAFIYDTTSEKECKVAQLLAELNSKTFGIPARTTAEQMAKYIFDTLSDVGLPVSLIRLWETPTSYCEYQR

SEQ ID NO: 22873 - protein, 187 aa, unidentified
  source 1..187: note = Muribaculaceae bacterium
  REGION 1..187: note = tr|A0A4Q0IK52|A0A4Q0IK52_9BACT Rubredoxin; OS = Muribaculaceae bacterium Isolate-007 (NCI) OX=2489217; GN = ED388_08020 PE=4 SV=1
MKSITTFDLQYAHRFYGFKGEAQYLHGHTGTLTIEVEDSINEGVNMVFPCNEIKKTAWNLLKNFDHALILREDDPLLPAVLEVYEKQGIVTGHPQNTNKGPAFKTELATAYPEARLVVTKETMTVEGMIKIVYNLLKDKLNISKITFTSGENAATEDYVTRNNIERCPLCGIALNEHGVCIKCGYKK

SEQ ID NO: 22874 - protein, 113 aa, unidentified
  source 1..113: note = Muribaculaceae bacterium
  REGION 1..113: note = tr|A0A4Q0IGE9|A0A4Q0IGE9_9BACT 6-carboxy-5,6,7,8-tetrahydropterin synthase; OS = Muribaculaceae bacterium Isolate-007 (NCI) OX=2489217; GN = ED388_13800 PE=3 SV=1
MYYISKRMEISGSHRLELSYPSKCENIHGHNWIVTVYCKARTLNADGMVCDFKHVKEKIHGVLDHKHINDILPFNPTAENIARWVVEQIPECYKAEVQESEGNVAMYVVDEDI

SEQ ID NO: 22875 - protein, 113 aa, unidentified; identical to SEQ ID NO: 22874
  source 1..113: note = Muribaculum intestinale
  REGION 1..113: note = tr|A0A1B1S9R4|A0A1B1S9R4_9BACT 6-carboxy-5,6,7,8-tetrahydropterin synthase OS=Muribaculum intestinale OX=1796646 GN=A4V02_07255 PE=3 SV=1

SEQ ID NO: 22876 - protein, 187 aa, unidentified
  source 1..187: note = Muribaculum intestinale
  REGION 1..187: note = tr|A0A1B1S9K5|A0A1B1S9K5_9BACT Rubredoxin; OS = Muribaculum intestinale OX=1796646 GN=A4V02_06835 PE=4; SV = 1
MKSITTFDLQYAHRFYGFKGEAQYLHGHTGTLTIEVEDSINDGVNMVFPCNEIKKTAWNLLKNFDHALILREDDPLLPAVLEVYEKQGIVTGHPQNTNKGPAFKTELATAYPEARLVVTKETMTVEGMIKIVYNLLKDKLNISKITFTSGENAATEDYVTRNNIERCPLCGIALNEHGVCIKCGYKK

SEQ ID NO: 22877 - protein, 187 aa, unidentified
  source 1..187: note = Muribaculum sp.
  REGION 1..187: note = tr|A0A4P7W024|A0A4P7W024_9BACT Rubredoxin; OS = Muribaculum sp. H5 OX=2530393 GN=E7747_01995 PE=4 SV=1
MRSITTFDLQYAHRFYGFKGEAQYLHGHTGTLTIEVEDSINKGVNMVFPCNEIKKTAWAVLKNFDHALVLREDDPLLPAITGVYEQQGILHGHPQNTLKGEAFKTELAKAYPDARLVVTKETMTVEGMIKIVYDLLKDKLNIAKITFTSGDNAASEEYTDRKEIERCPLCGIALTEEGVCIKCGYKK

SEQ ID NO: 22878 - protein, 117 aa, unidentified
  source 1..117: note = Muribaculum sp.
  REGION 1..117: note = tr|A0A4P7VPV5|A0A4P7VPV5_9BACT 6-carboxy-5,6,7,8-tetrahydropterin synthase OS=Muribaculum sp. TLL-A4 OX=2530390 GN=E7746_05845 PE=3 SV=1
MYYVTKRIEISASHRLELSYPSKCSRLHGHNWVITVYCRARELNADGMVCDFSHIKELIHGYLDHGNLNELLPFNPTAENIARWIVDRIPECYKARVQESEGNEAIYIDDNATDACI

SEQ ID NO: 22879 - protein, 118 aa, unidentified
  source 1..118: note = Muricauda antarctica
  REGION 1..118: note = tr|A0A1M6X5D3|A0A1M6X5D3_9FLAO 6-carboxy-5,6,7,8-tetrahydropterin synthase OS=Muricauda antarctica OX=1055723 GN=SAMN05216293_2449 PE=3 SV=1
MILFKQFKFDSAHFLPNVPEGHKCRGLHGHTYQLTLYFEGKIDEKLGWIMDFSEIKRVVDPIIECIDHKLLNEVEGLENPTCELIAIWLWDKIRLKIPQLSRIKLFETPTSGVIFEGE

SEQ ID NO: 22880 - protein, 136 aa, unidentified
  source 1..136: note = Muricauda antarctica
  REGION 1..136: note = tr|A0A1M6YR75|A0A1M6YR75_9FLAO 6-carboxy-5,6,7,8-tetrahydropterin synthase OS=Muricauda antarctica OX=1055723 GN=SAMN05216293_2903 PE=3 SV=1
MIATICRKAHFNAAHRLHNPKWSKEKNIEVFGKCNSPSYHGHNFDLEVRIKGEVDPDTGFVMDLAVLGSLIKDEVEERFDHKNLNEDCLEFQDLLPTTEHFVKVIYDILKPKLKKGQLLQIILHETQKNSAEYGDW

SEQ ID NO: 22881 - protein, 135 aa, Muricauda lutaonensis
  REGION 1..135: note = tr|A0A0D5YVC9|A0A0D5YVC9_9FLAO 6-carboxy-5,6,7,8-tetrahydropterin synthase OS=Muricauda lutaonensis OX=516051 GN=VC82_2270 PE=3 SV=1
MKVKVSRKAHFNAAHRLYRPDWTFEKNQEVFGRCNNPNYHGHNYELIVSVTGEIDQETGYVMDMKKLKDLIKAHVEEAFDHKNLNEDVPEFKNLNPTAENIAVVIFDKLRPHIGNSKELEIVLYETSRNFVTYNG

SEQ ID NO: 22882 - protein, 136 aa, Muricauda lutaonensis
  REGION 1..136: note = tr|A0A0D5YRE4|A0A0D5YRE4_9FLAO 6-carboxy-5,6,7,8-tetrahydropterin synthase OS=Muricauda lutaonensis OX=516051 GN=VC82_830 PE=3 SV=1
MIATICRKAHFNAAHRLHNPKWSQEKNVEVFGKCNSPNYHGHNFDLEVRIRGEVDQDTGFVMDLAQLGQLIKEKVEDRFDHKNLNEDCPEFEHILPSTENFVKVIYDILKPELKPGQKLRITLHETQKNSAEYGDW

SEQ ID NO: 22883 - protein, 135 aa, Muricauda lutimaris
  REGION 1..135: note = tr|A0A3A1N9X5|A0A3A1N9X5_9FLAO 6-carboxy-5,6,7,8-tetrahydropterin synthase OS=Muricauda lutimaris OX=475082 GN=D2V08_09045 PE=3 SV=1
MKVKASRKASFNAAHRLYRPDWDEEKNNEVFGKCNNPKFHGHNYDLIVSVTGEIDPETGFVMDLKVLKELIKEHVEEALDHKNLNLDVPEFKNLNPTAENIAVVIWNKLRPHIQQTKELEVVLYETPRNFVTYTG

SEQ ID NO: 22884 - protein, 137 aa, Muricauda lutimaris
  REGION 1..137: note = tr|A0A3A1N9B9|A0A3A1N9B9_9FLAO 6-carboxy-5,6,7,8-tetrahydropterin synthase OS=Muricauda lutimaris OX=475082 GN=D2V08_03580 PE=3 SV=1
MIATICRKAHFNAAHRLHNPKWSKEKNIEVFGKCNSPSFHGHNFDLEVRIKGEVDPDTGFVMDLADLGKLIKDEVEERFDHKNLNEDCPEFKNLLPTTEYFVKVIYDILKPKLKKGQLLHITLHETSKNSAAYGDWD

SEQ ID NO: 22885 - protein, 136 aa, Muricauda olearia
  REGION 1..136: note = tr|A0A444VP79|A0A444VP79_9FLAO 6-carboxy-5,6,7,8-tetrahydropterin synthase OS=Muricauda olearia OX=552546 GN=DN53_07785 PE=3 SV=1
MIATICRKAHFNAAHRLHNPKWSQEKNIAMFGKCNSPNYHGHNFDLEVRIRGEVDPDTGFVMDLAVLGELIRAEVEERFDHKNLNEDCPEFADLLPTTEYFVKVIYDILKPKLAQGQLLHITLHETQKNSAEYGDW

SEQ ID NO: 22886 - protein, 135 aa, Muricauda olearia
  REGION 1..135: note = tr|A0A444VH81|A0A444VH81_9FLAO 6-carboxy-5,6,7,8-tetrahydropterin synthase OS=Muricauda olearia OX=552546 GN=DN53_06480 PE=3 SV=1
MKVKVSRKANFNAAHRLHRPDWDAEKNQAVFGKCNNPRYHGHNYDLIVSVTGEIDQETGFVMDLKVLKDLIKEHVEEALDHKNLNADVPEFKELNPTAENIAVVIWSKLRPHIDQANELEVVLYETPRNFVTYSG

SEQ ID NO: 22887 - protein, 134 aa, unidentified
  source 1..134: note = Muricauda pacifica
  REGION 1..134: note = tr|A0A2T0M6N6|A0A2T0M6N6_9FLAO 6-carboxy-5,6,7,8-tetrahydropterin synthase OS=Muricauda pacifica OX=1080225 GN=CLV81_4067 PE=3 SV=1
MVKVSRKAHFNAAHRLYNPDWSFEKNEAVFGKCNNPRYHGHNYDLIVSVEGEINPITGYVMDMKVLKDLIKEHVEDQFDHKNLNEDVSDFKNLNPTAENIAVVIWNKLRPHIEHSKNLEVVLYETPRNFVTYSG

SEQ ID NO: 22888 - protein, 136 aa, unidentified
  source 1..136: note = Muricauda pacifica
  REGION 1..136: note = tr|A0A2T0M7W9|A0A2T0M7W9_9FLAO 6-carboxy-5,6,7,8-tetrahydropterin synthase OS=Muricauda pacifica OX=1080225 GN=CLV81_2013 PE=3 SV=1
MIATICRKAHFNAAHRLHNPNWSDEKNIEVFGKCNSPNYHGHNFDLEVRVRGEINTDTGFVMDLADLGALIKNEIEARFDHKNLNEDCPEFENLFPTTEYFVKVIYDILKPKLPQGHLLHITLHETQKNSAEYGDW

SEQ ID NO: 22889 - protein, 135 aa, Muricauda ruestringensis
  REGION 1..135: note = tr|G2PMB9|G2PMB9_MURRD 6-carboxy-5,6,7,8-tetrahydropterin synthase OS=Muricauda ruestringensis (strain DSM 13258 / CIP 107369 / LMG 19739 / B1) OX=886377 GN=Murru_21 77 PE=3 SV=1
MKVKASRKASFNAAHRLYRPDWDDEKNNAVFGKCNNPKFHGHNYDLIVSVTGEIDQETGFVMDLKVLKELIKEHVEEALDHKNLNLDVPEFENLNPTAENIAVVIWNKLRPHISKDKELEVVLYETPRNFVTYTG

SEQ ID NO: 22890 - protein, 118 aa, Muricauda ruestringensis
  REGION 1..118: note = tr|G2PJH7|G2PJH7_MURRD 6-carboxy-5,6,7,8-tetrahydropterin synthase OS=Muricauda ruestringensis (strain DSM 13258 / CIP 107369 / LMG 19739 / B1) OX=886377 GN=Murru_29 04 PE=3 SV=1
MILFKHFNFDSAHFLPNVPDGHKCRILHGHTYRLTLYFEGELDKDLGWVIDFSDIKRAVNPIIGRVDHKLLNDIEGLENPTCEQVAIWLWDKIKAKIPQLCKIKLYETPTSGVVYEGA

SEQ ID NO: 22891 - protein, 135 aa, Muricauda sp.
  REGION 1..135: note = tr|A0A418N2L6|A0A418N2L6_9FLAO 6-carboxy-5,6,7,8-tetrahydropterin synthase OS=Muricauda sp. NH166 OX=2306997 GN=D2U88_18675 PE=3 SV=1
MKVKVSRKATFNAAHRLHRPDWDDAKNQAVFGKCNNPRFHGHNYDLIVSVTGEIDQETGFVMDLKVLKELIQEHVEEALDHKNLNTDVPEFQDLNPTAENIAVVIWNKLRPLIDNQKELEVVLYETPRNFVTYSG

SEQ ID NO: 22892 - protein, 118 aa, Muricauda sp.
  REGION 1..118: note = tr|A0A3R7RZ21|A0A3R7RZ21_9FLAO 6-carboxy-5,6,7,8-tetrahydropterin synthase OS=Muricauda sp. TMED12 OX=1986608 GN=queD PE=3 SV=1
MIICKHFSFDSAHFLPKVPEGHKCKGIHGHTYRLTLYFEGKLDNELGWVMDFTDIKEAVNPIIECVDHKLLNNIAGLENPTCEHIAIWLWNRIKDKVPQLCRIRLYETPTSGIVYEGV

SEQ ID NO: 22893 - protein, 136 aa, unidentified
  source 1..136: note = Muricauda taeanensis
  REGION 1..136: note = tr|A0A3A1NSD7|A0A3A1NSD7_9FLAO 6-carboxy-5,6,7,8-tetrahydropterin synthase OS=Muricauda taeanensis OX=1005926 GN=D2V93_10310 PE=3 SV=1
MIATICRKAHFNAAHRLHNPKWSKEKNIEVFGKCNSPSYHGHNFDLEVRIKGEVDPDTGFVMDLAVLGSLIKDEVEERFDHKNLNEDCPEFQDLLPTTEHFVKVIYDILKPKLKKDQLLQIILHETQKNSAEYGDW

SEQ ID NO: 22894 - protein, 135 aa, unidentified
  source 1..135: note = Muricauda taeanensis
  REGION 1..135: note = tr|A0A3A1NR80|A0A3A1NR80_9FLAO 6-carboxy-5,6,7,8-tetrahydropterin synthase OS=Muricauda taeanensis OX=1005926 GN=D2V93_11985 PE=3 SV=1
MKVKVSRKASFNAAHRLYRPDWDEERNNAVFGKCNNPRYHGHNYDLIVGVTGEIDQATGFVMDLKVLKDLIKEHVEDALDHKNLNLDVPEFKNLNPTAENIAVVIWNRLRPHIENNKELEVVLYETPRNFVTYTG

SEQ ID NO: 22895 - protein, 136 aa, unidentified
  source 1..136: note = Muricauda zhangzhouensis
  REGION 1..136: note = tr|A0A1H2Q232|A0A1H2Q232_9FLAO 6-carboxy-5,6,7,8-tetrahydropterin synthase OS=Muricauda zhangzhouensis OX=1073328 GN=SAMN04487892_0019 PE=3 SV=1
MIATICRKGHFNAAHRLHNPNWSDEKNIAVFGKCNSPSFHGHNFDLEVRIRGEVDPDTGFVMDLADLGVLIRDEVEERFDHKNLNLDCPEFKDLLPTTEYFVKVIYDILKPKLQSGQQLHITLHETSKNSAEYGDW

SEQ ID NO: 22896 - protein, 135 aa, unidentified
  source 1..135: note = Muricauda zhangzhouensis
  REGION 1..135: note = tr|A0A1H2ZAV2|A0A1H2ZAV2_9FLAO 6-carboxy-5,6,7,8-tetrahydropterin synthase OS=Muricauda zhangzhouensis OX=1073328 GN=SAMN04487892_3395 PE=3 SV=1
MKVKVSRKASFNAAHRLHRDDWSDEKNQTIFGKCNNPRYHGHNYDLIVSVTGEIDQETGFVMDLKVLKELIQEHVEEALDHKNLNLDVPEFKNLNPTAENIAVVIWNKLRPHISDKKELEVMLYETPRNFVTYSG

SEQ ID NO: 22897 - protein, 187 aa, unidentified; identical to SEQ ID NO: 21582
  source 1..187: note = Muricomes intestini
  REGION 1..187: note = tr|A0A4R3K499|A0A4R3K499_9FIRM 6-pyruvoyltetrahydropterin/6-carboxytetrahydropterin synthase OS=Muricomes intestini OX=1796634 GN=EDD59_11634; PE = 4 SV=1

SEQ ID NO: 22898 - protein, 150 aa, Muriicola sp.
  REGION 1..150: note = tr|A0A411ECD0|A0A411ECD0_9FLAO 6-carboxytetrahydropterin synthase OS=Muriicola sp. MMS17-SY002 OX=2507538 GN=EQY75_12495 PE=4 SV=1
MSRIRVTKEFSFETGHALYGYDGKCKNVHGHSYKLAVTVIGTPITKEGEVKLGMVIDFGDLKKIVREEVVDPFDHATIFNKNTPHLELAKELEKRGHRVILANYQPTSENMVIDIAERIKTRLPAHLQLHSLKLRETETAYAEWHLEDNP

SEQ ID NO: 22899 - protein, 136 aa, Muriicola sp.
  REGION 1..136: note = tr|A0A411E7D7|A0A411E7D7_9FLAO 6-carboxy-5,6,7,8-tetrahydropterin synthase OS=Muriicola sp. MMS17-SY002 OX=2507538 GN=EQY75_02815 PE=3 SV=1
MKVKVSRRAHFNAAHRLYRADWSDTKNNDVFGKCNNPNFHGHNYELIVSVTGEIDPVTGFVIDVKILKDLIKAEVEEAFDHKNLNLEVPEFKELNPTAENIAVVIWNKLRPHIKASDALEVELYETPRNFVTYTGE

SEQ ID NO: 22900 - protein, 150 aa, unidentified
  source 1..150: note = Mycoavidus cysteinexigens
  REGION 1..150: note = tr|A0A2Z6EY99|A0A2Z6EY99_9BURK 6-pyruvoyl-tetrahydropterin synthase OS=Mycoavidus cysteinexigens OX=1553431 GN=MCB1EB_2260 PE=4 SV=1
MLTITRKLEFDAGHRIPDHRSLCCNLHGHRYVLEITLEGEPIITEGAPDRGMVMDFAQVKALALAHLVEHWDHAFLVYAGDTPIRDFLATLPNHKTVVLEHIPTVENLARIAFDRLAAAYNHHYGATLKLKRVRLYETPNCWAEVERPVN

SEQ ID NO: 22901 - protein, 146 aa, unidentified
  source 1..146: note = Mycobacterium angelicum
  REGION 1..146: note = tr|A0A1X0A3J6|A0A1X0A3J6_9MYCO Uncharacterized protein OS=Mycobacterium angelicum OX=470074; GN = BST12_03945 PE=4 SV=1
MTRTIEKTFRFDAGHRSLGFDYKKEETIHGHTWELKLILESELELDGMRTVFDTNELAVVVRPIIDSLDHSFIIWTEDPIFDEFVKLCELADVADKVYPVDFNPTIEGLVQHIYEQVSGKLQVDGCVLRRAELRCASTLNASYGIN

SEQ ID NO: 22902 - protein, 132 aa, unidentified
  source 1..132: note = Mycobacterium angelicum
  REGION 1..132: note = tr|A0A1W9ZW26|A0A1W9ZW26_9MYCO 6-carboxy-5,6,7,8-tetrahydropterin synthase; OS = Mycobacterium angelicum OX=470074 GN=BST12_11185 PE=3; SV = 1
MTATAEIFREFTFEAAHRLPNLPGDHKCSRLHGHSYRFSVHVSGPVDAANGWVTDFAVLKDACKPVLARLDHYYLNDIPGLENPTSERLAEWIWCELEHSLPMLTAVTVRETCTSCCIYRGPHGGHPGIEPA

SEQ ID NO: 22903 - protein, 142 aa, Mycobacterium asiaticum
  REGION 1..142: note = tr|A0A1A3KZ00|A0A1A3KZ00_MYCAS Uncharacterized protein OS=Mycobacterium asiaticum OX=1790 GN=A5640_27035; PE = 4 SV=1
MRKRFSDLACCHRSWSGAGKNFFLHGYEQRFEIEFACAELDPDTGMVVDADCLEQVRNALRRQFDHTTLIAAEDPQRDLFELLAAQGAIDLRVMHCPGMEASAAWVFDTVERIVAKASGGRVWVSRVEARENRNNRVTLMAD

SEQ ID NO: 22904 - protein, 142 aa, Mycobacterium asiaticum
  REGION 1..142: note = tr|A0A1A3CJF1|A0A1A3CJF1_MYCAS Uncharacterized protein OS=Mycobacterium asiaticum OX=1790 GN=A9X01_16750; PE = 4 SV=1
MRKRFSDLACCHRSWTGAGKDFYLHGYEQRFEIEFACAELDPGTGMVVDADCLEDVRAALRRQFDHTTLIAADDPQRDLFELLAAQGAIDLRVMHCPGMEASAAWVFDTVERIVAKASEGRVWVSRVQARENRNNKVTLMAD

SEQ ID NO: 22905 - protein, 163 aa, unidentified
  source 1..163: note = Mycobacterium attenuatum
  REGION 1..163: note = tr|A0A498QE71|A0A498QE71_9MYCO 6-carboxy-5,6,7,8-tetrahydropterin synthase; OS = Mycobacterium attenuatum OX=2341086 GN=queD PE=4 SV=1
MPYTIKQTIRLEMGHRTWTHDMRTSRGGSELYTPELVANKCANLHGHTIFVSVTLTGDSLDEQYFLLDTDLLENAFRPILDEVDHAFVVDRKDPLYEDIAAVARKGGLKLCTVDFSPTFEALVRHFYDRLQSVIEEKGLADQLRIKEMKVLGEQTVEATYCGE

SEQ ID NO: 22906 - protein, 142 aa, unidentified
  source 1..142: note = Mycobacterium attenuatum
  REGION 1..142: note = tr|A0A498QE81|A0A498QE81_9MYCO Uncharacterized protein OS=Mycobacterium attenuatum OX=2341086; GN = LAUMK136_04807 PE=4 SV=1
MPTSRGGNEFYTPDLIANKCANLHGHTIFVSVTLVGDTLDEQYFLLDTDLLEQAFRPILDEFDFAFVVDKHDPLYEDIAAVVNKGGLKLCTVDFSPTFEGLVRHFYDRLQAVIAEKGLADQLRIKEMKVLGELTVEATYTGE

SEQ ID NO: 22907 - protein, 177 aa, unidentified
  source 1..177: note = Mycobacterium basiliense
  REGION 1..177: note = tr|A0A3S4BI48|A0A3S4BI48_9MYCO 6-pyruvoyl tetrahydropterin synthase OS=Mycobacterium basiliense; OX = 2094119 GN=MB901379_04785 PE=4 SV=1
MNDITISDRVRAVTVHRADAPIGRTARFHLNKRFSDLPCCHRSWSRHDKRVFLHGYELTFEIEFACTETETRTGLVVNNRCLNEVRAALQHQFDHTTLIAADDPQRNLFEQLAGEGVIDLRIMNATSMEGAAAWVFDTVEHIVAPATDGRVWVSRIAARESRNNVVTLTAEPEDRFD

SEQ ID NO: 22908 - protein, 159 aa, unidentified
  source 1..159: note = Mycobacterium basiliense
  REGION 1..159: note = tr|A0A3S4CX24|A0A3S4CX24_9MYCO 6-carboxy-5,6,7,8-tetrahydropterin synthase; OS = Mycobacterium basiliense OX=2094119 GN=queD PE=4 SV=1
MTETAEIYCEFTFEAAHRLPNVPDGHKCGRLHGHSYRARIYVEGPLDPRAGWIIDFGNIKDACKPVIERLDHYYLNEIAGLENPTSEHLTVWLWRELAGLLPMMSAVSVSETCTSGCMYRGPRVAAHDSDAGCPSVEQRPGITSDQVGIGGLRQPIPSH

SEQ ID NO: 22909 - protein, 127 aa, Mycobacterium bohemicum
  REGION 1..127: note = tr|A0A1X1QWM9|A0A1X1QWM9_9MYCO 6-carboxy-5,6,7,8-tetrahydropterin synthase; OS = Mycobacterium bohemicum OX=56425 GN=AWB93_22750 PE=3; SV = 1
MNETAEIFWEFTFEAAHRLPNVPRDHKCSRLHGHSYRAQIFVTGPVNPHTGWVIDFGNIKDACKPVIAQLDHYYLNEIPGLENPTSEHLAAWIWRELTASLPMMSAVRVSETCTSGCVYRGQGGGRQ

SEQ ID NO: 22910 - protein, 127 aa, Mycobacterium bohemicum; identical to SEQ ID NO: 22909
  REGION 1..127: note = tr|A0A0U0W5N1|A0A0U0W5N1_9MYCO 6-carboxy-5,6,7,8-tetrahydropterin synthase; OS = Mycobacterium bohemicum DSM 44277 OX=1236609; GN = BN971_01864 PE=3 SV=1

SEQ ID NO: 22911 - protein, 177 aa, unidentified
  source 1..177: note = Mycobacterium decipiens
  REGION 1..177: note = tr|A0A1X2LSJ4|A0A1X2LSJ4_9MYCO Uncharacterized protein OS=Mycobacterium decipiens OX=1430326; GN = B8W66_15725 PE=4 SV=1
MRMRSDVVAAERDNPNTAAEPSRAVSKGLVPTIRTIEKTFRFDAGHRSLGFDYTKEETIHGHTWELKLIVECRQKLDDMKTIFDTNELNVITRPIIDSLDHSFIIWTEDPIFDAFVKVCELAGVADKVYPVDFNPTIEGMVEHIFNRVDEQLELDGCTLKRAELRCASTLNACYEVG

SEQ ID NO: 22912 - protein, 162 aa, unidentified
  source 1..162: note = Mycobacterium decipiens
  REGION 1..162: note = tr|A0A1X2LSL2|A0A1X2LSL2_9MYCO Uncharacterized protein OS=Mycobacterium decipiens OX=1430326; GN = B8W66_15720 PE=4 SV=1
MSYTIKQTFRIEMGHRTWTQDMRTSRGKEFYDPALVADKCANLHGHTMFVSVTIAGDSLDDQYFLMDTDLLTGAFKPILDEVDHAFVVDKNDPLYGDIAAVTQKGGLKLCTVDFSPTFEAMVRHFHDRLQSALDEKGLGDVLRIKEVKVLGEQSVEATYSNG

SEQ ID NO: 22913 - protein, 146 aa, Mycobacterium gastri
  REGION 1..146: note = tr|A0A1X1URD1|A0A1X1URD1_MYCGS Uncharacterized protein OS=Mycobacterium gastri OX=1777 GN=AWC07_19740; PE = 4 SV=1
MGHTIEKTFRFDAGHRSLGFNYKKEETIHGHTWELRLILEYGDQLDDMKTVFDTNELAVIVEPIISDLDHSFIIWDQDPIYDDFLKVCELADVADKVYTVDFNPTIEGLVEHIFERVNSQLRLSGCVLRRVELQCASTLKASYGVN

SEQ ID NO: 22914 - protein, 163 aa, Mycobacterium gastri
  REGION 1..163: note = tr|A0A1X1URC6|A0A1X1URC6_MYCGS Uncharacterized protein OS=Mycobacterium gastri OX=1777 GN=AWC07_19735; PE = 4 SV=1
MPYTIKQTIRLEMGHRTWTHDMRTSRGGSELYTPELVANKCANLHGHTIFVSVTLTGDSLDEQYFLLDTDLLENAFRPILDEVDHAFVVDRKDPLYEDIAAVARKGGLKLCTVDFSPTFEALVRHFYDRLQSVIQEKGLADQLRIKEMKVLGEQTVEATYCGE

SEQ ID NO: 22915 - protein, 177 aa, Mycobacterium gordonae
  REGION 1..177: note = tr|A0A1A3K647|A0A1A3K647_MYCGO Uncharacterized protein OS=Mycobacterium gordonae OX=1778 GN=A9W97_30195; PE = 4 SV=1
MPEIAFAGPAQTATMHRDDAPVGRTARFHLRKRFGGLHCCRRSWSDNGKRLFLHGYALSFEIEFACAETETETGQVLGSDCLDDIRAALAAQFAHTTLIATNDPQRDLFELLAERDLVDMRIVDSTGLEASAAWVFETVETIVAQATGGRVWVSRIDAQESGSRVLTLTALPVKDWV

SEQ ID NO: 22916 - protein, 176 aa, Mycobacterium gordonae
  REGION 1..176: note = tr|A0A1A6BHI7|A0A1A6BHI7_MYCGO Uncharacterized protein OS=Mycobacterium gordonae OX=1778 GN=A9W98_18270; PE = 4 SV=1
MPEIAFAGTAQTTTMHRDDAPVGRTARFHLRKRFGGLHCCRRSWSDNGKRLFLHGYALSFEIEFACDERQSDDQVLSAECLDDIRAALAAQFGHTTLITSNDPQRDLFELLAERDLVDMRIVESTALEASGAWVFETVERIVAQATGGRAWVSRIDAQESGSRVFTLTALPVKDWV

SEQ ID NO: 22917 - protein, 165 aa, Mycobacterium heckeshornense
  REGION 1..165: note = tr|A0A2I3EEQ9|A0A2I3EEQ9_9MYCO Uncharacterized protein OS=Mycobacterium heckeshornense OX=110505; GN = ACT16_23580 PE=4 SV=1
MSTTTVRVRHEFSAGHRILGLTGAGEKCRNIHGHNFTCWWMFDQRPGWPLAVEFGSVKAELKEMIDRLLDHAFIVHKDDEFVGYLVTHGLKRYLLSDRPTTEAIAAEIARLTEAQFPALDLLYVQLTEGSNNEAVWMRGGPPAATYPPGSAVLDGDHAKRVRAVI

SEQ ID NO: 22918 - protein, 173 aa, Mycobacterium heckeshornense
  REGION 1..173: note = tr|A0A2G8B8B0|A0A2G8B8B0_9MYCO Uncharacterized protein OS=Mycobacterium heckeshornense OX=110505; GN = BMW24_013365 PE=4 SV=1
MVSTGRHEMSTTTVRVRHEFSAGHRILGLTGAGEKCRNIHGHNFTCWWMFDQRPGWPLAVEFGSVKAELKEMIDRLLDHAFIVHKDDEFVGYLVTHGLKRYLLSDRPTTEAIAAEIARLTEAQFPALDLLYVQLTEGSNNEAVWMRGGPPAATYPPGSAVLDGDHAKRVRAVI

SEQ ID NO: 22919 - protein, 163 aa, unidentified; identical to SEQ ID NO: 22914
  source 1..163: note = Mycobacterium innocens
  REGION 1..163: note = tr|A0A498QBQ0|A0A498QBQ0_9MYCO Uncharacterized protein OS=Mycobacterium innocens OX=2341083; GN = LAUMK13_04669 PE=4 SV=1

SEQ ID NO: 22920 - protein, 142 aa, unidentified
  source 1..142: note = Mycobacterium innocens
  REGION 1..142: note = tr|A0A498QGK8|A0A498QGK8_9MYCO Uncharacterized protein OS=Mycobacterium innocens OX=2341083; GN = LAUMK13_04673 PE=4 SV=1
MPTSRGGSEFYTPDLIANKCANLHGHTIYVSVTLVGDSLDEQYFLLDTDLLEQAFRPILDEFDFAFVVDRHDPLYEDIAAVVHKGGLKLCTVDFSPTFEGLVRHFYDRLQAVIAEKGLADQLRIKEMKVLGELTVEATYSGE

SEQ ID NO: 22921 - protein, 179 aa, Mycobacterium interjectum
  REGION 1..179: note = tr|A0A1X1WJW2|A0A1X1WJW2_9MYCO Uncharacterized protein OS=Mycobacterium interjectum OX=33895; GN = AWC11_16865 PE=4 SV=1
MSHIAFDDDVYVATMHRADAPSGRTARFHMRKLFDELPCCHRSWANPGKRFFLHGCERAFEVEFACAETELGTGLVVDSGAVGEIRSALRYQFDHTTLIAEDDPQRDLFELLAERGVIDLRIMENTGMEGSAAWAFETVERIVALATGGRVWVSRIEARESRNNVVTLTAGPVTAGGWA

SEQ ID NO: 22922 - protein, 171 aa, Mycobacterium intermedium
  REGION 1..171: note = tr|A0A1E3SCB2|A0A1E3SCB2_9MYCO Uncharacterized protein OS=Mycobacterium intermedium OX=28445; GN = BHQ20_15790 PE=4 SV=1
MMLSDAAHTATIHRDDAPIGRSARFHLRKRFADLPCCYRSWARQGKHVYLHGYELTFDIEFACAETEPDSDVVLNHGVLKDVCKELRRQFDHTTLIAADDPHLKLFEMLAERGVIDLRIMISTGMQASAAWVFDTVDSIVLQATAGRVWVSRVIARESRNNVITLTAEPPV

SEQ ID NO: 22923 - protein, 99 aa, Mycobacterium kansasii
  REGION 1..99: note = tr|X7YTC2|X7YTC2_MYCKA 6-pyruvoyl tetrahydropterin synthase family protein OS=Mycobacterium kansasii 662; OX = 1299326 GN=I545_5778 PE=4 SV=1
MKTVFDTNELAVIVEPIISDLDHSFIIWDQDPIYDDFLKVCELADVADKVYTVDFNPTIEGLVEHIYERVNSQLRLSGCVLRRVELQCASTLKASYGLN

SEQ ID NO: 22924 - protein, 99 aa, Mycobacterium kansasii; identical to SEQ ID NO: 22923
  REGION 1..99: note = tr|A0A1V3X7F1|A0A1V3X7F1_MYCKA 6-pyruvoyl tetrahydropterin synthase family protein OS=Mycobacterium kansasii OX=1768 GN=BZL29_4579 PE=4 SV=1

SEQ ID NO: 22925 - protein, 171 aa, Mycobacterium lacus
  REGION 1..171: note = tr|A0A1X1XXH8|A0A1X1XXH8_9MYCO Uncharacterized protein OS=Mycobacterium lacus OX=169765 GN=AWC15_05240; PE = 4 SV=1
MSNTCVRVRHEFSAGHRILGLTGAGEKCRNIHGHNFTCWWMFEQGSGWPPRVEFGAVKAQLRAMVDELFDHAFVVHEDDDFLDYLIRHDLKRYTLRDRPTTEAIAAAIGQLTEERIPDLDLVYVQLTEGSNNEAIYLAHDRGPKFAYPPGDLMVNAPSVQPAGVLAAEVAR

SEQ ID NO: 22926 - protein, 159 aa, Mycobacterium marinum
  REGION 1..159: note = tr|A0A2Z5YIE5|A0A2Z5YIE5_MYCMR Uncharacterized protein OS=Mycobacterium marinum OX=1781 GN=MMRN_35470; PE = 4 SV=1
MTDTAEIYCEFTFESAHRLPNVPAGHKCGRLHGHSYRARIYIEGPVDPRAGWIVDFGKIKDACKPVIARLDHYYLNEIDGLENPTSEHLSMWIWRELATLLPMMSAVSVSETCSSGCMYRGPRVSASESDVEYPSMRRRPEAAGEQVGVSGLHQPISSR

SEQ ID NO: 22927 - protein, 159 aa, Mycobacterium marinum
  REGION 1..159: note = tr|B2HIP5|B2HIP5_MYCMM 6-pyruvoyl tetrahydrobiopterin synthase OS=Mycobacterium marinum (strain ATCC BAA-535 / M) OX=216594 GN=MMAR_3376 PE=4 SV=1
MTDTAEIYCEFTFESAHRLPNVPAGHKCGRLHGHSYRARIYVEGPVDPRAGWIVDFGKIKDACKPVIARLDHYYLNEIDGLENPTSEQLSMWIWRELATLLPMMSAVSVSETCSSGCMYRGPRVSASESDVEYPSTRRRPEAAGEQVGVSGLRQPISSR

SEQ ID NO: 22928 - protein, 160 aa, Mycobacterium montefiorense
  REGION 1..160: note = tr|A0A2R5H9R6|A0A2R5H9R6_9MYCO Uncharacterized protein OS=Mycobacterium montefiorense OX=154654; GN = MmonteBS_39620 PE=4 SV=1
MLQSILEIDPHGGGTTTAVVESEPLIWTHAQESTFAQNAGQRPNSAIEVFKKFTFEAADYLPHVAEGHKGANLHCHTFTLIVGVKGVPDPHSGFVVDFAAIDAAVRPLINQLDRNLMNHLIENPTCENLAAWLWSRLRISGLSSLEIWDRPTSGCKMTAA

SEQ ID NO: 22929 - protein, 173 aa, Mycobacterium nebraskense
  REGION 1..173: note = tr|A0A1X1Z1A6|A0A1X1Z1A6_9MYCO Uncharacterized protein OS=Mycobacterium nebraskense OX=244292; GN = AWC17_13535 PE=4 SV=1
MHNTISVDGARVATMHRADAPLGRTARFHLRRLFDNLPCCHRSWANQGKRFFLHGYERAFDIEFACAETEPGTDTVVDEGTLDEVRTTLRDQFDHTTLIAVDDPQRDLFELLADRGVIDLRIMDDTGMAGTAAWTFETVESIVGLATGGRVWVSRIKARESRNNVVTLTAGPV

SEQ ID NO: 22930 - protein, 179 aa, unidentified
  source 1..179: note = Mycobacterium paraense
  REGION 1..179: note = tr|A0A1X2AD40|A0A1X2AD40_9MYCO Uncharacterized protein OS=Mycobacterium paraense OX=767916 GN=AWB90_11440; PE = 4 SV=1
MSHIAFEDDVYVATIHRADAPNGRTARYHMRKHFGELPCCHRSWANPGKRFFLHGCERTFEIEFACAQTELGTGLVVDVGAVGEIRSALRYQFDHTTLIAEDDPQRDLFELLAERGVVDLRIMENTGMEGSAAWAFETAERIVALATGGRVWVSRIEARESRNNVVTLIAGPVTAGGWA

SEQ ID NO: 22931 - protein, 173 aa, Mycobacterium paraffinicum
  REGION 1..173: note = tr|A0A1Q4HVT0|A0A1Q4HVT0_9MYCO Uncharacterized protein OS=Mycobacterium paraffinicum OX=53378; GN = BRW65_12230 PE=4 SV=1
MRNTAFADGARVATIHRADAPLGRTARFHLRRLFDNLPCCHRSWANHGKRFFLHGYERAFDIEFACAETEADTDAVIDEATLDEVKTALRGQFDHTTLIAVDDPQRDLFELLADRGVIDLRIMDDTGMAGTAAWTFETVEGIVARATGGRVWVSRIKARESRNNVVTLTAGPV

SEQ ID NO: 22932 - protein, 177 aa, unidentified
  source 1..177: note = Mycobacterium paragordonae
  REGION 1..177: note = tr|A0A4R5WLQ9|A0A4R5WLQ9_9MYCO Uncharacterized protein OS=Mycobacterium paragordonae OX=1389713; GN = EUA02_20250 PE=4 SV=1
MPEIAFAGPAQTATMHRDDAPVGRTARFHLRKRFGGLHCCRRSWSDNGKRLFLHGYALSFEIEFACAETETESGQVLGSDCLDDIRAALAAQFAHTTLIATNDPQRDLFELLAERDLVDMRIVDSTGLEASAAWVFETVETIVAQATGGRVWVSRIDAQESGSRVLTLTALPVKDWV

SEQ ID NO: 22933 - protein, 177 aa, unidentified
  source 1..177: note = Mycobacterium paragordonae
  REGION 1..177: note = tr|A0A386UCC5|A0A386UCC5_9MYCO Uncharacterized protein OS=Mycobacterium paragordonae OX=1389713; GN = C0J29_29500 PE=4 SV=1
MPEIAFAGPAQTATMHRDDAPVGRTARFHLRKRFGGLHCCRRSWSDNGKRLFLHGYALSFEIEFACAETETESGQVLGSDCLDDIRAALAAQFAHTTLIATNDPQRDLFELLAERDLVDMRIVDSTGLEASAAWVFETVERIVAQATGGRVWVSRIDAQESGSRVLTLTALPVKDWV

SEQ ID NO: 22934 - protein, 173 aa, Mycobacterium paraseoulense
  REGION 1..173: note = tr|A0A1X0IBU4|A0A1X0IBU4_9MYCO Uncharacterized protein OS=Mycobacterium paraseoulense OX=590652; GN = BST39_11355 PE=4 SV=1
MRNTVFADGVRVATMHRADAPLGRTARFHLRRLFDNLPCCHRSWANQGKRFFLHGYERAFDIEFACAETEAGTGAVIDDGTLDEVNTALRDQFDHTTLIAVDDPQRDLFELLADRGVIDLRIMDDTDMAGTAAWTFETVESIVGPATGGRVWVSRIKARESRNNVVTLTAGPV

SEQ ID NO: 22935 - protein, 146 aa, unidentified
  source 1..146: note = Mycobacterium persicum
  REGION 1..146: note = tr|A0A1X0L8A6|A0A1X0L8A6_9MYCO Uncharacterized protein OS=Mycobacterium persicum OX=1487726; GN = LAUMK42_04789 PE=4 SV=1
MSHTIEKTFRFDAGHRSLGFNYKKEETIHGHTWQLRLVLEYGDQLDDMKTVFDTNELAVIVEPIINDLDHSFIIWDQDPIYDDFLKVCELADVADKVYTVDFNPTIEGLVEHIYQRVNSQLRLSGCVLRRVELQCASTLKASYGLN

SEQ ID NO: 22936 - protein, 144 aa, unidentified
  source 1..144: note = Mycobacterium persicum
  REGION 1..144: note = tr|A0A498PLF6|A0A498PLF6_9MYCO Uncharacterized protein OS=Mycobacterium persicum OX=1487726; GN = LAUMK42_04791 PE=4 SV=1
MPTSRGGSEFYTPDLIANKCANIHGHTIFVSVTLVGDSLDEQYFLLDTDLLEQAFRPILDEFDFAFVVDRHDPLYEDIAAVVHKGGLKLCTVDFSPTFEGLVRHFYDRLQAVIAEKGLADQLRIKEMKVLGELTVEATYSGEGE

SEQ ID NO: 22937 - protein, 146 aa, unidentified
  source 1..146: note = Mycobacterium pseudokansasii
  REGION 1..146: note = tr|A0A498R0R7|A0A498R0R7_9MYCO Uncharacterized protein OS=Mycobacterium pseudokansasii OX=2341080; GN = LAUMK142_05035 PE=4 SV=1
MGHTIEKTFRFDAGHRSLGFNYKKEETIHGHTWQLRLILEYGDQLDDMKTVFDTNELAVIVEPIISDLDHSFIIWDQDPIYDEFLKVCELADVADKVYTVDFNPTIEGLVEHIYERVNSQLRLSGCVLRRVELQCASTLKASYGLN

SEQ ID NO: 22938 - protein, 163 aa, unidentified
  source 1..163: note = Mycobacterium pseudokansasii
  REGION 1..163: note = tr|A0A498QY61|A0A498QY61_9MYCO 6-carboxy-5,6,7,8-tetrahydropterin synthase; OS = Mycobacterium pseudokansasii OX=2341080 GN=queD PE=4; SV = 1
MPYTIKQTIRLEMGHRTWTHDMRTSRGGSELYTPELVANKCANLHGHTIFVSVTLSGDSLDEQYFLLDTDLLENAFRPILDEVDHAFVVDRKDPLYEDIAAVARKGGLKLCTVDFSPTFEALVRHFYDRLQSVIQEKGLADQLRIKEMKVLGEQTVEATYCGE

SEQ ID NO: 22939 - protein, 163 aa, Mycobacterium riyadhense
  REGION 1..163: note = tr|A0A1X2D8P9|A0A1X2D8P9_9MYCO Uncharacterized protein OS=Mycobacterium riyadhense OX=486698; GN = AWC22_14065 PE=4 SV=1
MAYTIKQTIRLEMGHRTWTHDMRTSRGGSELYTPELVANKCANLHGHTIFVSVTLTGDSLDEQYFLLDTDLLENAFRPILDEVDHAFVVDKNDPLYEDIAAITRKGGLKLCTVDFSPTFEALVRHFYDRLQAVIDEKGLADQLRIKEMKVLGEQTVEATYSGS

SEQ ID NO: 22940 - protein, 153 aa, Mycobacterium riyadhense
  REGION 1..153: note = tr|A0A1X2BR02|A0A1X2BR02_9MYCO Uncharacterized protein OS=Mycobacterium riyadhense OX=486698; GN = AWC22_02185 PE=4 SV=1
MGRTARFHLRKRFGDLPCCHRSWSRQGKRFFLHGYERTFEVEFACAETAPGTGLVVDTRCLKDLRAALRRQFDHTTLIAADDPQLDLFQMMADQGVIDLRIMDSTGMEACAAWVFDTVERIVGKATEGRVWVSRIEARENRNNVITLTAEPAD

SEQ ID NO: 22941 - protein, 173 aa, Mycobacterium scrofulaceum
  REGION 1..173: note = tr|A0A1A2UH75|A0A1A2UH75_MYCSC Uncharacterized protein OS=Mycobacterium scrofulaceum OX=1783; GN = A5679_10250 PE=4 SV=1
MHNTVFADGSRVATIHRADAPLGRTARFHLRRLFDNLPCCHRSWANQGKRFFLHGYERAFDIEFACAETEAGTDAVIDEGTLDEVKAALRGQFDHTTLIAVDDPQRDLFELLAERGVIDLRIMDDTGMAGTAAWTFETVESIVARATGGRVWVSRIKARESRNNVVTLTAGPV

SEQ ID NO: 22942 - protein, 130 aa, Mycobacterium simiae
  REGION 1..130: note = tr|A0A5B1BSE4|A0A5B1BSE4_MYCSI 6-carboxytetrahydropterin synthase OS=Mycobacterium simiae; OX = 1784 GN=F0Q45_12090 PE=4 SV=1
MRDVSFSASHRLHSPALTDAENVHIFGKCNNANGHGHNYLLRVALKGELDPVTGMVSNLTKLADLIDRTIKVHFDHTHLNLDTDLFKDRVPTSENIAIVCWELLRSTSIGDMLHYVEVQETSKNRVRFAG

SEQ ID NO: 22943 - protein, 163 aa, Mycobacterium simiae
  REGION 1..163: note = tr|A0A5B1BLE4|A0A5B1BLE4_MYCSI Uncharacterized protein OS=Mycobacterium simiae OX=1784 GN=F0Q45_14745; PE = 4 SV=1
MAYTIKQTIRLEMGHRTWTHDMRTSRGGSQLYTPELIANKCANLHGHTIFVSVTLTGDSLDEQYFLLDTDLLENAFRPILDEVDHAFVVDRKDPLYEDIAAVAKKGGLKLCAVDFSPTFEALVRHFYDRLQSVIDEKGLADQLRIKEMKVLGEQTVEATYCGE

SEQ ID NO: 22944 - protein, 173 aa, Mycobacterium sp.
  REGION 1..173: note = tr|A0A1A2JL25|A0A1A2JL25_9MYCO Uncharacterized protein OS=Mycobacterium sp. E3339 OX=1834146; GN = A5702_16740 PE=4 SV=1
MGNTIYLDGARVATMHRADAPLGRTARFHLRKLFDNLPCCHRSWANQGKRFFLHGFERAFDIEFACAETEPETEAVIDEGTLDEVKTALRDQFDHTTLIAVDDPQRDLFELLADRGVIDLRIMDDTGMAGTAAWTFETVERIVERATGGRVWVSRIKARESRNNVVTLTAGPV

SEQ ID NO: 22945 - protein, 179 aa, Mycobacterium sp.
  REGION 1..179: note = tr|A0A1X2DL65|A0A1X2DL65_9MYCO Uncharacterized protein OS=Mycobacterium sp. IEC1808 OX=1743230; GN = AWB92_22345 PE=4 SV=1
MNHIAFDDDVYVATIHRADTPIGRAARFHMRKLFDEFPCCHRSWANRGKRFFLHGYERAFEIEFACAETERGTGLVVDGRAIAEVRSALRYQFDHTTLIAQDDPQRDLFELLAERGVVDLRIMENTGMEGSAAWVFETAERIVALATGGRVWVSRIQARESRNNVVTLTAGPIRAAGWA

SEQ ID NO: 22946 - protein, 163 aa, Mycobacterium szulgai
  REGION 1..163: note = tr|A0A1X2FME8|A0A1X2FME8_MYCSZ Uncharacterized protein OS=Mycobacterium szulgai OX=1787 GN=AWC27_17125; PE = 4 SV=1
MAYTIKQTIRLEMGHRTWTHDMRTSRGGSELFTPELVANKCANLHGHTIFVSVTLTGDTLDDQYFLLDTDLLENAFRPILDEVDHAFVVDKNDPLYEDIAAITRKGGLKLCTVDFSPTFEALVRHFYDRLQAVIEEKGLSDQLRIKEMKVLGEQTVEATYSGA

SEQ ID NO: 22947 - protein, 146 aa, Mycobacterium szulgai
  REGION 1..146: note = tr|A0A1X2FL20|A0A1X2FL20_MYCSZ Uncharacterized protein OS=Mycobacterium szulgai OX=1787 GN=AWC27_17130; PE = 4 SV=1
MTRTIEKTFRFDAGHRSLGFDYKKEETIHGHTWELKLILESELELDGMKTVFDTNELAVVVRPIIDALDHSFIIWTEDPIFDEFVKLCELADVADKVYPVDFNPTIEGLVQHIYEQVSGKLHVDGCVLKRAELRCASTLNASYGIN

SEQ ID NO: 22948 - protein, 160 aa, Mycobacterium ulcerans
  REGION 1..160: note = tr|A0PNB2|A0PNB2_MYCUA 6-pyruvoyl tetrahydrobiopterin synthase OS=Mycobacterium ulcerans (strain Agy99) OX=362242 GN=MUL_1264 PE=4 SV=1
MMDTAEIYCEFTFESAHRLPNVPAGHKCGRLHGHSYRARTYVEGPVDPRAGWIVDFGKIKDACKPVIARLDHYYLNEIDGLENPTSEQLSMWIWRELATLLPMMMSAVSVSETCSSGCMYRGPRVSASESDVEYPSMRRRPEAAGEQVGVSGLRQPICSR

SEQ ID NO: 22949 - protein, 163 aa, unidentified
  source 1..163: note = Mycobacteroides chelonae
  REGION 1..163: note = tr|A0A1S1KTJ8|A0A1S1KTJ8_MYCCH 6-pyruvoyl tetrahydrobiopterin synthase OS=Mycobacteroides chelonae; OX = 1774 GN=BKG75_25595 PE=4 SV=1
MSFQASGRATTRTVTVRHNFETAHRLPILGGKCVNLHGHSWWTEITVAGALNEQGILVDFGILKARLRDWIDANLDHGAMLGHADPLVPALLAQRSKLFRFGLDAPSHGLEWPTVENVSELLARVTAGFIAEAGWSNVTVHRVKVTETHVNAAELTEWPSLNA

SEQ ID NO: 22950 - protein, 345 aa, unidentified
  source 1..345: note = Mycobacteroides salmoniphilum
  REGION 1..345: note = tr|A0A4V3HYZ8|A0A4V3HYZ8_9MYCO Isopentenyl-diphosphate Delta-isomerase OS=Mycobacteroides salmoniphilum OX=404941 GN=idi PE=3 SV=1
MTDDVVLLDDAGRACGIAPKATVHDDNTPLHLAFSCYLFDPSYRFVLLTQRAWSKRTWPGIWSNSCCGHPPPGVDISEAIIERVHYELGVQMSSPQLALPDFRYRAAMENGVVENEVCPVYVGTIAEVPTPNPDEVAGYRWLPWTQLCDEVLADTRPVSPWCKLQVAKLAQIRNLHSGSRELVPFQASGRATTRTVTVRHNFETAHRLPILGGKCVNLHGHSWWTEITVAGALNEQGILVDFGILKARLRDWIDANLDHGAMLGHADPLVPALLAERSKLFRFGLDAPSHGLEWPTVENVSELLARVTAGFIAEAGWSNVTVHRVKVTETHVNAAELTEWPSLSA

SEQ ID NO: 22951 - protein, 345 aa, unidentified
  source 1..345: note = Mycobacteroides salmoniphilum
  REGION 1..345: note = tr|A0A4R8SQ84|A0A4R8SQ84_9MYCO Isopentenyl-diphosphate Delta-isomerase OS=Mycobacteroides salmoniphilum OX=404941 GN=idi PE=3 SV=1
MTEDVVLLDDAGRACGIAPKATVHDDNTPLHLAFSCYLFDPSYRFVLLTQRAWSKRTWPGAWSNSCCGHPPPGVDIAEAIIERVHYELGVQMSSPQLALPDFRYRAAMENGVVENEVCPVYVGTIADVPTLNPDEVAGYRWLPWTQLCDEVLTGTRPVSPWCKLQVAKLAQIRNLHSGSSELVPFQASGRATTRTVTVRHNFETAHRLPILGGKCVNLHGHSWWTEITVAGALNEQGILVDFGILKARLRDWIDANLDHGAMLGHADPLVRALRAERSKLFRFGLDAPSHGLEWPTVENVSELLARVTAGFIAEAGWSNVTVHRVKVTETHVNAAELTESPSWNA

SEQ ID NO: 22952 - protein, 150 aa, unidentified
  source 1..150: note = Mycolicibacillus koreensis
  REGION 1..150: note = tr|A0A1E3T955|A0A1E3T955_9MYCO 6-carboxy-5,6,7,8-tetrahydropterin synthase; OS = Mycolicibacillus koreensis OX=1069220 GN=B8W67_02340; PE = 4 SV=1
MSTTDRRTCTRRLHFSAGHRVMGHESKCATAHGHNYLVYVTAEAPHLDSVGRVIDFSVLKSAVGTWIDENWDHTFLVSSDDTDTITALKTMPGAKEPFICPFNPTAEEIASYLLGTVCPSVLDHTDVTITKVEVRETENCFAEAQSNQID

SEQ ID NO: 22953 - protein, 190 aa, unidentified
  source 1..190: note = Mycolicibacter arupensis
  REGION 1..190: note = tr|A0A5B1M4J0|A0A5B1M4J0_9MYCO 6-carboxytetrahydropterin synthase OS=Mycolicibacter arupensis OX=342002 GN=F0402_19860 PE=4 SV=1
MGSVGPNSPSVCCRCKTERSLTAEVATQLVIRRSSSSTSSALVEGVDEQAELVIWSSQDPPVSLTVSKQFGFSASHTLSGLPDGHKCSRLHGHSYRVRVDITGERDAVGFVIDYGELDWVRDLIETRLDHRHLNEAVDFNPTAENIAEWLCFRVGEWIDGRPEADRISSIGVAVSETQATWATSTLERRR

SEQ ID NO: 22954 - protein, 91 aa, unidentified
  source 1..91: note = Mycolicibacterium doricum
  REGION 1..91: note = tr|A0A1X1T2S7|A0A1X1T2S7_9MYCO Uncharacterized protein OS=Mycolicibacterium doricum OX=126673; GN = AWC01_14020 PE=4 SV=1
MKSIKALLEMQFDHTVLVAQDDPLREEFERLASLGAANLRVMEDTSLEGSARWIHDAVTPIVEVETSGRVRISRIEVRESAKNTVLLSLGP

SEQ ID NO: 22955 - protein, 129 aa, unidentified
  source 1..129: note = Mycolicibacterium mucogenicum
  REGION 1..129: note = tr|A0A1A0MNB3|A0A1A0MNB3_9MYCO Uncharacterized protein OS=Mycolicibacterium mucogenicum OX=56689; GN = A5642_22440 PE=4 SV=1
MSLTVSKQFGFSASHTLSGLPDGHKCSRLHGHSYRVRVDITGERDAVGFVIDYGELDWVRDLIETRLDHRHLNEAVDFNPTAENIAEWLCFRVGEWIDGRPEADRISSIGVAVSETQATWATSTLERRR

SEQ ID NO: 22956 - protein, 129 aa, unidentified
  source 1..129: note = Mycolicibacterium obuense
  REGION 1..129: note = tr|A0A0M2K089|A0A0M2K089_9MYCO Uncharacterized protein OS=Mycolicibacterium obuense OX=1807 GN=WN67_19330; PE = 4 SV=1
MSLTVSKQFGFSASHTLSGLPDGHKCSRLHGHSYRVRVDITGERDAVGFVIDYGELDWVRDLIETSLDHRHLNEAVDFNPTAENIAEWLCFRVDEWIDGRPEADRISSIGVAVSETQATWATSTLERRR

SEQ ID NO: 22957 - protein, 137 aa, unidentified
  source 1..137: note = Myroides guanonis
  REGION 1..137: note = tr|A0A1I3NDL7|A0A1I3NDL7_9FLAO 6-carboxy-5,6,7,8-tetrahydropterin synthase OS=Myroides guanonis OX=1150112 GN=SAMN04487893_10350 PE=3 SV=1
MKVTVSRKAHFNAAHRLYRKDWTDEMNNRVFGKCNNPNFHGHNYELIVHVTGDIDVETGFVMDLKTLSDIIYDEVEVAFDHKNLNLDVAEFRDLNPTAENIAVVIWSKLRKKIDDDKKIKVELYETARNFVSFDGDE

SEQ ID NO: 22958 - protein, 150 aa, unidentified
  source 1..150: note = Myroides guanonis
  REGION 1..150: note = tr|A0A1I3T5C9|A0A1I3T5C9_9FLAO 6-pyruvoyltetrahydropterin/6-carboxytetrahydropterin synthase OS=Myroides guanonis OX=1150112; GN = SAMN04487893_11270 PE=4 SV=1
MSKIRITKQFSFETGHALYGYDGKCRNVHGHSYKLRVTVIGEPIADASNVKFGMVIDFTDLKKIVLEEVVDVFDHATVFNKNTPHIELAKELQDRGHHVILVDYQPTSENMVIDFAEKIKHRLPKGLELYSLRLQETDSSYAEWYQSDNL

SEQ ID NO: 22959 - protein, 136 aa, unidentified
  source 1..136: note = Myroides indicus
  REGION 1..136: note = tr|A0A4R7ELG2|A0A4R7ELG2_9FLAO 6-carboxy-5,6,7,8-tetrahydropterin synthase OS=Myroides indicus OX=1323422 GN=C8P70_1573 PE=3 SV=1
MKLTVSRKAHFNAAHRLFRKDWSDEKNQKVFGKCNNPNYHGHNYELIVHVTGEIDEETGFVMDLKELSDLIKNEIEEYLDHKNLNLDVPEFADLNPTAENIAVVIWKKLRSFIETDKTLEIVLYETPRNFVSYRGE

SEQ ID NO: 22960 - protein, 150 aa, unidentified
  source 1..150: note = Myroides indicus
  REGION 1..150: note = tr|A0A4V3E9A9|A0A4V3E9A9_9FLAO 6-pyruvoyltetrahydropterin/6-carboxytetrahydropterin synthase OS=Myroides indicus OX=1323422 GN=C8P70_10242; PE = 4 SV=1
MPKIRITKQFNFETGHALYGYDGKCRNVHGHSYKLAVTVIGTPIEDTDNVKYGMVIDFGDLKKIVKEEIVDVFDHATVFNQNTPHVELAKELKERGHHVILVDYQPTSENMVIDFANKIKRRLPHGIDLYALRLQETESSYAEWYQSDNL

SEQ ID NO: 22961 - protein, 137 aa, Myroides marinus
  REGION 1..137: note = tr|A0A165RY89|A0A165RY89_9FLAO 6-carboxy-5,6,7,8-tetrahydropterin synthase OS=Myroides marinus OX=703342 GN=AV926_11545 PE=3 SV=1
MRLTVSRKAHFNAAHRLHRKEWSDEKNQLIFGKCNNPNFHGHNYELIVQVTGELDQETGFVMDLKELSDLIKSEVEERFDHKNLNLDVPEFFELIPTAENIAVVIWQLLRPFIPSDKELEIILYETARNFVSFKGEN

SEQ ID NO: 22962 - protein, 150 aa, Myroides marinus
  REGION 1..150: note = tr|A0A165QKU7|A0A165QKU7_9FLAO 6-pyruvoyl tetrahydropterin synthase OS=Myroides marinus OX=703342; GN = AV926_01480 PE=4 SV=1
MPKIRITKQFTFETGHALYGYDGKCRNVHGHSYKLAVTVIGTPIEDTTNVKYGMVIDFGDLKKIVKGDIVDVFDHATVFNKNTPHIELAKELEERGHHVILVDYQPTSENMVIDFAEKIKSKLPEGIELYSLRLQETESSYAEWHQSDNL

SEQ ID NO: 22963 - protein, 150 aa, Myroides odoratimimus
  REGION 1..150: note = tr|A0A0E1ZCG3|A0A0E1ZCG3_9FLAO 6-pyruvoyl tetrahydropterin synthase/QueD family protein OS=Myroides odoratimimus CCUG 10230 OX=883150 GN=HMPREF9712_00924 PE=4; SV = 1
MPKIRITKQFTFETGHALYGYDGKCRNVHGHSYKLAVTVIGTPIEDTNNVKYGMVIDFGDLKKIVKGDIVDVFDHATVFNKNTPHIELAKELEERGHHVILVDYQPTSENMVIDFAQKIKSKLPEGIELYSLRLQETESSYAEWHQSDNL

SEQ ID NO: 22964 - protein, 150 aa, Myroides odoratimimus; identical to SEQ ID NO: 22963
  REGION 1..150: note = tr|A0A0S7E759|A0A0S7E759_9FLAO 6-pyruvoyl tetrahydropterin synthase OS=Myroides odoratimimus; OX = 76832 GN=AS202_06710 PE=4 SV=1

SEQ ID NO: 22965 - protein, 150 aa, Myroides odoratus
  REGION 1..150: note = tr|A0A378U2J4|A0A378U2J4_MYROD 6-pyruvoyl tetrahydropterin synthase/QueD family protein OS=Myroides odoratus OX=256 GN=NCTC11036_01415 PE=4 SV=1
MSKIRITKQFTFETGHALYGYDGKCRNVHGHSYKLAVTVIGTPITDSSNVKFGMVIDFSDLKKIVKEEIVDIFDHATVFNKNTPHVELAQELKDRGHHVILVDYQPTSENMVIDFANKIKNRLPENLALFSLRLQETDSSYAEWYQSDNL

SEQ ID NO: 22966 - protein, 138 aa, Myroides odoratus
  REGION 1..138: note = tr|A0A378RS09|A0A378RS09_MYROD 6-carboxy-5,6,7,8-tetrahydropterin synthase OS=Myroides odoratus OX=256 GN=queD PE=3 SV=1
MRLTVSRKAHFNAAHRLHRPDWSDEQNQTVFGKCNNPNFHGHNYELIVHVTGEVDPETGFVMDLKILSDLIKSEIEEAFDHKNLNLDVIEFKNLIPTAEYIAVVIWQKLRPFIEKDKDLEVVLYETSRNFVTFKGEGI

SEQ ID NO: 22967 - protein, 137 aa, Myroides phaeus
  REGION 1..137: note = tr|A0A1G8H6I6|A0A1G8H6I6_9FLAO 6-pyruvoyltetrahydropterin/6-carboxytetrahydropterin synthase OS=Myroides phaeus OX=702745 GN=SAMN05421818_1448; PE = 4 SV=1
MKLRVSRKAHFNSAHRLFRKEWSDEKNQRIFGKCNNPNYHGHNYELIVHVTGELDLETGFVMDLKELSDLIKREIEETFDHKNLNLDVPEFADLIPSAENIAVVIWQKLRPFIPQDKALEVELYETARNFVSYKGEN

SEQ ID NO: 22968 - protein, 150 aa, Myroides phaeus
  REGION 1..150: note = tr|A0A1G8E554|A0A1G8E554_9FLAO 6-pyruvoyltetrahydropterin/6-carboxytetrahydropterin synthase OS=Myroides phaeus OX=702745; GN = SAMN05421818_10956 PE=4 SV=1
MPKIRITKQFTFETGHALYGYDGKCRNVHGHSYKLGVTVIGTPIDDINNVKYGMVIDFGDLKKIVKEDIVDVFDHATVFNKNTPHVELAKELKDRGHHVILVDYQPTSENMVIDFAAKIKSRLPEGIELYSLRLQETESSYAEWHQSDNL

SEQ ID NO: 22969 - protein, 150 aa, Myroides profundi
  REGION 1..150: note = tr|A0A0B5RTU1|A0A0B5RTU1_9FLAO 6-pyruvoyl-tetrahydropterin synthase OS=Myroides profundi; OX = 480520 GN=MPR_0251 PE=4 SV=1
MPKIRITKQFTFETGHALYGYDGKCRNVHGHSYKLAVTVIGTPIEDTSNVKYGMVIDFGDLKKIVKGDIVDVFDHATVFNKNTPHIELAKELEERGHHVILVDYQPTSENMVIDFAQKIKSKLPDGIELYSLRLQETESSYAEWHQSDNL

SEQ ID NO: 22970 - protein, 137 aa, Myroides profundi
  REGION 1..137: note = tr|A0A0B5S091|A0A0B5S091_9FLAO 6-carboxy-5,6,7,8-tetrahydropterin synthase OS=Myroides profundi OX=480520 GN=MPR_2924 PE=3 SV=1
MRLTVSRKAHFNAAHRLHRKEWSEEKNQLVFGKCNNPNYHGHNYELIVQVTGELDPETGFVMDLKELSDLIKSEIEENFDHKNLNLDVPEFLELIPTAENIAVVIWQKLRPFINDDKELEVILYETARNFVSFKGDY

SEQ ID NO: 22971 - protein, 139 aa, unidentified
  source 1..139: note = Myxococcaceae bacterium
  REGION 1..139: note = tr|A0A4Q5ZME4|A0A4Q5ZME4_9DELT 6-carboxy-5,6,7,8-tetrahydropterin synthase; OS = Myxococcaceae bacterium OX=2484252 GN=queD PE=3 SV=1
MTGRRPPSGDCPLKKTPLITEISKEFTFEAAHRLPNVPEGHKCSRVHGHSYRIEITLRGPVHPQFGWIVDFAELNAAWQPLHAQLDHRLLNDVPGLENPTSELLAAWLFERVNVPGTTVARIRVAETCTSSCTVYAAEG

SEQ ID NO: 22972 - protein, 128 aa, unidentified
  source 1..128: note = Myxococcaceae bacterium
  REGION 1..128: note = tr|A0A4V2AUD1|A0A4V2AUD1_9DELT 6-carboxy-5,6,7,8-tetrahydropterin synthase; OS = Myxococcaceae bacterium OX=2484252 GN=queD PE=3 SV=1
MKKTPLITEISKEYTFEAAHRLPHVPEGHKCSRVHGHSYRIEITLQGPLHPQLGWIVDFAEMNAAWQPLHAQLDHRLLNDVPGLENPTSELLAAWVFEKLQVPAGTRIARVRVAETCTSSCTVFPQED

SEQ ID NO: 22973 - protein, 124 aa, unidentified
  source 1..124: note = Myxococcales bacterium
  REGION 1..124: note = tr|A0A3B8LHK0|A0A3B8LHK0_9DELT Uncharacterized protein OS=Myxococcales bacterium OX=2026763; GN = DCE42_18140 PE=4 SV=1
MFIVAEERIFPATHRILLPTGEWEPLHEHDWLLKIYIRCKELDDKQLVIDFLDLQRYMDEALAPYIGKDIGEQPPFNEGISPTTEYFAWVLYQSLAPKIDDERIQLYKVELREAPTSWGIYEVA

SEQ ID NO: 22974 - protein, 172 aa, unidentified
  source 1..172: note = Myxococcales bacterium
  REGION 1..172: note = tr|A0A2E6VRN8|A0A2E6VRN8_9DELT Uncharacterized protein OS=Myxococcales bacterium OX=2026763; GN = CMH56_07610 PE=4 SV=1
MYKILKSIDIDFAHHIRGHQGACINIHGHTWKFEVGVQAKELNEDGFVVDFSKLKKSVLMPCHQLLDHALAIGETSISEIGEFLSPMGEKLVATRADAKPTPDNWEFHGAKGVYPGGMKVAVFPFSPTSEKLARWLYDAASAELADDRVQISFARIYETLHPVQAVAEYWPE

SEQ ID NO: 22975 - protein, 120 aa, Myxococcus fulvus
  REGION 1..120: note = tr|F8C6E5|F8C6E5_MYXFH 6-carboxy-5,6,7,8-tetrahydropterin synthase OS=Myxococcus fulvus (strain ATCC BAA-855 / HW-1) OX=483219; GN = LILAB_12130 PE=3 SV=1
MNIFKEFTFEAAHRLPNVPPGHKCSRLHGHSYRVEIHVSGPVGEQSGWVMDFSDLKEAFEPLRLKLDHYYLNEIEGLENPTSENLSRWIWKRLRPGLPLLSRVVVRETCTSGCVYQGEDD

SEQ ID NO: 22976 - protein, 132 aa, Myxococcus fulvus
  REGION 1..132: note = tr|A0A511T2G2|A0A511T2G2_MYXFU 6-carboxy-5,6,7,8-tetrahydropterin synthase OS=Myxococcus fulvus OX=33 GN=MFU01_33720 PE=3 SV=1
MEPVSKPKVSLVTEISREFTFEAAHFLPNVPPGHKCSRVHGHSYRVEVTVRGPVDPHYGWVVDFATLTEAWQAMHAQLDHRLLNDVPGLENPTSELLAAWVFGKLSFPTAKVVKIRVAETCTSQCVVYPEEG

SEQ ID NO: 22977 - protein, 120 aa, unidentified
  source 1..120: note = Myxococcus hansupus
  REGION 1..120: note = tr|A0A0H4X695|A0A0H4X695_9DELT 6-carboxy-5,6,7,8-tetrahydropterin synthase OS=Myxococcus hansupus OX=1297742 GN=A176_007686 PE=3 SV=1
MDIFKEFTFEAAHRLPNVPPGHKCSRLHGHSYRVEVHVRGPVGEQSGWVMDFSDIKESFEPVRLKLDHYYLNEIEGLENPTSENLSRWIWKRLRPGLPLLSRVVVRETCTSGCIYQGEDD

SEQ ID NO: 22978 - protein, 120 aa, unidentified; identical to SEQ ID NO: 22975
  source 1..120: note = Myxococcus macrosporus
  REGION 1..120: note = tr|A0A250K6C0|A0A250K6C0_9DELT 6-carboxy-5,6,7,8-tetrahydropterin synthase OS=Myxococcus macrosporus DSM 14697 OX=1189310 GN=MYMAC_006563 PE=3 SV=1

SEQ ID NO: 22979 - protein, 132 aa, Myxococcus sp.
  REGION 1..132: note = tr|A0A540WYM0|A0A540WYM0_9DELT 6-carboxy-5,6,7,8-tetrahydropterin synthase OS=Myxococcus sp. AM401 OX=2590453 GN=queD PE=3 SV=1
MEPVSTKKASLVTEISKEFTFEAAHRLPNVPPGHKCSRVHGHSYRIEITVRGPVDPHFGWIVDFAELNAAWQPLHALLDHRLLNDVPGLENPTSELLAAWVFERLSFATARVVKLRVSETCTSQCTVYPAEG

SEQ ID NO: 22980 - protein, 164 aa, Myxococcus sp.
  REGION 1..164: note = tr|A0A540X040|A0A540X040_9DELT Folate biosynthesis protein OS=Myxococcus sp. AM401 OX=2590453 GN=FJV41_20435; PE = 4 SV=1
MPRTTTLELYKEEMKFSAGHFTIFSATHRENLHGHNFTVYVALTGEVADNGMLSDYGPLKQTIIARCRTWNETFFLPEHSPHLKLERDAKGNVLARFNGEELRFLARDITVLPVENVTLEELARVFGEELVGDGTALRKDGVTRLVVKCASGPGQSSSWEWVAP

SEQ ID NO: 22981 - protein, 135 aa, Myxococcus stipitatus
  REGION 1..135: note = tr|L7UFY3|L7UFY3_MYXSD 6-carboxy-5,6,7,8-tetrahydropterin synthase OS=Myxococcus stipitatus (strain DSM 14675 / JCM 12634 / Mx s8); OX = 1278073 GN=MYSTI_05528 PE=3 SV= 1
MEPVSKKKVSLVTEISKEFTFEAAHRLPNVPPGHKCSRVHGHSYRIEITVRGPVDPHFGWIVDFSELNAAWQSLHAQLDHRLLNDVEGLENPTSELLAAWVYERLSFPNFPAARVVKLRVSETCTSQCTVYPAEG

SEQ ID NO: 22982 - protein, 164 aa, Myxococcus stipitatus
  REGION 1..164: note = tr|L7UFK0|L7UFK0_MYXSD Folate biosynthesis protein; OS = Myxococcus stipitatus (strain DSM 14675 / JCM 12634 / Mx s8) OX=1278073 GN=MYSTI_05526 PE=4 SV=1
MPRTTTLELHKEEMKFSAGHFTIFSATHRENLHGHNFTVFVALTGEVTDNGMLSDYGPLKRTIIERCHSWNETFFLPDRSPHLKLERNAKGDVLAHFNGEELRFLARDVTVLPVANVTLEELARVFGEELVGDGSAMRRDGVLKLVVKCASGPGQWSSWEWEAA

SEQ ID NO: 22983 - protein, 120 aa, Myxococcus virescens
  REGION 1..120: note = tr|A0A511HLW1|A0A511HLW1_9DELT 6-carboxy-5,6,7,8-tetrahydropterin synthase OS=Myxococcus virescens OX=83456 GN=ptps PE=3 SV=1
MDIFKEFTFEAAHRLPNVPPGHKCSRLHGHSYRVEIHVRGPVGSQSGWVMDFSDIKEAFEPLRLKLDHYYLNEVEGLENPTSENLSRWIWKRLRPGLPLLSRVVVRETCTSGCIYQGEDD

SEQ ID NO: 22984 - protein, 126 aa, Myxococcus xanthus
  REGION 1..126: note = tr|A0A4Y6AFR5|A0A4Y6AFR5_MYXXA Uncharacterized protein OS=Myxococcus xanthus OX=34 GN=BHS05_13545 PE=4; SV = 1
MHYLSLTGEFKASHAVTFPDGQREPLHTHDWWVRVWVKARALNHWDVIIDFKDLQDIIDRVCRELHDTNINEHPYFKTVNCTAERVTEYVFKQVESGLPEGVTLDRVHLRRTGGELPEAEYAHATD

SEQ ID NO: 22985 - protein, 209 aa, Myxococcus xanthus
  REGION 1..209: note = tr|Q1D8H8|Q1D8H8_MYXXD Uncharacterized protein; OS = Myxococcus xanthus (strain DK 1622) OX=246197; GN = MXAN_2834 PE=4 SV=1
MHIFVKAGAQRKRTGQARRRRVGTWSPLAGPCSEELRGDSLDSSCLLPYSAGRRSRLRRRYHGVCSLRAAHQDLTTTTSKWTAMHYLSLTAEFKASHAVTFPDGQREPLHTHDWWVRVWVKARALNHWDVIIDFKDLQDIIVRVCRELHDTNINEHPYFKTVNCTAERVTEYVFKQVESGLPEGVTLDRVHLRRTGGELPEAEYAHARD

SEQ ID NO: 22986 - protein, 135 aa, Nakamurella multipartita
  REGION 1..135: note = tr|C8XK63|C8XK63_NAKMY Uncharacterized protein; OS = Nakamurella multipartita (strain ATCC 700099 / DSM 44233 / CIP 104796 / JCM 9543 / NBRC 105858 / Y-104); OX = 479431 G N=Namu_0316 PE=4 SV=1
MFTVTVRDHMMIAHSLRGEVFGPAQRLHGATFVVDAAFAGRALSPDDIVVDIGLAADELRAVVDDFRYRNLDDDEAFAGRNTTTEVLARAIADRLADRVHAEAFGPSGRGLCRLTVTLHESHIAWASYERELWPG

SEQ ID NO: 22987 - protein, 132 aa, unidentified
  source 1..132: note = Nakamurella panacisegetis
  REGION 1..132: note = tr|A0A1H0SVU4|A0A1H0SVU4_9ACTN 6-pyruvoyl-tetrahydropterin synthase OS=Nakamurella panacisegetis OX=1090615 GN=SAMN04515671_4317 PE=4 SV=1
MFSVTVRDHMMIAHSFRGAVFGPAQRLHGATYVVDATFRSPVLNSDDIVVDIGRAAQELQAVVGELGYRNLDEEPDLAGGNTTTEVLARVIADRLADRVRAGRFGGGTENLDGVTVTLRESHIAWASYERPL

SEQ ID NO: 22988 - protein, 121 aa, Nannocystis exedens
  REGION 1..121: note = tr|A0A1I1U6G8|A0A1I1U6G8_9DELT 6-carboxy-5,6,7,8-tetrahydropterin synthase OS=Nannocystis exedens OX=54 GN=SAMN02745121_01011 PE=3 SV=1
MDIFKQFRFEAAHRLPNVPANHKCARLHGHSFMVEIHVTGPVGETSGWVVDFADIAAAWQPLHALLDHNYLNEVEGLENPTSELLARWIWRRMLPALPGLSQVVIRETCTSGCIYRGEDER

SEQ ID NO: 22989 - protein, 127 aa, Nannocystis exedens
  REGION 1..127: note = tr|A0A1I2EPG1|A0A1I2EPG1_9DELT 6-carboxy-5,6,7,8-tetrahydropterin synthase OS=Nannocystis exedens OX=54 GN=SAMN02745121_06204 PE=3 SV=1
MEIFRVYHFEAAHRLPAVPPGHKCSRLHGHSYAIDVRVRGPVGADTGWIMDLGDLDVAWEPLHRVLDHNYLNEVEGLENPTSELLARWIWRRLKPSLPLLCEVGVRETCTCGCIYRGEDEDERRPAT

SEQ ID NO: 22990 - protein, 130 aa, Natranaerobius trueperi
  REGION 1..130: note = tr|A0A226BVE9|A0A226BVE9_9FIRM 6-carboxy-5,6,7,8-tetrahydropterin synthase; OS = Natranaerobius trueperi OX=759412 GN=queD PE=3 SV=1
MFTLQSEFSFDAAHNLEGHEGKCKNLHGHRWRVIVQVSEEKLKEEGSERDMVVDFSILKKDLKQLSDMFDHKVIVEGKELKVEEEQITLPFRPTAERLSQFIYKKLQEKEYNVSQVTVYETPNNAVIYSE

SEQ ID NO: 22991 - protein, 139 aa, Natranaerovirga hydrolytica
  REGION 1..139: note = tr|A0A4R1ML73|A0A4R1ML73_9FIRM 6-carboxy-5,6,7,8-tetrahydropterin synthase; OS = Natranaerovirga hydrolytica OX=680378 GN=EDC19_1975; PE = 3 SV=1
MYILRTESSFDSAHFLSNYEGKCKNIHGHRWRVEVEVQSEKLIERGVKKGMVVDFSDFKKDLKQLVDALDHKLIIEKETLKNRTLECLLEEGFEVIQVDFRPTAENFSAYFYNVLEEQGYTVKRATVYETPNNSATYER

SEQ ID NO: 22992 - protein, 139 aa, Natranaerovirga pectinivora
  REGION 1..139: note = tr|A0A4R3ML51|A0A4R3ML51_9FIRM 6-carboxy-5,6,7,8-tetrahydropterin synthase; OS = Natranaerovirga pectinivora OX=682400 GN=EDC18_103117; PE = 3 SV=1
MYLLKTLHSFDSAHFLAGYDGKCKNIHGHRWTVEVEVQSETLIEEGQRKGMVVDFSDLKKDLKVLLDGFDHALIIERGTMRKETLSCLLEDDFYVIEVDFRPTAENFSAYFFKELEKKGYNVRRVVVYETPNNSAIFEK

SEQ ID NO: 22993 - protein, 141 aa, Natribacillus halophilus
  REGION 1..141: note = tr|A0A1G8PCY1|A0A1G8PCY1_9BACI 6-carboxy-5,6,7,8-tetrahydropterin synthase; OS = Natribacillus halophilus OX=549003; GN = SAMN04488123_10873 PE=3 SV=1
MLQQFYPQVFHDYRYELNKDMQMAAAHFIDHQDAGRCRDTHGHTYFINITIAGDALDDAGFLVDFKTLKDEIHGAYDHTLLNDHPRFAEGLPTTEVVARVFWEQVDERLAARENRPYCLQVLVRETPTSYAIYRPKRGDHR

SEQ ID NO: 22994 - protein, 148 aa, Natronoflexus pectinivorans
  REGION 1..148: note = tr|A0A4R2GNS2|A0A4R2GNS2_9BACT 6-carboxy-5,6,7,8-tetrahydropterin synthase; OS = Natronoflexus pectinivorans OX=682526 GN=EV194_101616; PE = 3 SV=1
MAKIRLTKEFRFEMAHALWNYDGLCRNIHGHSYILQVTVIGEPISDDENPKLGMVMDFGDLKAIVNREIVKDLDHSIVVSNKVSPEIIKQMGQMGERHFMVDYQPTCENMLIDFAQRLKNALPKEVSLFSLKLHETANSFAEWYAEDN

SEQ ID NO: 22995 - protein, 292 aa, unidentified
  source 1..292: note = Natronospirillum operossus
  REGION 1..292: note = tr|A0A4Z0WJU1|A0A4Z0WJU1_9BACT 6-pyruvoyl tetrahydropterin reductase OS=Natronospirillum operossus; OX = 2562806 GN=E4656_05295 PE=4 SV=1
MASLFVNNLTVIDFSYLDAERGIVGESWIVDLELGGELNAEGMVFDFGHVKKAIKTALDNGMDHRFVIPLQLDGLEVEQGPEYSRIRRLAADGSLMLDYRAPNQAFYWLQATAVTPQTALRDLQQQVRAVVPANVQQIKLSLRTEDHQDAYYHYSHGLKKHDGDCQRMVHGHRSRLIIEQDGRRQPELEQQFARHWQDIYLITREDIRQEIKVLDTPCYAMSYEAAQGHFELTLPVTRCDVLDTDTTVELIAQHLVHRLSARAPDSHWCVRAFEGVNKGAIAAHPAATAQAL

SEQ ID NO: 22996 - protein, 134 aa, unidentified
  source 1..134: note = Natronospirillum operossus
  REGION 1..134: note = tr|A0A4Z0W475|A0A4Z0W475_9BACT 6-carboxytetrahydropterin synthase OS=Natronospirillum operossus OX=2562806 GN=E4656_14595 PE=4 SV=1
MYALTVRDHLMIAHSFKGDIFGPAQNLHGATYVVDMTFMRPDLDDDDLIVDIGLASTVLKELLAPLNFQNLDELPEFKGRNTTTEFMARTLFERMREAIAAGRLGPTGKGLSDLRVTLGESHIAWASYEGPLHG

SEQ ID NO: 22997 - protein, 194 aa, Nautilia profundicola
  REGION 1..194: note = tr|B9L875|B9L875_NAUPA Putative 6-pyruvoyl tetrahydrobiopterin synthase OS=Nautilia profundicola (strain ATCC BAA-1463 / DSM 18972 / AmH) OX=598659; GN = NAMH_0410 PE=4SV=1
MIIRKLFKFENAHIVRNCTSRRCSRSIHGHSYKVEVKLSSNYLDNGEMVYDFGLMKVTIKDLIDSFDHAITLWAKDDDEYIEYAKKFSERWIVLPVNPSAEQFSRVFFIMIDRVLNLMEFNNGEKEVKLHSIVVHETDTGYAECFREDAYNFKGMGEIKLEDIVFSDRIKEEWNDSRLWDKLLREEKLTPPKEI

SEQ ID NO: 22998 - protein, 194 aa, Nautilia sp.
  REGION 1..194: note = tr|A0A3T0L0I4|A0A3T0L0I4_9PROT 6-carboxytetrahydropterin synthase QueD OS=Nautilia sp. PV-1 OX=2579250 GN=C3L23_02080 PE=4 SV=1
MIIRKLFKFENAHIVRNCTSRRCSRSIHGHSYKVEVKLSSNYLDNGEMVYDFGLMKVTIKDLIDSFDHAITLWAKDDDEYIKYAKKFSERWIVLPVNPSAEQFSRVFFIIIDRVLNLMEFNNGEKEVKLHSITVHETDTGYAECFREDAYNFKGMGEIKFEDIIFSDRIKQEWNDSRLWDKLLKQEKLTPPKEI

SEQ ID NO: 22999 - protein, 142 aa, Neisseria animalis
  REGION 1..142: note = tr|A0A3N3EHG1|A0A3N3EHG1_NEIAN 6-carboxy-5,6,7,8-tetrahydropterin synthase OS=Neisseria animalis OX=492 GN=queD PE=3 SV=1
MKITKIFTFDSSHMLDGHDGKCQNLHGHTYKLEITVSDGLIQGGAKDGMVMDFTDLKAIVKQQIIDPFDHAFIYDGSNERESRIAALLEEWNMKTLRLQRRTTAENMTVEIYGRLQNAGINVCSVKLWETPTSCAEYEGENE

SEQ ID NO: 23000 - protein, 140 aa, Neisseria animaloris
  REGION 1..140: note = tr|A0A448UD61|A0A448UD61_9NEIS 6-carboxy-5,6,7,8-tetrahydropterin synthase OS=Neisseria animaloris OX=326522 GN=NCTC12227_01577 PE=3 SV=1
MKITKIFTFDSSHMLDGHDGKCQNLHGHTYKLEVVVSDGLIQGGAKDGMVMDFSDLKTIVKRTIIEPFDHAFIYNGNNPRESQIAALLESWNMKTLRLGFRTTAENMTVEMFGRLKNAGLPVSLIRLWETPTSCAEYEGE

SEQ ID NO: 23001 - protein, 140 aa, unidentified
  source 1..140: note = Neisseria arctica
  REGION 1..140: note = tr|A0A0J0YS71|A0A0J0YS71_9NEIS 6-carboxy-5,6,7,8-tetrahydropterin synthase OS=Neisseria arctica OX=1470200 GN=PL75_05420 PE=3 SV=1
MKITKTFSFDMAHMLDNHDGKCKNLHGHTYKLEVEVCGNLIEGGAKDGMVIDFSDLKQSVKALVVEPFDHAFIYHTGSERERQIARMLEGWGLKTLAMDKRTTAENMAQYMFDLLRRKGRLNISTLRLWETPTSYCECSL

SEQ ID NO: 23002 - protein, 53 aa, unidentified
  source 1..53: note = Neisseria arctica
  REGION 1..53: note = tr|A0A0J0YP36|A0A0J0YP36_9NEIS 6-carboxy-5,6,7,8-tetrahydropterin synthase (Fragment); OS = Neisseria arctica OX=1470200 GN=PL75_11205 PE=4 SV=1
RHIARMLEVWGLKTLATDKRATAENMAEYMFDLLRRKGRLNITTLRLWETPTS

SEQ ID NO: 23003 - protein, 140 aa, Neisseria bacilliformis
  REGION 1..140: note = tr|F2BCW7|F2BCW7_9NEIS 6-carboxy-5,6,7,8-tetrahydropterin synthase OS=Neisseria bacilliformis ATCC BAA-1200 OX=888742 GN=ptpS PE=3 SV=1
MKITKIFTFDSSHLLDGHDGKCKNLHGHTYRLEITVSDDLICGGAKDGMVMDFADLKTIAEREIIAPFDHAFLYHADNARECQIAALLEGWQMKTLRLPCRTTAENMAAEIYGRLKAAGVNVCSVKLWETPTSCAEFEGA

SEQ ID NO: 23004 - protein, 140 aa, Neisseria canis
  REGION 1..140: note = tr|A0A448DBB1|A0A448DBB1_9NEIS 6-carboxy-5,6,7,8-tetrahydropterin synthase OS=Neisseria canis OX=493 GN=NCTC10296_02342 PE=3 SV=1
MKITKIFTFDSSHMLDGHDGKCQNLHGHTYKLEVVVSDGLIQGGAKDGMVMDFSDLKTIVKRTIIEPFDHAFIYNGNNSRESQIAALLESWNMKTLRLGFRTTAENMTVEMFGRLKNAGLPVSLIRLWETPTSCAEYEGE

SEQ ID NO: 23005 - protein, 144 aa, Neisseria cinerea
  REGION 1..144: note = tr|D0W2T8|D0W2T8_NEICI 6-carboxy-5,6,7,8-tetrahydropterin synthase OS=Neisseria cinerea ATCC 14685 OX=546262 GN=queD PE=3 SV=1
MKITKIFTFDSSHMLDGHDGKCQNLHGHTYKLEITVSDGIVRGGPKDGMVMDFTDLKAIVKKYITDPFDHAFIYHGDNGRECQIAALLEGWNMKTLRLPCRTTAENMSIEMYDRLKNAGLNVCSVKLWETPTSCAEYEGRCGAF

SEQ ID NO: 23006 - protein, 144 aa, Neisseria cinerea
  REGION 1..144: note = tr|A0A2X3ZLP2|A0A2X3ZLP2_NEICI 6-carboxy-5,6,7,8-tetrahydropterin synthase OS=Neisseria cinerea OX=483 GN=NCTC10294_00176 PE=3 SV=1
MKITKIFTFDSSHMLDGHDGKYQNLHGHTYKLEITVSDGIVRGGPKDGMVMDFTDLKAIVKKYITDPFDHAFIYHGDNGRECQIAALLEGWNMKTLRLPCRTTAENMSIEMYDRLKNAGLNVCSVKLWETPTSCAEYEGRCRAF

SEQ ID NO: 23007 - protein, 140 aa, Neisseria dentiae
  REGION 1..140: note = tr|A0A1X3DFQ2|A0A1X3DFQ2_9NEIS 6-carboxy-5,6,7,8-tetrahydropterin synthase OS=Neisseria dentiae OX=194197 GN=BWD09_01935 PE=3 SV=1
MKITKIFTFDSSHMLDGHDGKCQNLHGHTYSLEITVSDGLIEAGAKAGMVMDFADLKTIVKQTVIEPFDHAFIYHGGNARESQIAALLEGWQMKTLRLNRRTTAENLSVEIFGRLKSAGLPVCSVKLWETPTSCAEYEGN

SEQ ID NO: 23008 - protein, 140 aa, unidentified
  source 1..140: note = Neisseria dumasiana
  REGION 1..140: note = tr|A0A1X3DKG2|A0A1X3DKG2_9NEIS 6-carboxy-5,6,7,8-tetrahydropterin synthase OS=Neisseria dumasiana OX=1931275 GN=BV912_03410 PE=3 SV=1
MKITKIFTFDSSHMLDGHDGKCQNLHGHTYKLEVTVSDGLIQGGAKDGMVMDFSDLKAIVKRTIIEPFDHAFIYNGNNPRESQIAALLESWNMKTLRLGFRTTAENMTVEMFGRLKNAGLPVSLIRLWETPTSCAEYDGE

SEQ ID NO: 23009 - protein, 140 aa, Neisseria elongata
  REGION 1..140: note = tr|D4DQ52|D4DQ52_NEIEG 6-carboxy-5,6,7,8-tetrahydropterin synthase OS=Neisseria elongata subsp. glycolytica ATCC 29315 OX=546263 GN=queD; PE = 3 SV=1
MKITKIFTFDSSHMLDGHDGKCQNLHGHTYKLEITVSGSLIEGGAKDGMVMDFSDLKRTVKQHIIEPFDHAFIYHGGNGRECQIAALLEGWNMKTLRLPFRTTAENMAVEMYGRLKNAGLNVSNVKLWETPTSCAEYEEG

SEQ ID NO: 23010 - protein, 140 aa, Neisseria elongata
  REGION 1..140: note = tr|A0A378TXX0|A0A378TXX0_NEIEL 6-carboxy-5,6,7,8-tetrahydropterin synthase OS=Neisseria elongata OX=495 GN=NCTC10660_00718 PE=3 SV=1
MKITKIFTFDSSHMLDGHDGKCQNLHGHTYKLEITVSGSPIEGGAKDGMVMDFSDLKRTVKQHIIEPFDHSFIYHGGNERESQIAVLLEGWNMKTLRLPFRTTAENMAVEMYGRLKNAGLNVSNVKLWETPTSCAEYEEG

SEQ ID NO: 23011 - protein, 140 aa, Neisseria flavescens
  REGION 1..140: note = tr|C0EQQ6|C0EQQ6_NEIFL 6-carboxy-5,6,7,8-tetrahydropterin synthase OS=Neisseria flavescens NRL30031/H210 OX=546264 GN=queD PE=3 SV=1
MKITKIFTFDSSHMLDGHDGKCQNLHGHTYKLEITVSAPVIQGGAKDGMVMDFTDLKAIVKQHITDPFDHAFIYHGNNERESQIAALLEGWNMKTLRLPCRTTAENMSVEIYGRLKNAGVKVCSVKLWETPTSCAEYEGE

SEQ ID NO: 23012 - protein, 140 aa, Neisseria flavescens
  REGION 1..140: note = tr|C5TL94|C5TL94_NEIFL 6-carboxy-5,6,7,8-tetrahydropterin synthase OS=Neisseria flavescens SK114 OX=596320 GN=queD PE=3 SV=1
MKITKIFTFDSSHMLDGHDGKCQNLHGHTYKLEITVSAPVIQGGAKDGMVMDFTDLKAIVKQHITDPFDHAFIYHGNNERESQIAALLEDWNMKTLRLPCRTTAENMSVEMYGRLKNAGVKVCSVKLWETPTSCAEYEGE

SEQ ID NO: 23013 - protein, 144 aa, Neisseria gonorrhoeae
  REGION 1..144: note = tr|B4RQ63|B4RQ63_NEIG2 6-carboxy-5,6,7,8-tetrahydropterin synthase OS=Neisseria gonorrhoeae (strain NCCP11945) OX=521006 GN=NGK_0177 PE=3; SV = 1
MKITKIFTFDSSHMLDGHDGKCQNLHGHTYKLEITVSDGTIKGGAKDGMVMDFTDLKAIVKQHITDHFDHAFIYHGGNGRESQIAALLEGWNMKTLRLPCRTTAENMAVEMYCRLKNAGLNVCRVKLWETPTSCAEYEGGEGIF

SEQ ID NO: 23014 - protein, 140 aa, Neisseria gonorrhoeae
  REGION 1..140: note = tr|A0A4T9UAB2|A0A4T9UAB2_NEIGO 6-carboxy-5,6,7,8-tetrahydropterin synthase OS=Neisseria gonorrhoeae OX=485 GN=queD PE=3 SV=1
MKITKIFTFDSSHMLDGHDGKCQNLHGHTYKLEITVSDGTIKGGAKDGMVMDFTDLKAIVKQHITDHFDHAFIYHGGNGRESQIAALLEGWNMKTLRLPCRTTAENMAVEMYCRLKNAGLNVCRVKLWETPTSCAEYEGE

SEQ ID NO: 23015 - protein, 140 aa, Neisseria iguanae
  REGION 1..140: note = tr|A0A2P7TYP6|A0A2P7TYP6_9NEIS 6-carboxy-5,6,7,8-tetrahydropterin synthase OS=Neisseria iguanae OX=90242 GN=queD PE=3 SV=1
MKITKIFSFDSSHMLDGHDGKCQNLHGHTYKLEITVSDGLVQSGAKEGMVMDFTDLKAIVKQEITEPFDHAFIYDGRNERESQIAALLEGWNMKTLSLNCRTTAENMSMVMFERLKQAGLKVCSVKLWETPTSCTEYEGV

SEQ ID NO: 23016 - protein, 140 aa, Neisseria lactamica
  REGION 1..140: note = tr|E4ZEY2|E4ZEY2_NEIL0 6-carboxy-5,6,7,8-tetrahydropterin synthase OS=Neisseria lactamica (strain 020-06) OX=489653 GN=NLA_17130 PE=3 SV=1
MKITKIFTFDSSHMLDGHDGKCQNLHGHTYKLEITVSDGIIKGGAKDGMVMDFTDLKTIVKQHITDPFDHAFIYHGGNGRESQIAALLEGWNMKTLRLPCRTTAENMAVEMYGRLKNAGLNVCGVKLWETPTSCAEYEGG

SEQ ID NO: 23017 - protein, 140 aa, Neisseria lactamica
  REGION 1..140: note = tr|D0WB77|D0WB77_NEILA 6-carboxy-5,6,7,8-tetrahydropterin synthase OS=Neisseria lactamica ATCC 23970 OX=546265 GN=queD PE=3 SV=1
MKITKIFTFDSSHMLDGHDGKCQNLHGHTYKLEITVSDGIVSGGPKDGMVMDFTDLKAIVKQHITDPFDHAFIYHGGNGRESQIAALLEGWDMKTLRLPCRTTAENMAVEMYGRLQNAGLNVCGVKLWETPTSCAEYEGG

SEQ ID NO: 23018 - protein, 140 aa, Neisseria macacae
  REGION 1..140: note = tr|F9EUV0|F9EUV0_9NEIS 6-carboxy-5,6,7,8-tetrahydropterin synthase OS=Neisseria macacae ATCC 33926 OX=997348 GN=ptpS PE=3 SV=1
MKITKIFTFDSSHMLDGHDGKCQNLHGHTYKLEITVSDDPIRGGAKDGMVMDFTDLKAIVKKHITDPFDHAFIYHGGNGRECQIAALLEGWNMKTLCLPCRTTAENMAVEMYDRLKNAGLKVCSVKLWETPTSCAEYEGE

SEQ ID NO: 23019 - protein, 140 aa, Neisseria meningitidis
  REGION 1..140: note = tr|X5F546|X5F546_NEIME 6-carboxy-5,6,7,8-tetrahydropterin synthase OS=Neisseria meningitidis OX=487 GN=queD PE=3 SV=1
MKITKIFTFDSSHMLDGHDGKCQNLHGHTYKLEITVSDGIIKGGAKDGMVMDFTDLKAIVKQHITDPFDHAFIYHGGNSRECQIAALLEGWNMKTLRLPCRTTAENMAVEMYDRLKNAGLNVCRVKLWETPTSCAEYEGE

SEQ ID NO: 23020 - protein, 149 aa, Neisseria meningitidis
  REGION 1..149: note = tr|A0A425AK80|A0A425AK80_NEIME 6-carboxy-5,6,7,8-tetrahydropterin synthase OS=Neisseria meningitidis OX=487 GN=queD PE=3 SV=1
MKITKIFTFDSSHMLDGHDGKCQNLHGHTYKLEITVSDDPVRGGPKDGMVMDFTDLKAIVKQHITDPFDHAFIYHGGNGRESQIAALLEGWNMKTLRLPCRTTAENMAVEMYDRLKNAGLNVCRVKLWETPTSCAEYEGGVGDSLNVSI

SEQ ID NO: 23021 - protein, 140 aa, Neisseria mucosa
  REGION 1..140: note = tr|D2ZU75|D2ZU75_NEIMU 6-carboxy-5,6,7,8-tetrahydropterin synthase OS=Neisseria mucosa ATCC 25996 OX=546266 GN=queD PE=3 SV=1
MKITKIFTFDSSHMLDGHDGKCQNLHGHTYKLEITVSDDPVRGGPKDGMVMDFTDLKAIVKQHITDPFDHAFIYNGGNERECQIATLLEGWNMKTLCLPCRTTAENMAVEMYDRLKNAGLKVCSVKLWETPTSCAEYEGE

SEQ ID NO: 23022 - protein, 140 aa, Neisseria mucosa
  REGION 1..140: note = tr|A0A2R4AWB2|A0A2R4AWB2_NEIMU 6-carboxy-5,6,7,8-tetrahydropterin synthase OS=Neisseria mucosa OX=488 GN=queD PE=3 SV=1
MKITKIFTFDSSHMLDGHDGKCQNLHGHTYKLEITVSDDPIRGGPKDGMVMDFTDLKAAVKKHITDPFDHAFIYNGGNERECQISALLEGWNMKTLCLPCRTTAENMAVEMYDRLQNAGLKVCSVKLWETPTSCAEYEGE

SEQ ID NO: 23023 - protein, 140 aa, Neisseria perflava
  REGION 1..140: note = tr|A0A2I1QWI4|A0A2I1QWI4_NEIPE 6-carboxy-5,6,7,8-tetrahydropterin synthase OS=Neisseria perflava OX=33053 GN=queD PE=3 SV=1
MKITKIFTFDSSHMLDGHDGKCQNLHGHTYKLEITVSAPVIQGGAKDGMVMDFTDLKAIVKQHITDPFDHAFIYHGDNERESQIAALLEGWNMKTLRLPCRTTAENMSVEMYGRLKNAGVKVCSVKLWETPTSCAEYEGD

SEQ ID NO: 23024 - protein, 140 aa, Neisseria polysaccharea
  REGION 1..140: note = tr|E2PI36|E2PI36_NEIPO 6-carboxy-5,6,7,8-tetrahydropterin synthase OS=Neisseria polysaccharea ATCC 43768 OX=546267 GN=queD PE=3 SV=1
MKITKIFTFDSSHMLDGHDGKCQNLHGHTYKLEITVSDGIIKGGAKDGMVMDFTDLKTIVKQHITDPFDHAFIYHGGNGRESQIAALLEGWNMKTLLLPCRTTAENMAVEMYGRLKNAGLNVCRVKLWETPTSCAEYEGE

SEQ ID NO: 23025 - protein, 142 aa, Neisseria shayeganii
  REGION 1..142: note = tr|G4CF31|G4CF31_9NEIS 6-carboxy-5,6,7,8-tetrahydropterin synthase OS=Neisseria shayeganii 871 OX=1032488 GN=ptpS PE=3 SV=1
MKISKIFEFDAAHMLDTHDGKCRNLHGHTYRLEVTLSGSLLQGGPKDGMVCDFADLKSSVQQWVLSRFDHAFLYDARNPHEAELGRLLEGWGRKTLALPCRTTAENLAVHIFESLCQHKLPVSAVKLWETPSSCVEYTGDSA

SEQ ID NO: 23026 - protein, 140 aa, Neisseria sicca
  REGION 1..140: note = tr|C6M3W4|C6M3W4_NEISI 6-carboxy-5,6,7,8-tetrahydropterin synthase OS=Neisseria sicca ATCC 29256 OX=547045 GN=queD PE=3 SV=1
MKITKIFTFDSSHMLDGHDGKCQNLHGHTYKLEITVSDDPVRGGPKDGMVMDFTDLKAIVKKHITDPFDHAFIYHGGNGRECQIAALLEGWNMKTLCLPCRTTAENMAVEMYDRLKNAGLKVCIVKLWETPTSSAEYEGE

SEQ ID NO: 23027 - protein, 140 aa, Neisseria sicca
  REGION 1..140: note = tr|A0A2I1XCT2|A0A2I1XCT2_NEISI 6-carboxy-5,6,7,8-tetrahydropterin synthase OS=Neisseria sicca OX=490 GN=queD PE=3 SV=1
MKITKIFTFDSSHMLDGHDGKCQNLHGHTYKLEITVSDDPIRGGAKDGMVMDFTDLKAAVKKHITDPFDHAFIYHGGNGRECQIAALLEGWNMKTLCLPCRTTAENMAVEMYDRLKNAGLKVCSVKLWETPTSCAEYEGE

SEQ ID NO: 23028 - protein, 140 aa, Neisseria sp.
  REGION 1..140: note = tr|D7N3S7|D7N3S7_9NEIS 6-carboxy-5,6,7,8-tetrahydropterin synthase OS=Neisseria sp. oral taxon 014 str. F0314 OX=641149 GN=queD PE=3 SV=1
MKITKIFTFDSSHMLDGHDGKCQNLHGHTYKLEITVSDDPVRGGPKDGMVMDFTDLKAAVKKHITDPFDHAFIYHGGNDRECQIAALLEGWNMKTLCLPCRTTAENMAVEMYDRLKNAGLKVCSVKLWETPTSCAEYEGE

SEQ ID NO: 23029 - protein, 140 aa, Neisseria sp.
  REGION 1..140: note = tr|A0A1E8S9F8|A0A1E8S9F8_9NEIS 6-carboxy-5,6,7,8-tetrahydropterin synthase OS=Neisseria sp. HMSC072F04 OX=1739348 GN=HMPREF2844_05675 PE=3 SV=1
MKITKIFTFDSSHMLDGHDGKCQNLHGHTYKLEITVSDDPVRGGPKDGMVMDFTDLKAIVKQHITDPFDHAFIYNGGNERECQIATLLEGWNMKTLCLPCRTTAENMAVEMYDRLKNAGLKVCNVKLWETPTSCAEYEGD

SEQ ID NO: 23030 - protein, 140 aa, Neisseria subflava
  REGION 1..140: note = tr|D3A6H4|D3A6H4_NEISU 6-carboxy-5,6,7,8-tetrahydropterin synthase OS=Neisseria subflava NJ9703 OX=546268 GN=queD PE=3 SV=1
MKITKIFTFDSSHMLDGHDGKCQNLHGHTYKLEITVSAPVIQGGAKDGMVMDFTDLKSIVKQHINDPFDHAFIYHGNNERESQIAALLEGWNMKTLRLPCRTTAENMSVEMYGRLKNAGVKVCSVKLWETPTSYAEYEGE

SEQ ID NO: 23031 - protein, 140 aa, Neisseria subflava
  REGION 1..140: note = tr|A0A4D7WE17|A0A4D7WE17_NEISU 6-carboxy-5,6,7,8-tetrahydropterin synthase OS=Neisseria subflava OX=28449 GN=queD PE=3 SV=1
MKITKIFTFDSSHMLDGHDGKCQNLHGHTYKLEITVSAPVIQGGAKDGMVMDFTDLKAIVKQHITDPFDHAFIYHGNNERESQIAALLEGWNMKTLRLPCRTTAENMSVEMYGRLKNAGIKVCSVKLWETPTSCTEYEGE

SEQ ID NO: 23032 - protein, 152 aa, Neisseria wadsworthii
  REGION 1..152: note = tr|G4CSP7|G4CSP7_9NEIS 6-pyruvoyltetrahydropterin synthase OS=Neisseria wadsworthii 9715 OX=1030841 GN=ptpS; PE = 4 SV=1
MLKLSDRPLQQTMKITKIFTFDSSHMLDGHDGKCQNLHGHTYKLEVVVAGGLIKSGAKDGMVMDFADLKTIVKHTIIEPFDHAFIYNGNNPRESQIAALLEGWNMKTMRLDFRTTAENMAAYMYACLKNAGLHVSLIRLWETPTSCAECDGV

SEQ ID NO: 23033 - protein, 140 aa, Neisseria weaveri
  REGION 1..140: note = tr|A0A3S4Z7U6|A0A3S4Z7U6_9NEIS 6-carboxy-5,6,7,8-tetrahydropterin synthase OS=Neisseria weaveri OX=28091 GN=NCTC12742_00669 PE=3 SV=1
MKITKIFTFDSSHMLDGHDGKCQNLHGHTYKLEVTVSDGLIQGGTKDGMVMDFSDLKTIVKRTIIEPFDHAFIYNGNNPRESQIAALLESWNMKTLRLGFRTTAENMTVEMFGRLKNAGLPVSLIRLWETPTSCAEYEGE

SEQ ID NO: 23034 - protein, 141 aa, unidentified
  source 1..141: note = Neisseria zalophi
  REGION 1..141: note = tr|A0A5J6PTR5|A0A5J6PTR5_9NEIS 6-carboxytetrahydropterin synthase QueD OS=Neisseria zalophi OX=640030 GN=queD PE=4 SV=1
MKITKIFTFDSSHMLDGHDGKCKNLHGHTYKLEVTVSDGLISGGAKDGMVMDFSDLKTIVKQEIIEPFDHAFIYHGGNERESKIAALLESWQMKTMRLDIRTTAENMVVYMYSRLKAAGLPVSGIKLWETPTSCAEFETSL

SEQ ID NO: 23035 - protein, 140 aa, Neisseria zoodegmatis
  REGION 1..140: note = tr|A0A378WT21|A0A378WT21_9NEIS 6-carboxy-5,6,7,8-tetrahydropterin synthase OS=Neisseria zoodegmatis OX=326523 GN=NCTC12229_01987 PE=3 SV=1
MKITKIFTFDSSHMLDGHDGKCQNLHGHTYKLEVVVSDGLIQGGAKDGMVMDFSDLKTIVKRTIIEPFDHAFIYNGNNPRESQIAALLESWNMKTLRLDFRTTAENMTVEMFGRLKNAGLPVSLIRLWETPTSCAEYDGE

SEQ ID NO: 23036 - protein, 140 aa, Neisseria zoodegmatis
  REGION 1..140: note = tr|A0A1X3CPN9|A0A1X3CPN9_9NEIS 6-carboxy-5,6,7,8-tetrahydropterin synthase OS=Neisseria zoodegmatis OX=326523 GN=BWD10_08785 PE=3 SV=1
MKITKIFTFDSSHMLDGHDGKCQNLHGHTYKLEVVVSDGLIQGGAKDGMVMDFSDLKTIVKHTIIEPFDHAFIYNGNNPRESQIAALLESWNMKTLRLGFRTTAENMTVEMFGRLKNAGLPVSLIRLWETPTSCAEYEGE

SEQ ID NO: 23037 - protein, 142 aa, unidentified
  source 1..142: note = Neisseriaceae bacterium
  REGION 1..142: note = tr|A0A2I7N304|A0A2I7N304_9NEIS 6-pyruvoyl tetrahydrobiopterin synthase OS=Neisseriaceae bacterium DSM 100970 OX=2052837 GN=CUN60_00460 PE=4 SV=1
MGKFQVVRKHEIHCGHRVVQHEGKCKNLHGHSYIFHLKCESTELDNLGRVIDFSVIKDLLCRWLDDNWDHKLILWENDPWLLSLREIDATIVTVPYNPTAENLARYLVEVIGPELFKDLPISLSEVTLEETSKCRASYAISD

SEQ ID NO: 23038 - protein, 142 aa, unidentified
  source 1..142: note = Neisseriaceae bacterium
  REGION 1..142: note = tr|A0A3S0DZD0|A0A3S0DZD0_9NEIS 6-carboxytetrahydropterin synthase OS=Neisseriaceae bacterium OX=2014784 GN=EKK54_10290 PE=4 SV=1
MGKYQVVRKHEIHCGHRVYQHESKCRNLHGHSYVFHLKCSSDNLDNLGRVIDFSVIKELLCKWLDDNWDHKMILWDQDPLFTELLKLDSSVVSIPYNPTAENLARYLVETIGPQLFAHLPITLSEVTLEETSKCSASYAISN

SEQ ID NO: 23039 - protein, 142 aa, unidentified
  source 1..142: note = Neisseriales bacterium
  REGION 1..142: note = tr|A0A5C8AZY6|A0A5C8AZY6_9NEIS 6-carboxytetrahydropterin synthase OS=Neisseriales bacterium OX=2053582 GN=E6Q33_09815 PE=4 SV=1
MGKFQVVRKHEIHCGHRVVQHEGKCKNLHGHSYIFHLKCESTELDNLGRVIDFSVIKDLLCCWLDDNWDHRLILWENDPWLMNLREIDSTIVTVPYNPTAENLARYLVEVIGPELFKDLPISLSAVTLEETSKCRASYAISD

SEQ ID NO: 23040 - protein, 180 aa, Neoasaia chiangmaiensis
  REGION 1..180: note = tr|A0A1U9KM95|A0A1U9KM95_9PROT 6-pyruvoyl tetrahydropterin synthase OS=Neoasaia chiangmaiensis; OX = 320497 GN=A0U93_01975 PE=4 SV=1
MSSAELVFTRRFSMGHRLIDGASESCALPHGHNEFVTVTLSPTRDRALDGRRNMIVPFRQAKARWHEFVDRSLDHALQLSASDPLLSWFHENEPHRAARIVVTPGDPTTELLAALMMAKLGAILIAEGEHLICTRIELQETPTNTVCLTGDPMDYLPATGRAAQDCWWHRPDLSVSDVAR

SEQ ID NO: 23041 - protein, 121 aa, Neochlamydia sp.
  REGION 1..121: note = tr|A0A0C1JNP9|A0A0C1JNP9_9BACT 6-carboxy-5,6,7,8-tetrahydropterin synthase; OS = Neochlamydia sp. EPS4 OX=1478175 GN=queD PE=3 SV=1
MYELEKIFCFEAAHFLNHHDGKCKSMHGHSYSLHVIIRKESLQKEGPKKNMVIDFQDLADLVQPMLKKYLDHQCLNETLQSDSTTVEFVCKWIYDYLKPMLPELHAITLYETASSKATYWI

SEQ ID NO: 23042 - protein, 121 aa, Neochlamydia sp.
  REGION 1..121: note = tr|A0A3Q9XVP7|A0A3Q9XVP7_9BACT 6-carboxy-5,6,7,8-tetrahydropterin synthase; OS = Neochlamydia sp. S13 OX=1353976 GN=NCS13_2_0125 PE=3; SV = 1
MYELEKIFCFEAAHFLNHHDGKCKSMHGHSYSLHVIIRKESLQKEGPKKNMVIDFQDLADLIQPMLKKYLDHQCLNETLQSDSTTVEFVCKWIYDYLKPMLPELYAITLYETASSKATYWM

SEQ ID NO: 23043 - protein, 169 aa, Neokomagataea sp.
  REGION 1..169: note = tr|A0A506UML1|A0A506UML1_9PROT 6-carboxytetrahydropterin synthase OS=Neokomagataea sp. Jb2 OX=2558904 GN=E3202_04425 PE=4 SV=1
MGHRLIAGCSDRCAIPHGHNEYISVTLGAGPANPQAARLDGQANMLLPFAEAKGRWHHFIDTRMDHAFQLGEKDPLLQWFAQNEPSRLDRLVVTPGDPTTELLAALLMAKLNAILKAQGDRLTVRALEIRETPTNTVRLVGSDPAPYLPAVTRPPEACWWHRADDSTRD

SEQ ID NO: 23044 - protein, 184 aa, Neokomagataea tanensis
  REGION 1..184: note = tr|A0A4Y6V4Q1|A0A4Y6V4Q1_9PROT 6-carboxytetrahydropterin synthase OS=Neokomagataea tanensis OX=661191 GN=D5366_07565 PE=4 SV=1
MTSNPNLPETELVFTRRFSMGHRLISGSSERCAMVHGHNEYVTIRLKAMQPARLDGQQNVIVPFAEAKTRWHNFIDNIVDHALQLSEQDPLLNWFQTNEPERAKRIIVTPGDPTTELMAALLLAKLNAFLAADGGKLCALGIELQETPTNTVRLDGSPDAFLPTSGRPAAQCWWHRADLTISDL

SEQ ID NO: 23045 - protein, 132 aa, unidentified
  source 1..132: note = Neorhizobium galegae
  REGION 1..132: note = tr|A0A068SV85|A0A068SV85_RHIGA 6-pyruvoyl tetrahydropterin synthase OS=Neorhizobium galegae bv. orientalis str. HAMBI 540 OX=1028800 GN=RG540_CH39780 PE=4; SV = 1
MFAVEVRDHIMIAHSLPRPVFGPAQGMHGATFMVDAAFFTSDLDENGLAVDIGLATDLLKEVLAPLNYQNLDTLEIFAGKVTTTEFLAKYIFDRIADAIRNGRLGDGGARIRKLRVMLHESHTARGWFEAEL

SEQ ID NO: 23046 - protein, 118 aa, unidentified
  source 1..118: note = Neorhizobium galegae
  REGION 1..118: note = tr|A0A0T7G5A5|A0A0T7G5A5_RHIGA 6-carboxy-5,6,7,8-tetrahydropterin synthase; OS = Neorhizobium galegae bv. officinalis OX=323656; GN = NGAL_HAMBI1146_50630 PE=3 SV=1
MKITQAFTFEAAHRLPNVPATHKCHRMHGHSYRVELQLDGKVNSDTGFVIDFFDLEKAFGPLLEQLDHHTLNEIEGLENPTAENISTWIWTRVRPLLPELSSVKVFETPMCWAEYNGN

SEQ ID NO: 23047 - protein, 118 aa, unidentified
  source 1..118: note = Neorhizobium sp.
  REGION 1..118: note = tr|A0A4R3A8W6|A0A4R3A8W6_9RHIZ 6-carboxy-5,6,7,8-tetrahydropterin synthase; OS = Neorhizobium sp. JUb45 OX=2485113 GN=EDF70_101383 PE=3; SV = 1
MYRITKEFHFSASHQLTHLPADHQCARLHGHNYIVVVELSANELDDDGFVRDYHELKPLKQYIDEKFDHRHLNDVLGHEKVTSEFLAKHFYDWCKERLPETSAVRVSETPKTWAEYRP

SEQ ID NO: 23048 - protein, 132 aa, unidentified
  source 1..132: note = Neorhizobium sp.
  REGION 1..132: note = tr|A0A4R3XJP4|A0A4R3XJP4_9RHIZ 6-pyruvoyl-tetrahydropterin synthase OS=Neorhizobium sp. S3-V5DH OX=2485166 GN=EDE09_108123 PE=4 SV=1
MFAVEVRDHVMIAHSLPRPVFGPAQGLHGATFVVDAAFFTEDLDENGLAVDIGLAIDVLKEVLAPLNYQNLDTLEIFSGRITTTEFLAKHIFDRIAAAIGKGRLGRDGGRIRKLRVMLHESHMARGWYEAEL

SEQ ID NO: 23049 - protein, 294 aa, unidentified
  source 1..294: note = Neosynechococcus sphagnicola
  REGION 1..294: note = tr|A0A098TMJ7|A0A098TMJ7_9CYAN 6-pyruvoyl tetrahydropterin synthase OS=Neosynechococcus sphagnicola sy1 OX=1497020 GN=DO97_18720 PE=4 SV=1
MKCIIHRRAQFSASHRYWLPEWSDAENARQFGACHRAPGHGHNYVLYVALAGDLDEYGMVLNLSDVKRVIKREVTSQLDFSYLNDVWPEFHQTLPTTENLARVIWHRLAPYLPLAQIQLFEHPELWADYQGNGMEAYLSVSTHFSAAHRLARPDLSYEDNCKIYGKCARPNGHGHNYHLEVTVKGEMDPRTGMVVELGALHQVITDQVLEPLDHTFLNLDIPYFAAIVPTAEHIAVYIRDILQQPIQALGAKLHKIKLVESPNNSCEVYCTDAAPESSILQQRDREPMRIGVGV

SEQ ID NO: 23050 - protein, 278 aa, Neptuniibacter caesariensis
  REGION 1..278: note = tr|A0A2G6JBK1|A0A2G6JBK1_NEPCE Uncharacterized protein OS=Neptuniibacter caesariensis OX=207954; GN = CSA61_01140 PE=4 SV=1
MKLFVDDLTNVDFSFLHPQRGLLGESWLAQLELAGSLNEQGMICDFGIVKKEVKRWLDQWVDHALVVPTGMPRLSHHTADGYTEVEWLYANGERFYCRSPEQAICLVDMPEINEHTLANWCQKQLLALFPEEVKGLKIGFVPESIDGDFYHYSHGLKKHAGNCQRIAHGHRSKIQIYINDQRERQLEAEWAGRFTDIYIGSESHLVERCLDTHHYAYTAPQGEFAISLPASACYLIDTDSTVELIAAHLATEIKQAYPNDKVRVRAYEGVGKGAIAEM

SEQ ID NO: 23051 - protein, 278 aa, Neptuniibacter sp.
  REGION 1..278: note = tr|A0A136H3M2|A0A136H3M2_9GAMM Uncharacterized protein OS=Neptuniibacter sp. Phe_28 OX=1795871; GN = AXW15_05500 PE=4 SV=1
MKLFVDNLTNVDFSYLHPQRGLLGESWLVQLELDGSLNDQGMICDFGIVKKEVKKWFDLWIDHALVVPTGLSELVYNVDAGYTAVEWVYPNGERFSCRSPEAAICLVGMAEINEATLAEWCQGKLLELFPCEVKGLTIRFVPEKIDGAFYHYSHGLQKHDGNCQRIAHGHRSKIELFINGQRDASLEAEWAARFKDIYIGSASHVTSQSDDEHQYAYQAPQGRFEISLPARVCYVIDTDSTVELIASHLAKQIKLSYPNDRVMVKAYEGVGKGAIAEA

SEQ ID NO: 23052 - protein, 278 aa, Neptunomonas antarctica
  REGION 1..278: note = tr|A0A1N7PLB9|A0A1N7PLB9_9GAMM 6-pyruvoyl tetrahydropterin synthase OS=Neptunomonas antarctica; OX = 619304 GN=SAMN05421760_11625 PE=4 SV=1
MKLFVNNLTNVDFSYLHSSRGLMGESWLLQLELDGALNEQGMVCDFGVVKKLTREWMDSTIDHALLVPTKMNDIKIEHALGQTRVDWLYPNGKSFHCQSPSKAIVAVDVEEITPEAMAEWCRAQLIALFPQEVRGLNLRFVPEVIDGAFYHYSHGLQQHDGNCQRIAHGHRSRIEIFLNNERNHKLEQEWAARWHDIYIGTSAHRKESAEGMNTYEYRAPQGEFSLTLPTEYCSDIDTESTVEQIARHLAARIKQIRPLDDVMVRAYEGVGKGAVSQV

SEQ ID NO: 23053 - protein, 256 aa, unidentified
  source 1..256: note = Neptunomonas qingdaonensis
  REGION 1..256: note = tr|A0A1I2VW19|A0A1I2VW19_9GAMM 6-pyruvoyl tetrahydropterin synthase OS=Neptunomonas qingdaonensis; OX = 1045558 GN=SAMN05216175_12025 PE=4 SV=1
MGESWLLQLELDGALNEQGMVCDFGIVKKLTREWMDKTIDHALLVPTRMDNLKVEQAVGQTRVEWVYPDGQAFNCLSPSKAIALIDVEEITPESMAEWCRAQLIELFPQEVKGLNLRFVAEQIDGDFYHYSHGLQQHDGNCQRIAHGHRSRIEIFLNGERDQKLEHEWASRWSDIYIGTSAHRKESAEGMHTYEYRAPQGEFSLTLPAQYCYDIDTESTVEQIARHLAARIKQMKPFDEVLVRAYEGVGKGAVSQV

SEQ ID NO: 23054 - protein, 279 aa, Neptunomonas sp.
  REGION 1..279: note = tr|A0A437Q442|A0A437Q442_9GAMM Uncharacterized protein OS=Neptunomonas sp. HPM-16 OX=1815562; GN = EOE65_17210 PE=4 SV=1
MKLFVNNLTNIDFSYLHTERGLMGESWLVQLQLDGALNDQGMICDFGIVKKVVKEWMDTFADHVLLVPVGSDQADLQYHDQQAQLTWHYKEGEALVCQSPAQAIIAVETPEITPQSLAQWCEAKLKALFPGEVKGLKLHFVAEPEQGAFYHYSHGLQQHEGNCQRIAHGHRSQLHIYRNGQRDSLLEREWAERWQDIYLGTTAHRQPDPKPGVYAYCYQAPQGQFELSLPASRCYDLDTETTVELIAEHLAEQVKAVFPDDSIEVHAFEGIGKGAISVR

SEQ ID NO: 23055 - protein, 140 aa, Nesiotobacter exalbescens
  REGION 1..140: note = tr|A0A1U7JHU3|A0A1U7JHU3_9RHOB 6-pyruvoyl tetrahydropterin synthase OS=Nesiotobacter exalbescens; OX = 197461 GN=A3843_07720 PE=4 SV=1
MYTVEVKNRIMIAHSLPRDVFGPAQQLHGATYCVRVRFFAQNLDKNGLVVDMGKAMSALEEVLEPLNYQNLDELPQFQGVVTTTEYMAGYIFQRICDAVYLHKLGREPSELDRICVTLSESDVANASFEAPLTASEIHHD

SEQ ID NO: 23056 - protein, 128 aa, unidentified
  source 1..128: note = Nesterenkonia aurantiaca
  REGION 1..128: note = tr|A0A4R7FZ68|A0A4R7FZ68_9MICC 6-pyruvoyl-tetrahydropterin synthase OS=Nesterenkonia aurantiaca OX=1436010 GN=EV640_10851 PE=4 SV=1
MSRFRLTVDDHIMIAHSLQDPFFGPAQNLHGATLSIQASFFRDGLNEYGVVLDIGAATELLAATLEPLRYKNLDELEALAGKFTTTEVIIEHIAETLAAELPADHGLTALEVQAEEHPRARASVWVQL

SEQ ID NO: 23057 - protein, 128 aa, Nesterenkonia jeotgali
  REGION 1..128: note = tr|A0A0W8IFQ5|A0A0W8IFQ5_9MICC 6-pyruvoyl tetrahydrobiopterin synthase OS=Nesterenkonia jeotgali; OX = 317018 GN=AVL63_01920 PE=4 SV=1
MSRFRLTVDDHIMIAHSLQDPFFGPAQNLHGATLSIQASFFRDGLNEYGVVLDIGAASELLAATLEPLRYQNLDEVDALAGKFTTTEVIIEHIAETLAAGLPADHGLTALEVQAEEHPRARASVWVQL

SEQ ID NO: 23058 - protein, 128 aa, Nesterenkonia sandarakina
  REGION 1..128: note = tr|A0A2T0YKF3|A0A2T0YKF3_9MICC 6-pyruvoyl-tetrahydropterin synthase OS=Nesterenkonia sandarakina OX=272918 GN=BCL67_108147 PE=4 SV=1
MSRFRLTVDDHIMIAHSLQDPFFGPAQNLHGATLSIQASFFREGLNEYGVVLDIGAATELLAATLEPLRYKNLDEVPELAGKFTTTEVIIDHIAQKLAAGLPTDHGLTALEVEAEEHPRARASVHVQL

SEQ ID NO: 23059 - protein, 135 aa, Nesterenkonia sp.
  REGION 1..135: note = tr|A0A3A4FHU1|A0A3A4FHU1_9MICC 6-carboxytetrahydropterin synthase OS=Nesterenkonia sp. M8; OX = 2174932 GN=D3250_07095 PE=4 SV=1
MTSAHTPVFRISVDDHVMIAHSLPGDFFGPAQQLHGATLAISATFEREGLDEHGVVIDIGMATSLLSEVLDDLRYRNLDEHPDFTHKISTTEVVCQHVAMQMAQALPDQHGLRALEIAADEHPRARASVRVELGH

SEQ ID NO: 23060 - protein, 136 aa, Nesterenkonia sp.
  REGION 1..136: note = tr|A0A1X3P8H3|A0A1X3P8H3_9MICC 6-pyruvoyl tetrahydrobiopterin synthase OS=Nesterenkonia sp. PF2B19; OX = 1881858 GN=BCY76_007950 PE=4 SV=1
MSTTSTPSMTRFRLTVDDHLMIAHSLADPFFGPAQNLHGATLHIRATFERPGLDPHGVVMDIGAAAELLSGVLDPLRHQNLDEHPAFENKLSTTEVIIAYLAQQLAQVLPADHGLTAIEVEAEENPRASASVRIEL

SEQ ID NO: 23061 - protein, 278 aa, unidentified
  source 1..278: note = Nevskiales bacterium
  REGION 1..278: note = tr|A0A2E9ZX93|A0A2E9ZX93_9GAMM 6-pyruvoyl tetrahydropterin reductase OS=Nevskiales bacterium; OX = 2026766 GN=CMH65_08300 PE=4 SV=1
MATLFVEQLANLDFALLDPERGLVGETYLMDLELSGELDAQGMVLDFGRVKREVRAAAEALVDHKLLIPAAHPALDIQPGQVVLGLVGGGEIEVCSPDIAFCRLPAMAVTVETVADAVSAAVRAVVPDNVDAVRVRLQPEAIDGAYYHYCHGLRKHDGDCQRIAHGHRSRLAITRAGERDAALEAQWAERWNNRFLATVDDELPAQRPGHRRFGYDAPQGRFEIELPEARIDVIPGDTTVECLAAYMAKTLAAQHGQAMTVRAYEGLRKGALASAEPA

SEQ ID NO: 23062 - protein, 136 aa, unidentified
  source 1..136: note = Niabella drilacis
  REGION 1..136: note = tr|A0A1G7BMC8|A0A1G7BMC8_9BACT 6-carboxy-5,6,7,8-tetrahydropterin synthase OS=Niabella drilacis OX=1285928 GN=SAMN04487894_13118 PE=3 SV=1
MRVSVFRREHFNAAHRLFNPAWDDATNEKIFGKCALPHYHGHNYELEIKVTGEVDPQTGFVMDLKKLSELVAKNVIDKFDHRNLNLDTDEFKHTNPTAENIAIVIYDILRPHIGNDHDLKIRLYETPRNFVEYPSS

SEQ ID NO: 23063 - protein, 135 aa, unidentified
  source 1..135: note = Niabella drilacis
  REGION 1..135: note = tr|A0A1G7BNC5|A0A1G7BNC5_9BACT 6-pyruvoyltetrahydropterin/6-carboxytetrahydropterin synthase OS=Niabella drilacis OX=1285928; GN = SAMN04487894_13117 PE=4 SV=1
MVYLTRIEHFNAAHKLFNPAWTEAQNEQVFGKCANKNWHGHNYELYITVKGEPDPDTGFVYDVKKLSEIIKDHIIEKLDHRNLNEDVDFMKGKLCSTENLAIAIWNELGPHLPEGVLLHCIKLYETPRIYVEYFG

SEQ ID NO: 23064 - protein, 135 aa, unidentified
  source 1..135: note = Niabella ginsenosidivorans
  REGION 1..135: note = tr|A0A1A9HWW7|A0A1A9HWW7_9BACT 6-pyruvoyl tetrahydrobiopterin synthase OS=Niabella ginsenosidivorans; OX = 1176587 GN=A8C56_01800 PE=4 SV=1
MIYLTRIEHFNAAHKLFNPKWSEEENEQVFGKCANKNWHGHNYELYITVKGLPDPETGFVYDVKKLSGIIRQHIIEKLDHRNLNEDVGFMKDQLCSTENLAIGIWNELTPHLPPNVQLHCIKLYETPRIYVEYFG

SEQ ID NO: 23065 - protein, 135 aa, unidentified
  source 1..135: note = Niabella ginsenosidivorans
  REGION 1..135: note = tr|A0A1A9HWW4|A0A1A9HWW4_9BACT 6-carboxy-5,6,7,8-tetrahydropterin synthase OS=Niabella ginsenosidivorans OX=1176587 GN=A8C56_01795 PE=3 SV=1
MKVSVFRREHFNAAHRLFNPEWDAATNEKVFGKCSLPHYHGHNYELEIKVTGNVDPATGFVMDLKVLSELVNRTVLEKFDHRNLNLDTEEFKNLNPTAENIAIVIYNILRPHINKEQELKIRLYETPRNFVEYPA

SEQ ID NO: 23066 - protein, 135 aa, Niabella soli
  REGION 1..135: note = tr|W0F117|W0F117_9BACT 6-carboxy-5,6,7,8-tetrahydropterin synthase OS=Niabella soli DSM 19437 OX=929713 GN=NIASO_19240 PE=3 SV=1
MKVAVFRREHFNAAHRLFNPAWDDATNEKVFGKCSLPHYHGHNYELEIKVTGEVDPVTGFVMDMKQLSALVNKEVLEQFDHRNLNLDTEVFKTMNPTAENIAIVIYTILRPHINPEHDLQIRLYETPRNFVEYPA

SEQ ID NO: 23067 - protein, 135 aa, Niabella soli
  REGION 1..135: note = tr|W0F5X6|W0F5X6_9BACT 6-pyruvoyl tetrahydrobiopterin synthase OS=Niabella soli DSM 19437; OX = 929713 GN=NIASO_19245 PE=4 SV=1
MVYLTRIEHFNAAHKLFNPNWSEEQNEQVFGKCANKNWHGHNYELYITIKGDPDPDTGFVYDVKKLSELIKERVIEQLDHRNLNEDVDFMKGKLCSTENLAIGIWKELAPHLPQGVLLHCIKLYETPRIYVEYFG

SEQ ID NO: 23068 - protein, 149 aa, Niabella sp.
  REGION 1..149: note = tr|A0A5C7W344|A0A5C7W344_9BACT 6-carboxy-5,6,7,8-tetrahydropterin synthase OS=Niabella sp. OX=1962976 GN=E6Q58_04335 PE=3 SV=1
MVYVTRKSHFSASHRLYNPTFSDEKNDAVFYKCNNLHGHGHNYVLEVTVKGLPDPSTGYVIDLKQLRDIIELEIIDKVDHKHLNYDVPFLEGIIPTAENIAVIFWSILEKSIPMGTLHSVKLYESDNNFVEYFGEPVNIPNFKAEEVLS

SEQ ID NO: 23069 - protein, 136 aa, Niastella koreensis
  REGION 1..136: note = tr|G8T9X4|G8T9X4_NIAKG Uncharacterized protein; OS = Niastella koreensis (strain DSM 17620 / KACC 11465 / GR20-10) OX=700598 GN=Niako_5079 PE=4 SV=1
MVYLTRVEHFNAAHKLYNPNWSKEQNELVFGKCANEHWHGHNYELYVTVKGRPNPDTGFVCDVKALSKIINQYVIEQLDHKNLNMDVPFMKDQLCSTENLAIAIWKQLLPQLPAGVQLHGIKLYETPRIFVEYFGE

SEQ ID NO: 23070 - protein, 137 aa, Niastella koreensis
  REGION 1..137: note = tr|G8T9X5|G8T9X5_NIAKG 6-carboxy-5,6,7,8-tetrahydropterin synthase OS=Niastella koreensis (strain DSM 17620 / KACC 11465 / GR20-10); OX = 700598 GN=Niako_5080 PE=3 SV=1
MSKKVAVYRKEHFNAAHRLYNPAWDMAKNDAVFGKCNNPNFHGHNYEVVVKVTGVPDPETGYVMDMKILSDLIRDHVLEQFDHKNLNLDTVYFKTLNPTAENICVVIYDLLRAQIAPQFDLQVRLYETERNFVEYPA

SEQ ID NO: 23071 - protein, 138 aa, Niastella populi
  REGION 1..138: note = tr|A0A1V9FGN6|A0A1V9FGN6_9BACT 6-carboxy-5,6,7,8-tetrahydropterin synthase OS=Niastella populi OX=550983 GN=A4R26_24395 PE=3 SV=1
MSRKVAVYRKEHFNAAHRLYNPAWDMAKNDAVFGKCNNPSFHGHNYEVVVKVTGEPDPETGYVMDMKILSELIRDHVLERFDHKNLNLDTEYFKTLNPTAENICVVIYDLLREQIDAKLDLQVRLYETERNFVEFPAQ

SEQ ID NO: 23072 - protein, 136 aa, Niastella populi
  REGION 1..136: note = tr|A0A1V9FGN0|A0A1V9FGN0_9BACT 6-pyruvoyl tetrahydrobiopterin synthase OS=Niastella populi OX=550983; GN = A4R26_24400 PE=4 SV=1
MVYLTRVEHFNAAHKLYNPRWSKEQNEQVFGKCANENWHGHNYELYVTVKGRPNPDTGFVCDVKALSRIINQYVTEQLDHKNLNVDVPFMKDQLCSTENLAIAIWKQLEPHIPAGVQLHGIKLYETPRIFVEYFGE

SEQ ID NO: 23073 - protein, 137 aa, Niastella sp.
  REGION 1..137: note = tr|A0A4R2VQY4|A0A4R2VQY4_9BACT 6-carboxy-5,6,7,8-tetrahydropterin synthase OS=Niastella sp. CF465 OX=2135684 GN=C8K05_11359 PE=3 SV=1
MSRKVAVYRKEHFNAAHRLYNPAWDMAKNDAVFGKCNNPSFHGHNYEVIVKVTGEPDPETGYVMDMKILSDLIRDHVLEKFDHKNLNLDTVYFKDLNPTAENICLVIYDLLREQIDTRLDLQVRLYETERNFVEYPA

SEQ ID NO: 23074 - protein, 144 aa, Niastella sp.
  REGION 1..144: note = tr|A0A1E4E744|A0A1E4E744_9BACT Uncharacterized protein OS=Niastella sp. SCN 39-18 OX=1660119; GN = ABS68_11005 PE=4 SV=1
MLQVTKIFHFEMAHAIHGYSGACKNIHGHSYELHVTVSANQQGDNYIPGTGFVVDFKELKKCVNESVITLLDHKLVLSKEYIAAHTPVMNLENVIIWEIEPSAENILVFIQKELSQALPANIQLAALKLYETRDSFAKWIARQV

SEQ ID NO: 23075 - protein, 118 aa, unidentified
  source 1..118: note = Niastella vici
  REGION 1..118: note = tr|A0A1V9FT52|A0A1V9FT52_9BACT 6-carboxy-5,6,7,8-tetrahydropterin synthase OS=Niastella vici OX=1703345 GN=A3860_31560 PE=3 SV=1
MLLYKEFTFDSAHFLPNVPDGHKCKNIHGHTYRLRVWLKGKPDPQLGWIIDFAELKKIIKPVVTQLDHKLMNDLPGLQNPTCELIAVWIWDQLKPSLPAMHRIELHETPTSGVIYEGE

SEQ ID NO: 23076 - protein, 136 aa, unidentified
  source 1..136: note = Niastella vici
  REGION 1..136: note = tr|A0A1V9FUV1|A0A1V9FUV1_9BACT 6-pyruvoyl tetrahydrobiopterin synthase OS=Niastella vici OX=1703345; GN = A3860_29540 PE=4 SV=1
MVYLTRVEHFNAAHKLYNPNWSQEQNEQVFGKCANQNWHGHNYELYVTVKGRPNRDTGFVCDVKELSRIINQYVIEHIDHKNLNVDVPFMKDQLCSTENLAIAIWKQLQPQLPAGVQLHGIKLYETPRIFVEYFGE

SEQ ID NO: 23077 - protein, 118 aa, Niastella yeongjuensis
  REGION 1..118: note = tr|A0A1V9F8L2|A0A1V9F8L2_9BACT 6-carboxy-5,6,7,8-tetrahydropterin synthase OS=Niastella yeongjuensis OX=354355 GN=A4H97_22135 PE=3 SV=1
MLLYKEFTFDSAHFLPNVPEGHKCKNIHGHTYRLRVWLKGKPDPQYGWIIDFAELKTIIKPVVTQLDHKLMNDIPGLENPTCELIAVWIWDNLKPALPAMHRIELHETPTSGVIYEGE

SEQ ID NO: 23078 - protein, 136 aa, Niastella yeongjuensis
  REGION 1..136: note = tr|A0A1V9EYV4|A0A1V9EYV4_9BACT 6-pyruvoyl tetrahydrobiopterin synthase OS=Niastella yeongjuensis; OX = 354355 GN=A4H97_27360 PE=4 SV=1
MVYLTRVEHFNAAHKLYNPNWSKEQNEIVFGKCANEHWHGHNYELYVTVKGRPNPDTGFVCDVKALSKIINQYVIEQLDHKNLNMDVPFMKDQLCSTENLAIAIWKQLQPQLPAGVQLHGIKLYETPRIFVEYFGE

SEQ ID NO: 23079 - protein, 144 aa, unidentified
  source 1..144: note = Nibricoccus aquaticus
  REGION 1..144: note = tr|A0A290QK59|A0A290QK59_9BACT 6-pyruvoyl tetrahydropterin synthase OS=Nibricoccus aquaticus; OX = 2576891 GN=CMV30_18230 PE=4 SV=1
MPYRICKVFSVENGHILSKHPGKCRFPHGHSRRIEVVVEADELDANDMVCDFKQVSALIGGFIETFDHAMCLNTADAHYPLYRAAYERVVAFENQDPTSELMARRVFEKMKAELETSPEAVARRVRVRRIRMHETATSWAEYEG

SEQ ID NO: 23080 - protein, 160 aa, unidentified
  source 1..160: note = Nibricoccus aquaticus
  REGION 1..160: note = tr|A0A290QAY0|A0A290QAY0_9BACT 6-pyruvoyl tetrahydrobiopterin synthase OS=Nibricoccus aquaticus; OX = 2576891 GN=CMV30_10505 PE=4 SV=1
MPEKTRSRSSKKGAVVRPQKGTVIITRQVHFNSAHRLYNPTKSQAWNLEQFGLCTNPHWHGHNYVLEVSLRGEPDPETGCVMDLGDLKELLNRVIVDKCDHHNLNDEVDFLRGIIPSTENLVIAFWNELAPHITHGRLHSVKLFETPRNFAEYRGPEGIY

SEQ ID NO: 23081 - protein, 140 aa, Nicoletella semolina
  REGION 1..140: note = tr|A0A4V2SJU3|A0A4V2SJU3_9PAST 6-carboxy-5,6,7,8-tetrahydropterin synthase OS=Nicoletella semolina OX=271160 GN=EV693_1088 PE=3 SV=1
MFKIAKEFSFDMAHMLDGHDGKCQNLHGHTYKLQVEISGDLHLAGAKRGMVMDYADLKAIVKTHILDPMDHAYLYDLHSEKECRIAQLLIELNSKVYGIPHRTTAEEMAKYMFNKLEQVGLAVSLIRLWETPTSYCEYSR

SEQ ID NO: 23082 - protein, 120 aa, unidentified
  source 1..120: note = Nissabacter sp.
  REGION 1..120: note = tr|A0A4P8SEW3|A0A4P8SEW3_9GAMM 6-carboxy-5,6,7,8-tetrahydropterin synthase OS=Nissabacter sp. SGAir0207 OX=2126321 GN=queD PE=3 SV=1
MVTTLFKDFQFEAAHRLPHVPEGHKCGRLHGHSFMVRLEITGEVDAHTGWVMDFSELKAMFKPTWERLDHHYLNDIPGLENPTSEVLAKWIWDELKPQLPILSAVLVKETCTAGCIYKGE

SEQ ID NO: 23083 - protein, 189 aa, Nitratifractor salsuginis
  REGION 1..189: note = tr|E6X1Z0|E6X1Z0_NITSE Uncharacterized protein; OS = Nitratifractor salsuginis (strain DSM 16511 / JCM 12458 / E9I37-1) OX=749222 GN=Nitsa_0731 PE=4 SV=1
MRWIIDKSFDFCYGHRVWSQNLDKEYSLDECLMCRHLHGHQGKIKIFLSSESLIDGMVTDFKHLNWFKAWLDASLDHRFILDRHDPLFGDLMHHYVDEKGQMDEASFFYHEEGYWTPRLEKLGDAPEALIEKYEGMVVVNFVPTSENLTAWILEIVSERMEKLGIVVEAVEFWETPKSHCRVERSTAGS

SEQ ID NO: 23084 - protein, 118 aa, Nitratireductor aquibiodomus
  REGION 1..118: note = tr|I5BY80|I5BY80_9RHIZ 6-carboxy-5,6,7,8-tetrahydropterin synthase; OS = Nitratireductor aquibiodomus RA22 OX=1189611; GN = A33O_11335 PE=3 SV=1
MYRVSKEFHFSASHRLTNLPDDHPCARLHGHNYIVVVELAGERLDNHGFVRDYRELKPLKDHIDDTLDHRHLNEVFGHDGVTAEFLAKALFDWCRTRWSEVSAVRVSETPKTWAEYRP

SEQ ID NO: 23085 - protein, 118 aa, Nitratireductor aquibiodomus
  REGION 1..118: note = tr|I5BSG5|I5BSG5_9RHIZ 6-carboxy-5,6,7,8-tetrahydropterin synthase; OS = Nitratireductor aquibiodomus RA22 OX=1189611; GN = A33O_19149 PE=3 SV=1
METYKEFTFEAAHKLEPYSGLHGHSFKVSVHLVGEPDPVFGWAANLYEVEKQIDEIHKILDHTYLNDIEGLSVPSLENLAKWIYDRLAEKSPALQRVELKRGAEGQAEGCVYQPAKAA

SEQ ID NO: 23086 - protein, 118 aa, Nitratireductor indicus
  REGION 1..118: note = tr|K2PGY8|K2PGY8_9RHIZ 6-carboxy-5,6,7,8-tetrahydropterin synthase; OS = Nitratireductor indicus C115 OX=1231190 GN=NA8A_21027; PE = 3 SV=1
METYKEFTFEAAHKLEPYSGLHGHSFKVSVHLVGEPDPVFGWAANLYEVEKQIEGIHKTLDHKYLNEIEGLSVPSLENLAKWIFDKLSEKTDTLDRVEVKRGAEGQAEGCVYRRARAA

SEQ ID NO: 23087 - protein, 118 aa, Nitratireductor indicus
  REGION 1..118: note = tr|K2PB43|K2PB43_9RHIZ 6-carboxy-5,6,7,8-tetrahydropterin synthase; OS = Nitratireductor indicus C115 OX=1231190 GN=NA8A_01475; PE = 3 SV=1
MYRVSKEFHFSASHRLANLPDDHSCARLHGHNYIVVVELAGERLDNHGFVRDYRELDPLKRHIDNTLDHRHLNEVFGHDGVTAEFLAKALYDWCKARWSEVSAVRVSETPKTWAEYRP

SEQ ID NO: 23088 - protein, 118 aa, Nitratireductor pacificus
  REGION 1..118: note = tr|K2MCS7|K2MCS7_9RHIZ 6-carboxy-5,6,7,8-tetrahydropterin synthase; OS = Nitratireductor pacificus pht-3B OX=391937 GN=NA2_04371; PE = 3 SV=1
MYRVSKEFHFSASHRLANLPDDHPCARLHGHNYIVVVELAGAQLDNQGFVRDYRELAPLKQHIDTVLDHRHLNEVFGHDGVTAEFLARALYDWCKARWREVSAVRVSETPKTWAEYRP

SEQ ID NO: 23089 - protein, 118 aa, Nitratireductor pacificus
  REGION 1..118: note = tr|K2M9U8|K2M9U8_9RHIZ 6-carboxy-5,6,7,8-tetrahydropterin synthase; OS = Nitratireductor pacificus pht-3B OX=391937 GN=NA2_16108; PE = 3 SV=1
METYKEFTFEAAHKLEPYSGLHGHSFKVSVHLVGEPDPVFGWAANLYEVEKQIDAIHGILDHTYLNDIEGLSVPSLENLAKWIFDKLAEKSPALDRVELKRGAEGQAEGCIYRRREAA

SEQ ID NO: 23090 - protein, 118 aa, Nitratireductor sp.; identical to SEQ ID NO: 23084
  REGION 1..118: note = tr|A0A1H4LD06|A0A1H4LD06_9RHIZ 6-carboxy-5,6,7,8-tetrahydropterin synthase; OS = Nitratireductor sp. ES.061 OX=1855335; GN = SAMN05216452_2769 PE=3 SV=1

SEQ ID NO: 23091 - protein, 118 aa, Nitratireductor sp.
  REGION 1..118: note = tr|A0A2E0J7E1|A0A2E0J7E1_9RHIZ 6-carboxy-5,6,7,8-tetrahydropterin synthase; OS = Nitratireductor sp. OX=1872084 GN=CMH69_02375 PE=3 SV=1
METYKEFTFEAAHKLEPYSGLHGHSFKVSVHLVGEPDPVYGWAANLYEVEKQIDEIHKILDHTYLNDIEGLSVPSLENLAKWIYDKLAEKSPALHRVELKRGAEGQAEGCIYQPAKAA

SEQ ID NO: 23092 - protein, 193 aa, Nitratiruptor sp.
  REGION 1..193: note = tr|A6Q5C8|A6Q5C8_NITSB 6-pyruvoyl-tetrahydropterin synthase OS=Nitratiruptor sp. (strain SB155-2) OX=387092; GN = NIS_1580 PE=4 SV=1
MIIRKLFKFENAHIVRNCTSRRCSESIHGHSYKVELLFASDTLDRGQMVYDFGLTKLTIKELIDSFDHAITLWSGDDPRYLEDMKRWSRRWVELPVSPSAEQYARVIFLMTDLVLRQTEMVNEEKNVHLESVIVHETDTGYAKCTKEDAYSEKMGSIDLGSIIFSDGVKEEWSDPQIWDKLLRGEKIVNPKKI

SEQ ID NO: 23093 - protein, 193 aa, Nitratiruptor tergarcus
  REGION 1..193: note = tr|A0A1W1WQX0|A0A1W1WQX0_9PROT 6-pyruvoyltetrahydropterin/6-carboxytetrahydropterin synthase OS=Nitratiruptor tergarcus DSM 16512 OX=1069081; GN = SAMN05660197_0172 PE= 4 SV=1
MLIRKLYKFENAHIVRNCTTRRCSESIHGHSYKVELIFSSEYLDRGQMVYDFGLTKLTIKELIDSFDHAITLWSEDEPEYLAAMKKWSRRWVELPVSPSAEQYARVILLMVDLVMQNTVTVNEEKDVIIHSVRVHETDTGYAECSREDALSEKLGKIDLYAIKFSQGVKEEWSSPDMWERLLRGEKIVNPKKI

SEQ ID NO: 23094 - protein, 279 aa, Nitrincola lacisaponensis
  REGION 1..279: note = tr|A0A063Y0K9|A0A063Y0K9_9GAMM NADPH dependent preQ0 reductase OS=Nitrincola lacisaponensis OX=267850; GN = ADINL_2810 PE=4 SV=1
MKLFVDNLTHVDFSYLHPQRGLMGESWEVQLVLEGKLDEQGMICDFGVVKKRIKTWLDAHVDHMLVVATGMPGLAVEQFDGQTRVSWPYPDGGTFVCQAPEQAIALIPVDTIQQQAVARWCEDQLLALFPEQVESLALRFVAESIEGAFYHYSHGLQQHKGNCQRIAHGHRSRVQIRVDQKRRQDLELFWAQQFEDIYLGTRAHLQAVEEGQAVFRYQAPQGDFQLTLPVSRCYMMDTETTVEQIAQHLAEKVAEEYPDSVVEVRAYEGVGKGAIVTRP

SEQ ID NO: 23095 - protein, 279 aa, unidentified
  source 1..279: note = Nitrincola nitratireducens
  REGION 1..279: note = tr|W9UX39|W9UX39_9GAMM Queuosine biosynthesis protein QueD OS=Nitrincola nitratireducens OX=1229521; GN = D791_03773 PE=4 SV=1
MKLFVDNLTHVDFSYLHPQRGLVGESWEAQLILKGKLDDQGMICDFGTVKKRIKAWLDSHIDHMLVVARDMASLKVSQDELDTEVEWLYPDGERFFCKAPHQAIALLPVADITQKTVAGWAQEQLLALFPEQVESVEIHFVAEKIEGAFYHYSHGLQQHKGNCQRIAHGHRSRMEVKLDGKRRQDIELYWSQQFADIYIGTLAHRVESIEGVNRYEYVAPQGAFQLELPARYCYDLTTETTVEQIALHLAEQIKDEYSEYEVEVRAFEGVGKGAIVVID

SEQ ID NO: 23096 - protein, 278 aa, Nitrincola sp.
  REGION 1..278: note = tr|A0A099PDY3|A0A099PDY3_9GAMM Uncharacterized protein OS=Nitrincola sp. A-D6 OX=1545442 GN=LH51_06925; PE = 4 SV=1
MKLFVDNLTHVDFSYLHPQRGLVGESWEVQLVLEGRLDEQGMICDFGVVKKRIKTWLDTHVDHMLVVATGMSGLIWQQSAGVTQVSWSYPAGGRFVCKAPDQAIALVPVAEIQQQAVAKWCETQLLALFPEQVESLELRFVAEPIEGAFYHYSHGLQQHRGNCQRIAHGHRSRMQVRVDQKRRQDLELYWSQQFEDIYIGTQAHLLKNEEGHALFAYEAPQGKFELLLPMRCCYLMETETTVEQIAEHLAQSIKAEYPDSTIEVRAYEGVGKGAIAVK

SEQ ID NO: 23097 - protein, 281 aa, Nitrincola sp.
  REGION 1..281: note = tr|A0A5A9VYS1|A0A5A9VYS1_9GAMM Uncharacterized protein OS=Nitrincola sp. MEB193 OX=1708751 GN=E1H14_12275; PE = 4 SV=1
MKLFVDNLTHVDFSYLHPERGLVGESWEAQLILQGKLDDQGMICDFGVVKKRIKAWLDSHLDHMLVVPALMDSLELARQDGEIQLQWHYPSGERLFCRAPQQAIAVLPLMEISQKGVAAWCEAQLLALFPEQVESLQLTFVAEEIEGAFYHYSHGLQKHGGNCQRIAHGHRSRVQIRVDGKRRQDLEQYWAQTFADIYIGTRAHLQADSNESWHHYAYTAPQGEFELSLPARYCYVIETESTVEQIAQHLLEQIQLEYPESQVQVRAYEGVGKGAITQTAS

SEQ ID NO: 23098 - protein, 278 aa, unidentified
  source 1..278: note = Nitrincola tibetensis
  REGION 1..278: note = tr|A0A364NHP5|A0A364NHP5_9GAMM Uncharacterized protein OS=Nitrincola tibetensis OX=2219697 GN=DN062_17280; PE = 4 SV=1
MKLFVDNLTHVDFSYLHPQRGLVGESWEAQLILQGKLDDQGMICDFGTVKKRIKAWLDSHVDHMLVVARDMESLTVSQDEQDTAVEWFYPGGERFFCKAPHQAIALLPVAEITQKTVAGWAQEQLLALFPEQVESVEIHFVAEKIEGAFYHYSHGLQQHKGNCQRIAHGHRSRMEVKLDNKRRQDVELYWSQQFSDIYIGTLAHRVESIDGVNRYEYLAPQGAFQLELPARYCYDLVTETTVEQIAQHLAEQIKEEYSDYEVEVRAFEGVGKGAIVVI

SEQ ID NO: 23099 - protein, 136 aa, Nitritalea halalkaliphila
  REGION 1..136: note = tr|I5BY46|I5BY46_9BACT 6-carboxy-5,6,7,8-tetrahydropterin synthase OS=Nitritalea halalkaliphila LW7 OX=1189621 GN=A3SI_15920 PE=3 SV=1
MRVSVFRKEHFNAAHKLHNPNWSKEKNEATFGKCNNEYYHGHNYDLHVKVTGEIDPETGYVCDMKVLSDLIKEHVIDKFDHKNLNLDTDEFKNLNPTAENMAVVIWNILKEKLDSKYDLMIRLYETERNYVEYDGK

SEQ ID NO: 23100 - protein, 139 aa, Nitritalea halalkaliphila
  REGION 1..139: note = tr|I5C1K1|I5C1K1_9BACT Uncharacterized protein; OS = Nitritalea halalkaliphila LW7 OX=1189621 GN=A3SI_12689; PE = 4 SV=1
MVLVCRKEHFNAAHKLWNPNWSEEKNKEVFGPCANVNWHGHNFELIVTVKGTPDPETGFVVDLKALSDLIRKLIISQVDHKNLNLDVPFMEGKMASCEILVMEFWKILAPAVAEIVPFGGLYKLTLYETPRNFVEYYGE

SEQ ID NO: 23101 - protein, 121 aa, Nitrobacter hamburgensis
  REGION 1..121: note = tr|Q1QIG8|Q1QIG8_NITHX 6-carboxy-5,6,7,8-tetrahydropterin synthase OS=Nitrobacter hamburgensis (strain DSM 10229 / NCIMB 13809 / X14); OX = 323097 GN=Nham_3244 PE=3 SV= 1
MWELTKSFRFEAAHSLPGTTFGAASMEIHGHSFRAEVSVRGTPDPATGMVLDLGLLERGMGEVRNKLDHKLLNNVEGLGPPTLENLARFIWDHVQPAGQVTRVSVHRDSCGESCTYFGPRI

SEQ ID NO: 23102 - protein, 121 aa, Nitrobacter sp.
  REGION 1..121: note = tr|A0A1Q3K794|A0A1Q3K794_9BRAD 6-carboxy-5,6,7,8-tetrahydropterin synthase OS=Nitrobacter sp. 62-13 OX=1895797 GN=BGN91_02195 PE=3 SV=1
MWELTKSFRFEAAHALPGTTLGNASMEIHGHSFRAEVSVRGTPDSVTGMVLDLGLLARGMEEVRSKLDHRLLNDVEGLGPPTLENLARFIWDHVQHAGHVTRISVHRDSCGESCTYFGPEN

SEQ ID NO: 23103 - protein, 121 aa, Nitrobacter sp.
  REGION 1..121: note = tr|A3WT49|A3WT49_9BRAD 6-carboxy-5,6,7,8-tetrahydropterin synthase OS=Nitrobacter sp. Nb-311A OX=314253 GN=NB311A_15027 PE=3 SV=1
MWELTKSFRFEAAHALPGTTLGIASMEIHGHSFRAEVSLRGKPDPASGMVLDLGLLERSMDKVRNKLDHKLLNDIEGLGLPTLENLARFIWDHVQHAGHVTRVSVHRDSCGESCAYFGPEN

SEQ ID NO: 23104 - protein, 121 aa, Nitrobacter vulgaris
  REGION 1..121: note = tr|A0A1V4HXD5|A0A1V4HXD5_NITVU 6-carboxy-5,6,7,8-tetrahydropterin synthase OS=Nitrobacter vulgaris OX=29421 GN=B2M20_14030 PE=3 SV=1
MWELTKSFRFEAAHSLPATTLGTASMEIHGHSFRAEVSVRGKPDPASGMVLDLGLLERGMGEVRSKLDHKLLNNVEGLGPPTLENLARFIWDHVQHAGHVTRVSVHRDSCGESCTYFGPES

SEQ ID NO: 23105 - protein, 123 aa, Nitrobacter winogradskyi
  REGION 1..123: note = tr|Q3SPB8|Q3SPB8_NITWN 6-carboxy-5,6,7,8-tetrahydropterin synthase OS=Nitrobacter winogradskyi (strain ATCC 25391 / DSM 10237 / CIP 104748 / NCIMB 11846 / Nb-255) OX =323098 GN=Nwi_2620 PE=3 SV=1
MWELTKSFRFEAAHALPGTTLGAASMEIHGHSFRAEVSLRGTPDPASGMVLDLGLLERGMGEVRNKLDHKLLNDVEGLGPPTLENLARFIWDHVQHAGAVTRVSVHRDSCGESCAYFGPHVPS

SEQ ID NO: 23106 - protein, 123 aa, Nitrobacter winogradskyi; identical to SEQ ID NO: 23105
  REGION 1..123: note = tr|A0A4Y3W655|A0A4Y3W655_NITWI 6-carboxy-5,6,7,8-tetrahydropterin synthase OS=Nitrobacter winogradskyi OX=913 GN=NWI01_03550 PE=3 SV=1

SEQ ID NO: 23107 - protein, 127 aa, Nitrococcus mobilis
  REGION 1..127: note = tr|A4BSY1|A4BSY1_9GAMM 6-carboxy-5,6,7,8-tetrahydropterin synthase OS=Nitrococcus mobilis Nb-231 OX=314278 GN=NB231_00850 PE=3 SV=1
MSGRYILSIVTDFSASHILEGHPGKCSRLHGHNWSVEVEVEARELDRLGMAIDFAELKAATRQIVETMDHRHLNDLPEFAGINPTAEHVAGAIYRALRTWLSGHHARLSAVTVWETAHARVRYTEED

SEQ ID NO: 23108 - protein, 126 aa, unidentified
  source 1..126: note = Nitrosococcus halophilus
  REGION 1..126: note = tr|D5C4H2|D5C4H2_NITHN Uncharacterized protein; OS = Nitrosococcus halophilus (strain Nc4) OX=472759; GN = Nhal_2052 PE=4 SV=1
MYTIAVKDHFMIAHSLQGEVFGPAQKLHGATYNVTAEFRTERLSQDGIVIDIGLALNALKAVLALLNYKNLDEEEAFRGVNTTTEYLAHYIHGQLAKRVRASFQGTLKITLEESHVAWGSYEGTVT

SEQ ID NO: 23109 - protein, 129 aa, unidentified
  source 1..129: note = Nitrosococcus halophilus
  REGION 1..129: note = tr|D5BXV2|D5BXV2_NITHN 6-carboxy-5,6,7,8-tetrahydropterin synthase; OS = Nitrosococcus halophilus (strain Nc4) OX=472759; GN = Nhal_2797 PE=3 SV=1
MAATYTLKILTDFASAHTLRDYPGECRRMHGHNWKLEVEVTAQALDQQGMAMDFKAIKESARNLCAQLDHRYLNDIPPFDQINPTAENLAAFFYRGLSEKLNNERAQVSAITLWETERACVRYTEDQQQ

SEQ ID NO: 23110 - protein, 127 aa, Nitrosococcus oceani
  REGION 1..127: note = tr|A0A0E2ZL92|A0A0E2ZL92_9GAMM 6-carboxy-5,6,7,8-tetrahydropterin synthase; OS = Nitrosococcus oceani C-27 OX=314279 GN=IB75_10865 PE=3; SV = 1
MAITYTLKIITDFSSAHTLRDYPGECRRMHGHNWKLEVEVTAQALDQQGMVMDFKDIKESARELCAQLDHRYLNDISPFDLINPTAENLAAFFYRGLSKQLNNERARVSAITLWETERACVRYTEDQ

SEQ ID NO: 23111 - protein, 126 aa, Nitrosococcus oceani
  REGION 1..126: note = tr|Q3JC64|Q3JC64_NITOC 6-pyruvoyl tetrahydropterin synthase OS=Nitrosococcus oceani (strain ATCC 19707 / BCRC 17464 / NCIMB 11848 / C-107) OX=323261 GN=Noc_1077 PE=4SV=1
MYTLAVKDHFMIAHSLQGEVFGPAQGLHGATYNVIAEFHTEKLDQDGIVIDIGLALKALQAVLALLNYKNLDEEQSFRGANTTTEYLAHYIHGQLAKRVRATFQGKLKITLEESHVAWGSYEGPVS

SEQ ID NO: 23112 - protein, 129 aa, unidentified
  source 1..129: note = Nitrosococcus wardiae
  REGION 1..129: note = tr|A0A4P7C0U5|A0A4P7C0U5_9GAMM 6-carboxy-5,6,7,8-tetrahydropterin synthase; OS = Nitrosococcus wardiae OX=1814290 GN=queD PE=3 SV=1
MAAIYTLKILTDFASAHTLRDYPGECRRMHGHNWKLEVEVTAHVLDQQGMAMDFKAIKENARNLCAQLDHRYLNDIPPFDQINPTAENLAAFFYRGLSEKLNNERARVSAITLWETERACVRYTEDQQQ

SEQ ID NO: 23113 - protein, 126 aa, unidentified
  source 1..126: note = Nitrosococcus wardiae
  REGION 1..126: note = tr|A0A4P7BZI3|A0A4P7BZI3_9GAMM 6-carboxytetrahydropterin synthase OS=Nitrosococcus wardiae OX=1814290 GN=E3U44_14810 PE=4 SV=1
MYAIAVKDHFMIAHSLQGEVFGPAQKLHGATYNVTAEFRTERLSQDGIVIDIGLALNALKAVLALLNYKNLDEEEPFRGVNTTTEYLAHYIHGQLAKRVRDSFQGTLKITLEESHVARGSYEGTVT

SEQ ID NO: 23114 - protein, 126 aa, unidentified
  source 1..126: note = Nitrosococcus watsoni
  REGION 1..126: note = tr|D8K7B4|D8K7B4_NITWC Uncharacterized protein; OS = Nitrosococcus watsoni (strain C-113) OX=105559; GN = Nwat_1951 PE=4 SV=1
MYTLAVKDHFMIAHSLQGEIFGPAQGLHGATYNVTAEFHTEQLNQDGIVIDIGLALKALQAVLALLNYKNLDEEESFRGINTTTEYLAHYIHGQLAKRVRATFQGKLKITLEESHVAWGAYEGPVS

SEQ ID NO: 23115 - protein, 129 aa, unidentified
  source 1..129: note = Nitrosococcus watsoni
  REGION 1..129: note = tr|D8K523|D8K523_NITWC 6-carboxy-5,6,7,8-tetrahydropterin synthase; OS = Nitrosococcus watsoni (strain C-113) OX=105559; GN = Nwat_1061 PE=3 SV=1
MAITYTLKILTDFSSAHTLRDYPGECRRMHGHNWKLEVEVTAQALDQQGMVMDFKDIKKSARQLCAQLDHRYLNDISPFDRINPTAENLAAFFYRGLSQQLNNERAWVSAITLWETERACVRYTEDQSP

SEQ ID NO: 23116 - protein, 149 aa, unidentified
  source 1..149: note = Nitrosomonadaceae bacterium
  REGION 1..149: note = tr|A0A2E6UQB3|A0A2E6UQB3_9PROT 6-carboxytetrahydropterin synthase QueD; OS = Nitrosomonadaceae bacterium OX=2026767 GN=queD PE=4 SV=1
MLISSKLEFDAGHRIPSHNSHCRHLHGHRYAIEITLSGNIITDEGIANQGMIMDYSEVKRIAKDTLINKWDHAFLVYSGDIQVLKFLQSIKDHKTVILDKPPTAENLALIAFDILDHAYIDNYENNLRLEKIRLYETPNCWADAIRKEN

SEQ ID NO: 23117 - protein, 149 aa, unidentified
  source 1..149: note = Nitrosomonadaceae bacterium
  REGION 1..149: note = tr|A0A4P5UIU0|A0A4P5UIU0_9PROT 6-carboxytetrahydropterin synthase QueD; OS = Nitrosomonadaceae bacterium OX=2026767 GN=LBMAG32_11190; PE = 4 SV=1
MLITRKLEFDAGHRIPSHKNQCRHLHGHRYSIEISLSGNVITDEGAAKQGMVMDYSEIKSIAKNSLVDKWDHAFLVYAGDTILLKFLQSLEDHKTVILSVPPTAENLALIAFSILDPAYQDIYGNNLKLERVRLFETPNCWADATREGV

SEQ ID NO: 23118 - protein, 145 aa, unidentified
  source 1..145: note = Nitrosomonadales bacterium
  REGION 1..145: note = tr|A0A2E0I711|A0A2E0I711_9PROT 6-carboxytetrahydropterin synthase QueD; OS = Nitrosomonadales bacterium OX=2026761 GN=queD PE=4 SV=1
MEITTRLEFDAGHRIPSHKSNCKNLHGHRYCIEVTIKGDINSENTKSNFGMVMDFKDAKDLIKKSIIDEWDHSFIVYKDDIIVLDFLQSLDNHKTVIFPLVPTAENMALIAMDKLKIAFKEEFGDSIKPFKVKLYETPNNWAEAY

SEQ ID NO: 23119 - protein, 149 aa, unidentified
  source 1..149: note = Nitrosomonadales bacterium
  REGION 1..149: note = tr|A0A1E4FSQ3|A0A1E4FSQ3_9PROT 6-carboxytetrahydropterin synthase QueD; OS = Nitrosomonadales bacterium SCN 54-20 OX=1660164; GN = ABS69_12960 PE=4 SV=1
MLITRRLEFDAGHRIPFHKSQCRHLHGHRYAIEITLSGEIITEPGVSEQGMVMDYSEVKRIAKKVLVDKWDHAFLAFAEDHKLLEFLQSLEDHKTVVLDTPPTAENLALTAFRILDEAYQDHYGNHLRLEQVRLFETPNCWADAVRGRL

SEQ ID NO: 23120 - protein, 149 aa, Nitrosomonas aestuarii
  REGION 1..149: note = tr|A0A1I4GJJ4|A0A1I4GJJ4_9PROT 6-pyruvoyltetrahydropterin/6-carboxytetrahydropterin synthase OS=Nitrosomonas aestuarii OX=52441; GN = SAMN05216302_10572 PE=4 SV=1
MLITRKLEFDAGHRISTHNSQCRHLHGHRYVIEITLSGNIISEKGVAQQGMVMDFSEVKRIAKSALVDKWDHAFLVYSGDAPVMEFLQSLKDHKTVVLDVQPTAENLAVIAFGILDEAYQDIYGNHLQLEQVRLFETPNCWADAIRGAH

SEQ ID NO: 23121 - protein, 155 aa, Nitrosomonas communis
  REGION 1..155: note = tr|A0A1H2SDN4|A0A1H2SDN4_9PROT 6-pyruvoyltetrahydropterin/6-carboxytetrahydropterin synthase OS=Nitrosomonas communis OX=44574; GN = SAMN05421882_10076 PE=4 SV=1
MLITRRLEFDAGHRISTHNSQCRHLHGHRYVIEITLSGNIISDEGVAEQGMVMDFSEIKRIAKEVLVDKWDHAFLVYVGDTLVVEFLQSLKDHKTVIIDTQPTAENLAIKAFHILDLAFQDTYGNRLALEQVRLYETPNCWADARREIINHTNNP

SEQ ID NO: 23122 - protein, 155 aa, Nitrosomonas communis
  REGION 1..155: note = tr|A0A1I4R692|A0A1I4R692_9PROT 6-pyruvoyltetrahydropterin/6-carboxytetrahydropterin synthase OS=Nitrosomonas communis OX=44574; GN = SAMN05421863_103043 PE=4 SV=1
MLITRRLEFDAGHRISTHNSQCRHLHGHRYVIEITLSGNIISDEGVAEQGMVMDFSEIKRIAKDVLVDKWDHAFLAYAGDTLVVEFLQSLKDHKTVILDTQPTAENLAIKAFHILDVAFQDTYGNRLALEQVRLYETPNCWADARRETVNNTNNP

SEQ ID NO: 23123 - protein, 149 aa, unidentified
  source 1..149: note = Nitrosomonas cryotolerans
  REGION 1..149: note = tr|A0A1N6JKK6|A0A1N6JKK6_9PROT 6-pyruvoyltetrahydropterin/6-carboxytetrahydropterin synthase OS=Nitrosomonas cryotolerans ATCC 49181; OX = 1131553 GN=SAMN02743940_2675PE=4 SV=1
MLITRRLEFDAGHRISTHNSQCRHLHGHRYVIEITLSGEVICEEGVAEQGMVMDFSEVKQIAKTALVDKWDHAFLVYSGDIPVVKFLQSLEGHKTVVLDTQPTAENLALAAFRVLDEAYQDNYGNHLRLEQVRLFETPNCWADAIRERG

SEQ ID NO: 23124 - protein, 160 aa, Nitrosomonas europaea
  REGION 1..160: note = tr|A0A1H9Z440|A0A1H9Z440_NITER 6-pyruvoyltetrahydropterin/6-carboxytetrahydropterin synthase OS=Nitrosomonas europaea OX=915; GN = SAMN05216309_103145 PE=4 SV=1
MLITRKFEFDAGHRISTHLSQCRNLHGHRYVLEVTIAGGIIADAGVPEQGMVMDFSDVKRVIREALVDRWDHAFLVYAGDTRVLEFLQSLENHKTVVLEVQPTAENLALIAFDILRHTFRNRYAGRLELEHVRLFETPNCWADVDKAVFKSATVDRIAES

SEQ ID NO: 23125 - protein, 160 aa, Nitrosomonas europaea; identical to SEQ ID NO: 23124
  REGION 1..160: note = tr|Q82UG9|Q82UG9_NITEU 6-pyruvoyl tetrahydropterin synthase OS=Nitrosomonas europaea (strain ATCC 19718 / CIP 103999 / KCTC 2705 / NBRC 14298) OX=228410 GN=NE1517 PE =4; SV = 1

SEQ ID NO: 23126 - protein, 160 aa, Nitrosomonas eutropha
  REGION 1..160: note = tr|Q0AGJ5|Q0AGJ5_NITEC Uncharacterized protein; OS = Nitrosomonas eutropha (strain DSM 101675 / C91); OX = 335283 GN=Neut_1286 PE=4 SV=1
MLITRKFEFDAGHRISTHRSQCRNLHGHRYVLEVTILGGIITDAGAPEQGMVMDFSDVKRVIRETLVDQWDHAFLVYAGDTRVLEFLQSIDGHKTVVLEVQPTAENLALIAFDSLHRTLRNKYAGRLELEHIRLFETPNCWADVNKVDFKFDLVGEAPGS

SEQ ID NO: 23127 - protein, 160 aa, Nitrosomonas eutropha; identical to SEQ ID NO: 23126
  REGION 1..160: note = tr|A0A2V3Q9Y7|A0A2V3Q9Y7_9PROT 6-pyruvoyltetrahydropterin/6-carboxytetrahydropterin synthase OS=Nitrosomonas eutropha OX=916 GN=C8R14_1348; PE = 4 SV=1

SEQ ID NO: 23128 - protein, 155 aa, Nitrosomonas halophila
  REGION 1..155: note = tr|A0A1H3DMB4|A0A1H3DMB4_9PROT 6-pyruvoyltetrahydropterin/6-carboxytetrahydropterin synthase OS=Nitrosomonas halophila OX=44576; GN = SAMN05421881_100576 PE=4 SV=1
MLITRKFEFDAGHRISTHTSKCRNLHGHRYVLEITLSGHIIADAGVPEQGMVMDFSEVKRIAKEALVDQWDHAFLVYAGDALVLSFLQSLPDHKTVVLEVQPTAENLALIAFGVLDRAFCDKYGNQLQLEHVRLFETPNCWADVDRKGGMYDRGA

SEQ ID NO: 23129 - protein, 149 aa, Nitrosomonas marina
  REGION 1..149: note = tr|A0A1I0FBS5|A0A1I0FBS5_9PROT 6-carboxy-5,6,7,8-tetrahydropterin synthase; OS = Nitrosomonas marina OX=917 GN=SAMN05216326_1366 PE=3; SV = 1
MLITRKLEFDAGHRISTHNSQCRHLHGHRYVIEITLSGSIISEKGNAQQGMVMDFSEVKRIASEVLVDKWDHAFLVYSGDTPVMQFLQSLEDHKTVVLDVQPTAENLAVIAFDILNAAYQDNYGNHLQLEHVRLYETPNCWADASRAVD

SEQ ID NO: 23130 - protein, 214 aa, Nitrosomonas marina
  REGION 1..214: note = tr|A0A1H8DBS2|A0A1H8DBS2_9PROT 6-pyruvoyltetrahydropterin/6-carboxytetrahydropterin synthase OS=Nitrosomonas marina OX=917; GN = SAMN05216325_106146 PE=4 SV=1
MLIRKLFRFENTHRVRGCSTRRCSHSIHGHSYKTELLLEAHALDNGQMVYDFGLLKNNVRDLIDAFDHAVSLWSGDDPDYLATMRKHSERWILLPVSPSAEQLSRILFRLVDTLLRHTAMANGEADVQLHSVIVHETESGYAQCFREDACNPRMGLIELSDIAFSATITRSWQDIELFENLKQYDRIFLRQSRNHDPEKKILMTRNISKTCTES

SEQ ID NO: 23131 - protein, 151 aa, unidentified
  source 1..151: note = Nitrosomonas mobilis
  REGION 1..151: note = tr|A0A1G5SC98|A0A1G5SC98_9PROT 6-pyruvoyl tetrahydropterin synthase OS=Nitrosomonas mobilis OX=51642; GN = NSMM_260068 PE=4 SV=1
MLITRKFEFDAGHRISTHASQCRNLHGHRYVLEVTLSGKIVNDEGVPEQGMVMDFSEVKSIVHTALVDQWDHAFLVYIQDKPVIDFLLSIPDHKTVVLDLQPTAENLALIAFDILDNAFREHYKEQLQLDHVRLFETPNCWADVARTDTGS

SEQ ID NO: 23132 - protein, 155 aa, Nitrosomonas nitrosa
  REGION 1..155: note = tr|A0A3D0F959|A0A3D0F959_9PROT 6-carboxytetrahydropterin synthase QueD OS=Nitrosomonas nitrosa OX=52442 GN=queD PE=4 SV=1
MLITRRLEFDAGHRISTHNSQCRHLHGHRYVIEISLSGNIISDEGVPEQGMVLDFSAIKRIAKEIIVDKWDHAFLVYAGDKPVVDFLQSIEGHKTVIFDSQPTAENLAVKAFQLLDRAFEAAYGNRLRLEQVRLYETPNCWADAKREKIDLTNHS

SEQ ID NO: 23133 - protein, 155 aa, Nitrosomonas nitrosa
  REGION 1..155: note = tr|A0A1I4M3J7|A0A1I4M3J7_9PROT 6-pyruvoyltetrahydropterin/6-carboxytetrahydropterin synthase OS=Nitrosomonas nitrosa OX=52442; GN = SAMN05421880_103102 PE=4 SV=1
MLITRRLEFDAGHRISTHNSQCRHLHGHRYVIEISLSGNIISDEGVPEQGMVLDFSAIKRIAKEIIVDKWDHAFLVYAGDKPVVDFLQSIEGHKTVIFDSQPTAENLAVKAFQLLDRAFEAAYGSRLRLEQVRLYETPNCWADAKREKIDLTNNS

SEQ ID NO: 23134 - protein, 149 aa, Nitrosomonas oligotropha
  REGION 1..149: note = tr|A0A1H8M9M9|A0A1H8M9M9_9PROT 6-pyruvoyltetrahydropterin/6-carboxytetrahydropterin synthase OS=Nitrosomonas oligotropha OX=42354; GN = SAMN05216333_10523 PE=4 SV=1
MFITRRLEFDAGHRISTHNSQCRHLHGHRYCIEITLSGNIIADEGVAQQGMVMDYSEVKRIAKSVLVDQWDHAFLVYSGDTKVLQFLQSIEDHKTVVLDVQPTAENLALLAFEILDGAYQDSYGNHLQLEQVRLYETPNCWADALRGSV

SEQ ID NO: 23135 - protein, 149 aa, Nitrosomonas oligotropha
  REGION 1..149: note = tr|A0A2T5I356|A0A2T5I356_9PROT 6-carboxytetrahydropterin synthase QueD OS=Nitrosomonas oligotropha OX=42354 GN=queD PE=4 SV=1
MFITRRLEFDAGHRISTHNSQCRHLHGHRYCIEITLSGNIIADEGVAQQGMVMDYSEVKRIAKSVLVDQWDHAFLVYSGDTKVLQFLQSIEDHKTVVLDVQPTAENLALIAFEILDGAYQDSYGNHLQLEQVRLYETPNCWADAVRGSV

SEQ ID NO: 23136 - protein, 149 aa, Nitrosomonas sp.
  REGION 1..149: note = tr|A0A2P7NXJ5|A0A2P7NXJ5_9PROT 6-carboxytetrahydropterin synthase QueD OS=Nitrosomonas sp. APG5 OX=2116706 GN=queD PE=4 SV=1
MLITRRLEFDSGHRISTHNSQCRHLHGHRYCIEITLSGNIIADEGVAQQGMVMDFSEVKQIAKSALVDHWDHAFLVYSGDQQVLQFLQSIEDHKTVILDVQPTAENLALIAFNILDSAYQDSYGNHLQLEQVRLFETPNCWADAVRGVR

SEQ ID NO: 23137 - protein, 149 aa, Nitrosomonas sp.
  REGION 1..149: note = tr|A0A1H9RL66|A0A1H9RL66_9PROT 6-carboxy-5,6,7,8-tetrahydropterin synthase; OS = Nitrosomonas sp. Nm51 OX=133720 GN=SAMN05421690_10613; PE = 3 SV=1
MLITRKLEFDAGHRISTHNSQCRHLHGHRYVIEITLSGTIISEKGNAQQGMVMDFSEVKRIAEQALVDKWDHAFLVYTGDVPVMQFLQSLDDHKTVVLDVQPTAENLAVIAFNILSAAYQDSYGNHLQLEHVRLYETPNCWADASRVAD

SEQ ID NO: 23138 - protein, 158 aa, unidentified
  source 1..158: note = Nitrosomonas stercoris
  REGION 1..158: note = tr|A0A4Y1YJE9|A0A4Y1YJE9_9PROT Uncharacterized protein OS=Nitrosomonas stercoris OX=1444684; GN = Nstercoris_00333 PE=4 SV=1
MLITRKFEFDAGHRISTHQSQCRNLHGHRYVLEVTISGNIITDDAVPEQGMVMDFSNVKRIIQEALVDQWDHAFLVYAGDTRVLEFLQSMDGHKTVVLEVQPTVENLALIAFDKLQRVFRDRYADRLALEHIRLFETPNCWADINRVDFDQDSDSSNA

SEQ ID NO: 23139 - protein, 149 aa, Nitrosomonas ureae
  REGION 1..149: note = tr|A0A285BVG7|A0A285BVG7_9PROT 6-carboxy-5,6,7,8-tetrahydropterin synthase; OS = Nitrosomonas ureae OX=44577 GN=SAMN06296273_0299 PE=3; SV = 1
MLITRKLEFDAGHRISTHNSQCRHLHGHRYCIEITLSGNIIADEGVAQQGMVMDFAAVKQIAKSTLVDYWDHAFLVYSGDKKVLQFLQSIEDHKTVVLDVQPTAENLALIAFNILDDAYQDSYGNHLQLEQVRLFETPNCWADAVRGAR

SEQ ID NO: 23140 - protein, 149 aa, Nitrosomonas ureae
  REGION 1..149: note = tr|A0A0S3AN99|A0A0S3AN99_9PROT 6-carboxy-5,6,7,8-tetrahydropterin synthase; OS = Nitrosomonas ureae OX=44577 GN=SAMN05216406_11081 PE=3; SV = 1
MLITRKLEFDAGHRISTHNSQCRHLHGHRYCIEITLSGNIIADEGVAQQGMVMDFAAVKQIAKSTLVDHWDHAFLVYSGDKKVLQFLQSIEDHKTVVLDVQPTAENLALIAFNILDDAYRDSYGNHLRLEQVRLFETPNCWADAVRGAR

SEQ ID NO: 23141 - protein, 153 aa, Nitrosospira briensis
  REGION 1..153: note = tr|A0A1I5DBU3|A0A1I5DBU3_9PROT 6-pyruvoyltetrahydropterin/6-carboxytetrahydropterin synthase OS=Nitrosospira briensis OX=35799; GN = SAMN05216386_2273 PE=4 SV=1
MLITRRLEFDAGHRIPSHNSQCRHLHGHRYAIEITLSGDIITDAGISEQGMVMDYSEIKRIANTTLVDKWDHAFLVYSEDVRLLEFLQSLEDHKTVVLDTPPTAENLALTAFRVLDAAYQDSYGNHLRLEQVRLFETPNCWADARRGQSGISE

SEQ ID NO: 23142 - protein, 154 aa, unidentified
  source 1..154: note = Nitrosospira lacus
  REGION 1..154: note = tr|A0A1W6SP01|A0A1W6SP01_9PROT 6-carboxytetrahydropterin synthase QueD OS=Nitrosospira lacus OX=1288494 GN=EBAPG3_007015 PE=4 SV=1
MLITRRLEFDAGHRIPSHNSKCRHLHGHRYAIEITLSGDIITEAGAAEQGMVMDYSEVKRIASAVLVDKWDHAFLAYSDDVPVMEFLQSLDGHKTVVLDVPPTAENLALTAFRILDTAYRDSYGNHLRLEQVRLFETPNCWADATRGQVFGPAG

SEQ ID NO: 23143 - protein, 149 aa, Nitrosospira multiformis
  REGION 1..149: note = tr|A0A4V3E5T4|A0A4V3E5T4_9PROT 6-pyruvoyltetrahydropterin/6-carboxytetrahydropterin synthase OS=Nitrosospira multiformis OX=1231; GN = C8R18_102124 PE=4 SV=1
MLITRRLEFDAGHRIPSHKSQCRHLHGHRYAIEITLSGEIITEPGVSEQGMVMDYSEVKRIAKKVLVDKWDHAFLAYSEDHKLLEFLQSLEDHKTVVLATPPTAENLALTAFHILDEAYQDRYGNHLRLEQVRLFETPNCWADAVRGQL

SEQ ID NO: 23144 - protein, 149 aa, Nitrosospira multiformis
  REGION 1..149: note = tr|Q2Y7N2|Q2Y7N2_NITMU 6-carboxy-5,6,7,8-tetrahydropterin synthase; OS = Nitrosospira multiformis (strain ATCC 25196 / NCIMB 11849 / C 71) OX=323848 GN=Nmul_A1944 PE=3SV=1
MLITRRLEFDAGHRIPSHKSQCRHLHGHRYAIEITLSGEIITEPGISEQGMVMDYSEVKRIAKEVLVDKWDHAFLAYAEDHKLLEFLQSLEDHKTVVLDTPPTAENLALTAFYILDEAYQDRYGNHLRLEQVRLFETPNCWADAVRGQP

SEQ ID NO: 23145 - protein, 149 aa, Nitrosospira sp.
  REGION 1..149: note = tr|A0A2T5K4A3|A0A2T5K4A3_9PROT 6-carboxy-5,6,7,8-tetrahydropterin synthase; OS = Nitrosospira sp. Nsp2 OX=136548 GN=C8R31_101335 PE=3; SV = 1
MLITRRLEFDAGHRIPAHQSKCRHLHGHRYAIEVTLSGLIITEAGAAEQGMVMDYSEVKRIANVALVDLWDHAFLVYRQDVEVLQFLQSLDDHKTVVLDSPPTAENLALTAFRILDVAYQDTYGNHLRLEQVRLFETPNCWADAVRGKF

SEQ ID NO: 23146 - protein, 149 aa, Nitrosospira sp.
  REGION 1..149: note = tr|A0A495EKT5|A0A495EKT5_9PROT 6-pyruvoyltetrahydropterin/6-carboxytetrahydropterin synthase OS=Nitrosospira sp. Nsp44 OX=1945879; GN = B0H90_1686 PE=4 SV=1
MLITRRLEFDAGHRIPSHHSKCRHLHGHRYAIEVTLSGNIITEAGAAEQGMVMDYSEVKRIANVALVDLWDHAFLVYRQDLDVLHFLQSLDDHKTVVLDTPPTAENLALTAFRILDAAYRDTYGNDLRLEQVRLFETPNCWADAIRDKF

SEQ ID NO: 23147 - protein, 153 aa, unidentified
  source 1..153: note = Nitrosovibrio sp.
  REGION 1..153: note = tr|A0A497XKH7|A0A497XKH7_9PROT 6-pyruvoyltetrahydropterin/6-carboxytetrahydropterin synthase OS=Nitrosovibrio sp. Nv12 OX=2135773; GN = C8R22_0993 PE=4 SV=1
MLITRRLEFDAGHRIPSHNSKCRHLHGHRYAIEITLSGNIINEAGVSEQGMVMDYSEVKRIANTALVDKWDHAFLVYSEDARLLEFLQSLEGHKTVVLDTPPTAENLSLAAFRILDAAYQDTYGNHLRLEQVRLFETPNCWADAVRGQIISSR

SEQ ID NO: 23148 - protein, 154 aa, unidentified
  source 1..154: note = Nitrosovibrio sp.
  REGION 1..154: note = tr|A0A1K1NAA5|A0A1K1NAA5_9PROT 6-pyruvoyltetrahydropterin/6-carboxytetrahydropterin synthase OS=Nitrosovibrio sp. Nv17 OX=1855339; GN = SAMN05216414_11638 PE=4 SV=1
MLITRRLEFDAGHRIPAHASNCRHLHGHRYAIEITLSGDIITEAGTAGQGMVMDYSEVKRIARAALVDKWDHAFLVYAGDVAVMQFLESLEGHRTVVLDAPPTAENLALAAFRILDAAYGDTYGNHLRLERVRLFETPNCWADAVRGQLPQSPA

SEQ ID NO: 23149 - protein, 152 aa, unidentified
  source 1..152: note = Nitrosovibrio tenuis
  REGION 1..152: note = tr|A0A1H7PTD3|A0A1H7PTD3_9PROT 6-pyruvoyltetrahydropterin/6-carboxytetrahydropterin synthase OS=Nitrosovibrio tenuis OX=1233; GN = SAMN05216387_1108 PE=4 SV=1
MLITRRLEFDAGHRIPSHTSKCRHLHGHRYAIEITLSGDIITEAGAPEQGMVMDYSEVKRIASITLVDKWDHAFLVYSQDVSVLQFLQSLQNHKTVVLDMPPTAENLALTAFRILDAAYQDTYGNHLRLERVRLFETPNCWADAVREQIPGI

SEQ ID NO: 23150 - protein, 122 aa, Nitrospina gracilis
  REGION 1..122: note = tr|M1Z263|M1Z263_NITG3 6-carboxy-5,6,7,8-tetrahydropterin synthase OS=Nitrospina gracilis (strain 3/211) OX=1266370 GN=NITGR_950044 PE=3; SV = 1
MYEVYVTTRFSAAHQLRGYDGKYENLHGHNWTASVTVEAKELDEIGVGIDFVELKRMVDDFLSKLDYHNINEVPPFDTQNPSAENIARWLFKQLEAAIDKQHARVKRVEVYETPESGAAYFE

SEQ ID NO: 23151 - protein, 141 aa, Nitrospina gracilis
  REGION 1..141: note = tr|M1YN83|M1YN83_NITG3 6-pyruvoyl tetrahydrobiopterin synthase OS=Nitrospina gracilis (strain 3/211) OX=1266370 GN=PTS PE=4 SV=1
MIYITRKVEFCASHRLFNPTFSDEKNAQVFGLCNNPNGHGHNYTMEVTVKGDVDPETGMVLDLKFLKKLVTEEIIDKVDHKNLNMDVEFLQGVIPTAENLAIKFWEVLEPKIGGGLLHQIKLYESPRNFVTYRGQVSERVD

SEQ ID NO: 23152 - protein, 122 aa, Nitrospina sp.
  REGION 1..122: note = tr|A0A523MX15|A0A523MX15_9BACT 6-carboxy-5,6,7,8-tetrahydropterin synthase OS=Nitrospina sp. OX=2024844 GN=E2O41_04450 PE=3 SV=1
MYQVTIKTIFSAAHQLRGYDGQYENLHGHNWTAVVIAESEELDAMGVGIDFVNLKKQTEGVLSALDYHNINEVAPFDQQNPSAENIARWLFEKLSALLNTKSVKIKRVEISETPECGAAYFE

SEQ ID NO: 23153 - protein, 141 aa, Nitrospina sp.
  REGION 1..141: note = tr|A0A523NPM3|A0A523NPM3_9BACT 6-carboxytetrahydropterin synthase OS=Nitrospina sp.; OX = 2024844 GN=E2O42_05210 PE=4 SV=1
MIYITRKLEFCASHTLFNPEYSDEKNAEVFGLCSNPNGHGHNYVMEVTVRGEVHPETGMVLDLKVLKKLVNEEIILKVDHKNLNVDVPFLKDIIPTAENLAIHFWEVLESKLEGGELHEIKLYESERNFVIYRGNSRERFD

SEQ ID NO: 23154 - protein, 127 aa, unidentified
  source 1..127: note = Nitrospinae bacterium
  REGION 1..127: note = tr|A0A1G1E7B3|A0A1G1E7B3_9BACT 6-carboxy-5,6,7,8-tetrahydropterin synthase OS=Nitrospinae bacterium RIFCSPLOWO2_12_FULL_45_22 OX=1801687; GN = A3G93_13360 PE=3 SV=1
MYALTVKSGFAAAHQLRGYQGACENLHGHNWKVEVTIMANKLNELGIVIDFREIKRVLDGVLESLDHKNLSDLEPFKKANPTSENICAWLFQELDKRLSSRDLKVNKVTVRETDNYAASYYRQASEP

SEQ ID NO: 23155 - protein, 141 aa, unidentified
  source 1..141: note = Nitrospinae bacterium
  REGION 1..141: note = tr|A0A2H0CWD4|A0A2H0CWD4_9BACT 6-pyruvoyl tetrahydrobiopterin synthase OS=Nitrospinae bacterium CG22_combo_CG10-13_8_21_14_all_47_10 OX=1974050; GN = COW89_01395 PE=4 S V=1
MILITRRLEFCASHRLHNPAFSEEKNAATFGLCNNPNGHGHNYVLEVTVRGEVNPETGMVLDLKALKKLINEEIVDKVDHKNLNVDVDFLKNIIPTAENIAIHFWNIIEPKIENGTLHEIKLFESERNFVIYRGAELERPH

SEQ ID NO: 23156 - protein, 122 aa, unidentified
  source 1..122: note = Nitrospira bacterium
  REGION 1..122: note = tr|A0A0S8AL10|A0A0S8AL10_9BACT 6-carboxy-5,6,7,8-tetrahydropterin synthase OS=Nitrospira bacterium SG8_35_4 OX=1704025 GN=AMK71_08885 PE=3 SV=1
MFDLMIEAQFSAAHQLRGYKGKCEDLHGHNWRVQVTVSSDKLSDIGMVIDFHELKDISGEVISSLDHTFLNDVFPFTEINPSSENIARWIYESIKKKLNKKDCSMSSVTVWENDTSSATYYE

SEQ ID NO: 23157 - protein, 123 aa, unidentified
  source 1..123: note = Nitrospira bacterium
  REGION 1..123: note = tr|A0A2N1UL06|A0A2N1UL06_9BACT 6-carboxy-5,6,7,8-tetrahydropterin synthase OS=Nitrospira bacterium HGW-Nitrospira-1 OX=2013825 GN=queD PE=3 SV=1
MYDLSIETGFAGAHQLRGYKGKCEKLHGHNWKVQISVTAERLNEIDLAIDFHDLKKIANELISPLDHAFLNDIFPFTEKNPSSENIAKWIYDSLKKKIQDENLRISAVTVWESDTASASYYED

SEQ ID NO: 23158 - protein, 149 aa, unidentified
  source 1..149: note = Nitrospira defluvii
  REGION 1..149: note = tr|D8PJ03|D8PJ03_9BACT 6-pyruvoyl-tetrahydropterin synthase OS=Nitrospira defluvii OX=330214 GN=pts PE=4 SV=1
MSQATITRRYRFCAAHRLHTDQLSAEENWTTFGKCNNPNGHGHNYVVFVSVRGDIDPVTHQVLDVSRLDAVVERIVVQRFDHQDLNLDPEFATQTTTGENLVLLIWDLLVDQLPAGRLVKVGVIETRDNYFEYSGSVESMRREEGVRHG

SEQ ID NO: 23159 - protein, 250 aa, unidentified
  source 1..250: note = Nitrospira defluvii
  REGION 1..250: note = tr|D8P875|D8P875_9BACT Putative 6-pyruvoyl-tetrahydropterin synthase (Modular protein); OS = Nitrospira defluvii OX=330214 GN=NIDE4038 PE=4 SV=1
MAAVLLNKRIEFCASHRYHKPEWDAAKNRAMFGACNNDPGHGHNYMLEVTVAGEVDQRTGMVVNLFDLKRVLLQVLEEFDHKHLNLDLPYFERQIPTSENIARVLWDKLQAQPDIGTLKRLSLYEDEDLCADLTAEAGLEVASVTRRYSFTAVHDGHRGHTWDLFVSVHGPIDRGTGMVTDIVALDHLLKERVLVPFEGRDLRMVLATPSVTGEYLAKAVWDRIVSAIPAGTLQLVKLVQTRDLFYEYAG

SEQ ID NO: 23160 - protein, 250 aa, unidentified
  source 1..250: note = Nitrospira japonica
  REGION 1..250: note = tr|A0A1W1I190|A0A1W1I190_9BACT Putative 6-pyruvoyl-tetrahydropterin synthase (Modular protein); OS = Nitrospira japonica OX=1325564 GN=NSJP_0585 PE=4 SV=1
MAPVLLTKRIEFAAAHRYFRPEWDEAKNRAVFGRCYNPPAHGHNYMLEVTVSGGVDPQTGMVINLFDLKRVLLGMIEEFDHKNLNLDMSYFTDRIPTSENLARVLWTKLEPQSDIGTLHAIRLYEDEDLFAEITAAGGLDIAGVTRRYSFTAVQEGHQGRQWDCFVTVQGPIDPKTGMVVDIAALNLLVQEHVLAKLDCRDLRDVFGRTSVTGQSLVEFIWTSLVSRIPSGKLAHLQVVHSRDLSFSCSA

SEQ ID NO: 23161 - protein, 136 aa, unidentified
  source 1..136: note = Nitrospira japonica
  REGION 1..136: note = tr|A0A1W1I0P8|A0A1W1I0P8_9BACT 6-carboxy-5,6,7,8-tetrahydropterin synthase OS=Nitrospira japonica OX=1325564 GN=pts PE=4 SV=1
MQFTMTRRYRFCAAHRLHTDHLTPEENRTAFGKCNNPNGHGHNYVVLVTVRSGANEGAVALERLDRIVEETIVERFDHQDLNQDSEFAALTTTGENLVKLIWNLLAPKLPAGILEKVGVIETRDNYFEYAAPTGPR

SEQ ID NO: 23162 - protein, 143 aa, unidentified
  source 1..143: note = Nitrospira lenta
  REGION 1..143: note = tr|A0A330L7M6|A0A330L7M6_9BACT 6-pyruvoyl tetrahydrobiopterin synthase OS=Nitrospira lenta; OX = 1436998 GN=PTS PE=4 SV=1
MGQGSITRRYRFCAAHRLHTDYLSIEDNRAVFGKCNNPNGHGHNYVVLVTIGSPGVSQSGRTMDIDALDRIVTERIVTRFDHRDLNQDPEFATRTTTGENLVLLIWDLLVTQVPEGQLKKVAVVETRDNYFEYTGSALVAARS

SEQ ID NO: 23163 - protein, 250 aa, unidentified
  source 1..250: note = Nitrospira lenta
  REGION 1..250: note = tr|A0A330L7H2|A0A330L7H2_9BACT Putative 6-pyruvoyl-tetrahydropterin synthase (Modular protein); OS = Nitrospira lenta OX=1436998 GN=NITLEN_20575 PE=4 SV=1
MANVQLTKRIEFSSSHRYIKPEWDEAKNRAVFGPCYNAPAHGHNYMLEVTVSGEVDPQTGMVINLFDLKQVLLAVIEEFDHMNFNLDLPYFRDRIPTSENIACVLWTKLVAQSDIGTLDTIRLYEDEDLYAEVTAAGGLDVASVTRRYSFTALLDSRQGHTWDCFVSVHGAIDPITGMVTDIGALDRLVQEQVLRVLDRQDLREVLKAASISGANLAEFIWNALVSRLSSGALKNIRIIQSRDLSFDYNG

SEQ ID NO: 23164 - protein, 136 aa, Nitrospira moscoviensis
  REGION 1..136: note = tr|A0A0K2GHM0|A0A0K2GHM0_NITMO 6-pyruvoyl tetrahydrobiopterin synthase OS=Nitrospira moscoviensis; OX = 42253 GN=PTS PE=4 SV=1
MAHTTITRRYRFCAAHRLHTEHLSAEENWAAFGKCNNPNGHGHNYIVLVTVSTPETEKAVDLARLDRIVGERIVTRFDHHDLNQDPEFADRTTTGENLVLLIWDLLAPHLPEGQLKKVGVIETRDNYFEYAAPSPV

SEQ ID NO: 23165 - protein, 250 aa, Nitrospira moscoviensis
  REGION 1..250: note = tr|A0A0K2GIL9|A0A0K2GIL9_NITMO Putative 6-pyruvoyl-tetrahydropterin synthase (Modular protein); OS = Nitrospira moscoviensis OX=42253 GN=NITMOv2_4338 PE=4; SV = 1
MSVVLLTKRIEFAAAHRYFKPEWDEAKNRAVFGLCYNPPAHGHNYLLEVTVSGEVDPKTGMVINLFDLKRVLLGMIEEFDHKNFNLDMPYFKDRIPTSENIARLLWTKLAPHKDIGMLHTVRLCEDEDLYAEVTAAGGLDVASVTRRYSFNAVQDGKAGRDWDCFVTVHGPIDPVTGMVTDIAALDRLVDERVVTVFDGQDLSHVLRKPGATGDHLAQDIWQRLVSRIAPGRLTNIRLVQSRDVSVDYAG

SEQ ID NO: 23166 - protein, 129 aa, Nitrospira sp.
  REGION 1..129: note = tr|A0A1W9GDI3|A0A1W9GDI3_9BACT Uncharacterized protein OS=Nitrospira sp. SG-bin1 OX=1827376; GN = A4E19_04395 PE=4 SV=1
MTRRYRFCAAHRLHTDQLSPEENWAAFGKCNNPNGHGHNYVVLVTIRNGAIQGMGDVDRLDRIVSENIVERFDHRDLNGDPAFAALTTTGENLVKVIWDILAPFLPADSLQKVGVIETRDNYFEYAGVT

SEQ ID NO: 23167 - protein, 129 aa, Nitrospira sp.
  REGION 1..129: note = tr|A0A354BHN6|A0A354BHN6_9BACT 6-pyruvoyl tetrahydrobiopterin synthase OS=Nitrospira sp. OX=70125; GN = DDY39_05545 PE=4 SV=1
MTRRYRFCAAHRLHTDLLSPEENWAAFGKCNNANGHGHNYVVLVTIRAGTAESLTNLDSLDRLVTDTVIERFDHQDLNSDPAFSALTTTGENLVAVIWDILNPLLPAGRLSKVGVIETRDNYFEYTGAI

SEQ ID NO: 23168 - protein, 267 aa, unidentified
  source 1..267: note = Nitrospiraceae bacterium
  REGION 1..267: note = tr|A0A356R5G2|A0A356R5G2_9BACT 6-pyruvoyl tetrahydropterin synthase OS=Nitrospiraceae bacterium; OX = 2026770 GN=DD706_08240 PE=4 SV=1
MANRPKATLTKRLEFCSSHRYHNPQWDDAKNRTVFGPCNNVNTHGHNYLVEVTLRGTIDPVTGMIINLYDLKNILNEVLEQFDHKNLNSDTAYFIDRIPTTENLAVTLWDILEKHPDLPTPETLRLYEDETLYAEVTKSFMEENPQSFTGGSALIARRFGFSAVHQSRTGNTQGHNYDLWVATKGSIPADTGQVMNLQTLDQIVRTEVLTRFDQRNLSQDQAFANFPVTECTIAKVTWDTLNPHFKNPSLYRVSVSQQPGAVTTFSA

SEQ ID NO: 23169 - protein, 122 aa, unidentified
  source 1..122: note = Nitrospiraceae bacterium
  REGION 1..122: note = tr|A0A348VRJ9|A0A348VRJ9_9BACT 6-carboxy-5,6,7,8-tetrahydropterin synthase; OS = Nitrospiraceae bacterium OX=2026770 GN=queD PE=3 SV=1
MYELMIESRFAAAHQLRGYQGKCEKLHGHNWRVTMAVTAERLNEQGLAIDFTDLNKALREVLDQLEHSFLNDIFPFTEINPSSENLAKWIYDGLAKKLNDDNLEVASVTVWESDTASSSYFE

SEQ ID NO: 23170 - protein, 122 aa, unidentified
  source 1..122: note = Nitrospirae bacterium
  REGION 1..122: note = tr|A0A1G1HST7|A0A1G1HST7_9BACT 6-carboxy-5,6,7,8-tetrahydropterin synthase OS=Nitrospirae bacterium RIFCSPLOW2_12_42_9 OX=1801722 GN=A2Y48_09395; PE = 3 SV=1
MYEIKVITTISAAHSLRNYPGDCKNIHGHNYKVEVVMQSEGLDNLGMAIDFRMLRQEIERLLQTLDHTYINDKPPFDTINPTAENLSQWIYDTLSKKLNRDIARVCRVNVWENENSSASYFD

SEQ ID NO: 23171 - protein, 256 aa, unidentified
  source 1..256: note = Nitrospirae bacterium
  REGION 1..256: note = tr|A0A1G1K744|A0A1G1K744_9BACT Uncharacterized protein OS=Nitrospirae bacterium RIFCSPLOWO2_12_FULL_63_8; OX = 1801718 GN=A3K11_11610 PE=4 SV=1
MLTKRIEFAAAHRYHNEALDAATNRRVFGACNNAPGHGHNYLLEVTVAGPVDRHTGMVVNLFDLKVVLQEVLEEFDHKHLNLDVPYFTKTVPTTENIATVLWGKLAARSEIGRLERIRLYEEDDLWADVTVKDQAGNRASLTRRYHFPASLPAANAQQGQAGHNYALEVTVEGDIHPETGMVTDIGAVDRMVQELVVSRCTGRNLGQDPAFASRPLTGETLARLIWSSLAKALPSGRLQKVRLVESDDLSYEYAES

SEQ ID NO: 23172 - protein, 123 aa, unidentified
  source 1..123: note = Nitrospirales bacterium
  REGION 1..123: note = tr|A0A4Y7X5V9|A0A4Y7X5V9_9BACT 6-carboxy-5,6,7,8-tetrahydropterin synthase; OS = Nitrospirales bacterium LBB_01 OX=2552947 GN=queD PE=3; SV = 1
MFELSVESTFAAAHQLRGYKGKCEALHGHNWRVQVVVQADKLNEIDITIDFHDIKKLTNDVTSQLDHAFLNDIFPFTQINPSSENIAKWVYDTLRKKISTEHVRLLSVTVWESETSAATYYED

SEQ ID NO: 23173 - protein, 123 aa, unidentified
  source 1..123: note = Nitrospirales bacterium
  REGION 1..123: note = tr|A0A524GGZ9|A0A524GGZ9_9BACT 6-carboxy-5,6,7,8-tetrahydropterin synthase; OS = Nitrospirales bacterium OX=2358460 GN=queD PE=3 SV=1
MFELMIETQFASAHQLRGYKGVCENLHGHNWKVQIFVLAERLNEIDIAIDFHELKKLAEEVIMPLDHGFLNDIFPFTEKNPSSENIAKWIFDSLRKKLDNDDVNLSAVTVWESETASATYFEE

SEQ ID NO: 23174 - protein, 138 aa, unidentified
  source 1..138: note = Niveispirillum cyanobacteriorum
  REGION 1..138: note = tr|A0A2K9NCK5|A0A2K9NCK5_9PROT Uncharacterized protein OS=Niveispirillum cyanobacteriorum OX=1612173; GN = C0V82_11660 PE=4 SV=1
MYSVSVRDHIMIAHSFVGAIFGPAQALHGATFVVDAEFRRRQLSPEGLVVDIGAASALLKQVLAPLNYQNLDEMPEYRGRNTTTEYLAGDIHRKIAAGIRAGALGADGPALDGLRVVLSESHTAWGSYEAPLNVEAAR

SEQ ID NO: 23175 - protein, 137 aa, unidentified
  source 1..137: note = Niveispirillum lacus
  REGION 1..137: note = tr|A0A255Z3D3|A0A255Z3D3_9PROT Uncharacterized protein OS=Niveispirillum lacus OX=1981099 GN=CHU95_06760; PE = 4 SV=1
MYFLSVREHIMIAHSFVGAIFGPAQALHGATFVVDAEFRRRQLSPEGLVVDIGAASVLLKQVLAPLNYKNLDELPEYRGRNTTTEFLAGDIHRKLAAGIRAGALGADGPALDSLRVTLSESHVAWGAFEAPLTGDGA

SEQ ID NO: 23176 - protein, 117 aa, Nocardia brasiliensis
  REGION 1..117: note = tr|K0F544|K0F544_9NOCA 6-carboxy-5,6,7,8-tetrahydropterin synthase OS=Nocardia brasiliensis ATCC 700358 OX=1133849 GN=O3I_023505 PE=3 SV=1
MDIFREFSFEAAHRLPAVPDGHKCGRLHGHSYRVEVQVTGEVGAETGWVIDFARIKDAFAGVHDQLDHHYLNEVPGLENPTSEVLAQWIWARLYDKIPLSAVTVRETCTSGCVYRGH

SEQ ID NO: 23177 - protein, 136 aa, Nocardia sp.
  REGION 1..136: note = tr|A0A0M8WBD9|A0A0M8WBD9_9NOCA 6-pyruvoyl tetrahydropterin synthase OS=Nocardia sp. NRRL S-836; OX = 1519492 GN=ADL03_25115 PE=4 SV=1
MFSITVRDHVMIAHSFRGEVFGPAQRLHGATFLVDATFKRAELDQDNIVVDIGLATQELGKVLAAFNYRNLDEEPQFAGINTSTEWLAKHIADQLADAIAAGSLGEGAHGIDGITVTLHESHVAWASYERALRTAG

SEQ ID NO: 23178 - protein, 117 aa, Nocardia sp.
  REGION 1..117: note = tr|A0A3A4K2Z0|A0A3A4K2Z0_9NOCA 6-carboxy-5,6,7,8-tetrahydropterin synthase OS=Nocardia sp. YIM PH 21724 OX=2340916 GN=queD PE=3 SV=1
MEIFREFTFEAAHRLPNTPEGHKCARLHGHSFRVEVHVRGEVDERTGWVMDFAEIKSAVAPLYERLDHHYLNEIEGLENPTSENLARWLWERLAGTLPLSAIQVRETCTSGCVYRGE

SEQ ID NO: 23179 - protein, 122 aa, unidentified
  source 1..122: note = Nocardioidaceae bacterium
  REGION 1..122: note = tr|E9US35|E9US35_9ACTN 6-carboxy-5,6,7,8-tetrahydropterin synthase; OS = Nocardioidaceae bacterium Broad-1 OX=408672; GN = NBCG_01553 PE=3 SV=1
MTHTAEIFKEFTFEAAHRLPNVPDGHKCARLHGHSFRVQLHVRGSVGEETGWVQDFGDLKAAFKPLEARLDHYYLNEIEGLDNPTSEVLAKWLWDRLIDALPNLVEVQVRETCTAGCIYRGD

SEQ ID NO: 23180 - protein, 135 aa, unidentified
  source 1..135: note = Nocardioides albidus
  REGION 1..135: note = tr|A0A5C4WCT4|A0A5C4WCT4_9ACTN 6-carboxytetrahydropterin synthase OS=Nocardioides albidus; OX = 1517589 GN=FHP29_03515 PE=4 SV=1
MFRVTVRDHIMIAHSLQGEVFGPAQRLHGATYVVDATFAGADLDEDGILVDIGRATEVVREVLGRLHYRNLDELDGEEALATQNTSTEVLARWVADRLAERAVGGDLGPGGRTLAAIEVVLHESHVARAGYERTL

SEQ ID NO: 23181 - protein, 132 aa, unidentified
  source 1..132: note = Nocardioides bacterium
  REGION 1..132: note = tr|A0A4S5A628|A0A4S5A628_9ACTN 6-carboxytetrahydropterin synthase OS=Nocardioides bacterium OX=1565122 GN=E7Z54_10950 PE=4 SV=1
MFRVTVRGHIMIAHSLRGAVFGPAQGLHGATYVVDATFAGPELDDDGILVDIGRAGTELHNVLGALNYRNLDEDPLLAGQNTSTEVLARFIADRLAERVQAGGLGPGGSALSGIEVTLRESHIAWASYERSL

SEQ ID NO: 23182 - protein, 154 aa, unidentified
  source 1..154: note = Nocardioides bacterium
  REGION 1..154: note = tr|A0A4S5ASQ9|A0A4S5ASQ9_9ACTN 6-carboxytetrahydropterin synthase OS=Nocardioides bacterium OX=1565122 GN=E7Z54_04480 PE=4 SV=1
MSQTVAVRHTWEAGHRLPHLDGKCQSLHGHSWSVEVTVAGPIAPSTGVLVEFAALKKHLRSWVDTHLDHGLMLGVDDPLLELLAAHGKTYPFGAPTHGAYTAGLLWPTVENVATLLARVMIDHLCSTGEEQRGVRLARVDVQETAVNHATWRGQ

SEQ ID NO: 23183 - protein, 122 aa, Nocardioides caeni
  REGION 1..122: note = tr|A0A4S8NLM6|A0A4S8NLM6_9ACTN 6-carboxy-5,6,7,8-tetrahydropterin synthase; OS = Nocardioides caeni OX=574700 GN=queD PE=3 SV=1
MTYSSEIYREFTFEAAHRLPNVPEGHKCARLHGHSYLAAVHVSGPVGEDTGWVQDFGDIKAAFKPLEEQLDHHYLNEVPGLENPTSEVLAKWIWDRLITDLPNLTEVRVRETCTSGCIYRGE

SEQ ID NO: 23184 - protein, 123 aa, unidentified
  source 1..123: note = Nocardioides immobilis
  REGION 1..123: note = tr|A0A417Y8K8|A0A417Y8K8_9ACTN 6-carboxytetrahydropterin synthase OS=Nocardioides immobilis OX=2049295 GN=D0Z08_00655 PE=4 SV=1
MMVAHSLRGEVFGPAQRLHGATFVVDATFVAADLDESGIVVDIGRASEQLKAVLADLTYRNLDDVESLAGVNTSTEVLARLVADRLADAAHQGLLGRPADELSGIEVTLRESHIAWASYQRPL

SEQ ID NO: 23185 - protein, 125 aa, Nocardioides iriomotensis
  REGION 1..125: note = tr|A0A4Q5IVR2|A0A4Q5IVR2_9ACTN 6-carboxytetrahydropterin synthase OS=Nocardioides iriomotensis OX=715784 GN=ETU37_19145 PE=4 SV=1
MFSVTVRDHMLVAHSLRGEVFGPAQRLHGATYVVDVTFRGPELDDDGILVDIGWATETLRDVMGDLGYRNLDDEPDLAGLNTTTEVLARVVADRVVARLTTDAVRTVAVTLHESHVASAGYERSV

SEQ ID NO: 23186 - protein, 131 aa, Nocardioides sp.
  REGION 1..131: note = tr|A0A2T8FCI4|A0A2T8FCI4_9ACTN Uncharacterized protein OS=Nocardioides sp. WSJ-1 OX=2138300; GN = DDE18_08990 PE=4 SV=1
MFSVTVRDHMMVAHSLRGDVFGPAQRLHGATFVVDATFRGETLSEEGILVDIGRATEELRDVLTGLTYRNLDDEPSFGGANTTTEVLARHVADRLAERLNAGALGPAAQVTGLVVTLHESHVAWASYERVP

SEQ ID NO: 23187 - protein, 123 aa, Nocardioides sp.
  REGION 1..123: note = tr|A0A5B1LHZ1|A0A5B1LHZ1_9ACTN 6-carboxytetrahydropterin synthase OS=Nocardioides sp. BN130099 OX=2607660 GN=F0U44_07615 PE=4 SV=1
MMIAHSLRGEVFGPAQQLHGATYVVDATFRATDVDAAGIVVDIGCAMDQLKAVLADLTYRNLDDHAELTGVITTTEVLAKLVADRLADRAHAGLLGRPAAELDGIEVTLRESHIAWASYERGL

SEQ ID NO: 23188 - protein, 134 aa, Nocardioides terrae
  REGION 1..134: note = tr|A0A1I1J7N3|A0A1I1J7N3_9ACTN 6-pyruvoyl-tetrahydropterin synthase OS=Nocardioides terrae OX=574651 GN=SAMN04487968_106212 PE=4 SV=1
MFTVTVRDRIMVAHSLAGEEFGPAQRLHGATYVVEAAFRGKSLDPSGVLVDIAKATSELRAVLADLDFQNLDELPAFTGRNRTTEAVAEVIGDELAARVGEGVLGNGVTSVAVTLRESDVAWVTYEAPRVLTEP

SEQ ID NO: 23189 - protein, 132 aa, Nocardiopsis alba
  REGION 1..132: note = tr|J7LEE0|J7LEE0_NOCAA Uncharacterized protein; OS = Nocardiopsis alba (strain ATCC BAA-2165 / BE74); OX = 1205910 GN=B005_4510 PE=4 SV=1
MFGVTVRDHLMVAHSFRGEVFGPAQALHGATFVVDATLRRPDLDPDGIVVDIGAATRVLGEIVGELNYRNLDEVPEFAGVNTSTEFLAKVIADRLAERIHAGGLGQNARGLASLSITLHESHVAWASYEREL

SEQ ID NO: 23190 - protein, 174 aa, Nocardiopsis dassonvillei
  REGION 1..174: note = tr|A0A223QDW9|A0A223QDW9_NOCDA 6-carboxytetrahydropterin synthase OS=Nocardiopsis dassonvillei OX=2014 GN=CGQ36_15655 PE=4 SV=1
MTHRIRVRHNFETAHRLPHLSGKCMNLHGHSWWAEVSVSAPALSEDGTVVEFGAFKKALRAFVDTHLDHGAMLGAGDPLAAVLAEHGSKVYRFGAASPGDTERYARDLPYPTVEAVAVMLGRVAQALLDSGERAAGARVTGVEVTETHVNTAAYHPVASSQAGERPFERVLAVD

SEQ ID NO: 23191 - protein, 174 aa, Nocardiopsis dassonvillei
  REGION 1..174: note = tr|D7AWP6|D7AWP6_NOCDD Uncharacterized protein; OS = Nocardiopsis dassonvillei (strain ATCC 23218 / DSM 43111 / CIP 107115 / JCM 7437 / KCTC 9190 / NBRC 14626 / NCTC 10 488 / NRRL B-5397 / IMRU 509) OX=446468 GN=Ndas_
MTHRIRVRHNFETAHRLPHLSGKCMNLHGHSWWAEVSVSAPALSEDGTVVEFGAFKKALRAFVDTHLDHGAMLGAGDPLAAVLAEHGSKVYRFGAASPGDTERYARDLPYPTVEAVAVMLGRVAQALLDSGERAAGARVTGVEVTETHVNRAAYHPVASPQAGERPFERVLAVD

SEQ ID NO: 23192 - protein, 127 aa, Nocardiopsis flavescens
  REGION 1..127: note = tr|A0A1M6BR12|A0A1M6BR12_9ACTN 6-pyruvoyl-tetrahydropterin synthase OS=Nocardiopsis flavescens OX=758803 GN=SAMN05421803_101444 PE=4 SV=1
MFSVTVRDHMMVAHSFRGEVFGPARALHGATFVVDATVHRRDLDPDGVVVDIGEFSRVLAQIVGELNHRNLDEVPEFAGVNTTTEFLARTVADRLAERLDAAARGLCRIAVTLHESHVARASYEREP

SEQ ID NO: 23193 - protein, 132 aa, Nocardiopsis gilva
  REGION 1..132: note = tr|A0A223S1Q7|A0A223S1Q7_9ACTN 6-carboxytetrahydropterin synthase OS=Nocardiopsis gilva YIM 90087 OX=1235441 GN=CDO52_03875 PE=4 SV=1
MFSVTVRDHLMVAHSFRGEVFGPAQSLHGATFIVDASFRRPELDDDGIVVDIGRATQELNSVLADLNYRNLDEVPEFAGVNTSTEFLAKVIADRIADRVAQGALGEQARGVTELKVTLHESHIAWASYERAL

SEQ ID NO: 23194 - protein, 127 aa, Nocardiopsis sinuspersici
  REGION 1..127: note = tr|A0A1V3BYZ1|A0A1V3BYZ1_9ACTN Uncharacterized protein OS=Nocardiopsis sinuspersici OX=501010; GN = NOSIN_07580 PE=4 SV=1
MYSVTVRDHIMVAHSFRGEVFGPAQGLHGATFVVDATFRRRELDEDNIVVDIGLATRELKAVLAGLDYRNLDEDPDFAGVNTSTEFLAGVIADRLVERLDARARGLDGIAVTLHESHVAWAGHERDL

SEQ ID NO: 23195 - protein, 118 aa, Nocardiopsis sinuspersici
  REGION 1..118: note = tr|A0A1V3BU81|A0A1V3BU81_9ACTN 6-carboxy-5,6,7,8-tetrahydropterin synthase; OS = Nocardiopsis sinuspersici OX=501010 GN=NOSIN_26085 PE=3; SV = 1
MEIFREFTFEAAHRLPRVPEGHKCARLHGHSYRVVLHIEGPVEPDAGWVMDFGDVKRAFEPLRSRLDHYYLNEVDGLDNPTSENLARWIWERLHPTLHGLTAITVQETCTSGCTYRGE

SEQ ID NO: 23196 - protein, 117 aa, Nocardiopsis sp.
  REGION 1..117: note = tr|A0A0M8Y0M4|A0A0M8Y0M4_9ACTN 6-pyruvoyl tetrahydropterin synthase OS=Nocardiopsis sp. NRRL B-16309; OX = 1519494 GN=ADL05_14620 PE=4 SV=1
MVAHSFRGTVFGPAQRLHGATFVVDATFRRPELDQDNIVIDIGLATRELAAVVAELNYRNLDEEPAFAGVNTSTEYLAQVIGDRLVERVDARARGLSGLTVTLSESHVAWASHDREL

SEQ ID NO: 23197 - protein, 125 aa, Nocardiopsis sp.
  REGION 1..125: note = tr|A0A495L1B6|A0A495L1B6_9ACTN 6-carboxy-5,6,7,8-tetrahydropterin synthase; OS = Nocardiopsis sp. Huas11 OX=2183912 GN=DFP74_2695 PE=3; SV = 1
MGYRIGKSFSFDAAHFLGDLPAGHKCSRLHGHTYTVTVELAAQSLVPPGFVTDFGDLALFAAYLDEQLDHRLLNEVLDGEPTSELLARYLGEWFIANVEPGLPANLRAVTVSESPTSWGRWEVER

SEQ ID NO: 23198 - protein, 290 aa, Nodularia sp.
  REGION 1..290: note = tr|A0A218Q0S0|A0A218Q0S0_9CYAN 6-pyruvoyl-tetrahydropterin synthase homolog OS=Nodularia sp. NIES-3585 OX=1973477 GN=NIES3585_14740 PE=4 SV=1
MQCIVNRRAQFSASHRYFFPELSEAENTEKFGACSRFPGHGHNYVLFISLAGELDKYGMVLNLSDVKHVIKQEVTSQLDFSYLNDVWAEFQETLPTTENIARVIWQRLVPHLPLVRVQLFEHPELWADYIGDGMEAYLSISTHFSAAHRLAHPQLSNEENAEIYGKCARPHGHGHNYHLEVTVKGEIDPRTGMIVDLGALNQAVEDYVLEAFDHTFLNKDIPFFAEVVPTAENIALYISNLLRSPIQELGGTLYKIKLIESPNNSCEIYCTESDTTTVSVAQPEPVLARV

SEQ ID NO: 23199 - protein, 288 aa, Nodularia spumigena
  REGION 1..288: note = tr|A0ZKC4|A0ZKC4_NODSP 6-pyruvoyl tetrahydrobiopterin synthase OS=Nodularia spumigena CCY9414 OX=313624 GN=NSP_8980 PE=4 SV=1
MQCIVNRRAQFSASHRYFLPELSEAENTEKFGACSRFPGHGHNYVLFISLAGELDKYGMVLNLSDVKHVIKHEVTSQLDYSYLNDVWAEFQETLPTTENIARVIWQRLVPHLPLVRVQLFEHPELWADYIGDDMEAYLSISTHFSAAHRLAHPQLSNEENSQIYGKCARPHGHGHNYHLEVTVKGKIDPRTGMIVDLGALNQAIEDYVLEAFDHTFLNKDIPFFAEVVPTAENIALYISNLLRSPIQELGGTLHKIKLIESPNNSCEIYCTESDANTVSAVKSEPVLV

SEQ ID NO: 23200 - protein, 150 aa, Nodularia spumigena
  REGION 1..150: note = tr|A0A166ITM5|A0A166ITM5_NODSP 6-carboxy-5,6,7,8-tetrahydropterin synthase OS=Nodularia spumigena CENA596 OX=1819295 GN=A2T98_16010 PE=4 SV=1
MISNKEKDEKPQITRAKSNLETWIIGKEFRFEASHQLPNHDGKCARLHGHSWRCVIYVAGDKLINTGAKQDMIMDYEEIKKYVKPLLDNYLDHYHLNETTGIANPTSEAIAKWIYEQLEDQISGLVAVRIDETCTSQCVYSKKTGNFLLL

SEQ ID NO: 23201 - protein, 149 aa, Nonlabens agnitus
  REGION 1..149: note = tr|A0A2S9WVQ5|A0A2S9WVQ5_9FLAO 6-carboxytetrahydropterin synthase QueD OS=Nonlabens agnitus OX=870484 GN=BST86_10830 PE=4 SV=1
MGTVRITKEFTFETGHALYGYDGKCRNVHGHSYKLAVTVIGQPIMDADHVKYGMVIDFGDLKKIVKEEIVDPFDHATVFNKNSPHVELAKELENRGHEVILADYQPTSEMMIQDFAKKIAGRLPDNIKLFSLRLRETETSYAEWFASDN

SEQ ID NO: 23202 - protein, 136 aa, Nonlabens agnitus
  REGION 1..136: note = tr|A0A2S9WUV5|A0A2S9WUV5_9FLAO 6-carboxy-5,6,7,8-tetrahydropterin synthase OS=Nonlabens agnitus OX=870484 GN=BST86_09140 PE=3 SV=1
MRITAYRKAHFNAAHRLYRKDWDDQKNLEVFGKCSNPHYHGHNYDLEVGVSGTVDPETGFLIDLKILKDIIKEHVEDALDHKNLNEQVAEFKNLNPTAENIAYVIYNKIKEQLDPKYDLEVKLYETPRNFVVYRGE

SEQ ID NO: 23203 - protein, 136 aa, unidentified
  source 1..136: note = Nonlabens arenilitoris
  REGION 1..136: note = tr|A0A2S7UAP8|A0A2S7UAP8_9FLAO 6-carboxy-5,6,7,8-tetrahydropterin synthase OS=Nonlabens arenilitoris OX=1217969 GN=BST92_08500 PE=3 SV=1
MRITAYRKAHFNAAHRLHRPDWSDQKNAAIFGKCNNPNFHGHNYDLEVGVTGDVDPETGYLIDLKILKDVIKSEVEEAFDHKNLNIEVPDFKTLNPTAENIAYVIYNKIKAKLDSKYDIEIKLYETERNFVVYKGE

SEQ ID NO: 23204 - protein, 136 aa, unidentified
  source 1..136: note = Nonlabens dokdonensis
  REGION 1..136: note = tr|A0A1Z8B9D6|A0A1Z8B9D6_9FLAO 6-carboxy-5,6,7,8-tetrahydropterin synthase OS=Nonlabens dokdonensis OX=328515 GN=A9Q93_02630 PE=3 SV=1
MRLTAYRKAHFNAAHRLHRKDWSDEKNEKIFGKCNNPHFHGHNYDLEVGVTGEVDPETGYLIDLKILKDIIKDEVEDAFDHKNLNEQVPEFANLNPTAENIAYVIYNKIKAQLDPKYDLEIKLFETERNFVVYRGE

SEQ ID NO: 23205 - protein, 136 aa, unidentified
  source 1..136: note = Nonlabens dokdonensis
  REGION 1..136: note = tr|L7WAR8|L7WAR8_NONDD 6-carboxy-5,6,7,8-tetrahydropterin synthase OS=Nonlabens dokdonensis (strain DSM 17205 / KCTC 12402 / DSW-6); OX = 592029 GN=DDD_2087 PE=3 SV=1
MRLTAYRKAHFNAAHRLHREDWSDEKNQQIFGKCNNPHFHGHNYDLEVGVTGEVDPETGYLIDLKILKDIIKEEVEDAFDHKNLNKQVPEFANLNPTAENIAFVIYNKVKAKLDPKYDLEIKLFETERNFVVYRGE

SEQ ID NO: 23206 - protein, 120 aa, unidentified
  source 1..120: note = Nonlabens marinus
  REGION 1..120: note = tr|W8VQ74|W8VQ74_9FLAO 6-pyruvoyl tetrahydrobiopterin synthase OS=Nonlabens marinus S1-08; OX = 1454201 GN=NMS_1485 PE=4 SV=1
MYRKDWSDYKNAQIFGKCSNPHYHGHNYELEVGVTGEVDPETGFLIDLKILKDIIKEHVEDVLDHKNLNEEVEEFKDLNPTAEHIAFVIYQKIKKHLDPKYDLEIKLYETPRNFVVYTGS

SEQ ID NO: 23207 - protein, 150 aa, unidentified
  source 1..150: note = Nonlabens marinus
  REGION 1..150: note = tr|W8VWB5|W8VWB5_9FLAO Queuosine biosynthesis QueD, PTPS-I OS=Nonlabens marinus S1-08 OX=1454201 GN=NMS_0608; PE = 4 SV=1
MGTVRITKEFTFETGHALHGYDGKCRNVHGHSYKLAVTVIGEPIMDSNHVKFGMVIDFGDLKKIVKEEIVDPFDHATVFNKNSPHVELAKELESRGHEVILADYQPTSEMMIQDFAKKIADRLPNNIKLFSLRLRETETSYAEWFASDNG

SEQ ID NO: 23208 - protein, 136 aa, unidentified
  source 1..136: note = Nonlabens sediminis
  REGION 1..136: note = tr|A0A090PZJ6|A0A090PZJ6_9FLAO 6-carboxy-5,6,7,8-tetrahydropterin synthase OS=Nonlabens sediminis OX=319236 GN=JCM19294_1708 PE=3 SV=1
MRLTAYRKAHFNAAHRLFRPDWSSEQNESIFGKCSNPHFHGHNYELEVGVTGEVDPETGYLIDLKILKDIIKEQVEDAFDHKNLNEEVPEFKTLIPTAEHIAYVIYQKIKPKLDPKYDLSIKLYETPRNFVVYSGD

SEQ ID NO: 23209 - protein, 149 aa, unidentified
  source 1..149: note = Nonlabens sediminis
  REGION 1..149: note = tr|A0A090Q278|A0A090Q278_9FLAO 6-carboxy-5,6,7,8-tetrahydropterin synthase OS=Nonlabens sediminis OX=319236 GN=JCM19294_2605 PE=3 SV=1
MKKVRITKEFTFETGHALYGYDGKCRNVHGHSYKLAVTVIGTPKDELGHVKHGMVIDFGDLKKIVKEEIVDPFDHATVFNKNTPHVELAKELSDRGHEVILVDYQPTSEMMILDFADKIKARLPQEIQLHSLRLRETETSYAEWHAADQ

SEQ ID NO: 23210 - protein, 136 aa, Nonlabens sp.
  REGION 1..136: note = tr|A0A2K8X5W5|A0A2K8X5W5_9FLAO 6-carboxy-5,6,7,8-tetrahydropterin synthase OS=Nonlabens sp. MB-3u-79 OX=2058134 GN=CW736_01685 PE=3 SV=1
MRLTAYRKAHFNAAHRLHRKDWSDEKNAQIFGLCNNPYFHGHNYDLEVGVTGEVDPETGYLIDLKILKDIIKEEVENAFDHKNLNEQVPEFANLNPTAENIAFVIYNKIKAKLDPKYDLEIKLFETERNFVVYRGE

SEQ ID NO: 23211 - protein, 149 aa, Nonlabens sp.
  REGION 1..149: note = tr|A0A2K8X758|A0A2K8X758_9FLAO 6-carboxy-5,6,7,8-tetrahydropterin synthase OS=Nonlabens sp. MB-3u-79 OX=2058134 GN=CW736_04815 PE=3 SV=1
MRKVRITKEFTFETGHALYGYDGKCRNVHGHSYKLAVTVIGTPIDELGHVKHGMVIDFGDLKKIIKEEIVDPFDHATVFNKNTPHVELAKELSDRGHDVILVDYQPTSEMMIIDFADKIQKRLPATIALHHLRLRETETSYAEWHAGDQ

SEQ ID NO: 23212 - protein, 136 aa, unidentified
  source 1..136: note = Nonlabens spongiae
  REGION 1..136: note = tr|A0A1W6MG79|A0A1W6MG79_9FLAO 6-carboxy-5,6,7,8-tetrahydropterin synthase OS=Nonlabens spongiae OX=331648 GN=BST97_00505 PE=3 SV=1
MRLTAYRKAHFNAAHRLYRKNWSDEKNEEVFGKCSNPHFHGHNYDLEVGVTGEVDPETGYLIDLKILKDIIRDEVEDYMDHKNLNEEVPEFATMIPTAEHIAYVIYNRIKAKLEDRFELEIKLYETPRNFVVYKGG

SEQ ID NO: 23213 - protein, 150 aa, unidentified
  source 1..150: note = Nonlabens spongiae
  REGION 1..150: note = tr|A0A1W6MME7|A0A1W6MME7_9FLAO 6-carboxytetrahydropterin synthase QueD OS=Nonlabens spongiae OX=331648 GN=BST97_12080 PE=4 SV=1
MKKVRITKEFTFETGHALHGYDGKCRNVHGHSYKLAVTVIGTPISDTNNVKLGMVIDFGDLKKIVKEEIVDPFDHATVFNKNTPHVELAEELRGRGHDVILADYQPTSEMMILDFAEKIKSRLPEHLELFSLRLRETETSYAEWHASDQA

SEQ ID NO: 23214 - protein, 149 aa, Nonlabens tegetincola; identical to SEQ ID NO: 23209
  REGION 1..149: note = tr|A0A2S7TFN7|A0A2S7TFN7_9FLAO 6-carboxy-5,6,7,8-tetrahydropterin synthase OS=Nonlabens tegetincola OX=323273 GN=BST93_01325 PE=3 SV=1

SEQ ID NO: 23215 - protein, 136 aa, Nonlabens tegetincola; identical to SEQ ID NO: 23208
  REGION 1..136: note = tr|A0A2S7T349|A0A2S7T349_9FLAO 6-carboxy-5,6,7,8-tetrahydropterin synthase OS=Nonlabens tegetincola OX=323273 GN=BST93_13785 PE=3 SV=1

SEQ ID NO: 23216 - protein, 150 aa, unidentified
  source 1..150: note = Nonlabens ulvanivorans
  REGION 1..150: note = tr|A0A090X268|A0A090X268_NONUL Queuosine biosynthesis QueD OS=Nonlabens ulvanivorans OX=906888; GN = JCM19275_3044 PE=4 SV=1
MKKVRITKEFTFETGHALYGYDGKCRNVHGHSYKLAVTVIGTPINDANNVKHGMVIDFTDLKKIVKEEIVDPFDHATVFNKNTPHVELAQELRERGHEVILADYQPTSEMMILDFADKIRNRLPENIELFSLRLRETETSYAEWHASDQG

SEQ ID NO: 23217 - protein, 150 aa, unidentified
  source 1..150: note = Nonlabens ulvanivorans
  REGION 1..150: note = tr|A0A081D7X8|A0A081D7X8_NONUL Queuosine biosynthesis QueD OS=Nonlabens ulvanivorans OX=906888; GN = JCM19296_602 PE=4 SV=1
MKKVRITKEFTFETGHALYGYDGKCRNVHGHSYKLAVTVIGTPINDANNVKHGMVIDFTDLKKIVKEEIVDPFDHATVFNKNTPHVELAQELRERGHEVILADYQPTSEMMILDFADKIRNRLPENIELFSLRLRETETSYAEWHASDQL

SEQ ID NO: 23218 - protein, 136 aa, unidentified
  source 1..136: note = Nonlabens xylanidelens
  REGION 1..136: note = tr|A0A2S6IH66|A0A2S6IH66_9FLAO 6-carboxy-5,6,7,8-tetrahydropterin synthase OS=Nonlabens xylanidelens OX=191564 GN=LY01_02331 PE=3 SV=1
MILTAYRKAHFNAAHRLYRKDWSDEKNAQVFGLCSNKHYHGHNYNIEVGVTGEVDPETGYLIDLKVLKDIIKEEVEDALDHKNLNEQVPEFASLNPTAENIAFVVYNKIKAKLDPKFDLEIKLYETERNFVVYKGL

SEQ ID NO: 23219 - protein, 150 aa, unidentified
  source 1..150: note = Nonlabens xylanidelens
  REGION 1..150: note = tr|A0A2S6IQN9|A0A2S6IQN9_9FLAO 6-pyruvoyltetrahydropterin/6-carboxytetrahydropterin synthase OS=Nonlabens xylanidelens OX=191564 GN=LY01_00387; PE = 4 SV=1
MRKVRITKEFTFETGHALYGYDGKCRNVHGHSYKLAVTVIGTPIDELGHVKHGMVIDFGDLKKIIKEEIVDPFDHATVFNKNTPHVELAKELSDRGHDVILVDYQPTSEMMIIDFADKIKRRLPSNIALHTLRLRETETSYAEWHAADQV

SEQ ID NO: 23220 - protein, 149 aa, unidentified
  source 1..149: note = Nonomuraea fuscirosea
  REGION 1..149: note = tr|A0A2T0LXS4|A0A2T0LXS4_9ACTN 6-carboxy-5,6,7,8-tetrahydropterin synthase OS=Nonomuraea fuscirosea OX=1291556 GN=B0I32_13916 PE=3 SV=1
MTSPRPCPARVGSHPDLRDLRGAALTIGKTFTFEAAHRLNGLPDGHKCGRRHGHSYQVTVELTSTELVGPGFITDFGDLAPFAAYLAEHFDHCDLNEVLTVEPTSELLALHLARWFLDNVQPGIPGRLAAVTVSETSKTWARCTLGNAP

SEQ ID NO: 23221 - protein, 125 aa, unidentified
  source 1..125: note = Nonomuraea solani
  REGION 1..125: note = tr|A0A1H5T0K2|A0A1H5T0K2_9ACTN 6-carboxy-5,6,7,8-tetrahydropterin synthase OS=Nonomuraea solani OX=1144553 GN=SAMN05444920_10161 PE=3 SV=1
MSFRIGKRFTFEAAHQLSGLPGGHKCGRLHGHSYTVEVVLTATELSESGFVIDFANLDPIKRHLAEHFDHQPLNEAIDIEPTSENLARVLFEWCAKNVPLPATAAIEAVRVSETSATWAEYRPCH

SEQ ID NO: 23222 - protein, 119 aa, unidentified
  source 1..119: note = Nonomuraea solani
  REGION 1..119: note = tr|A0A1H6F129|A0A1H6F129_9ACTN 6-carboxy-5,6,7,8-tetrahydropterin synthase OS=Nonomuraea solani OX=1144553 GN=SAMN05444920_13280 PE=3 SV=1
MIEIFREFTFEAAHRLPNVPENHKCGRLHGHSYRVEVHVSGEVDPSAGWLIDFGEIKKVVKPLVERLDHYYLNEVEGLENPTSENLAKWIWDRLVGSLPISAIHVRETCTSGCVYRGES

SEQ ID NO: 23223 - protein, 118 aa, Nonomuraea sp.
  REGION 1..118: note = tr|A0A5C4UUW2|A0A5C4UUW2_9ACTN 6-carboxy-5,6,7,8-tetrahydropterin synthase OS=Nonomuraea sp. PA1-10 OX=2219224 GN=queD PE=3 SV=1
MEIFREFTFEAAHRLPNVPENHKCGRLHGHSYRVEVHVSGEVDPSAGWLIDFGEIKKVFNPLEERLDHYYLNEVEGLENPTSENLAKWIWDRLVGSLPISAIHVRETCTSGCVYRGES

SEQ ID NO: 23224 - protein, 164 aa, Nonomuraea sp.; identical to SEQ ID NO: 17026
  REGION 1..164: note = tr|A0A1V0A0F6|A0A1V0A0F6_9ACTN 6-pyruvoyl tetrahydrobiopterin synthase OS=Nonomuraea sp. ATCC 55076; OX = 1909395 GN=BKM31_21325 PE=4 SV=1

SEQ ID NO: 23225 - protein, 124 aa, unidentified
  source 1..124: note = Nosocomiicoccus massiliensis
  REGION 1..124: note = tr|A0A2J6NIG6|A0A2J6NIG6_9STAP 6-carboxy-5,6,7,8-tetrahydropterin synthase; OS = Nosocomiicoccus massiliensis OX=1232430 GN=queD PE=3; SV = 1
MFYNYEITKEFHFSASHQLDYLPEGHQCKRLHGHNYIVKVTLGSDELNDDGFVTDFGLLKPIKVFIDENLDHRHLNDVFDFKTTSENIAKFFYEKIKNELNMDNVVEVAVSETPKTSARYRELR

SEQ ID NO: 23226 - protein, 129 aa, unidentified
  source 1..129: note = Nostoc azollae
  REGION 1..129: note = tr|D7E5G6|D7E5G6_NOSA0 6-carboxy-5,6,7,8-tetrahydropterin synthase OS=Nostoc azollae (strain 0708) OX=551115 GN=Aazo_4074 PE=3 SV=1
MPQWKLLTEFTFDSAHYIKDYNGPCGRMHGHTYRVKIEAKSSQLNSSEYCPHPVMVADFRSLRWAKKDVTKGGLDHCVLNEVLPPEYETTAEMIAKYIYAETKKRLPQDVKLKVAVSETPNSWAEYEDD

SEQ ID NO: 23227 - protein, 421 aa, unidentified
  source 1..421: note = Nostoc azollae
  REGION 1..421: note = tr|D7E4A6|D7E4A6_NOSA0 Uncharacterized protein; OS = Nostoc azollae (strain 0708) OX=551115 GN=Aazo_3791; PE = 4 SV=1
MQCVVNRRAQFLASHHYSLPELGETENLEKFGRSSKFPGQGHNYTLFISIAGELDKYGMVLNLSDVKQVIKREITDQLDFSYLNNVWPEFQQTLSSNENIARVIWQRLAPHLPLIRVQLVEHTGLWADYMGEGMQASLSISTHFSAAHRLASNLSSEKYSKCSRTHGHNYHLEVTVEGEMDSRTGMIIDLDALNRVVENDVVKIFDHFCVNKDIPHFSEIVPTTENLVLYISNLLKSPIQKLGAKLSQVKLFESPQLWVDYQGNGTETFLTVKSEFSSAHRLAHPGLSLEKNTEIYGKCARVNGHGHNYQLEVTVKGEIDSSTGMVVDLGALNQVIANLTEPLDHSFLNRDVPYFGEVVPTAENIALYISNMLRLPIQELGAELYKVKLVESPNNSCEIYPSDIESTSVITVQNQPVLATV

SEQ ID NO: 23228 - protein, 422 aa, Nostoc calcicola
  REGION 1..422: note = tr|A0A1U7I3H0|A0A1U7I3H0_9NOSO 6-pyruvoyl tetrahydropterin synthase OS=Nostoc calcicola FACHB-389; OX = 1357508 GN=FACHB389_23370 PE=4 SV=1
MKCIINRRAQFSASHRYWLPELSETENIEKFGARSKFPGQGHNYVLLISLGGEVDEYGMVLNLSDVKHVIKREVTNQLDFSYLNDVWADFQETLPTTENIARIIWQRLAPHLPLVRVQLFEHSQLWADYTGEGMEAYLTISTHFSAAHRLAPNISPEKYGKCTRTHGHNYHLEITVKGKIDPRTGMIVDVDALKRVVEDYAVEPLDHSCLNKDIPYFAEIVPTTENISLYINSLLASPIQKLGVELDKVRLFESHELWADYAKNGTETYFTVSTYFSAAHRLADPNLSQEKNTEIYGKCARPNGHGHNYYLEVTVKGEIDPTTGMIVDLGALNQIVKDYVVERFDHTFINEDVPYFAEVVPTSENIALYISNLLRSPIQELGSELYKVKLFESPNNSCEIYCTESDSNSVSAAVNQQILAGV

SEQ ID NO: 23229 - protein, 128 aa, unidentified; identical to SEQ ID NO: 17729
  source 1..128: note = Nostoc carneum
  REGION 1..128: note = tr|A0A1Z4HF21|A0A1Z4HF21_9NOSO 6-carboxy-5,6,7,8-tetrahydropterin synthase OS=Nostoc carneum NIES-2107 OX=1973483 GN=NIES2107_01540 PE=3 SV=1

SEQ ID NO: 23230 - protein, 290 aa, unidentified
  source 1..290: note = Nostoc carneum
  REGION 1..290: note = tr|A0A1Z4HVI3|A0A1Z4HVI3_9NOSO Putative 6-pyruvoyl tetrahydropterin synthase OS=Nostoc carneum NIES-2107; OX = 1973483 GN=NIES2107_54820 PE=4 SV=1
MQCIVNRRAQFSASHRYWLPELSEAENTQQFGACSRFPGHGHNYVLFISLIGELDEYGMVLNLSDVKQVIKREVTSQLDFSYLNDVWPDFQETLPTTENIARVIWQRLAPHLPLVRVQLFEHPELWADYMGNSMEAYLTISTHFSAAHRLAHPNLSNEENAEIYGKCARTNGHGHNYHLEVTVKGEIDQRTGMIVDLGALNQVIEDYVVEPFDHTFLNKDIPYFAEVVPTAENIALYISNLLRSPVQKLGAKLHKVKLIESPNNSCEIYCTDAESNSVSANANQPMLARV

SEQ ID NO: 23231 - protein, 290 aa, Nostoc commune
  REGION 1..290: note = tr|A0A2R5FS23|A0A2R5FS23_NOSCO Putative 6-pyruvoyl tetrahydropterin synthase OS=Nostoc commune NIES-4072; OX = 2005467 GN=NIES4072_52370 PE=4 SV=1
MQCIVNRRAQFSASHRYWLPELSEAENIEKFGACSRFPGHGHNYVLFISLTGELDEYGMVLNLSDVKHVIKREVTSQLDFSYLNDAWAEFQQTLPTTENIARIIWQRLAPHLPLVRVQLFEHPELWADYMGNAMEAYLTISTHFSAAHRLAHPNLSNEENTEIYGKCARPHGHGHNYHLEVTVKGEIDPRTGMLVDLGALNQVIDDYVVEPFDHTFLNKDIPYFAEVVPTAENIALYISNLLRSPIQELGAKLYKVKLIESPNNSCEIYCTESESNSVSATGNQPVLASV

SEQ ID NO: 23232 - protein, 128 aa, unidentified; identical to SEQ ID NO: 17440
  source 1..128: note = Nostoc cycadae
  REGION 1..128: note = tr|A0A2H6LCQ4|A0A2H6LCQ4_9NOSO 6-carboxy-5,6,7,8-tetrahydropterin synthase OS=Nostoc cycadae WK-1 OX=1861711 GN=NCWK1_0699 PE=3 SV=1

SEQ ID NO: 23233 - protein, 290 aa, unidentified
  source 1..290: note = Nostoc cycadae
  REGION 1..290: note = tr|A0A2H6LQT1|A0A2H6LQT1_9NOSO 6-pyruvoyl-tetrahydropterin synthase OS=Nostoc cycadae WK-1 OX=1861711 GN=NCWK1_5332 PE=4 SV=1
MQCIVNRRAQFSASHRYWLPELSEAENFEKFGAGSKFPGHGHNYVLFISLAGELDKYGMVLNLSDVKQVIKREVTSVLDFSYLNDIWAEFQETLPTTENIARVIWRRLAPHLPVVRVQLFEHPELWADYMGNSMEAYLSISTHFSAAHRLAHPDLSLEDNTEIYGKCARTNGHGHNYHLEVTVKGEIDQRTGMIVDLGALHQAIADYVVEPFDHTFLNKDVPYFAEVVPTAENIALYISNLLRSPIQNLGAQLYKIKLIESPNNSCEIYCTDTDSNSMSAVDSQPVLARL

SEQ ID NO: 23234 - protein, 288 aa, unidentified
  source 1..288: note = Nostoc flagelliforme
  REGION 1..288: note = tr|A0A2K8SYB4|A0A2K8SYB4_9NOSO QueD, 6-pyruvoyltetrahydropterin/6-carboxytetrahydropterin synthase OS=Nostoc flagelliforme CCNUN1 OX=2038116; GN = COO91_06379 PE=4 SV=1
MQCIVNRRAQFSASHRYWLPELSEAENIEKFGACSRFPGHGHNYVLFISLAGELDEYGMVLNLSDVKHVIKREVTSQLDFSYLNDAWAEFQQTLPTTENIARIIWQRLAPHLPLVRVQLFEHPELWADYTGNAMEAYLTISTHFSAAHRLAHPKLSNEENTEIYGKCARPHGHGHNYHLEVTVKGEIDSRTGMIVDLGALNQVIEDYVVEPFDHTFLNKDIPYFVEVVPTAENIALYISNLLRSPIQELGAKLYKVKLIESPNNSCEIYCTESNSVSAAGNQPVLASV

SEQ ID NO: 23235 - protein, 422 aa, unidentified
  source 1..422: note = Nostoc linckia
  REGION 1..422: note = tr|A0A1Z4L975|A0A1Z4L975_NOSLI Uncharacterized protein OS=Nostoc linckia NIES-25 OX=1091006; GN = NIES25_42460 PE=4 SV=1
MKCIINRRAQFSASHRYWLPELSEAENIEKFGVRAKFPGQGHNYVLSISLGGEVDEYGMVLNLSDVKHVIKREVTNQLDFSYLNDVWADFQETLPTTENIARVIWQRLAPHLPVVGVQLLENSQLWADYTGEGMEAYVTISTHFSAAHRLAPNISPEKYGKCTRTHGHNYHLEVTVKGKIDPRTGAIVDVDALKRVVEDYAVEPLDHSCLNKDIPYFAEIVPTTENISLYINHLLSSPIEELGVELHKVRLFESHELWADYAKNGTETNFTVSTYFSAAHRLADPNLSQEKNTEIYGKCARPHGHGHNYYLEITVKGDIDPTTGMIVDLGGLNQIIKNDVIEQFDHTFINEDIPYFAKVVPTSENIALYISNLLRSPIQELGAELYKVKLFESPNNSCEIYCTESDSNSISAAVSQPVLAEV

SEQ ID NO: 23236 - protein, 289 aa, unidentified
  source 1..289: note = Nostoc linckia
  REGION 1..289: note = tr|A0A2C6TZW2|A0A2C6TZW2_NOSLI 6-pyruvoyl tetrahydropterin synthase OS=Nostoc linckia z16 OX=1628751; GN = VF13_06980 PE=4 SV=1
MEAYLTISTHFSAAHRLAPNISPEKYGKCTRTHGHNYHLEITVKGKIDPRTGAIVDVDALKRVVEDYAVEPLDHSCLNKDIPYFAEIVPTTENISLYIHHLLTSPIEKLGVELHKVRLFESHELWADYAKNGTETHFTVSTYFSAAHRLADPNLSQEKNAQIYGKCARPHGHGHNYYLEVTVKGEIDSTTGMIVDLGGLNQIIKNDVVELFDHTFINEDIPYFAEVVPTSENIALYISNILRSPIQELGSELYKVKLFESPNNSCEIYCNESDVNSISATVSELVLAEV

SEQ ID NO: 23237 - protein, 290 aa, Nostoc minutum
  REGION 1..290: note = tr|A0A367S3P0|A0A367S3P0_9NOSO 6-pyruvoyl tetrahydropterin synthase OS=Nostoc minutum NIES-26; OX = 1844469 GN=A6770_07080 PE=4 SV=1
MQCIVNRRAQFSASHRYWLSELSEAENIEKFGACSRFPGHGHNYVLFISIAGELDKYGMVLNLSDVKQVIKREVTSQLDFSYLNDVWAEFQETLPTTENIARVIWQRLAPHLPLVRVQLFEHPELWADYMGNAMEAYLTISTHFSAAHRLAHPDLSNEENTEIYGKCARPHGHGHNYHLEVTVKGEIDPRTGMIVDLGALNQVIEDYVVEPFDHTFLNKDIPHFAKVVPTAENIALYISNLLRSPIQELGAKLYKVKLIESPNNSCEIYCTESESNSVNAAASQPILARV

SEQ ID NO: 23238 - protein, 290 aa, unidentified
  source 1..290: note = Nostoc piscinale
  REGION 1..290: note = tr|A0A0M4T4I8|A0A0M4T4I8_9NOSO 6-pyruvoyl tetrahydropterin synthase OS=Nostoc piscinale CENA21; OX = 224013 GN=ACX27_22190 PE=4 SV=1
MQCIVNRRAQFSASHRYWLPELSEAENFEKFGAGSKFPGHGHNYVLFISLAGELDKYGMVLNLSDVKQVIKREVTSLLDFSYLNDVWAEFQETLPTTENIARVIWRRLAPHLPVVRVQLFEHPELWADYMGNSMEAYLSISTHFSAAHRLAHPDLSLEDNTEIYGKCARTNGHGHNYHLEVTVKGEIDQRTGMIVDLGALQKAIADYVVEPFDHTFLNKDVPYFAEVVPTAENIALYISNLLRSPIQNLGAKLYKVKLIESPNNSCEIYCTDTESDAVGAVDSQPVLVRL

SEQ ID NO: 23239 - protein, 128 aa, unidentified
  source 1..128: note = Nostoc piscinale
  REGION 1..128: note = tr|A0A0M4T7Q4|A0A0M4T7Q4_9NOSO 6-carboxy-5,6,7,8-tetrahydropterin synthase OS=Nostoc piscinale CENA21 OX=224013 GN=ACX27_25855 PE=3 SV=1
MPKWKVVTEFSFNSAHYIKDYDGPCGRMHGHNYQVRIEAISTQLHSSQFCPHPVMVADFRTLRWAKQDVTKGGLDHCILNEVMPPEYETTAEMIAKYIYDETKKRVPPNVQLKVHISETPNSWVEYEE

SEQ ID NO: 23240 - protein, 290 aa, unidentified
  source 1..290: note = Nostoc punctiforme
  REGION 1..290: note = tr|A0A367RRY8|A0A367RRY8_NOSPU 6-pyruvoyl tetrahydropterin synthase OS=Nostoc punctiforme NIES-2108; OX = 1356359 GN=A6769_05865 PE=4 SV=1
MPCIVNRRAQFSASHRYWLPELSEAENIEKFGAGTRFPGHGHNYVLFISLAGELDEYGMVLNLSDVKHVIKREVTSQLDFSYLNDVWAEFQQTLPTTENIARIIWQRLAPHLPLVRVQLFEHPELWADYMGNAMEAYLTISTHFSAAHRLAHPNLSNEENTEIYGKCARPNGHGHNYHLEVTVKGKIDPRTGMIIDLGALNQVVEDYVLEPFDHTFLNKDIPYFAEVVPTAENIALYISNLVRSPIEELGAKLYKVKLIESPNNSCEIYCTESESDSASAAVNQPVFAVI

SEQ ID NO: 23241 - protein, 290 aa, unidentified
  source 1..290: note = Nostoc punctiforme
  REGION 1..290: note = tr|B2IVF9|B2IVF9_NOSP7 Uncharacterized protein; OS = Nostoc punctiforme (strain ATCC 29133 / PCC 73102); OX = 63737 GN=Npun_F2811 PE=4 SV=1
MQCIVNRRAQFSASHRYWLPELSEAENIEKFGACSKFPGHGHNYVLFISLAGELDKYGMVLNLSDVKHVIKREVTSQLDFSYINDAWTEFQQTLPTTENIARIIWQRLAPHLPLVRVQLFEHPELWADYIGNAMEAYLTISTHFSAAHRLAHPHLSNEENTEIYGKCARPHGHGHNYHLEVTVKGEIDPRTGMIVDLGGLNQVIEDYVVEPFDHTFLNKDIPYFAEIVPTAENIALYISNLLRSPIQELGAKLHKVKLIESPNNSCEIYCTESESDSVSASVNQPVLARV

SEQ ID NO: 23242 - protein, 290 aa, Nostoc sp.
  REGION 1..290: note = tr|A0A2D0HGG6|A0A2D0HGG6_9NOSO 6-pyruvoyl tetrahydropterin synthase OS=Nostoc sp. 'Peltigera malacea cyanobiont' DB3992 OX=1206980 GN=CK516_20010 PE=4 SV=1
MPCIVNRRAQFSASHRYWLPELSEAENIEKFGAGSRFPGHGHNYVLFISLAGELDEYGMVLNLSDVKHVIKREVTSQLDFSYLNDVWAEFQQTLPTTENIARIIWQRLAPHLPLVRVQLFEHPELWADYMGNAMEAYLTISTHFSAAHRLAHPKLSNEENTEIYGKCARPNGHGHNYHLEVTVKGKIDPRTGMIIDLGALNQVVEDYVLEPFDHTFLNKDIPYFAEVVPTAENIALYISNLLRSPIQELGAKLYKVKLIESPNNSCEIYCTESESDSASAAVNQPVLAGV

SEQ ID NO: 23243 - protein, 128 aa, Nostoc sp.
  REGION 1..128: note = tr|A0A1C0V4G8|A0A1C0V4G8_9NOSO 6-carboxy-5,6,7,8-tetrahydropterin synthase OS=Nostoc sp. MBR 210 OX=1881015 GN=BCD64_08040 PE=3 SV=1
MPKWKVVTEFSFNSAHYIKDYDGPCGRMHGHNYQVRIEAISTQLHSSQFCPHPVMVADFRTLRWAKQDVTKGGLDHCILNEVMPAEYETTAEMIAKYIYDETKKRVPPNVQLKVHVSETPNSWVEYEE

SEQ ID NO: 23244 - protein, 290 aa, unidentified
  source 1..290: note = Nostocales cyanobacterium
  REGION 1..290: note = tr|A0A1Y0RF26|A0A1Y0RF26_9CYAN 6-pyruvoyl tetrahydropterin synthase OS=Nostocales cyanobacterium HT-58-2 OX=1940762 GN=BZZ01_02515 PE=4 SV=1
MQCIVNRRAQFSASHRYWLPELSEAENIEKFGSCSKFPGHGHNYVLFVSLIGDLDEYGMVLNLSDVKHVIKQEVTSQLDFSYLNDVWVDFQQTLPTTENIARVIWQRLAPHLPLVRIQLFEHPELWADYLGNGMEAYLTLSTHFSAAHRLAHPRLSNEENFKIYGKCARPNGHGHNYHLEVTVKGEIDPRTGMLVDLGALNKVIEDYVVEPFDHTFLNKDIPYFAEVVPTAENIALHISQLLRSPIQQLGAKLYKVKLIESPNNSCEIYCNESESNSVNPAQNEPMLVRV

SEQ ID NO: 23245 - protein, 129 aa, unidentified
  source 1..129: note = Nostocales cyanobacterium
  REGION 1..129: note = tr|A0A1Y0RJH0|A0A1Y0RJH0_9CYAN 6-carboxy-5,6,7,8-tetrahydropterin synthase OS=Nostocales cyanobacterium HT-58-2 OX=1940762 GN=BZZ01_17605 PE=3 SV=1
MPKWKLVTEFTFDSAHYIKDYDGPCGRMHGHTYKVRIEAISFKLHSSKYCPHPVMVADFRTLRWAKQDVTKGGLDHSVLNDVLPVEYETTAEMIAKYIYDETKKQLPSDVQLKVAVSETPNSWVEYEDD

SEQ ID NO: 23246 - protein, 177 aa, unidentified
  source 1..177: note = Notoacmeibacter marinus
  REGION 1..177: note = tr|A0A231UXI4|A0A231UXI4_9RHIZ 6-pyruvoyl tetrahydropterin synthase OS=Notoacmeibacter marinus; OX = 1876515 GN=B7H23_11225 PE=4 SV=1
MTNAYRIARRIGIDAGHRIRLHGSKCRNLHGHRYTIEAVCEAEHLAHDGEQAGMVLDFSFLKDEMMGEIDAPCDHGFIAEIADSECLAMFAPGGVSVENFIHALRESVEKDGFAATTKTTLGTKLYVIGAPPTAENLARHWFERLAPRIAERSEGRARLAKVVVWETPNCAAEWPAT

SEQ ID NO: 23247 - protein, 177 aa, unidentified
  source 1..177: note = Notoacmeibacter sp.
  REGION 1..177: note = tr|A0A3L7JDK9|A0A3L7JDK9_9RHIZ 6-carboxytetrahydropterin synthase OS=Notoacmeibacter sp. M2BS9Y-3-1 OX=2448481 GN=D8780_09455 PE=4 SV=1
MTNAYRITRRIGIDAGHRIRLHGSKCRNLHGHRYTIEAVCEAHELAGSGEQAGMVLDFGFLKDEMMAEIDSPCDHGFIAEAADQDLLTMFAPKSEDAGAFIDTLRQAVEKQGFAQTVETALGTKLYVIGPPPTAENLARHWFERLASRVEKRSEGRARLVKLVVWETPNCSAEWPAN

SEQ ID NO: 23248 - protein, 148 aa, unidentified
  source 1..148: note = Noviherbaspirillum autotrophicum
  REGION 1..148: note = tr|A0A0C2BMS5|A0A0C2BMS5_9BURK 6-carboxy-5,6,7,8-tetrahydropterin synthase; OS = Noviherbaspirillum autotrophicum OX=709839; GN = TSA66_19865 PE=4 SV=1
MLTITRKLEFDAGHRIPDHKSQCRNLHGHRYTLEITLIGAVIREEGSSDNGMIMDFSDVKSLAKQHLVDVWDHAFLVYEKDATLREFLDSLPGHKTVVIDSIPTVENLAQTAFNILRAAYQDHYGTGLRLHKLVLHETPNCWAEITAD

SEQ ID NO: 23249 - protein, 149 aa, unidentified
  source 1..149: note = Noviherbaspirillum denitrificans
  REGION 1..149: note = tr|A0A254TI31|A0A254TI31_9BURK 6-carboxy-5,6,7,8-tetrahydropterin synthase; OS = Noviherbaspirillum denitrificans OX=1968433; GN = AYR66_24385 PE=4 SV=1
MLTITRKLEFDAGHRIPDHKSQCRNLHGHRYTLEITLVGDIIQQEGSSDNGMIMDFSDVKAIAKETLVDVWDHAFLAYAKDTAVREFLESIPGHKTVIIDSIPTVENLARTAFNILHAAYKDRYGTGLHLHKLVLHETPNCWAEITADN

SEQ ID NO: 23250 - protein, 148 aa, unidentified
  source 1..148: note = Noviherbaspirillum humi
  REGION 1..148: note = tr|A0A239H9T8|A0A239H9T8_9BURK 6-carboxy-5,6,7,8-tetrahydropterin synthase; OS = Noviherbaspirillum humi OX=1688639; GN = SAMN06265795_106138 PE=3 SV=1
MLTITRKLEFDAGHRIPDHKSQCRNLHGHRYVLEITLTGEVVDQDGESDNGMIMDFSDVKTLAKQHLVDVWDHAFLVYEKDAPVREFLASMPDHKTVVVPRVPTVENLAVTAFDILKPAFEQRFGRALRLKRVKLYETPNCWAEATDD

SEQ ID NO: 23251 - protein, 147 aa, unidentified
  source 1..147: note = Noviherbaspirillum sp.
  REGION 1..147: note = tr|A0A3A3GIX9|A0A3A3GIX9_9BURK 6-carboxy-5,6,7,8-tetrahydropterin synthase; OS = Noviherbaspirillum sp. K1S02-23 OX=2320865 GN=queD PE=3; SV = 1
MLTITRKLEFDAGHRIPDHKSQCRNLHGHRYTLEITLMGEIIREEGSSDQGMIMDFSDVKALAKQHLVDVWDHAFLVYAKDEKVREFLQSLPGHKTVVIDSIPTVENLAQTAFDILKAAYQDHYGTGLRLHKLVLHETPNCWAEITE

SEQ ID NO: 23252 - protein, 148 aa, unidentified
  source 1..148: note = Noviherbaspirillum sp.
  REGION 1..148: note = tr|A0A5B8N3J5|A0A5B8N3J5_9BURK 6-carboxytetrahydropterin synthase QueD; OS = Noviherbaspirillum sp. UKPF54 OX=2601898 GN=queD PE=4; SV = 1
MLTITRKLEFDAGHRIPDHKSQCRNLHGHRYTLEITLIGAVITEEGSSDNGMIMDFSDVKSLAKQHLVDVWDHAFLVYEKDTALREFLDSLPGHKTVVIGSIPTVENLAQTAFNILKAAYQDRYGTGLRLHKLVLHETPNCWAEITAD

SEQ ID NO: 23253 - protein, 149 aa, unidentified
  source 1..149: note = Novimethylophilus kurashikiensis
  REGION 1..149: note = tr|A0A2R5F7S0|A0A2R5F7S0_9PROT 6-carboxy-5,6,7,8-tetrahydropterin synthase; OS = Novimethylophilus kurashikiensis OX=1825523 GN=queD; PE = 3 SV=1
MQITTRLEFDAGHRIPSHKSQCRNLHGHRYVIEITLSGDIIQNEGASEQGMVMDFSDVKAIARQQVVDKWDHAFLVYKGDTAVLDFLKTMPDHKTVVMNSVPTAENMAAEAFRILDASYKDTYGNHLRLERVRLFETPNSWADALRNAD

SEQ ID NO: 23254 - protein, 125 aa, Novosphingobium sp.
  REGION 1..125: note = tr|A0A0N0JHE3|A0A0N0JHE3_9SPHN 6-carboxy-5,6,7,8-tetrahydropterin synthase; OS = Novosphingobium sp. AAP1 OX=1523413 GN=IP65_09810 PE=3; SV = 1
MFELSKQFRFDAAHTLDRLIGTESSRRIHGHSYRAEVTVRGRPDPVSGMVIDLGFLERTIDDARDALDHRFLDEINDLGAATMENLSRWIWNRLSPAVDNLFRVSVYRDSSGDACFYYGPKEVDA

SEQ ID NO: 23255 - protein, 124 aa, Novosphingobium sp.
  REGION 1..124: note = tr|A0A258HZ89|A0A258HZ89_9SPHN 6-carboxy-5,6,7,8-tetrahydropterin synthase; OS = Novosphingobium sp. 32-60-15 OX=1970410 GN=B7Y89_10070; PE = 3 SV=1
MFELSKQFRFDAAHTLDRLIDTESSRRIHGHSYRAEVTVRGRPDPVTGMVVDLGLLERKMADARDALDHRFLDEVNDLGPATMENLSRWIWDRLSPEVGNLFKVSVYRDSSGEACSYWGEEITA

SEQ ID NO: 23256 - protein, 119 aa, Obesumbacterium proteus
  REGION 1..119: note = tr|A0A4Q9D5Z7|A0A4Q9D5Z7_9GAMM 6-carboxy-5,6,7,8-tetrahydropterin synthase; OS = Obesumbacterium proteus OX=82983 GN=queD PE=3 SV=1
MTTTLFKDFQFEAAHHLPHVPEGHKCGRLHGHSFLVRIEITGEVDAYTGWVMDFAELKAAFKPILDRLDHYYLNDIPGLENPTSEVLAQWIWQQLKPDLPLLSAVLVKETCTAGCTYRG

SEQ ID NO: 23257 - protein, 119 aa, Obesumbacterium proteus; identical to SEQ ID NO: 20943
  REGION 1..119: note = tr|A0A1B7KE07|A0A1B7KE07_9GAMM 6-carboxy-5,6,7,8-tetrahydropterin synthase; OS = Obesumbacterium proteus ATCC 12841 OX=1354268; GN = M993_02922 PE=3 SV=1

SEQ ID NO: 23258 - protein, 147 aa, unidentified
  source 1..147: note = Oblitimonas alkaliphila
  REGION 1..147: note = tr|A0A0K1XGJ2|A0A0K1XGJ2_9GAMM 6-carboxy-5,6,7,8-tetrahydropterin synthase OS=Oblitimonas alkaliphila OX=1697053 GN=AKN88_10795 PE=3 SV=1
MKIVKHFSFDSAHLLDCHDGKCQNLHGHTYQLEVEVQGPLIKSGPKAGMVLDFADLKQAVKQQIVDHLDHAFIYDVHSEKESTIAQLLQSWQMKTFAFKGRTTAEMLSQFIFDQLSTKLPISRIRLYETPSSYAECNSPSSKETSDD

SEQ ID NO: 23259 - protein, 122 aa, Oceanibaculum indicum
  REGION 1..122: note = tr|A0A420WID5|A0A420WID5_9PROT 6-carboxy-5,6,7,8-tetrahydropterin synthase; OS = Oceanibaculum indicum OX=526216 GN=BCL74_2625 PE=3 SV=1
MFELSKEFRFDAAHTLNRTIEAESSRRIHGHSYRAQVTVRGTPDPETGMIVDLGMLSRLMEDARQALDHHFLDEVEGLGPATMENLSAWIWRRLDGQVPGLACVTVLRDSSGETCRYFGPAA

SEQ ID NO: 23260 - protein, 134 aa, Oceanibaculum indicum
  REGION 1..134: note = tr|K2K0S6|K2K0S6_9PROT Uncharacterized protein; OS = Oceanibaculum indicum P24 OX=1207063 GN=P24_08504 PE=4; SV = 1
MFSVTVRDHFMIAHSFVGEVFGPAQALHGATYVVDVEFRRPKLDSDGIVVDIGRATDTLKAVLAEFNFKNLDEEEQFRGQNTTTEFMAKVVFDRMAARIAAGDLGAQAGGLTGMKVALHESHAAWAAYEGSLQA

SEQ ID NO: 23261 - protein, 134 aa, Oceanibaculum pacificum
  REGION 1..134: note = tr|A0A154WG67|A0A154WG67_9PROT 6-pyruvoyl tetrahydropterin synthase OS=Oceanibaculum pacificum; OX = 580166 GN=AUP43_16145 PE=4 SV=1
MFSVTVRDHFMIAHSFVGAVFGPAQALHGATYVVDLEFRRPQLDSDGIVVDIGRATEALKAVLAEFNFKNLDDEAQFRGQNTTTEFMAKVVFDRVAARIRAGDLGAQAGGLAGLKVTLHESHAAWAAYEGALPA

SEQ ID NO: 23262 - protein, 124 aa, Oceanicaulis sp.
  REGION 1..124: note = tr|A0A2T4ZT08|A0A2T4ZT08_9RHOB 6-carboxy-5,6,7,8-tetrahydropterin synthase; OS = Oceanicaulis sp. PT13A OX=2135616 GN=C7969_2179 PE=3; SV = 1
MADLHLEISKDFTFDAAHHFEHKDASHPFSRMHGHSFSGTVTLTGPRAAESGMVRDFWEIDAEINKIRDQLDHRLLNDVEGLEHPSLEAIAFWVFERLEKTLPGLIAVEIRRPSCGEKAVVRRG

SEQ ID NO: 23263 - protein, 124 aa, Oceanicaulis sp.
  REGION 1..124: note = tr|A0A2D9MMT8|A0A2D9MMT8_9RHOB 6-carboxy-5,6,7,8-tetrahydropterin synthase; OS = Oceanicaulis sp. OX=1924941 GN=CMH90_03030 PE=3 SV=1
MADLHLEISKDFTFDAAHHFEHKDASHPFSRMHGHSFAGTVTLTGPRAAESGMVRDFWEIDAEINKIRDQLDHRLLNDVEGLEHPSLEAIAFWVFERLEKTLPGLTAVEIRRPSCGEKAVVRRG

SEQ ID NO: 23264 - protein, 137 aa, unidentified
  source 1..137: note = Oceanicella actignis
  REGION 1..137: note = tr|A0A1M7SEG2|A0A1M7SEG2_9RHOB 6-pyruvoyl tetrahydropterin synthase OS=Oceanicella actignis; OX = 1189325 GN=SAMN05216200_102301 PE=4 SV=1
MTGQEASLYAVEVRDHVMIAHSLPDPLFGPAQKLHGATYVVDAAFMRPELTEQGVVVDIGRAREALRAALAPLDYGNLDELLPGRLTTTEYLCRHIYERLRDAARAGALGPGAEGLTRIRVTLSESHLARAWHEGPA

SEQ ID NO: 23265 - protein, 121 aa, unidentified
  source 1..121: note = Oceanicoccus sagamiensis
  REGION 1..121: note = tr|A0A1X9NBR2|A0A1X9NBR2_9GAMM 6-carboxy-5,6,7,8-tetrahydropterin synthase; OS = Oceanicoccus sagamiensis OX=716816 GN=BST96_15940 PE=3; SV = 1
MVAMEIYKEFTFEAAHRLPNVPEGHKCARLHGHSFYVRIYVDGPVDPDTGWVMDFYELKVAFKPILERLDHYYLNDIPGLENPTSENLSRWIWQALKPDLPLLSKLEVKETCTSGCIYTGP

SEQ ID NO: 23266 - protein, 165 aa, unidentified
  source 1..165: note = Oceanicoccus sagamiensis
  REGION 1..165: note = tr|A0A1X9NIC7|A0A1X9NIC7_9GAMM Uncharacterized protein OS=Oceanicoccus sagamiensis OX=716816; GN = BST96_14735 PE=4 SV=1
MESSNTVQIELDNQSLHFSCAHFTVFSAKSRERLHGHNFTVRARAWSSVGNNGLAFDYNELKTALRTICQRLDEYTLIPLYSPYLDIKEQGEYFSVSHNQQTMLLLQSDTLLLPVSNITLEELNGFIIEQLQSRSLFERLSIERFELSVSSGPGQRVKRELRVQP

SEQ ID NO: 23267 - protein, 149 aa, unidentified
  source 1..149: note = Oceanihabitans sediminis
  REGION 1..149: note = tr|A0A368P695|A0A368P695_9FLAO 6-carboxy-5,6,7,8-tetrahydropterin synthase; OS = Oceanihabitans sediminis OX=1812012 GN=DU428_03260 PE=3; SV = 1
MSKIRITKQFSFETGHALYGYDGKCKNVHGHSYKLSVTVIGTPISDKDNVKYGMVIDFGDLKKIVKNEIVDVFDHATVFNKNTPHIELAKELADRDHSVLLVDYQPTSEMMVIDFAEKIKKQLPSHISLFSLRLQETDSSFAEWFASDN

SEQ ID NO: 23268 - protein, 136 aa, unidentified
  source 1..136: note = Oceanihabitans sediminis
  REGION 1..136: note = tr|A0A368P5W1|A0A368P5W1_9FLAO 6-carboxy-5,6,7,8-tetrahydropterin synthase; OS = Oceanihabitans sediminis OX=1812012 GN=DU428_09550 PE=3; SV = 1
MKVTVSRRAHFNAAHRLYRKDWSDEKNTEVFGKCSNPNFHGHNYELIASVTGEINPETGYVIDIKDLKDIIKTEVEDAFDHKNLNVEVPEFKDLNPTAENIVVVIYNKIKKQLASHLELEVTLYETPRNFVSYSGI

SEQ ID NO: 23269 - protein, 118 aa, Oceanimonas baumannii
  REGION 1..118: note = tr|A0A235CL03|A0A235CL03_9GAMM 6-carboxy-5,6,7,8-tetrahydropterin synthase OS=Oceanimonas baumannii OX=129578 GN=queD PE=3 SV=1
MYTIKKEFHFSASHQLKQMPDWHPCARLHGHNYVVVIELQSEQLDQYGFVRDYLELKAFKEYIDDKLDHRHLNEVLGNECTTAERLARHLYDWASVRWPEVSAVAVSETPKTWAEFRP

SEQ ID NO: 23270 - protein, 118 aa, Oceanimonas doudoroffii
  REGION 1..118: note = tr|A0A233RF76|A0A233RF76_9GAMM 6-carboxy-5,6,7,8-tetrahydropterin synthase OS=Oceanimonas doudoroffii OX=84158 GN=queD PE=3 SV=1
MYTIKKEFHFSASHQLKQMPDWHPCARLHGHNYVVVIELQSERLDQYGFVRDYLELKAFKDYIDDQLDHRHLNEVLGDECTTAERLARHLYEWAREHWPEVSAVAVSETPKTWAEFRP

SEQ ID NO: 23271 - protein, 118 aa, Oceanimonas sp.
  REGION 1..118: note = tr|H2FX32|H2FX32_OCESG 6-carboxy-5,6,7,8-tetrahydropterin synthase OS=Oceanimonas sp. (strain GK1) OX=511062 GN=GU3_12045 PE=3 SV=1
MYTIKKEFHFSASHQLKQMPDWHPCARLHGHNYVVVIELQSETLDQYGFVRDYLELKAFKDYIDDRLDHRHLNEVLGDECTTAERLARHLYDWARERWPEVSAVLVSETPKTWAEYRP

SEQ ID NO: 23272 - protein, 118 aa, unidentified
  source 1..118: note = Oceanisphaera arctica
  REGION 1..118: note = tr|A0A2P5TQW6|A0A2P5TQW6_9GAMM 6-carboxy-5,6,7,8-tetrahydropterin synthase; OS = Oceanisphaera arctica OX=641510 GN=UN63_01355 PE=3 SV=1
MYTIKKEFHFSASHQLLQMPDWHPCARLHGHNYVVVIELQSETLDQYGFVRDYLELKAFKDYIDEQLDHRHLNEVLGDACTTAERLARHLFDWACARWPEVSAVSVSETPKTWAEYRP

SEQ ID NO: 23273 - protein, 118 aa, unidentified
  source 1..118: note = Oceanisphaera profunda
  REGION 1..118: note = tr|A0A1Y0D1Q1|A0A1Y0D1Q1_9GAMM 6-carboxy-5,6,7,8-tetrahydropterin synthase; OS = Oceanisphaera profunda OX=1416627 GN=CBP31_01380 PE=3; SV = 1
MYRIKKEFHFSASHQLKQMPDDHPCARLHGHNYIVVIELCSETLDEFGFVRDYHELKAFKNYLDDRFDHRHLNEVLGDECTTAERLARHLFDWARERWCEVSAVLVSETPKTWAEYRP

SEQ ID NO: 23274 - protein, 118 aa, unidentified
  source 1..118: note = Oceanisphaera psychrotolerans
  REGION 1..118: note = tr|A0A1J4QDR4|A0A1J4QDR4_9GAMM 6-carboxy-5,6,7,8-tetrahydropterin synthase; OS = Oceanisphaera psychrotolerans OX=1414654 GN=BFR47_17280; PE = 3 SV=1
MYTIKKEFHFSASHQLLQMPDWHPCARLHGHNYVVVIELQSEALDQYGFVRDYLELKPFKDYIDDTLDHRHLNEVLGDECTTAERLARHLFDWARARWPEVSAVLVSETPKTWAEYRP

SEQ ID NO: 23275 - protein, 144 aa, Oceanobacillus caeni; identical to SEQ ID NO: 17788
  REGION 1..144: note = tr|A0A0N0M766|A0A0N0M766_9BACI 6-carboxy-5,6,7,8-tetrahydropterin synthase; OS = Oceanobacillus caeni OX=405946 GN=AFL42_11830 PE=3 SV=1

SEQ ID NO: 23276 - protein, 147 aa, Oceanobacillus iheyensis
  REGION 1..147: note = tr|Q8EMN8|Q8EMN8_OCEIH 6-carboxy-5,6,7,8-tetrahydropterin synthase; OS = Oceanobacillus iheyensis (strain DSM 14371 / CIP 107618 / JCM 11309 / KCTC 3954 / HTE831) OX=22 1109 GN=OB2804; PE = 3 SV=1
MEMMQQIYPVTPHSYAYELNKDFQFSAAHYIPHDQAGKCQQMHGHTYFTNITVVGDELDETGFLVNFKQIKNLIHKRFDHGVINDDAAFSDEQAVDFPTTEVVARKIYEIIQEYLDGLQNKPKCIQVYLRETPTSYCIYRPKGGKSI

SEQ ID NO: 23277 - protein, 155 aa, Oceanobacillus oncorhynchi
  REGION 1..155: note = tr|A0A0A1MDZ4|A0A0A1MDZ4_9BACI 6-carboxy-5,6,7,8-tetrahydropterin synthase; OS = Oceanobacillus oncorhynchi OX=545501 GN=queD PE=4 SV=1
MFGFRIVEELQKLDKDIHRKELAYHQKRVMVSKEFSFDAAHHLHCYEGKCKNLHGHTYQVVFGISGFVDKVGFVIDFGDIKEIWKNKIETFLDHRYLNETLPKMNTTAENMVVWIFEQMEAAIQELPNQCQVEFVRLFETPTSYAEARREWMNHA

SEQ ID NO: 23278 - protein, 144 aa, Oceanobacillus profundus
  REGION 1..144: note = tr|A0A417YLK6|A0A417YLK6_9BACI 6-carboxy-5,6,7,8-tetrahydropterin synthase; OS = Oceanobacillus profundus OX=372463 GN=queD PE=3 SV=1
MMQQIYPVTEHPYAYELNKDFQFAAAHYVPHEDAGKCQNMHGHTYFTNVTIAGDELDHTGFLVDFKKIKDLIHKRFDHRMMNEDTKFSDQDAEYFPTTEVVARTIYEIIKEYLNTLSNNPTCVQVYLRETPTSYCIYRPKEKTL

SEQ ID NO: 23279 - protein, 155 aa, Oceanobacillus sojae
  REGION 1..155: note = tr|A0A511ZJB3|A0A511ZJB3_9BACI 6-carboxytetrahydropterin synthase QueD OS=Oceanobacillus sojae OX=582851 GN=OSO01_22700 PE=4 SV=1
MFGFRIVEELQKLDEDIQREHLAYHQKRVMVSKEFTFDAAHHLHCYEGKCKNLHGHTYKVIFGISGFVDENGLVIDFSDIKKIWKDKIEVFLDHRYLNETLPKMNTTAENMVVWIFEQMEEAIRDLPNDCKVELVRLFETPTSYAEARREWIYHA

SEQ ID NO: 23280 - protein, 145 aa, Oceanobacillus sp.
  REGION 1..145: note = tr|A0A1E5K2E0|A0A1E5K2E0_9BACI 6-carboxy-5,6,7,8-tetrahydropterin synthase; OS = Oceanobacillus sp. E9 OX=1742575 GN=AQ616_07460 PE=3; SV = 1
MMQQIYPVIPHSYAYELNKDFHFSAAHYIPQDQAGKCQQMHGHTYFTNITVVGDELDETGFLVNFKQIKDLIHKRFDHGVINHDSAFSDEQAIDFPTTEVVSRKIYEIIQDYLDGLQNKPKCIQVYLRETPTSYCIYRPRGEKST

SEQ ID NO: 23281 - protein, 144 aa, Oceanobacillus sp.
  REGION 1..144: note = tr|A0A498DFU0|A0A498DFU0_9BACI 6-carboxy-5,6,7,8-tetrahydropterin synthase; OS = Oceanobacillus sp. YLB-02 OX=2448030 GN=queD PE=3 SV=1
MIQQIYPVTEHPYAYELNKDFQFAAAHYIPHGDAGKCQNMHGHTYFTNVTIAGDELNHTGFLVNFKKVKDLIHKRFDHRVMNEDTKFSDLDAEYFPTTEVVARTIYEIIQEYLNTLSNKPTCIQVYLRETPTSYCIYRPKGKTL

SEQ ID NO: 23282 - protein, 277 aa, Oceanobacter sp.
  REGION 1..277: note = tr|A0A2G2JG97|A0A2G2JG97_9GAMM Uncharacterized protein OS=Oceanobacter sp. OX=2030817 GN=COA68_12865 PE=4; SV = 1
MHLFVEQLTNVDFSYLDLSRGIVGETWWASAILEGELDQQGMVCDFGTVKKVLRNWMDDEIDHRLLVPELAEGLTITQSADRIELRCDTARGPIIMNAPREAVTLIDAKEITIQSVASWCIRQLEPHFPNSIDQLSLDFTPEEINGAMYHYSHGLKKHDGNCQRIAHGHRSRIQIWLDGNRNQDEEAYWADLWKDIYIGSKEDLIDSPEDEYQFEYTAQQGEFYLSLSKQHCYLIDTDTTVELIANHLANKIKARHPNTQVTVRAFEGVNKGAMVTL

SEQ ID NO: 23283 - protein, 140 aa, unidentified
  source 1..140: note = Oceanococcus atlanticus
  REGION 1..140: note = tr|A0A1Y1SH37|A0A1Y1SH37_9GAMM 6-pyruvoyl tetrahydrobiopterin synthase OS=Oceanococcus atlanticus; OX = 1317117 GN=ATO7_01500 PE=4 SV=1
MTTSKPIVYLTRREHFCAAHRLWSDALSAEENQALYGPCSREYGHGHNYFMDVTLRGPVDPRTGVIVNLTEVRDALKELILEDTDQRHLNHDSPLCAGVNPTAENLAVLFWNVLHARFGALLYEVKVQETDKNWAIYRGE

SEQ ID NO: 23284 - protein, 285 aa, unidentified
  source 1..285: note = Oceanococcus atlanticus
  REGION 1..285: note = tr|A0A1Y1SHC1|A0A1Y1SHC1_9GAMM Uncharacterized protein OS=Oceanococcus atlanticus OX=1317117; GN = ATO7_01900 PE=4 SV=1
MKLETRLFIADFTHLDCAWFDPLQGLIGESWRVDAELAGELADNGMLCDFGVVKSVLKQALDEQIDHRLLLNAAQAAELHNQSGHSTISLRNAASEEWHYRAPSSSFALLDTPTIDAGHLAATLAAPLRALLPDNITHLNLTLSPAHHQGPYRYCHGLRQHSGNCQRMAHGHRARLDIQVDGERHHQLETDWQQRFDGRYIGSEEHLSISGSRHRYAYQASQGAFELELPQNRSCPIEAEPTVEHITAHMARAIARQLPGRRIECRAFEGIGKGAHSCAELKPRP

SEQ ID NO: 23285 - protein, 288 aa, unidentified
  source 1..288: note = Oceanococcus sp.
  REGION 1..288: note = tr|A0A520SNT6|A0A520SNT6_9GAMM Uncharacterized protein OS=Oceanococcus sp. OX=1958892 GN=EVA65_11075 PE=4; SV = 1
MPAMKLETRLFIADFTHLDCAWFDPLQGLIGESWRVDAELAGELADNGMLCDFGVVKSVLKQALDEQIDHRLLLNAAQAAELHNQSGHSTISLRNAASEEWHYRAPSSSFALLDTPTIDAGHLAATLAAPLRALLPDNITDLNLTLSPAHHQGPYRYCHGLRQHSGNCQRMAHGHRARLDIQVDGERHHQLETDWQQRFDGRYIGSEEHLSISGSRHRYAYQASQGAFELELPQNRSCPIEAEPTVEHITAHMARAIARQLPGRRIECRAFEGIGKGAHSCAELKPKP

SEQ ID NO: 23286 - protein, 140 aa, unidentified; identical to SEQ ID NO: 23283
  source 1..140: note = Oceanococcus sp.
  REGION 1..140: note = tr|A0A520SSG9|A0A520SSG9_9GAMM 6-carboxytetrahydropterin synthase OS=Oceanococcus sp.; OX = 1958892 GN=EVA65_06045 PE=4 SV=1

SEQ ID NO: 23287 - protein, 278 aa, unidentified
  source 1..278: note = Oceanospirillaceae bacterium
  REGION 1..278: note = tr|A0A2E2ICQ1|A0A2E2ICQ1_9GAMM Uncharacterized protein OS=Oceanospirillaceae bacterium OX=1899355; GN = CMI06_05745 PE=4 SV=1
MQLFVEQLTNVDFSYLDAKRGLVGETWWASAVLDGALDEQGMVCDFGIVKKTLRNWLDDELDHRLLVPVQSPALTLKHSGDIIELSWQYDNGDLLEMRAPRQAVALVDAEQIDANSVAHWCREQLRSHFPVNVEQLTLSFVAEDIDGAFYHYSHGLKKHNGNCQRIAHGHRSRIQIWLDDERSSTLEQQWAERWADIYLGSTEDLISSDNNQLLFRYSAQQGEFELSLPASRNYMMETDTTVEFIARHLADTIKQQHPDSQVRVRAFEGVNKGAIAEA

SEQ ID NO: 23288 - protein, 119 aa, unidentified
  source 1..119: note = Oceanospirillaceae bacterium
  REGION 1..119: note = tr|A0A2D6DJC2|A0A2D6DJC2_9GAMM 6-carboxy-5,6,7,8-tetrahydropterin synthase; OS = Oceanospirillaceae bacterium OX=1899355 GN=queD PE=3; SV = 1
MEIYKDFSFDSAHRLPNVPDGHKCGRLHGHTFQLRIVVSGPVDETTGWIMDFGDIKAAFRPLYERLDHNYLNEIDGLENPTSEVLVKWIWQQLKPVLPQLVRLEIKETCTSGCVYIGDD

SEQ ID NO: 23289 - protein, 278 aa, unidentified
  source 1..278: note = Oceanospirillales bacterium
  REGION 1..278: note = tr|A0A2A4UQN6|A0A2A4UQN6_9GAMM Uncharacterized protein OS=Oceanospirillales bacterium OX=1914300; GN = COB43_09280 PE=4 SV=1
MHLFVDQLTNVDFSYLDSHRGLVGETWWASAVLEGALDEQGMVCDFGIVKKTLRNWLDLELDHRLLIPVRSPALQHCLHDDKITLTWHFGHGQHLTMTAPQQAVALVDAEVINDLTVAEWSITQLSSSFPGSIEQLSLTFENENIHGANYHYSHGLKKHDGNCQRIAHGHRSRIEIFIDGERNPSLEQHWANTWEDIYLGTVEDLSNQTEEHLHFHYHAQQGEFTLSLPKDCCYLMDTDTTVELIAAHLAQEIKRDHPSVEVCVRAFEGVNKGAMVAL

SEQ ID NO: 23290 - protein, 279 aa, unidentified
  source 1..279: note = Oceanospirillales bacterium
  REGION 1..279: note = tr|A0A357LYK5|A0A357LYK5_9GAMM Uncharacterized protein OS=Oceanospirillales bacterium OX=1914300; GN = DEA26_05970 PE=4 SV=1
MHLFVEKLVNIDFSYLDVTRGLVGETWWASTSLEGALDQQGMVCDFGTVKKVLREWLDREIDHCLLVPAQAAGLKVQENDGITSLSWQTERGLIRMSAPSQAVTLIDAAVITPYTCAKWCMEQLTPLFPDSIDQLSLTFEPEVIDGPSYHYSHGLKKHDGNCQRIAHGHRSRIEIFLDGVRNTDEEAWWAECWKDVYLGSRDDVTEENDQHIDYRYQAAQGDFALTLPRSHCYLMETDTTVELIAAHLTARVAERHPGRTVKVRAFEGVNKGALAFSGQ

SEQ ID NO: 23291 - protein, 279 aa, Oceanospirillum multiglobuliferum
  REGION 1..279: note = tr|A0A1T4PFP4|A0A1T4PFP4_9GAMM Uncharacterized protein OS=Oceanospirillum multiglobuliferum OX=64969; GN = BTE48_08100 PE=4 SV=1
MTTLFVRQLTVIDCSYLDDQLGLVGESWYVDVELDGELNEQGMLFDFSHVKKTLKKLIDSTVDHALLVPESAPSYQLIQECEDQLSLRFQSQVGTFIHKSPHCAVQRLAVERISAETVAYWLEQSARAVLPPNVQSVRFFLHAEKLPSEQAYYHYSHGLKKHEGNCQRIAHGHRSQIEILTAGQRNTALETQWAKQLKNGYIGTVEDIKAEDDHSLTFAYQANQGHFEITVPKSICTLMPTDTTVELIARFICEQINQPNTRVRAYEGIEKGAIAKSEP

SEQ ID NO: 23292 - protein, 118 aa, Ochrobactrum anthropi
  REGION 1..118: note = tr|A0A011UCP9|A0A011UCP9_OCHAN 6-carboxy-5,6,7,8-tetrahydropterin synthase; OS = Ochrobactrum anthropi OX=529 GN=queD PE=3 SV=1
MFRITKEFHFSASHQLTGLPDDHQCARLHGHNYIVEVELSADDLNQHGFVRDYHELAPFKRYIDDCFDHRHLNDVLGHDQSTAETLARHFFEWCYARWPEISAVRVSETPKTWAEYRP

SEQ ID NO: 23293 - protein, 118 aa, Ochrobactrum anthropi
  REGION 1..118: note = tr|A0A137XZX2|A0A137XZX2_OCHAN 6-carboxy-5,6,7,8-tetrahydropterin synthase; OS = Ochrobactrum anthropi OX=529 GN=AYJ56_00170 PE=3 SV=1
MFRITKEFHFSASHQLTGLPVGHQCARLHGHNYIVEVELSADDLNQHGFVRDYHELAPFKRYIDDCFDHRHLNDVLGHDQSTAETLARHFFDWCHVRWPEISAVRISETPKTWAEYRP

SEQ ID NO: 23294 - protein, 118 aa, Ochrobactrum cytisi; identical to SEQ ID NO: 23292
  REGION 1..118: note = tr|A0A1J6IBW2|A0A1J6IBW2_9RHIZ 6-carboxy-5,6,7,8-tetrahydropterin synthase; OS = Ochrobactrum cytisi OX=407152 GN=BLA27_16520 PE=3 SV=1

SEQ ID NO: 23295 - protein, 122 aa, Ochrobactrum gallinifaecis
  REGION 1..122: note = tr|A0A502BM99|A0A502BM99_9RHIZ 6-carboxy-5,6,7,8-tetrahydropterin synthase; OS = Ochrobactrum gallinifaecis OX=215590 GN=queD PE=3 SV=1
MFRITKEFHFSASHQLTQLPADHQCARLHGHNYIVEIELSANDLDQHGFVRDYHELAPLKHYIDNELDHRHLNDVLGHDRVTAEFLARHLYDWCKTRWQEVTAVRVSETPKTWAEYRPGNRI

SEQ ID NO: 23296 - protein, 122 aa, Ochrobactrum grignonense
  REGION 1..122: note = tr|A0A256FAC5|A0A256FAC5_9RHIZ 6-carboxy-5,6,7,8-tetrahydropterin synthase; OS = Ochrobactrum grignonense OX=94627 GN=queD PE=3 SV=1
MYRITKEFHFSASHQLTELPADHQCARLHGHNYIVEVELSAADLNEHGFVRDYHELAPLKRYIDDELDHRHLNDVLGHNRVTAEFLARHLYDWCQTRWQEVTAVRVSETPKTWAEYRPESRS

SEQ ID NO: 23297 - protein, 122 aa, Ochrobactrum haematophilum; identical to SEQ ID NO: 18469
  REGION 1..122: note = tr|A0A2P9HQT6|A0A2P9HQT6_9RHIZ 6-carboxy-5,6,7,8-tetrahydropterin synthase; OS = Ochrobactrum haematophilum OX=419474 GN=OHAE_2372 PE=3; SV = 1

SEQ ID NO: 23298 - protein, 122 aa, Ochrobactrum haematophilum
  REGION 1..122: note = tr|A0A397L3W1|A0A397L3W1_9RHIZ 6-carboxy-5,6,7,8-tetrahydropterin synthase; OS = Ochrobactrum haematophilum OX=419474 GN=BCF22_3691 PE=3; SV = 1
MFRITKEFHFSASHQLTGLPADHQCARLHGHNYIVEVELSAADLDRHGFVRDYHELAPFKRYIDDAFDHRHLNDVLGHGQTTAETLAKHFFDWCRARWPEISAVRVSETPKTWAEYRPGPQP

SEQ ID NO: 23299 - protein, 118 aa, Ochrobactrum intermedium
  REGION 1..118: note = tr|U4VAM5|U4VAM5_9RHIZ 6-carboxy-5,6,7,8-tetrahydropterin synthase; OS = Ochrobactrum intermedium 229E OX=1337887 GN=Q644_01510; PE = 3 SV=1
MFRITKEFHFSASHQLTGLPEDHQCARLHGHNYIVEVELSASDLNEHGFVRDYHELAPFKRYIDDCFDHRHLNDVLGHDQSTAETLARHFFEWCHARWPEISAVRVSETPKTWAEYRP

SEQ ID NO: 23300 - protein, 118 aa, Ochrobactrum intermedium; identical to SEQ ID NO: 23299
  REGION 1..118: note = tr|C4WJA2|C4WJA2_9RHIZ 6-carboxy-5,6,7,8-tetrahydropterin synthase; OS = Ochrobactrum intermedium LMG 3301 OX=641118 GN=queD; PE = 3 SV=1

SEQ ID NO: 23301 - protein, 118 aa, Ochrobactrum lupini
  REGION 1..118: note = tr|A0A256GQM1|A0A256GQM1_9RHIZ 6-carboxy-5,6,7,8-tetrahydropterin synthase; OS = Ochrobactrum lupini OX=255457 GN=queD PE=3 SV=1
MFRITKEFHFSASHQLTGLPDDHQCARLHGHNYIVEVELSADDLNQHGFVRDYHELAPFKRHIDDCFDHRHLNDVLGHDQSTAETLARHFFEWCYARWPEISAVRVSETPKTWAEYRP

SEQ ID NO: 23302 - protein, 118 aa, Ochrobactrum oryzae
  REGION 1..118: note = tr|A0A2S7J1D7|A0A2S7J1D7_9RHIZ 6-carboxy-5,6,7,8-tetrahydropterin synthase; OS = Ochrobactrum oryzae OX=335286 GN=queD PE=3 SV=1
MFRITKEFHFSASHQLTGLPADHQCARLHGHNYIVEVELSAPELNQHGFVRDYHELAPFKRYIDDCFDHRHLNDVLGHDRSTAETLARHFFEWCHARWPEISAVRVSETPKTWAEYRP

SEQ ID NO: 23303 - protein, 118 aa, Ochrobactrum pecoris
  REGION 1..118: note = tr|A0A5C5CPV1|A0A5C5CPV1_9RHIZ 6-carboxy-5,6,7,8-tetrahydropterin synthase; OS = Ochrobactrum pecoris OX=867683 GN=queD PE=3 SV=1
MFRITKEFHFSASHQLTGLPEDHQCARLHGHNYVVEVELSARDLDQHGFVRDYHELAPFKRYIDDCFDHRHLNDVLGHNQSTAETLARHFFEWCQTRWPEISAVRVSETPKTWAEYRP

SEQ ID NO: 23304 - protein, 122 aa, Ochrobactrum pseudogrignonense
  REGION 1..122: note = tr|A0A1A9FS24|A0A1A9FS24_9RHIZ 6-carboxy-5,6,7,8-tetrahydropterin synthase; OS = Ochrobactrum pseudogrignonense OX=419475 GN=A8A54_16735; PE = 3 SV=1
MFRITKEFHFSASHQLTELPADHQCARLHGHNYIVEVELSSADLNEHGFVRDYHELAPLKRYIDDELDHRHLNDVLGHNCVTAEFLARHLYEWCQTRWQEVTAVRVSETPKTWAEYRPASRS

SEQ ID NO: 23305 - protein, 122 aa, Ochrobactrum pseudogrignonense
  REGION 1..122: note = tr|A0A256GM37|A0A256GM37_9RHIZ 6-carboxy-5,6,7,8-tetrahydropterin synthase; OS = Ochrobactrum pseudogrignonense OX=419475 GN=queD PE=3; SV = 1
MFRITKEFHFSASHQLTELPADHQCARLHGHNYIVEVELSSADLNEHGFVRDYHELAPLKRYIDDELDHRHLNDVLGHNCVTAEFLARHLYEWCQTRWQEVTAVRVSETPKTWAEYRPESRS

SEQ ID NO: 23306 - protein, 122 aa, unidentified
  source 1..122: note = Ochrobactrum quorumnocens
  REGION 1..122: note = tr|A0A248UFS9|A0A248UFS9_9RHIZ 6-carboxy-5,6,7,8-tetrahydropterin synthase; OS = Ochrobactrum quorumnocens OX=271865 GN=queD PE=3 SV=1
MFRITKEFHFSASHQLTELPADHQCARLHGHNYIVEVELSAADLNAYGFVRDYHELAPLKRYIDGELDHRHLNDVLGHHRVTAEFLARHLYDWCKVRWQEVTAVRVSETPKTWAEYRPEYRP

SEQ ID NO: 23307 - protein, 122 aa, Ochrobactrum rhizosphaerae
  REGION 1..122: note = tr|A0A256F354|A0A256F354_9RHIZ 6-carboxy-5,6,7,8-tetrahydropterin synthase; OS = Ochrobactrum rhizosphaerae OX=571254 GN=queD PE=3 SV=1
MFRITKEFHFSASHQLTELPADHQCARLHGHNYIVEVELSASALDEHGFVRDYHELAPLKRYIDDELDHRHLNDVLGHNHVTAECLARHLYDWCQRRWQEVSAVRVSETPKTWAEYRPGNRP

SEQ ID NO: 23308 - protein, 122 aa, Ochrobactrum sp.
  REGION 1..122: note = tr|A0A4R7WP20|A0A4R7WP20_9RHIZ 6-carboxy-5,6,7,8-tetrahydropterin synthase; OS = Ochrobactrum sp. LP_5_YM OX=2485134 GN=EC911_103530; PE = 3 SV=1
MFRITKEFHFSASHQLNELPTDHQCARLHGHNYIVEVELSAPDLNEYGFVRDYHELAPLKRYIDDELDHRHLNDVLGHNGVTAEFLARHLYDWCRTRWQEVTAVRVSETPKTWAEYRPGYRA

SEQ ID NO: 23309 - protein, 122 aa, Ochrobactrum sp.
  REGION 1..122: note = tr|A0A1V3YTR3|A0A1V3YTR3_9RHIZ 6-carboxy-5,6,7,8-tetrahydropterin synthase; OS = Ochrobactrum sp. P6BS-III OX=1920636 GN=BRY73_04005; PE = 3 SV=1
MFRITKEFHFSASHQLTGLPADHQCARLHGHNYIVEVELSAAGLNGHGFVRDYHELAPFKHYIDDAFDHRHLNDVLGHGHTTAETLAKHFFDWCHSRWPEISAVRVSETPKTWAEYRPSVKQ

SEQ ID NO: 23310 - protein, 126 aa, Ochrobactrum thiophenivorans
  REGION 1..126: note = tr|A0A256G1T7|A0A256G1T7_9RHIZ 6-carboxy-5,6,7,8-tetrahydropterin synthase; OS = Ochrobactrum thiophenivorans OX=571255 GN=queD PE=3 SV=1
MFRITKEFHFSASHQLTDLPADHQCARLHGHNYIVEVELSASDLDENGFVRDYHELTPLKRYIDDELDHRHLNDVLGHNRVTAEFLARHLYDWCKARWQEVSAIRVSETPKTWAEYRPGYQAGYRT

SEQ ID NO: 23311 - protein, 118 aa, unidentified
  source 1..118: note = Unknown
  REGION 1..118: note = tr|A0A2A4Z388|A0A2A4Z388_9PROT 6-carboxy-5,6,7,8-tetrahydropterin synthase OS=OCS116 cluster bacterium OX=2030921 GN=queD PE=3 SV=1
MFTISKEFHFSAAHRLLTLAEDHPCYRLHGHNYIVTIELKSEQVSDNGFVVDFRDLTPLKNYIDGTFDHQYLNDVFGDVPTTSELLAKHFYDWSKQKWSEVSAVRVSETAKTWAEYRP

SEQ ID NO: 23312 - protein, 180 aa, Odoribacter laneus
  REGION 1..180: note = tr|R5US48|R5US48_9BACT Uncharacterized protein; OS = Odoribacter laneus CAG:561 OX=1263089 GN=BN709_00277; PE = 4 SV=1
MIIRKLFKFEGAHIVRNCSSQQCRENIHGHSYIVEVFIRSDKLDRGCMVMDFSLLDKVKMFIESFDHTYSLWKGEAEELKHFIYKYNRRVAEFPLSPSAEGFALIFLYVIDLILKNTRFENGEGNIEVSSVRVHETATGYAEAFREDLQEVHFSVRDIHFSPGITEQWKTADWWEKLINA

SEQ ID NO: 23313 - protein, 180 aa, Odoribacter laneus; identical to SEQ ID NO: 23312
  REGION 1..180: note = tr|H1DFE2|H1DFE2_9BACT Uncharacterized protein; OS = Odoribacter laneus YIT 12061 OX=742817; GN = HMPREF9449_00978 PE=4 SV=1

SEQ ID NO: 23314 - protein, 178 aa, Odoribacter sp.
  REGION 1..178: note = tr|A0A373UV63|A0A373UV63_9BACT 6-carboxytetrahydropterin synthase OS=Odoribacter sp. AF21-41 OX=2293111 GN=DWX82_02730 PE=4 SV=1
MVIRKLFKFEGAHIVRNCSSHRCRENIHGHSYIVEVFITSDKLDRGYMVMDFVLLDKVKELVDSFDHTYSLWQEESDELKTFVYKYNRRVAEIPVSPSAEGYALLFLYLIDKILQNMEHKNGEGNVQLSSVRVHETATGYAEAFREDLKLVNFNVHDIRFSEAIREEWKNEQWWEGIR

SEQ ID NO: 23315 - protein, 178 aa, Odoribacter sp.
  REGION 1..178: note = tr|A0A417WYP5|A0A417WYP5_9BACT 6-carboxytetrahydropterin synthase OS=Odoribacter sp. OF09-27XD OX=2293112 GN=DXA95_06725 PE=4 SV=1
MIIRKLFKFEGAHIVRNCSSRHCRENMHGHSYIVEVFITSDRLDNGYMVMDFGLLDKVKAFIASFDHTYTLWTQEEPDFKHFVYRYNKRVAEIPVSPSAEGFALLFLYIINRILENTTFRNGEGHVQLSSVRVHETATGYAEAFREDLKLAEFTPADVLFSPAIQEEWKSDEWWKKIR

SEQ ID NO: 23316 - protein, 180 aa, Odoribacter splanchnicus
  REGION 1..180: note = tr|F9Z7W9|F9Z7W9_ODOSD 6-pyruvoyl-tetrahydropterin synthase OS=Odoribacter splanchnicus (strain ATCC 29572 / DSM 20712 / CIP 104287 / JCM 15291 / NCTC 10825 / 1651/6 ); OX = 709991 GN=Odosp_0745 PE=4 SV=1
MLIRKQFKFEGAHIVRNCSSQRCRENIHGHSYIVEVFITSDKLDDGYMVMDFCRLDKVKEFIESFDHSYSLWQNESPDLKTFVYRYNRRVAEIPVSPSAEGYALLFTYVIDKILRHTERVNGEGNIQLHAVRVHETATGYAEAFQEDLKLARFQLKDIHFSEGIVAEWKSTDWWDKLLEA

SEQ ID NO: 23317 - protein, 180 aa, Odoribacter splanchnicus
  REGION 1..180: note = tr|A0A1Y3YHF4|A0A1Y3YHF4_9BACT 6-carboxytetrahydropterin synthase QueD OS=Odoribacter splanchnicus OX=28118 GN=DWW57_00535 PE=4 SV=1
MLIRKQFKFEGAHIVRNCSSQRCRENIHGHSYIVEVFITSDKLDDGYMVMDFCRLDKVKEFIESFDHSYSLWQKEPPDFKTFVYRYNRRVAEIPVSPSAEGYALLFTYVIDKILRHTERVNGEGNIQLHAVRVHETATGYAEAFQEDLKLARFRLKDIHFSEGIVAEWKSTDWWDKLLEV

SEQ ID NO: 23318 - protein, 122 aa, Oenococcus oeni
  REGION 1..122: note = tr|A0A5E9PA44|A0A5E9PA44_OENOE 6-pyruvoyl tetrahydropterin synthase OS=Oenococcus oeni OX=1247; GN = E2146_01215 PE=4 SV=1
MTRKKYTYKMRSYINASHAIRWEAGIGSEHPHTWEIICEIVSSNDHMIKFEDIEEVITETISGLSGKFLNTIAPFDKINPTLENLTNYLFDMITDSLKKINCKLIRIEVGESPTRFYCISLD

SEQ ID NO: 23319 - protein, 122 aa, Oenococcus oeni; identical to SEQ ID NO: 23318
  REGION 1..122: note = tr|Q04DY8|Q04DY8_OENOB 6-pyruvoyl-tetrahydropterin synthase OS=Oenococcus oeni (strain ATCC BAA-331 / PSU-1); OX = 203123 GN=OEOE_1473 PE=4 SV=1

SEQ ID NO: 23320 - protein, 136 aa, Ohtaekwangia koreensis
  REGION 1..136: note = tr|A0A1T5M4Y2|A0A1T5M4Y2_9BACT 6-pyruvoyltetrahydropterin/6-carboxytetrahydropterin synthase OS=Ohtaekwangia koreensis OX=688867; GN = SAMN05660236_4296 PE=4 SV=1
MKIKVSRKEHFNAAHRLFNPEWSPEKNQQVFGKCSNPNFHGHNYEVIVSVIGDPDPATGYVYDMKILSDEIKEHVLNKFDHRNLNLDLEYFKDLNPTAENIALVIWRILRQRIDSKFELKITLYETERNFVEYPAS

SEQ ID NO: 23321 - protein, 139 aa, Ohtaekwangia koreensis
  REGION 1..139: note = tr|A0A1T5LUK8|A0A1T5LUK8_9BACT 6-pyruvoyltetrahydropterin/6-carboxytetrahydropterin synthase OS=Ohtaekwangia koreensis OX=688867; GN = SAMN05660236_3902 PE=4 SV=1
MLHISRKEHFNAAHKLYNPQWSKEKNAEVFGPCANENWHGHNFDLIVTVKGKPDPETGFVVDLKKLSTLIRQEVIEKLDHKNLNTDVDFMQGKLASCENLIVEIWKILDAKLASITSFGKLHCVRLYETPRNYVEYFGE

SEQ ID NO: 23322 - protein, 148 aa, unidentified
  source 1..148: note = Okeania hirsuta
  REGION 1..148: note = tr|A0A3N6PC87|A0A3N6PC87_9CYAN 6-carboxy-5,6,7,8-tetrahydropterin synthase OS=Okeania hirsuta OX=1458930 GN=queD PE=3 SV=1
MSSNQEEIPEIKKTESNSETWIIGKEFRFEASHQLPNHDGKCARLHGHSWRGVIYVSGNELVNSGGKQGMIMDYGDIKKHLKPLLDDYLDHYHLNETTGLVNPTSEAIAKWIYEQLENKIPGLVAVRIDETCTSQCIYSKGKNNFLIL

SEQ ID NO: 23323 - protein, 166 aa, unidentified
  source 1..166: note = Okeania hirsuta
  REGION 1..166: note = tr|A0A3N6PHY1|A0A3N6PHY1_9CYAN 6-pyruvoyl tetrahydrobiopterin synthase OS=Okeania hirsuta OX=1458930; GN = D5R40_04315 PE=4 SV=1
MKKRLTKIELFKQAMNFSAGHFTIFSDSERENLHGHSFSVYVMFEAEVTNNGMTFDYGIYKEIILNICQFLDEVFLLPLKNPYLKIEEFDEYIYALFNGGKEKIPFLKRDVKLLPVRNITVEELSHWFLQQLLVNVQENQEHLIQTIEVKIFSGPGQSGSSFWSKK

SEQ ID NO: 23324 - protein, 119 aa, unidentified
  source 1..119: note = Oleiagrimonas soli
  REGION 1..119: note = tr|A0A099CSS5|A0A099CSS5_9GAMM 6-carboxy-5,6,7,8-tetrahydropterin synthase; OS = Oleiagrimonas soli OX=1543381 GN=LF63_0114460 PE=3 SV=1
MQIFKVFHIEAAHRLPNVPEGHKCARLHGHSFKVEIHVGGTPGAQTGWIMDYADIKAAFAPLYDRLDHHYLNEIEGLENPTSEHIAQWIFARLKVGLPALTRVVVHETCTSGAVCEGLD

SEQ ID NO: 23325 - protein, 119 aa, unidentified
  source 1..119: note = Oleiagrimonas sp.
  REGION 1..119: note = tr|A0A328SYY2|A0A328SYY2_9GAMM 6-carboxy-5,6,7,8-tetrahydropterin synthase; OS = Oleiagrimonas sp. MCCC 1A03011 OX=1926883; GN = BTJ49_12155 PE=3 SV=1
MQIFKIFHIEAAHRLPNVPEGHKCARLHGHSFKVEIHVGGEPGAETGWIMDYAEIKAAFAPLYEQLDHHYLNEIEGLENPTSERIAQWIFTRLKADLPALERVVVHETCTAGAVCTGPV

SEQ ID NO: 23326 - protein, 277 aa, Oleibacter marinus
  REGION 1..277: note = tr|A0A1N7Q6P3|A0A1N7Q6P3_9GAMM 6-pyruvoyl tetrahydropterin synthase OS=Oleibacter marinus OX=484498; GN = SAMN05421686_11431 PE=4 SV=1
MHLFVEQLTNVDFSYLDANRGIVGETWWASAILEGALDDQGMVCDFGIVKKTLRQWLDTELDHRLLVPAEAPGLEVKKTGERVNISMQTGRGIVEMSAPAQAVTLIDTAEITAASVAAWSIKQLQMYFPDTIDQLTLDFTTETIDGAFYHYSHGLKKHAGNCQRIAHGHRSRIQIWLDGQRDEQEESYWADLWRDIYIGSTEDLASDDNDTLSFAYTAQQGDFSLTLNRAHCYMMSTDSTVELIADHLAKEISKRHPGKDIRVRAFEGVNKGAMVQV

SEQ ID NO: 23327 - protein, 277 aa, Oleibacter sp.
  REGION 1..277: note = tr|A0A2D8AEH0|A0A2D8AEH0_9GAMM Uncharacterized protein OS=Oleibacter sp. OX=2024845 GN=CMI13_13900 PE=4; SV = 1
MQLFVDQLTNVDFSYLDSRRGLVGETWWASAILDGALDDQGMVCDFGIVKKTLRNWLDDELDHRLLVPVRSPALTLSGDEQRVSLSWRYESGEVLTMEAPREAVALVDADAITTDSVADWCREQLREFFPVNVDQLTLLFAPEDIQGAYYHYSHGLKKHAGNCQRIAHGHRSRIEIWRAGSRDKSLEAEWAEQFADIYLGSEEDISARTDDTIHFAYRSQQGEFSLSLPQRACYLMQTDTTVEFIAAHLASEIRGKYPTEDIEVKAFEGVNKGAIAN

SEQ ID NO: 23328 - protein, 290 aa, Oleiphilus messinensis
  REGION 1..290: note = tr|A0A1Y0I7T8|A0A1Y0I7T8_9GAMM Queuosine biosynthesis protein QueD OS=Oleiphilus messinensis; OX = 141451 GN=OLMES_2192 PE=4 SV=1
MNRLFVNNLTVIDFSFLDPIRGIVGESWIVDVELEGELDEQGMVFDFGHVKKQLKNLIDDEVDHKLAIPAQLEGVLIERSENRIDVGYQNSTGEKWLHRSPASAVLLIEEKEITPESVSTFLIDLFDQVLPDNVDGVSITIRPEEINGAYYHYSHGLKKHLGNCQRIAHGHRSRIEIYLNQQRQKVLETEWATKLQDSYVATLEDLSGQNEQTEISLGRQTGQNITFNYVAQQGQFELTLPARQVYIIDTDSTVEWIACHIAENLQETFPNDDIQVRAYEGVGKGSIAER

SEQ ID NO: 23329 - protein, 281 aa, Oleispira antarctica
  REGION 1..281: note = tr|R4YRV9|R4YRV9_OLEAN Uncharacterized protein; OS = Oleispira antarctica RB-8 OX=698738 GN=OLEAN_C17820; PE = 4 SV=1
MQLFVDNLTNVDFSYLDDERGLVGETWLASVLLDGGLDQTSMIWDFGVVKKVLRNWLDDELDHRLLVPTKSQRLSYEINQDRITLSWSFGNDNVLTMDAPLEAVALIDAKQINEQTAAKWSIKQLSNHFPDNLEHIQLTFEAEEINAAYYHYSHGLKKHDGNCQRIAHGHRSRIQIWCDGARDRNLENNWAERWSDIYIGSEEDLISISDNEQAQMHFAYDAPQGHFELTLPKKVCYIMPSDTTVECIASHIAQILHDENPDSTITVKAFEGLNKGAIFEV

SEQ ID NO: 23330 - protein, 281 aa, Oleispira antarctica
  REGION 1..281: note = tr|A0A1Y5HVL9|A0A1Y5HVL9_OLEAN Uncharacterized protein OS=Oleispira antarctica OX=188908 GN=A9R00_02510; PE = 4 SV=1
MQLFVDNLTNVDFSYLDDQRGLVGETWLASALLDGGLNQTSMIWDFGLVKKVLRNWLDDQLDHRLLLPIQSKQLQYEIKQDRIILSWAFANEEVLTMDAPIEAVALIDAEKINEISVAQWSLKQLASEFPENLEHIQLSFEAEEISGAYYHYSHGLKKHDGNCQRIAHGHRSRIQIWQNGTRDNDLESIWAERWADIYIGSEEDLVSISSDAKQQMHFAYDAPQGHFELTLPQRVCYMMNSDTTVECISAHIANVLQSENPTSSITVKAFEGLHKGAISEI

SEQ ID NO: 23331 - protein, 123 aa, unidentified
  source 1..123: note = Oleomonas sp.
  REGION 1..123: note = tr|A0A418WEZ1|A0A418WEZ1_9PROT 6-carboxy-5,6,7,8-tetrahydropterin synthase OS=Oleomonas sp. K1W22B-8 OX=2320859 GN=D3874_17615 PE=3 SV=1
MFELSKQFRFEAAHTLHRAVDAEPSRRIHGHSYRAEVILRGPADPVTGMVIDLGLFERSLAMVRDALDHRLLDELPDLGPATMENLSAWIWRRLAADAPQLARVTIYRDSLGDACSYFGPDHG

SEQ ID NO: 23332 - protein, 132 aa, unidentified
  source 1..132: note = Oleomonas sp.
  REGION 1..132: note = tr|A0A418WC96|A0A418WC96_9PROT 6-carboxytetrahydropterin synthase OS=Oleomonas sp. K1W22B-8 OX=2320859 GN=D3874_11665 PE=4 SV=1
MFAVEVRDHVMIAHSLPSPVFGPAQGMHGATYVVDAAFFAPALDGDGLVVDIGLATEALGRVLGPLKYQNLDALPAFKGKITTTEFLAKAIADGLIAEIAAGSLGAGGGRLARLRVQLHESHVARAWYETDL

SEQ ID NO: 23333 - protein, 55 aa, Oligella ureolytica
  REGION 1..55: note = tr|A0A378XBU5|A0A378XBU5_9BURK 6-pyruvoyl tetrahydropterin synthase OS=Oligella ureolytica OX=90244; GN = NCTC11997_00299 PE=4 SV=1
MLQGWDLKTYAFEQRTTAEVISRHIFHTLREQGGLPVNRIRLWETPTSYSEYEGD

SEQ ID NO: 23334 - protein, 141 aa, Oligella ureolytica
  REGION 1..141: note = tr|A0A378XAU7|A0A378XAU7_9BURK 6-carboxy-5,6,7,8-tetrahydropterin synthase OS=Oligella ureolytica OX=90244 GN=queD PE=3 SV=1
MKVVKSFSFDIAHMLDCHDGKCKNLHGHTYRLEVEISGELIQDGPKEGMIMDFSDLKQAVKQWIVDPMDHAFLYNTKSEREVALAEMLEGWDLKTYALDCRTTAEAVSYHIYHVLREQGNLPVTRIRLWETPTSYSEYEGE

SEQ ID NO: 23335 - protein, 121 aa, Oligotropha carboxidovorans
  REGION 1..121: note = tr|B6JI63|B6JI63_OLICO 6-carboxy-5,6,7,8-tetrahydropterin synthase OS=Oligotropha carboxidovorans (strain ATCC 49405 / DSM 1227 / KCTC 32145 / OM5) OX=504832 GN=OCA5 _c10910 PE=3 SV=1
MWELTKSFRFEAAHSLKGTTLGESSEEIHGHSFRAEVTVRGTPDPATGMVMDLGLLEQKIAAIRSALDHKFLNKIEALGVPTLENLSRYIWEQVQGAGNVTRVSVHRDSCGESCTYFGPSS

SEQ ID NO: 23336 - protein, 137 aa, Olivibacter sp.
  REGION 1..137: note = tr|A0A5C0ZG34|A0A5C0ZG34_9SPHI 6-carboxy-5,6,7,8-tetrahydropterin synthase OS=Olivibacter sp. LS-1 OX=2592345 GN=FKG96_03545 PE=3 SV=1
MIYITRRERFSAAHKLYRDDWSLEENEATFGKCSNPNWHGHNYELFVTIKGEIDPTTGFVMDLRILKTIILQHVVEKLDHRNVNLDVDFMRGKMASTEVLAVEIFNQLKSPIETAGAQLHSIKLQETENNSVEYFGN

SEQ ID NO: 23337 - protein, 136 aa, Olleya aquimaris
  REGION 1..136: note = tr|A0A327RMF2|A0A327RMF2_9FLAO 6-carboxy-5,6,7,8-tetrahydropterin synthase OS=Olleya aquimaris OX=639310 GN=LY08_00537 PE=3 SV=1
MKVTVSRKAHFNAAHRLYRKDWSFEKNDEIFGKCNNPNYHGHNYELIASVTGDIDKETGYVIDVKILKDIIKTEVEDAFDHKNLNVEVEEFKNLNPTAENIVVVIYNKIKAKLKPNLDLEVTLYETPRNFVSYSGK

SEQ ID NO: 23338 - protein, 150 aa, Olleya aquimaris
  REGION 1..150: note = tr|A0A327RNW3|A0A327RNW3_9FLAO 6-pyruvoyltetrahydropterin/6-carboxytetrahydropterin synthase OS=Olleya aquimaris OX=639310 GN=LY08_00025 PE=4; SV = 1
MSNIRITKQFTFETGHALYGYDGKCKNVHGHSYKLDVTVIGKPISDTTNVKFGMVIDFSDLKKIVKEEIVNVFDHATVFNKNTPHVELAKELEERGHNVLLVDYQPTSEMMVIDFAEKIKNRLPNSIKLHSLKLSETATSYAQWYASDNQ

SEQ ID NO: 23339 - protein, 136 aa, unidentified
  source 1..136: note = Olleya namhaensis
  REGION 1..136: note = tr|A0A1I3N3R0|A0A1I3N3R0_9FLAO 6-carboxy-5,6,7,8-tetrahydropterin synthase OS=Olleya namhaensis OX=1144750 GN=SAMN05443431_1045 PE=3 SV=1
MRVTVSRKAHFNSAHRLYRKDWSFEKNNEIFGKCNNPNYHGHNYELIASVTGAIDQETGFVIDVKILKDIIKAEVEDAFDHKNLNLDVPEFKDLNPTAENIAVVIYNKIKAKLKSNLELEVTLYETPRNFVSYSGK

SEQ ID NO: 23340 - protein, 150 aa, unidentified
  source 1..150: note = Olleya namhaensis
  REGION 1..150: note = tr|A0A1I3JBU7|A0A1I3JBU7_9FLAO 6-pyruvoyltetrahydropterin/6-carboxytetrahydropterin synthase OS=Olleya namhaensis OX=1144750; GN = SAMN05443431_101341 PE=4 SV=1
MSNIRITKQFTFETGHALYGYDGKCKNVHGHSYKLDVTVIGTPISDSDNAKFGMVIDFTDLKKIVKEEIVDVFDHATVFNKNTPHVELAKELKDRDHNVLLVDYQPTSEMMVIDFAQKIKNRLPNAIKLHSLKLSETATSYAQWYASDNG

SEQ ID NO: 23341 - protein, 136 aa, Olleya sp.
  REGION 1..136: note = tr|A0A2K8WY06|A0A2K8WY06_9FLAO 6-pyruvoyl tetrahydrobiopterin synthase OS=Olleya sp. Bg11-27; OX = 2058135 GN=CW732_07720 PE=4 SV=1
MRVTVSRKAHFNAAHRLYRKDWSFEKNNEIFGKCNNPNYHGHNYELIASVTGDIDQETGFVIDVKILKDIIKVEVEDAFDHKNLNLDVAEFKDVNPTAENIVVVIYNKIKAQLKPSLDLEVTLYETPRNFVSYSGK

SEQ ID NO: 23342 - protein, 150 aa, Olleya sp.
  REGION 1..150: note = tr|A0A559RDS2|A0A559RDS2_9FLAO 6-pyruvoyltetrahydropterin/6-carboxytetrahydropterin synthase OS=Olleya sp. Hel_I_94 OX=1250001 GN=JM82_2864; PE = 4 SV=1
MSNIRITKQFTFETGHALYGYDGKCKNVHGHSYKLDVTVIGTPISDSNNVKFGMVIDFTDLKKIVKEEIVDVFDHATVFNKNTPHVQLAKELQDRDHNVLLVDYQPTSEMMVIDFAQKIQDRLPNNIKLHSLKLSETATSYAQWYASDNQ

SEQ ID NO: 23343 - protein, 139 aa, Olsenella profusa
  REGION 1..139: note = tr|U2VBR2|U2VBR2_9ACTN 6-carboxy-5,6,7,8-tetrahydropterin synthase OS=Olsenella profusa F0195 OX=1125712 GN=HMPREF1316_1429 PE=3 SV=1
MYELSTEYWFDSAHFLTGYHGACENLHGHQWRVTAYVTAESLGEAGTQRGMVVDFGVLKRIVREECDRLDHTFLVEEGSLKPQTIAALEDEGFTLTMLPFRTTAENLARYLAERLRDRGLPISRVDCDETPNNRASYVV

SEQ ID NO: 23344 - protein, 142 aa, unidentified
  source 1..142: note = Olsenella scatoligenes
  REGION 1..142: note = tr|A0A100YW11|A0A100YW11_9ACTN 6-carboxy-5,6,7,8-tetrahydropterin synthase OS=Olsenella scatoligenes OX=1299998 GN=AUL39_07050 PE=3 SV=1
MYTLSTEYWFDSAHFLTDYNGKCENLHGHQWRVTAYVRADELGTSGTEKDMVVDFATLKRIVREECDALDHTFLVEEGSLAPSTLEALKSEGFSLTMLPFRTTSENLAHYLFDRLSSRGLPVCRVDCNETPNNRASYEPDVD

SEQ ID NO: 23345 - protein, 140 aa, Olsenella sp.
  REGION 1..140: note = tr|A0A1Y4K9K0|A0A1Y4K9K0_9ACTN 6-carboxytetrahydropterin synthase QueD OS=Olsenella sp. An188 OX=1965579 GN=B5F23_05165 PE=4 SV=1
MYGLKTEASFDSAHFLADYHGKCENLHGHRWRVVCYLRSGELGGAGTERDMVCDFGAFKREVRSLVAEFDHMFLVEEGTLAPATVAALESEGFTLKVLPFRTTAENLARHFCERLRERGLPCSQVDVYETPLNCATYLWE

SEQ ID NO: 23346 - protein, 142 aa, Olsenella sp.
  REGION 1..142: note = tr|A0A1I0CBQ5|A0A1I0CBQ5_9ACTN 6-carboxy-5,6,7,8-tetrahydropterin synthase OS=Olsenella sp. KH3B4 OX=1855394 GN=SAMN05216348_10868 PE=3 SV=1
MYTLSTEYWFDSAHFLTDYNGKCENLHGHQWRVTAYVRSNELGTSGTEKDMVVDFATLKRIVREECDALDHTFLVEEGSLAPATLEALASEGFSLTILPFRTTSENLARYLFERLSARGLPVCRVDCNETPNNRASYEPDGE

SEQ ID NO: 23347 - protein, 140 aa, Olsenella uli
  REGION 1..140: note = tr|X8HS23|X8HS23_9ACTN 6-carboxy-5,6,7,8-tetrahydropterin synthase OS=Olsenella uli MSTE5 OX=1190621 GN=HMPREF1503_1815 PE=3 SV=1
MYGLKTEASFDGAHFLTDYHGKCENLHGHRWRVVAYVRQEELQAEGTTRGMVVDFGAFKQAVREEVARLDHMFLVEEGSLRRSTIEALQGEGFTLLVLPFRTTAENLARYLYQRISARHLPVSQVDVYETPLNCASYFGE

SEQ ID NO: 23348 - protein, 140 aa, Olsenella umbonata
  REGION 1..140: note = tr|A0A1H9MZR3|A0A1H9MZR3_9ACTN PreQ(0) biosynthesis protein QueD OS=Olsenella umbonata OX=604330; GN = SAMN05216446_0066 PE=4 SV=1
MFGLKTEASFDGAHFLADYYGKCENLHGHRWRVVAYARQESLQTEGTMRGMVLDFGVFKKALRSIVGEFDHMFLVEEGTLKQATVDALEGEGFTLKMLPFRTTAENLARYFYGRLEQEGIPVAQVDVYETPLNCASYFGE

SEQ ID NO: 23349 - protein, 141 aa, Olsenella umbonata
  REGION 1..141: note = tr|A0A1H1LNV5|A0A1H1LNV5_9ACTN 6-pyruvoyltetrahydropterin/6-carboxytetrahydropterin synthase OS=Olsenella umbonata OX=604330; GN = SAMN04487824_1089 PE=4 SV=1
MYQLKTEASFDGAHFLTDYNGKCENLHGHRWRVVVYIRQASLGTDGTERDMVLDFGEFKRIVREEVARFDHMFLVEEGSLAPDTVACLEREGFTLRMLPFRTTAENLARNFAEVLLGRGLPVSRVDCYETPLNCATYLVDE

SEQ ID NO: 23350 - protein, 162 aa, unidentified
  source 1..162: note = Unknown
  REGION 1..162: note = tr|A0A520S4G2|A0A520S4G2_9GAMM 6-pyruvoyl tetrahydropterin synthase OS=OM182 bacterium OX=2510334; GN = EVA68_01735 PE=4 SV=1
MSRYSRIEIRKQALNFSVAHFTIFSEKERENLHGHNFQVECEITAPVGEDGLVFDYGIIKKLLRQICDELDEHVILPSNSPHLRLEEGEEYTAAIFGNERLLFLPKDLIILPISNTTVEEFSHYILKLLVKHDEFSNKGIIEMTVKVSSSPGQSGCSSWKLT

SEQ ID NO: 23351 - protein, 71 aa, unidentified
  source 1..71: note = Unknown
  REGION 1..71: note = tr|A0A520RVS9|A0A520RVS9_9GAMM 6-carboxytetrahydropterin synthase (Fragment) OS=OM182 bacterium OX=2510334 GN=EVA69_06090 PE=4 SV=1
IEEELQKIVDYFGDKMLNDLPEFAGLNPSIEHFSRIVCEKMLAGVAPPGSGRFTIRIWENETCWAAYYMDY

SEQ ID NO: 23352 - protein, 126 aa, unidentified
  source 1..126: note = Omnitrophica bacterium
  REGION 1..126: note = tr|A0A1G1J9J0|A0A1G1J9J0_9BACT 6-carboxy-5,6,7,8-tetrahydropterin synthase; OS = Omnitrophica bacterium RIFCSPHIGHO2_02_FULL_49_9; OX = 1801822 GN=A3J52_00125 PE=3 SV=1
MGEQFTVRVETRFEAAHNLRQYKGAEEPLHGHSWRVEAKFSTAKLDHEDIAIDYVSLKDAIRKLGERLDHRYINEIPPFDKINPTSENIARWFFDELNRENIRQNTQLSEVVVWEGPDAFVSYRQD

SEQ ID NO: 23353 - protein, 134 aa, unidentified
  source 1..134: note = Omnitrophica bacterium
  REGION 1..134: note = tr|A0A1G1KQX6|A0A1G1KQX6_9BACT Uncharacterized protein OS=Omnitrophica bacterium RIFCSPLOWO2_12_FULL_44_17 OX=1801832 GN=A3G33_03060 PE=4; SV = 1
MSYSVTKTIHFSYGHRLSDYEGECRNFHGHNGKAEIELSSDSLNQFGMVRDFREVNQVMKAWIDQTLDHKLILWKNDPLAALLKQQKEPFYEMETRPTAEAIAKLIYDVAISKGFPATRVTLWETETSSATYHG

SEQ ID NO: 23354 - protein, 122 aa, unidentified
  source 1..122: note = Unknown
  REGION 1..122: note = tr|A0A1G1M2C2|A0A1G1M2C2_9BACT 6-carboxy-5,6,7,8-tetrahydropterin synthase; OS = Omnitrophica WOR_2 bacterium GWB2_45_9 OX=1801843; GN = A2Y42_03425 PE=3 SV=1
MYKLSVKTEFSAAHNLRHYKGKCEALHGHNWKVEAVISAKKTDTNGLAMDFHEIKDILKETLEELDHKHLNQIAYFKKNNPTSENIACYLFGRLDGQLKKGLVYLSEVTVWESDNCSATYCK

SEQ ID NO: 23355 - protein, 121 aa, unidentified
  source 1..121: note = Unknown
  REGION 1..121: note = tr|A0A1G1NU19|A0A1G1NU19_9BACT 6-carboxy-5,6,7,8-tetrahydropterin synthase; OS = Omnitrophica WOR_2 bacterium RIFCSPHIGHO2_01_FULL_48_9; OX = 1801851 GN=A2787_04410 PE=3 S V=1
MYELTIKSDFASAHFVRGYQGNCKDLHGHTWKVEVTVENDKLDAIGMVVDFKIIKQQLKDFLKNIDHVCLNDLPHFKVVNPTTENLAKYIFDEFAKVCHPLRIKKVCVWESETSDVTYYKI

SEQ ID NO: 23356 - protein, 151 aa, unidentified
  source 1..151: note = Opitutaceae bacterium
  REGION 1..151: note = tr|A0A178IK57|A0A178IK57_9BACT 6-pyruvoyl tetrahydropterin synthase OS=Opitutaceae bacterium TSB47; OX = 1184151 GN=AW736_12660 PE=4 SV=1
MPYRISKIFEIENGHILSKHPDNCRFPHGHSRMVEIVLAADSLDSNDMVCDFKAIKESLGAFLESWDHALCLNTADPNFGFYQKTYGSRIIPFEKTDPTSERMAKAIFDEVRARLAEASAAKGARYPVASGVRVERVRVTETSSTWAEYSE

SEQ ID NO: 23357 - protein, 151 aa, unidentified
  source 1..151: note = Opitutaceae bacterium
  REGION 1..151: note = tr|A0A2T6DV20|A0A2T6DV20_9BACT 6-pyruvoyl tetrahydropterin synthase OS=Opitutaceae bacterium EW11; OX = 2161865 GN=DB347_12610 PE=4 SV=1
MPYRISKSFEIESGHILSKHPDKCRFPHGHSRRVEIVLAADSLDANDMVCDFKALKERIGAYIDSWDHALCLNSADANRDFYQQAYGDRVVIFTSTDPTSEVMAKAIFDELTRRLAEGQKQTNSAYRIPVGVRVERVRVTETSSSWAEYSA

SEQ ID NO: 23358 - protein, 117 aa, unidentified
  source 1..117: note = Opitutae bacterium
  REGION 1..117: note = tr|A0A1Z8WM38|A0A1Z8WM38_9BACT 6-carboxy-5,6,7,8-tetrahydropterin synthase OS=Opitutae bacterium TMED67 OX=1986877 GN=CBC27_05715 PE=3 SV=1
MELRKTFQFEAAHYLPNLPKEHKCNRLHGHSFKVEIVVEGECDPKLGWVIDYSDITKAFKPLWEQLDHHYLNEIEGLENPTSENLALWIWKHLKPNLSILTAVEVAETCTARCVYRG

SEQ ID NO: 23359 - protein, 162 aa, unidentified
  source 1..162: note = Opitutae bacterium
  REGION 1..162: note = tr|A0A2A2QC72|A0A2A2QC72_9BACT 6-pyruvoyl tetrahydrobiopterin synthase OS=Opitutae bacterium Tous-C1TDCM OX=1982319 GN=B9S34_02530 PE=4 SV=1
MPKLAARKKPAPPRVLPGIVYITRQVHFNSAHRLYNPTKSQAWNVEQYGLCTNPHWHGHNYVLEVTVRGQPHPDTGYVMELGDLKDLLNEAVVDKCDHRNLNTDVDFLRNVIPSTENLVIAFWHELAPRLPKAAELYRIRLFETPRNYAEFFGPGATEASAR

SEQ ID NO: 23360 - protein, 146 aa, unidentified
  source 1..146: note = Opitutales bacterium
  REGION 1..146: note = tr|A0A3S5J5Y9|A0A3S5J5Y9_9BACT 6-carboxytetrahydropterin synthase OS=Opitutales bacterium TMED207 OX=1986795 GN=CBD67_002060 PE=4 SV=1
  VARIANT 88: note = Xaa can be any naturally occurring amino acid
MLTCSKTYKDIPFAHRQPLHKGHCSKIHGHNWTIVIEFEATELDANGFVVDFGNLKYLKAFIDEHLDHACLFSKKDSQVQSLSQSEFXDLFKILWVDNASCEGIALFLYETFSQLIEAHEKGRVSIRSLKLYEDEKNFVSYIPKNK

SEQ ID NO: 23361 - protein, 143 aa, unidentified
  source 1..143: note = Opitutales bacterium
  REGION 1..143: note = tr|A0A2E7VHY9|A0A2E7VHY9_9BACT 6-pyruvoyl tetrahydropterin synthase OS=Opitutales bacterium; OX = 2026772 GN=CMI32_08605 PE=4 SV=1
MLTCSKTYSDVPLGHRQPHHHGHCACIHGHNWEIKVTFQAADLDENGFVVDFGELHYLKDWIDEHLDHACAFSSTDPQRQKIEELVGLGLIKPLWIENVSCEGFAKYLFETFDPMVRENTGGRVQVVSIELFEDSRNSVLYHP

SEQ ID NO: 23362 - protein, 149 aa, Opitutus sp.
  REGION 1..149: note = tr|A0A2T6CZW0|A0A2T6CZW0_9BACT 6-pyruvoyl tetrahydropterin synthase OS=Opitutus sp. ER46 OX=2161864; GN = DB354_09975 PE=4 SV=1
MPFRIAKTFTIESGHLLSKHPGACRFPHGHSRTVEVIVTADTLDAQDMVCDFKALKTAVGDIITRYDHAFALNTADPHFRELRTAYGERVLAFTNTDPTTEVLAREIFLEINAQMKAAANDAEFPIPACVRLERVRVTETESSWAEYWE

SEQ ID NO: 23363 - protein, 168 aa, Opitutus sp.
  REGION 1..168: note = tr|A0A2T6CQA8|A0A2T6CQA8_9BACT 6-pyruvoyl tetrahydrobiopterin synthase OS=Opitutus sp. ER46; OX = 2161864 GN=DB354_13590 PE=4 SV=1
MPAISPRGKKPDASPRRGGRSAPVRALGGTVYVTRQVHFNSAHRLENPTKSLRWNQAQYGACTRPHWHGHNYVLEVTVAGTPDPETGYVLDLGMLKEILNRAIVEPCDHRNLNTDVPFLRGVIPTTENLVIAFWQRIEPLLPCGRLHRVRLYETPRNFAEYNGPDAPL

SEQ ID NO: 23364 - protein, 161 aa, Opitutus terrae
  REGION 1..161: note = tr|B1ZTR4|B1ZTR4_OPITP Uncharacterized protein; OS = Opitutus terrae (strain DSM 11246 / JCM 15787 / PB90-1); OX = 452637 GN=Oter_1566 PE=4 SV=1
MPAKSRRRRSAARSPRVLRGTVFITRQVHFNAAHRLYNPTKSQAWNTNQYGLCTSPNWHGHNYVLEVTVRGEPDPETGYIVDLSELKRVLHETVVDRCDHRNLNDDVDFLRNVIPTTENLVIAFWDQIEPALPAGKLHCVRLYETPRNFAEYFGPDAPARA

SEQ ID NO: 23365 - protein, 139 aa, Opitutus terrae
  REGION 1..139: note = tr|B1ZSN3|B1ZSN3_OPITP Uncharacterized protein; OS = Opitutus terrae (strain DSM 11246 / JCM 15787 / PB90-1); OX = 452637 GN=Oter_0602 PE=4 SV=1
MPFRIAKSFTVESGHLLTKHPGSCRFPHGHSRTIEIIVTSDQLDAADMVCDFKALKAAATDAVHRFDHTFALNTADPRFAELRAAYGDHVVAFPDTDPTTEVLAREIFQQVRAKLQVPGVRLERVRVTETATSWAEYWE

SEQ ID NO: 23366 - protein, 153 aa, Orenia marismortui
  REGION 1..153: note = tr|A0A4R8H0M2|A0A4R8H0M2_9FIRM PreQ(0) biosynthesis protein QueD OS=Orenia marismortui OX=46469 GN=C7959_10484; PE = 4 SV=1
MSKVTVSKEFSWDMAHILAEHEGLCKNLHGHTYKMRVTVAEKRGSLEDDGAAAGMVIDFKDLKQVVNQEIVEPLDHAFIYWGNSPDEVEHQIARLLSNAERKVFEVEFRPTAEMMASYFLSLLEDSFDNLDIEVVSVKLWETPTSYAEARGEN

SEQ ID NO: 23367 - protein, 151 aa, unidentified
  source 1..151: note = Orenia metallireducens
  REGION 1..151: note = tr|A0A1C0ACH9|A0A1C0ACH9_9FIRM 6-carboxytetrahydropterin synthase QueD OS=Orenia metallireducens OX=1413210 GN=U472_02530 PE=4 SV=1
MITVTKEFSWDMSHMLAEHEGLCKNLHGHTYRMEVTVAKKEGSLEDEGSKAGMVIDFKDLKEIVKEEIISPLDHSFMYWTHSSDEIEHQLAQILQQADRKVFAVDFRPTAEMMAIYFFQSLEDKFNEIDIDLVSIKVWETPTSYAEFRGER

SEQ ID NO: 23368 - protein, 151 aa, unidentified
  source 1..151: note = Orenia metallireducens
  REGION 1..151: note = tr|A0A285GW55|A0A285GW55_9FIRM PreQ(0) biosynthesis protein QueD OS=Orenia metallireducens OX=1413210; GN = SAMN06265827_11176 PE=4 SV=1
MITITKEFSWDMSHMLAEHEGLCKNLHGHTYRMEVTVAKKEGALEDEGSKAGMVIDFKDLKKIVKEEIVEPLDHSFMYWTHSPDEIEHQIARILQQDERKVFAVDFRPTAEMMSIYFFQSLEDRFNGIDINLVSIKVWETPTSYAEFRGER

SEQ ID NO: 23369 - protein, 139 aa, Oribacterium sp.
  REGION 1..139: note = tr|A0A1I2PWE7|A0A1I2PWE7_9FIRM 6-carboxy-5,6,7,8-tetrahydropterin synthase; OS = Oribacterium sp. WCC10 OX=1855343; GN = SAMN05216356_103123 PE=3 SV=1
MFYLKSEASFDAAHFLKDYEGKCRNIHGHRWRVVVEIKGDKLSEDTQTRGMLIDFSDLKKAVKDMCDFFDHSLIYEKDSLKEATIAALTDEHFRLNEVPFRPTAECFSKYFYETLSDKGFTVHRVEVYETPTNCACYEG

SEQ ID NO: 23370 - protein, 140 aa, Oribacterium sp.
  REGION 1..140: note = tr|A0A1S9BSW3|A0A1S9BSW3_9FIRM 6-carboxy-5,6,7,8-tetrahydropterin synthase; OS = Oribacterium sp. C9 OX=1943579 GN=BXO88_12615 PE=3 SV=1
MYFLKSESSFDAAHFLKDYEGKCRNIHGHRWRVVVEIKGESLSEETQTRGMLIDFSDLKRAVKDACDFFDHSLIYESGSLKETTIKALEEENFRLNEVPFRPTAENFSRFFFTSLRDKGFNVHRVDVYETPNNCASFEME

SEQ ID NO: 23371 - protein, 118 aa, unidentified
  source 1..118: note = Oricola cellulosilytica
  REGION 1..118: note = tr|A0A4R0PDB4|A0A4R0PDB4_9RHIZ 6-carboxy-5,6,7,8-tetrahydropterin synthase OS=Oricola cellulosilytica OX=1429082 GN=E0D97_08975 PE=3 SV=1
MYRITKEFHFSASHQLCKLPDDHPCARLHGHNYIVVVELASQDVDGNGFVRDYRELAPLKNYIDDTFDHRHLNEVLGHDSVTAECLAHHLFGWCRERWPETTAVRVSETPKTWAEYRP

SEQ ID NO: 23372 - protein, 126 aa, Ornithinimicrobium humiphilum
  REGION 1..126: note = tr|A0A543KJQ5|A0A543KJQ5_9MICO 6-pyruvoyl-tetrahydropterin synthase OS=Ornithinimicrobium humiphilum OX=125288 GN=FB476_0149 PE=4 SV=1
MFTLTVRDHVMVAHSLPDPFFGPAQGLHGATYVVEAGFERADLDEHGVVLDIGAASEALSAVLGRIAYRNLDEVEELAGVVTTTEWLARWVAEQLAASLDTAGLSAVTVVLREHPDAWASYRLALT

SEQ ID NO: 23373 - protein, 127 aa, Ornithinimicrobium pekingense
  REGION 1..127: note = tr|A0A285VRU2|A0A285VRU2_9MICO 6-pyruvoyltetrahydropterin/6-carboxytetrahydropterin synthase OS=Ornithinimicrobium pekingense OX=384677; GN = SAMN05421879_1099 PE=4 SV= 1
MFTLTVRDHMMVAHSLPDPFFGPARALHGATYVVEAGFERAELDEHGVVLDIGAAGTALAEVLGQLTYRNLDEVEALDGRLTTTEFLARWVAERLAERFEREDLAAITVVLREHPDAWASYRLRLRW

SEQ ID NO: 23374 - protein, 128 aa, Ornithinimicrobium sp.
  REGION 1..128: note = tr|A0A345NSV2|A0A345NSV2_9MICO 6-carboxytetrahydropterin synthase OS=Ornithinimicrobium sp. AMA3305 OX=2283195 GN=DV701_13010 PE=4 SV=1
MHTLTVRDHVMVAHSLPDEFFGPAQALHGATYVVEATWERDGLDAHGVVLDIGAATEALAGVLGRLAYRNLDEVPELAGHVTTTEFLSRWVAERLVEQVDPAPFRSVSVTLREHPDAWASYRLDLDRA

SEQ ID NO: 23375 - protein, 116 aa, Ornithinimicrobium sp.
  REGION 1..116: note = tr|A0A345NQE5|A0A345NQE5_9MICO 6-carboxytetrahydropterin synthase QueD; OS = Ornithinimicrobium sp. AMA3305 OX=2283195; GN = DV701_15040 PE=4 SV=1
MVSRTVHVVRELSFAAARSLPHVWGGRTSPHPYRVALTVAGELDTHGMVVDWGVLDRLAAPALEQLDGGDLVALLGTPSAEIIALWLLDQLEPAVPGLVSVQVWETERASALVHVR

SEQ ID NO: 23376 - protein, 151 aa, Ornithobacterium rhinotracheale
  REGION 1..151: note = tr|I3ZZS2|I3ZZS2_ORNRL 6-pyruvoyl-tetrahydropterin synthase OS=Ornithobacterium rhinotracheale (strain ATCC 51463 / DSM 15997 / CCUG 23171 / CIP 104009 / LMG 9086) O; X = 867902 GN=Ornrh_1014 PE=4 SV=1
MNPQKIRITKIFSFETAHALFGYDGKCKNVHGHSYKLYVTLRGTPIEDTSNEKLGMVIDFGDVKKIVKSEIVDKLDHAVLLNENSGHKSLGEMLEKQGHKVVFTPYQPTCENMLIDFAERIKKQLPPQVELVYLKLYETENSYGEWLAEEN

SEQ ID NO: 23377 - protein, 151 aa, Ornithobacterium rhinotracheale
  REGION 1..151: note = tr|A0A3R5UVT1|A0A3R5UVT1_9FLAO 6-carboxytetrahydropterin synthase OS=Ornithobacterium rhinotracheale OX=28251 GN=EQP59_10395 PE=4 SV=1
MNPQKIRITKIFSFETAHALFGYDGKCKNVHGHSYKLYVTLRGTPIEDTSNEKLGMVIDFGDVKKIVKSEIVDKLDHAVLLNENSGHKSLGEMLEKQGHKVVFTPYQPTCENMLIDFAERIKKQLPPQVELVYLKLYETENSYGEWLVEEN

SEQ ID NO: 23378 - protein, 156 aa, unidentified
  source 1..156: note = Orrella dioscoreae
  REGION 1..156: note = tr|A0A1C3JWW0|A0A1C3JWW0_9BURK 6-carboxytetrahydropteri  n synthase @ Queuosine biosynthesis QueD, PTPS-I OS=Orr  ella dioscoreae; OX = 1851544 GN=ODI_03728 PE=4 SV=1
MNTSADGRAAISVTRRLEFDAGHRIPDHRSQCRNLHGHRYVLEITLSGEVLDAPGESDNGMVMDFSEIKSIAKAHIVDVWDHAFLVFQGDTAVRGFLETLPDHKTVVLDCIPTAENLARIVFRTLAPHYQGHYGQALRLTRVRLFETPNCWADCHG

SEQ ID NO: 23379 - protein, 148 aa, unidentified
  source 1..148: note = Oryzomicrobium terrae
  REGION 1..148: note = tr|A0A5C1EA52|A0A5C1EA52_9RHOO 6-carboxy-5,6,7,8-tetrahydropterin synthase; OS = Oryzomicrobium terrae OX=1735038 GN=ptpS PE=3 SV=1
MQITRRLEFDAGHRIPDHKSQCRHLHGHRYALEITLSGEVIQLDGDAANGMVMDFAEVKALAKEHIVDRWDHAFLVFERDEPLVSFLRSMPDHKTVLMPCVPTAENLAQRAFQLLDEVYRDTYGNHLRLQRVRLYETPNCWADAVRPE

SEQ ID NO: 23380 - protein, 129 aa, Oscillatoria acuminata
  REGION 1..129: note = tr|K9TN53|K9TN53_9CYAN 6-carboxy-5,6,7,8-tetrahydropterin synthase; OS = Oscillatoria acuminata PCC 6304 OX=56110; GN = Oscil6304_4467 PE=3 SV=1
MPKWKVTTEFTFDSAHFIKDYDGPCGRMHGHTYRVRIEATTQKLHSSEYCPHEVMVADFKTLRWAKRDVSKGGLDHCVLNDVMPPEYETTAEMIAKYIYDETKRRLPEGVSLKVAVSETPNSWAEYEDD

SEQ ID NO: 23381 - protein, 137 aa, Oscillatoria acuminata
  REGION 1..137: note = tr|K9TRG2|K9TRG2_9CYAN 6-pyruvoyl-tetrahydropterin synthase OS=Oscillatoria acuminata PCC 6304 OX=56110; GN = Oscil6304_5960 PE=4 SV=1
MSMIYITRRVTFCASHRLHSDALSDEENRRIFGKCNNPNGHGHNYALKVTVRGEVNPETGIVLNFFDLQDAIDAAIIDEVDHKHINLDVPAFKGINPTAENMVVVFWNMLEPKLPPGMLYEMQLYETDNDHVTYRGT

SEQ ID NO: 23382 - protein, 290 aa, unidentified
  source 1..290: note = Oscillatoria nigroviridis
  REGION 1..290: note = tr|K9VJL9|K9VJL9_9CYAN Uncharacterized protein; OS = Oscillatoria nigro-viridis PCC 7112 OX=179408; GN = Osc7112_3040 PE=4 SV=1
MQCIINRRAQFSASHRYWLPELSEAENFERFGPTARAPGHGHNYVLYVSMIGELDEYGMVLNLSDVKHVIKREVIKDLDFSYLNEAWPEFEQTLPTTENIARQIWLRLAPHLPVSKIQLFEHPELWAEYLGNGMEAYLTLSTHFSAAHRLARPDLSFEENSEIYGKCARPNGHGHNYHLEVTVKGEIDARTGMIADLGALQKAVDDYVVEPFDHTFLNKDIAYFEKVVPTAENIAVRIGQLLRSPVRELGAELHKIKLIESPNNSCEIYGADLEEVVAQSQQPEAVLAAV

SEQ ID NO: 23383 - protein, 294 aa, unidentified
  source 1..294: note = [Oscillatoria] sp.
  REGION 1..294: note = tr|D8G1S7|D8G1S7_9CYAN Uncharacterized protein; OS = [Oscillatoria] sp. PCC 6506 OX=272129 GN=OSCI_3060047; PE = 4 SV=1
MQCVINRRAQFSASHRYWLPELSAAENSDRFGPTARAPGHGHNYVLYVSMIGELDSYGMVLNLSNVKHVIKREVTNHLDFSYLNQAWPEFEQTLPTTENIARVIWQRLAPHLPLTRIQLFEHPELWADYLGNGMEAYLTISTHFSAAHRLAHPKLSYEENCEIYGKCARPNGHGHNYHLEVTVKGEMDERTGMIVDLGALQKAIDEYVLDPLDHTFLNKDIAYFAEVVPTAENIAIYIRELLRSPIRELGAQLYKIKLIESPNNSCEVYCTESESESEAATIQEREPVLAPLYK

SEQ ID NO: 23384 - protein, 291 aa, unidentified
  source 1..291: note = Oscillatoriales cyanobacterium
  REGION 1..291: note = tr|A0A1C0VWE2|A0A1C0VWE2_9CYAN 6-pyruvoyl tetrahydropterin synthase OS=Oscillatoriales cyanobacterium USR001 OX=1880991 GN=BCD67_22795 PE=4 SV=1
MQCVINRRAEFSASHRYWLPELSEGENRDRFGPTARAPGHGHNYVLYVSMVGEVDRYGMVLNLSNVKHVIKREVTNDLDFSFLNDVWPEFKQTLPTTENMARVIWQRLAPHLPLIRIQVFENPELWADYLGNEMEAYLTISTHFSAAHRLAHPQLSYEENCEIYGKCARPNGHGHNYHLEVTVRGEMDERTGMIADLGALQKAIDDYVVEPLDHTFLNKDIAYFENVVPTAENIAMYIRELLRAPVADLGAQLHKIKLIESPNNSCEVYCDNLKNRAGLIQEFEPVLAGVS

SEQ ID NO: 23385 - protein, 290 aa, unidentified
  source 1..290: note = Oscillatoriales cyanobacterium
  REGION 1..290: note = tr|K8GH31|K8GH31_9CYAN 6-pyruvoyl-tetrahydropterin synthase OS=Oscillatoriales cyanobacterium JSC-12; OX = 864702 GN=OsccyDRAFT_2803 PE=4 SV=1
MRCIINRRAQFSASHRYWLPELTEAENIARFGACTRAPGHGHNYVLYVSMLGDLDEYGMVLNLSDVKRVIKQEVTSQLDFSYLNDVWEEFQHTLPTTEAIARAIWNRLAPHLPLTRIQLFEHPELWADYYGNNMEAYLTISTHFSAAHRLARPDLSYEENCEIYGKCARPNGHGHNYHLEVTIKGEIDSRTGMVADLVAFQRIVDDLVVEPFDHTFLNKDIAYFVDVVPTAENIAIHIRDLLQAPIQQIGAQLYKVKLIESPNNSCEVYCETPQEAIALSTQRELALAEA

SEQ ID NO: 23386 - protein, 278 aa, unidentified
  source 1..278: note = Osedax symbiont
  REGION 1..278: note = tr|A0A1Y5GUT5|A0A1Y5GUT5_9BACT Uncharacterized protein OS='Osedax' symbiont bacterium Rs2_46_30_T18; OX = 1856298 GN=A9R01_13695 PE=4 SV=1
MKLFVKNLTNVDFSYLDADRGMMGESWLAQLELDGSLNSQGMICDFGLVKSRVRDWLDTYVDHRLVIPVQSAQAELVVEQQNIILHWTYADGEALSCNAPRQAFALVERQKITLESLASWCEGQLLALFGDEVQGLTLSFVPEKIEGAFYHYSHGLQQHDGNCQRIAHGHRSQLEIFLDGERDQQLEQQWALKWKDIYLGTKNHLVKQQDGYNSYQYSAPQGQFSLRLPSSRCDDLATETTVEQIAQHIASELKKTYADRQVTVRAYEGIGKGAIAQA

SEQ ID NO: 23387 - protein, 278 aa, unidentified
  source 1..278: note = Osedax symbiont
  REGION 1..278: note = tr|S6HP53|S6HP53_9GAMM Uncharacterized protein; OS = Osedax symbiont Rs2 OX=1330035 GN=OFPI_12170 PE=4 SV=1
MKLFVKNLTNVDFSFLDAQRGMMGESWLAQLELDGSLNSQGMICDFSLVKSRVRDWLDTYVDHRLVIPVHSAQAEITQQQQNIQLQWTYAEGEKLSCNAPEQAFALVDCQKIDLDTLACWCEGQLLALFGDEVQGLSLSFVPEKMQGAFYHYSHGLQQHDGNCQRIAHGHRSQLEIYLDGERDQQLELQWAQKWQDIYLGTLAHLVKQQGGYNSYQYSAPQGEFSLRLPSSRCDDLTTETTVEQIAQHIANELKKSHANRQVTVRAYEGIGKGAIAQA

SEQ ID NO: 23388 - protein, 140 aa, unidentified
  source 1..140: note = Otariodibacter oris
  REGION 1..140: note = tr|A0A420XGK3|A0A420XGK3_9PAST 6-carboxy-5,6,7,8-tetrahydropterin synthase; OS = Otariodibacter oris OX=1032623 GN=DES31_0822 PE=3 SV=1
MFKIAKEFSFDMAHMLDGHDGKCKNLHGHTYKLQVEISGELYVEGPKAGMVMDYADLKASVNEHILDHMDHAFIYDSTNERESQVATLLNDLNSKTFAIPYRTTAENMAKYMFDKLKTAGLPVSLIRLWETPTSYCEYSN

SEQ ID NO: 23389 - protein, 117 aa, Ottowia sp.
  REGION 1..117: note = tr|A0A5C7VJC6|A0A5C7VJC6_9BURK 6-carboxy-5,6,7,8-tetrahydropterin synthase OS=Ottowia sp.; OX = 1898956 GN=queD PE=3 SV=1
MDIFKVFTLEAAHRLPHVPAGHKCARLHGHSFRVEIHVSGPVDPHSGWVMDFADIKAAFQPLYDQLDHHYLNEVDGLDNPTSERLAAWIWERLKPALPLLSEVVVHETCTSGCRHRG

SEQ ID NO: 23390 - protein, 164 aa, Ottowia sp.
  REGION 1..164: note = tr|A0A5C7VZ72|A0A5C7VZ72_9BURK 6-pyruvoyl tetrahydropterin synthase OS=Ottowia sp. OX=1898956; GN = E6Q64_03960 PE=4 SV=1
MNDTVTIRLAKQAMKFSAAHFTIFSASERERLHGHNFKVEVDIEAQMLGNGMCFDYGIYKDSVIALCRELNEWTILPMHSPHLRIEEADGQVIALFNGQRIPFLRADVLLLPIENATLEEFAAYFLTRLTADREALHVHRIRAIEVRVFSGPGQSAGRRLRMAP

SEQ ID NO: 23391 - protein, 150 aa, Owenweeksia hongkongensis
  REGION 1..150: note = tr|G8R5S9|G8R5S9_OWEHD 6-pyruvoyl-tetrahydropterin synthase OS=Owenweeksia hongkongensis (strain DSM 17368 / CIP 108786 / JCM 12287 / NRRL B-23963 / UST20020801) OX= 926562 GN=Oweho_3446 PE=4 SV=1
MEHFALSNYLTVTKIFRFEMAHVLTSHDGLCKNIHGHSYKLYVTLTGETKNSPGASDDGMLMDFSELKKLVNEQIMNTFDHALVINQNAPYAQVLNDLPFERIKLVPFQPTCENLILHFAKLLVPKLPADIRLNRLRLFETETSYAEWYA

SEQ ID NO: 23392 - protein, 137 aa, Owenweeksia hongkongensis
  REGION 1..137: note = tr|G8R785|G8R785_OWEHD 6-carboxy-5,6,7,8-tetrahydropterin synthase OS=Owenweeksia hongkongensis (strain DSM 17368 / CIP 108786 / JCM 12287 / NRRL B-23963 / UST200208 01) OX=926562 GN=Oweho_3544 PE=3; SV = 1
MRVTVNRKAHFNAAHRLHRADWDDQKNQQVFGRCNNPFYHGHNYELIVSVTGKVDDETGFVVDMKWLADLITEKVEDYLDHKNLNEQIDEFKSLNPTAENIAVVIWKRLRSSIDSQHDLKVTLYETPRNFVEYSGEE

SEQ ID NO: 23393 - protein, 137 aa, Owenweeksia sp.
  REGION 1..137: note = tr|A0A1Z8LE83|A0A1Z8LE83_9FLAO 6-pyruvoyl tetrahydrobiopterin synthase OS=Owenweeksia sp. TMED14; OX = 1986609 GN=CBB74_01620 PE=4 SV=1
MVYIQRRETFSASHRLYNPSWTEERNFEIFGKCSNKRGHGHNFQLIVVVKGEVNPETGFVMNLSDLKNLIRSNIIESVDHTSLNEDIDFLDGIIPSTENLVIAFWKILSPIIVDHGAELHCVRIIETENNSVEYFGK

SEQ ID NO: 23394 - protein, 136 aa, Owenweeksia sp.
  REGION 1..136: note = tr|A0A1Z8L9T0|A0A1Z8L9T0_9FLAO 6-pyruvoyl tetrahydrobiopterin synthase OS=Owenweeksia sp. TMED14; OX = 1986609 GN=CBB74_04475 PE=4 SV=1
MKATVSRHAHFNAAHRLHIRDWSDKKNQEFFGLCNNNNFHGHNYELIVSIKGEIDPITGYVYDMKELSNIIKTKVEKRLDHKNLNLDVPAFKNLNPSAENIAMVIYNWLKPHFSSGIDLKIRLYETPRNYVDFGDD

SEQ ID NO: 23395 - protein, 152 aa, Oxalobacter formigenes
  REGION 1..152: note = tr|C3X241|C3X241_OXAFO Queuosine biosynthesis protein QueD OS=Oxalobacter formigenes HOxBLS OX=556268; GN = OFAG_00430 PE=4 SV=1
MLTITRKLEFDAGHRIPDHHSQCRNLHGHRYVLHITLEGDPLMKEGDSGNGMILDFSEVKKLAETHLVSHWDHAFLVYEKDRPVREFLDSLPNHKTVVLDRVPTVENMAQVAFDTLKNVYEGFYGKALVLKSVRIYETPNCWAEVTADSVHD

SEQ ID NO: 23396 - protein, 153 aa, Oxalobacter formigenes
  REGION 1..153: note = tr|C3XA63|C3XA63_OXAFO Queuosine biosynthesis protein QueD OS=Oxalobacter formigenes OXCC13 OX=556269; GN = queD PE=4 SV=1
MLTITRKLEFDAGHRIPDHHSQCRNLHGHRYVLHITLEGDPHKKDGDSSNGMILDFSEVKRLAETHLVSHWDHAFLVYENDMPVRQFLDSLPNHKTVVLDRVPTAENLAQIAFDTLKDVYEGFYGNKLVLKSIRIYETPNCWAEVTADSVDVR

SEQ ID NO: 23397 - protein, 149 aa, Oxalobacter sp.
  REGION 1..149: note = tr|A0A3A6P316|A0A3A6P316_9BURK 6-carboxy-5,6,7,8-tetrahydropterin synthase OS=Oxalobacter sp. OX=2093374 GN=queD PE=3 SV=1
MLTITRKLEFDAGHRIPDHNSQCRNLHGHRYALHLTLTGEIVTQDGRSDKGMIMDFSDIKALANKYLVDEWDHAFLVYENDLAVRQFLESLPNHKTVVLNKIPTVENLAQIAFDRLKDVFQKEVGLRLVKVTLYETPNCWAEVSEGASA

SEQ ID NO: 23398 - protein, 67 aa, unidentified
  source 1..67: note = Oxalobacteraceae bacterium
  REGION 1..67: note = tr|A0A4Q3IJW5|A0A4Q3IJW5_9BURK 6-pyruvoyl tetrahydropterin synthase family protein (Fragment); OS = Oxalobacteraceae bacterium OX=1871070 GN=EOO80_17855; PE = 4 SV=1
MDIFKVFTLEAAHRLPNVPPGHKCARLHGHSFRVELHVSGDPGAETGWIMDFGDIKAAFQPIYEQLD

SEQ ID NO: 23399 - protein, 149 aa, unidentified
  source 1..149: note = Oxalobacteraceae bacterium
  REGION 1..149: note = tr|A0A3D3PRD7|A0A3D3PRD7_9BURK 6-carboxytetrahydropterin synthase QueD; OS = Oxalobacteraceae bacterium OX=1871070 GN=queD PE=4 SV=1
MLTITRKLEFDAGHRIPDHKSQCRNLHGHRYTLEITLVGAVIDVEGSSDNGMIMDFSDIKALAKEHLVDVWDHAFLVYEKDAVVREFLESIPGHKTVIIDRIPTVENLAQTAFNILKAAYRDRYGTGLHLHKLVLHETPNCWAEVTDPA

SEQ ID NO: 23400 - protein, 117 aa, Pacificibacter maritimus
  REGION 1..117: note = tr|A0A3N4VC83|A0A3N4VC83_9RHOB 6-carboxy-5,6,7,8-tetrahydropterin synthase; OS = Pacificibacter maritimus OX=762213 GN=EDD53_0559 PE=3; SV = 1
MFRITKEFHFSASHQLTHLPHDHQCARLHGHNYIVVIELASKTLNKDGFVRDYGELKALKTYIDDTFDHHHLNDVMDCPSTSENLAQHFYDWCLARWPETSAVKVSETPKTWAEYRP

SEQ ID NO: 23401 - protein, 132 aa, unidentified; identical to SEQ ID NO: 17686
  source 1..132: note = Paenarthrobacter aurescens
  REGION 1..132: note = tr|A1R2X7|A1R2X7_PAEAT Putative 6-pyruvoyl tetrahydropterin synthase OS=Paenarthrobacter aurescens (strain TC1) OX=290340 GN=AAur_0790 PE=4 SV=1

SEQ ID NO: 23402 - protein, 132 aa, unidentified
  source 1..132: note = Paenarthrobacter aurescens
  REGION 1..132: note = tr|A0A4Y3NNQ3|A0A4Y3NNQ3_PAEAU Uncharacterized protein OS=Paenarthrobacter aurescens OX=43663 GN=ptpS; PE = 4 SV=1
MFSLTVRRHFMIAHSLPREAFGPAQGLHGATFVAEVTFRRPNVNDDAIVLDIGAAGGILEEVLADLNYKNLDEHPAFKGKLSTTEALAKHIADAMAAQIQDTADGPALTGIDVVLRENPDAWAGYSLELPVK

SEQ ID NO: 23403 - protein, 132 aa, unidentified
  source 1..132: note = Paenarthrobacter nicotinovorans
  REGION 1..132: note = tr|A0A175J6X6|A0A175J6X6_PAENI 6-pyruvoyl tetrahydrobiopterin synthase OS=Paenarthrobacter nicotinovorans OX=29320 GN=CVCC1112_2347 PE=4 SV=1
MFSLTVRRHFMIAHSLPREAFGPAQGLHGATFVAEVSFRRQNLNDDAIVLDIGAAGGILEEILEDLNYKNLDEHPAFKGKLSTTEALAKHIADAMATRIQDTEDGPALAGIDVVLRENPDAWAGYSLELPAK

SEQ ID NO: 23404 - protein, 132 aa, unidentified
  source 1..132: note = Paenarthrobacter nitroguajacolicus
  REGION 1..132: note = tr|A0A558GWE6|A0A558GWE6_PAENT 6-carboxytetrahydropterin synthase OS=Paenarthrobacter nitroguajacolicus OX=211146 GN=FQP90_14385 PE=4 SV=1
MFSLTVRRHFMIAHSLPREAFGPAQGLHGATFVAEVSFRRPDLNDDAIVLDIGAAGGILEEILEDLNYKNLDEHPAFKGKLSTTEALAKHIADAMATRIQDTEDGPALAGIDVVLRENPDAWAGYSLELPAK

SEQ ID NO: 23405 - protein, 132 aa, unidentified
  source 1..132: note = Paenarthrobacter ureafaciens
  REGION 1..132: note = tr|A0A444GX43|A0A444GX43_9MICC 6-carboxytetrahydropterin synthase OS=Paenarthrobacter ureafaciens OX=37931 GN=AUR_14015 PE=4 SV=1
MFSLTVRRHFMVAHSLPREAFGPAQGLHGATFVAEVTFRRRELNDDAIVLDIGAAGGILEEILADLNYKNLDEHPAFKGKLSTTEALAKHIADVMAARIKSTDDGPALSGIDVVLRENPDAWAGYSLELPGN

SEQ ID NO: 23406 - protein, 140 aa, unidentified
  source 1..140: note = Paenibacillaceae bacterium
  REGION 1..140: note = tr|A0A2A6DYD5|A0A2A6DYD5_9BACL 6-carboxy-5,6,7,8-tetrahydropterin synthase; OS = Paenibacillaceae bacterium JTherm OX=1906605; GN = BLM47_11040 PE=3 SV=1
MLFPYYPAAPHPYRFELHKEMHFSAAHFIPHPDAGDCRRVHGHTYVVDLTVAGDELDDSGFLVNFQDLKRLVHDRFDHRLLNDCPELAGRMPTTETLAETVCRIVQEYLDGRPNRPRVVQVIVRETPTSYVVYRPLQKNG

SEQ ID NO: 23407 - protein, 134 aa, unidentified
  source 1..134: note = Paenibacillaceae bacterium
  REGION 1..134: note = tr|A0A354DFI1|A0A354DFI1_9BACL 6-carboxytetrahydropterin synthase QueD (Fragment); OS = Paenibacillaceae bacterium OX=2003592 GN=queD PE=4 SV=1
MAEYMIPKKIQCLHDDIHPQHLSYHKRRVAVTKEFTFDAAHHLHLYEGKCKSLHGHTYKLVIMVSGFVNEIGICIDFTDIKKMYEEVIKNRLDHRYLNEVLPLMNTTAENMIVWIWEELDQFLVSSGEKQRGTR

SEQ ID NO: 23408 - protein, 148 aa, Paenibacillus agaridevorans
  REGION 1..148: note = tr|A0A2R5F6Q6|A0A2R5F6Q6_9BACL 6-carboxy-5,6,7,8-tetrahydropterin synthase; OS = Paenibacillus agaridevorans OX=171404 GN=PAT3040_07174; PE = 3 SV=1
MLQQIYPSVQHDYCYELNKDFHFAAAHYIPSDDAGKCRLTHGHTYFANVTVAGGELDDSGFLVNFAIIKQLIHNRFDHTLLNEDTDSFDNGISHRFPTTEVVARVIHDLVQTHLDSLPNRPQCLQVFLRETPTSYCIYRPKRKGKGND

SEQ ID NO: 23409 - protein, 161 aa, Paenibacillus algorifonticola
  REGION 1..161: note = tr|A0A1I2IJW6|A0A1I2IJW6_9BACL 6-pyruvoyltetrahydropterin/6-carboxytetrahydropterin synthase OS=Paenibacillus algorifonticola OX=684063; GN = SAMN04487969_13745 PE=4 SV =1
MIQQIYPSVSHPYSYELNKDMHFAAAHSIPSADAGKCAQVHGHTYFANVTIAGDELDASGFLVNFALIKRLIHDRFDHTYLNDDNEHFHAQSADYFPTTEVVARTIYEITQNYLDQLANKPRCVQVYLRETPTSYVIYRPKKTDQQLAANEAQNKAAAPDA

SEQ ID NO: 23410 - protein, 162 aa, Paenibacillus alvei
  REGION 1..162: note = tr|S9U6D4|S9U6D4_PAEAL 6-pyruvoyl tetrahydrobiopterin synthase OS=Paenibacillus alvei TS-15; OX = 1117108 GN=PAALTS15_16961 PE=4 SV=1
MSTPGPFRIVDKLQVLGADISQESLRYHRHRVLVSKEFTFDAAHHLHAYEGKCKNLHGHTYKVVFGLSGFVNEIGLTLDFGDIKEIWKDRIEPYLDHRYLNETLPPMNTTAENMVVWLYEQMQGALQTEPYAERCEGGRVEFVRLYETPTSYAEARREWMEQ

SEQ ID NO: 23411 - protein, 162 aa, Paenibacillus alvei
  REGION 1..162: note = tr|K4ZPN2|K4ZPN2_PAEA2 Queuosine biosynthesis protein QueD OS=Paenibacillus alvei (strain ATCC 6344 / DSM 29 / NBRC 3343 / NCIMB 9371 / NCTC 6352) OX=1206781; GN = queDPE=4 SV=1
MSTPGPFHIVDRLQVLGADISQESLRYHRHRVLVSKEFTFDAAHHLHAYEGKCKNLHGHTYKVVFGVSGFVNEIGLALDFGDIKEIWKDRIEPFLDHRYLNETLPTMNTTAENMVVWLYEQMKAALQAEPYAECCEGGRVEFVRLYETPTSYAEARREWIEQ

SEQ ID NO: 23412 - protein, 163 aa, Paenibacillus amylolyticus
  REGION 1..163: note = tr|A0A100VI08|A0A100VI08_PAEAM 6-pyruvoyl tetrahydrobiopterin synthase OS=Paenibacillus amylolyticus; OX = 1451 GN=PAHA3_0098 PE=4 SV=1
MREPGTFRIVEHLQRIGEDILPTQLRYHRKRVLVSKEFTFDAAHHLHCYEGKCKNLHGHTYKVIFGISGYPGETGLTVDFGHIKDIWKTQIEGYLDHQYLNETLPLMNTTAENMVVWLFEQMEHALQTEPYAGLTEGGRTEFVRLFETPTSYAEARREWMIDE

SEQ ID NO: 23413 - protein, 163 aa, Paenibacillus amylolyticus
  REGION 1..163: note = tr|A0A1R1BWW8|A0A1R1BWW8_PAEAM 6-carboxytetrahydropterin synthase QueD OS=Paenibacillus amylolyticus OX=1451 GN=queD PE=4 SV=1
MREPGTFRIVEHLQRIGEDILPTQLRYHRKRVLVSKEFTFDAAHHLHCYEGKCKNLHGHTYKVIFGISGYPGETGLTVDFGHIKDIWKTQIEGYLDHQYLNETLPLMNTTAENMVVWLFEQMEHALQTEPYAGLTDGGRTEFVRLFETPTSYAEARREWMIDE

SEQ ID NO: 23414 - protein, 169 aa, Paenibacillus antarcticus
  REGION 1..169: note = tr|A0A168QTM1|A0A168QTM1_9BACL 6-pyruvoyl tetrahydrobiopterin synthase OS=Paenibacillus antarcticus; OX = 253703 GN=PBAT_00685 PE=4 SV=1
MNPTPGEFRIIDNLQRLGEGIQRDELKYHTKRVLVCKEFTFDAAHHLHAYEGKCKNLHGHTYKAVFGISGVPNDIGITVDFSEIKSIWKERIEPYLDHRYLNETLPKMNTTAENMVVWLFEEMEQALQDSIHLDHEDIPHASVMRTEFVRLYETPTSYAESRREWMLSE

SEQ ID NO: 23415 - protein, 161 aa, unidentified
  source 1..161: note = Paenibacillus aquistagni
  REGION 1..161: note = tr|A0A1X7LZ63|A0A1X7LZ63_9BACL 6-pyruvoyltetrahydropterin/6-carboxytetrahydropterin synthase OS=Paenibacillus aquistagni OX=1852522; GN = SAMN06295960_4830 PE=4 SV=1
MRQPGPFQIVEKLQRYGTDIEANELRYHRKRVMVSKAFTFDAAHHLHAYEGKCKNLHGHTYKVVFGISGYVDEIGLTLDFGEIKTLWKDRMEPYLDHRYLNDTLPPMNTTAENMVVWIYEQMESALKDSESSKALGCRVEFVRLYETPTGYAEARREWMME

SEQ ID NO: 23416 - protein, 149 aa, unidentified
  source 1..149: note = Paenibacillus baekrokdamisoli
  REGION 1..149: note = tr|A0A3G9JES8|A0A3G9JES8_9BACL 6-carboxy-5,6,7,8-tetrahydropterin synthase; OS = Paenibacillus baekrokdamisoli OX=1712516 GN=queD PE=4; SV = 1
MIQQIYPSAAHPFRYELNKDMQFAAAHYVPSESAGACSRVHGHTYFVNVTVAGDELDESGFLVNFSQIKKLIHNRFDHSLLNDHSALFSDEDPNRYPTTENVARIIAELVSDFLAQTVNKPQCVQIFLRETPTSYVIYRPYAAGGNRHE

SEQ ID NO: 23417 - protein, 163 aa, Paenibacillus barcinonensis
  REGION 1..163: note = tr|A0A2V4VPY3|A0A2V4VPY3_PAEBA 6-pyruvoyltetrahydropterin/6-carboxytetrahydropterin synthase OS=Paenibacillus barcinonensis OX=198119; GN = DFQ00_108117 PE=4 SV=1
MREPGTFRIVERLQRIDQDILPSQLRYHRRRVLVSKEFTFDAAHHLHCYEGKCKNLHGHTYKVVFGISGYPGDTGLTVDFGHIKDIWKSRIEGYLDHQYLNETLPLMNTTAENMVVWLFEQMEQALQTEPYAGLTEGARTEFVRLFETPTSYAEARREWMIHE

SEQ ID NO: 23418 - protein, 271 aa, Paenibacillus barcinonensis
  REGION 1..271: note = tr|A0A2V4VR22|A0A2V4VR22_PAEBA 6-pyruvoyltetrahydropterin/6-carboxytetrahydropterin synthase OS=Paenibacillus barcinonensis OX=198119; GN = DFQ00_107126 PE=4 SV=1
MFHLSRRVEFSAAHVYHVPSWSEQQNKEVFGKCSNLHGHGHDYKLDVVVRGKLNPQSGIVVNTTDIKNTVNAMIEEELDGKFLNREHDHFQHHMPTTENMALYIWDRLNEQFDDCELQQIKLYENTELSAEKERHALPRLTRKYHFCASHRLHSPLLSDEENRQLFGKCNNPHGHGHNYVLDVTVQGTPDADTGMIIHLSELDSIVEREVLDRYDHHHLNLDVEDYKDLNPTSEVVAMVIYNLLKPHLPQLYRIGLWETDKNYFEYYGSGA

SEQ ID NO: 23419 - protein, 164 aa, Paenibacillus barengoltzii
  REGION 1..164: note = tr|R9L9R8|R9L9R8_9BACL Queuosine biosynthesis protein QueD OS=Paenibacillus barengoltzii G22 OX=1235795; GN = C812_02587 PE=4 SV=1
MKRTPGEFRIVEALQKLDQDIRRDQLRYHRRRVLVSKEFTFDAAHHLHAYDGKCKNLHGHTYKVVFGISGRPDEIGMTIDFGTIKEIWKNEIETYLDHRYINETLPPMNTTAENMVVWLFEKMEEALQSEAYRNPVLEARTEFVRLYETPTSYAEARREWMRDE

SEQ ID NO: 23420 - protein, 148 aa, unidentified
  source 1..148: note = Paenibacillus beijingensis
  REGION 1..148: note = tr|A0A0D5NIM4|A0A0D5NIM4_9BACL 6-carboxy-5,6,7,8-tetrahydropterin synthase; OS = Paenibacillus beijingensis OX=1126833 GN=VN24_12320; PE = 3 SV=1
MIQQIYPAPSHSYRYELNKDMQFAAAHYIPAEEAGKCSRVHGHTYFANLTIAGDELDECGFLIDFAVLKRLVHDRFDHRLLNDDTELFDSKDGSRFPTTEAVARIVCELVQQHLDTRPNRPRCIQVFLRETPTSYVIYRPHPEVRHER

SEQ ID NO: 23421 - protein, 160 aa, Paenibacillus borealis
  REGION 1..160: note = tr|A0A1R0YFY5|A0A1R0YFY5_9BACL 6-pyruvoyl tetrahydrobiopterin synthase OS=Paenibacillus borealis; OX = 160799 GN=BSK56_14215 PE=4 SV=1
MLGEVSVCKIFTFDAAHQLIGHKGKCSNLHGHTYKLEVVLKGKPSVEAGHSDEGFVIDFSDIKSTVQQSLVDRLDHAFLAMGNEPVLDTLTNTGSKVALLSFRTTVENMACYIAYKLKQAALPLYSVKLWETPTSWAEVLAEDIPEDGPSYRMHGGCDCE

SEQ ID NO: 23422 - protein, 160 aa, Paenibacillus borealis
  REGION 1..160: note = tr|A0A089MR29|A0A089MR29_9BACL 6-pyruvoyl tetrahydrobiopterin synthase OS=Paenibacillus borealis; OX = 160799 GN=PBOR_19765 PE=4 SV=1
MQGEVSVCKIFTFDAAHQLIGHKGKCSNLHGHTYKLEVVLKGVPSLEHGQSDEGFVIDFSDIKATVKQLVVDRLDHAFLAMGNEPVLETLTATGSKVALLSFRTTAENMSAYIAYELKRASLPVYSVKLWETPTSWAEVLAADIPEEGPSYRLYGGCDHE

SEQ ID NO: 23423 - protein, 162 aa, unidentified
  source 1..162: note = Paenibacillus bovis
  REGION 1..162: note = tr|A0A172ZN12|A0A172ZN12_9BACL 6-carboxytetrahydropterin synthase QueD OS=Paenibacillus bovis OX=1616788 GN=AR543_08000 PE=4 SV=1
MNQPGPFRIVEKLQQYGTDIQHEQLRYHRKRVLVNKEFTFDAAHHLHAYEGKCMNLHGHTYRVIFGISGIPSMNGIVVDFGDIKNIWKERIEPYLDHRYLNETLPPMNTTAENMVVWLYEQMEQALQSEPYCDQVQGGRTEFVQLYETPTSYAEARREWMES

SEQ ID NO: 23424 - protein, 147 aa, unidentified
  source 1..147: note = Paenibacillus catalpae
  REGION 1..147: note = tr|A0A1I1Z6R4|A0A1I1Z6R4_9BACL 6-carboxy-5,6,7,8-tetrahydropterin synthase; OS = Paenibacillus catalpae OX=1045775 GN=SAMN05216378_2961; PE = 3 SV=1
MIQQIYPSVQHPFQYELNKDMQFAAAHSIPSEEAGHCARVHGHTYFANVTIAGDELDSSGFLVNFAAIKKLIHNRFDHTYLNDHQDVFDNNDPNRFPTTEVVARTIYEIVQAYLDETSNKATCVQVFLRETPTSYCIYRPKKVVTHD

SEQ ID NO: 23425 - protein, 159 aa, Paenibacillus cellulosilyticus
  REGION 1..159: note = tr|A0A2V2YFD2|A0A2V2YFD2_9BACL 6-pyruvoyltetrahydropterin/6-carboxytetrahydropterin synthase OS=Paenibacillus cellulosilyticus OX=375489; GN = DFQ01_13919 PE=4 SV=1
MNYEIPRKVQVLGEDIQSHQLRYHKRRVLLSKEFTFDSAHHLHNYEGKCMNLHGHTYKVQLMMSGVPDERGISIDFSDMKRIAQARIIEPLDHRYLNEVLPPMNTTAENMVVWMYEQVHEALVEEGLYPNVRVEEVRLWETPTSFAAITREWMEAADNE

SEQ ID NO: 23426 - protein, 162 aa, Paenibacillus chitinolyticus
  REGION 1..162: note = tr|A0A410WS35|A0A410WS35_9BACL 6-carboxytetrahydropterin synthase QueD OS=Paenibacillus chitinolyticus OX=79263 GN=queD PE=4 SV=1
MKAPGEFRIVENLQQYGQDIRHEQLRYHTKRVLVSKEFTFDAAHHLHAYEGKCKNLHGHTYKAVYGISGYVNEIGLTLDFGEIKDIWKARIEPYLDHRYLNETLPPMNTTAENMVVWLYEQMETALQSDEMQAKARGGRVEFVRLYETPTSYAEARREWMSE

SEQ ID NO: 23427 - protein, 147 aa, Paenibacillus contaminans
  REGION 1..147: note = tr|A0A329MT55|A0A329MT55_9BACL 6-carboxy-5,6,7,8-tetrahydropterin synthase; OS = Paenibacillus contaminans OX=450362 GN=DQG23_02955 PE=3; SV = 1
MLHQLYPSVPHHYSYELNKDMQFAAAHYVPAEEAGKCRNMHGHTYFANITIAGDTLDSAGFLVNFSILKRLIHDRFDHSVLNSDTVSFSDKRPDRFPTTEVVARTICEIVQDYLDRTENRPRCLQVYLRETPTSYCLYRPKAVISND

SEQ ID NO: 23428 - protein, 164 aa, unidentified
  source 1..164: note = Paenibacillus crassostreae
  REGION 1..164: note = tr|A0A167GUJ0|A0A167GUJ0_9BACL 6-pyruvoyl tetrahydrobiopterin synthase OS=Paenibacillus crassostreae; OX = 1763538 GN=PNBC_00235 PE=4 SV=1
MQSPGEFRIIDRLQRFGEDLNHSDLRYHNKRVLVSKEFTFDASHHLHAYEGKCKNLHGHTYKVVFGISGVPNDIGITVDFGEIKDIWKKYIEPYLDHRYLNETLPKMNTTAENMVVWLFEQMEAALQSLQLSEENLILETRTEFVRLFETPTSYAEARREWILG

SEQ ID NO: 23429 - protein, 122 aa, Paenibacillus curdlanolyticus
  REGION 1..122: note = tr|E0I7G5|E0I7G5_9BACL 6-carboxy-5,6,7,8-tetrahydropterin synthase; OS = Paenibacillus curdlanolyticus YK9 OX=717606; GN = PaecuDRAFT_1589 PE=3 SV=1
MIMVLGRHFEFEAAHFLPDVGTFGRCSRMHGHRYELTVEIEGPVNSDGWICDFKELKGVVQEQVLDRYDHSNLNDHFEVSTVENIASQIFSALTHALDGKPYWLKKIKLYETRNCYAEITAN

SEQ ID NO: 23430 - protein, 159 aa, Paenibacillus curdlanolyticus
  REGION 1..159: note = tr|E0IGB8|E0IGB8_9BACL Uncharacterized protein; OS = Paenibacillus curdlanolyticus YK9 OX=717606; GN = PaecuDRAFT_4711 PE=4 SV=1
MTYEIPRNVQIFGEHIQLHELRYHNRRVLLSKEFTFDSAHHLHHYEGKCQSMHGHTYKVQLMMSGKPDERGISIDFADMKRIAQARIIEPLDHKYLNEALPPMNTTAENMVVWMYEQVHEALVEEGLYPNVRVEEIRLWETPTSFAAVTRQWMEASDDE

SEQ ID NO: 23431 - protein, 143 aa, unidentified
  source 1..143: note = Paenibacillus darwinianus
  REGION 1..143: note = tr|A0A015L087|A0A015L087_9BACL 6-carboxy-5,6,7,8-tetrahydropterin synthase; OS = Paenibacillus darwinianus OX=1380763 GN=BG52_07390 PE=3; SV = 1
MLQQIYPPVAHDYAYELNKDMHFAAAHYIPHDDAGKCRRVHGHTYFANVTIAGDELDGSGFLVNFSTVKKLIHERFDHHTVNEDELFDDADPGRYPTTEIMARTIWEIVQEHLDVQPNKPRCLQVFLRETPSSYVVYRPKAVR

SEQ ID NO: 23432 - protein, 273 aa, unidentified
  source 1..273: note = Paenibacillus darwinianus
  REGION 1..273: note = tr|A0A015L4A0|A0A015L4A0_9BACL 6-pyruvoyl tetrahydropterin synthase OS=Paenibacillus darwinianus; OX = 1380763 GN=BG52_10785 PE=4 SV=1
MLFISRRIDFSATHVYRVSSWSEAENKRVFGLCSNPNGHGHDYRLEVVVKGALNEKSGIVVNTTDIKHIVGSFVEDELDGKFLDRQHPYFVTHMPTTENLAGYIWQSLENRFENCELHRIRLYENHYLSAEKEKAALTRLTRKYHFCAAHRLHSDQLSAEENLELFGKCNNPHGHGHNYYLDVTVHGEPDPVTGMIVNLAELDEIVQKQVLDKVDHKHLNLDTAEFKDLNPTSEAVAMVIYNMLHPHLPELHKIGLWETEKNYFEYRGAGELS

SEQ ID NO: 23433 - protein, 162 aa, Paenibacillus dendritiformis
  REGION 1..162: note = tr|A0A4R5YRI3|A0A4R5YRI3_9BACL 6-carboxytetrahydropterin synthase QueD OS=Paenibacillus dendritiformis OX=130049 GN=queD PE=4 SV=1
MSRPGPFRIVEKLQQYGTDISRESLRYHKRRVLVSKEFTFDAAHHLHAYEGKCKNLHGHTYKAVFGLSGYTNDIGIALDFGDIKEIWKERIEPYLDHRYLNETLPPMNTTAENMVVWLYEQMSAALAEEPYRTRCEGGRVEFVRLYETPTSYAEARREWMER

SEQ ID NO: 23434 - protein, 162 aa, Paenibacillus dendritiformis
  REGION 1..162: note = tr|H3SNA3|H3SNA3_9BACL 6-pyruvoyl tetrahydrobiopterin synthase OS=Paenibacillus dendritiformis C454 OX=1131935 GN=PDENDC454_25264 PE=4 SV=1
MSRPGPFRIVEKLQQYGTDISRESLRYHKRRVLVSKEFTFDAAHHLHAYEGKCKNLHGHTYKAVFGLSGYTNDIGIALDFGDIKEIWKERIEPYLDHRYLNETLPPMNTTAENMVVWLYEQMSAALAEEPYRTRCEGGRVEFIRLYETPTSYAEARREWMER

SEQ ID NO: 23435 - protein, 160 aa, unidentified
  source 1..160: note = Paenibacillus donghaensis
  REGION 1..160: note = tr|A0A2Z2KL33|A0A2Z2KL33_9BACL 6-pyruvoyl tetrahydrobiopterin synthase OS=Paenibacillus donghaensis; OX = 414771 GN=B9T62_13770 PE=4 SV=1
MHNEVTVCKIFTFDSAHQLIGHQGKCSNLHGHTYKLEVVLKGIPSSEEGTSGEGFVIDFSEIKSKVKAIVIDRLDHAFLAMGNEPVLETLTLTGSKVAQLSFRTTAENMSCYIAHTLKQAGLPLYSVKLWETPTSWAEVLAADIPLEGPSYRMFGGCDCE

SEQ ID NO: 23436 - protein, 159 aa, Paenibacillus durus
  REGION 1..159: note = tr|A0A089HQT7|A0A089HQT7_PAEDU 6-pyruvoyl tetrahydrobiopterin synthase OS=Paenibacillus durus; OX = 44251 GN=PDUR_15155 PE=4 SV=1
MLHEVSVCKIFSFDAAHQLVGHKGKCANVHGHTYKLEVVLKGKPVAEEGRSDEGFVVDFGDIKELVKERVVDRLDHAFLAKGDEPVLEALKTSGSKTAVLSFRTTAENLASYIAYTLKTSGLPVYSVKLWETPSAWAEVLAADIPEEGPSYRLYGGCDL

SEQ ID NO: 23437 - protein, 159 aa, Paenibacillus durus
  REGION 1..159: note = tr|A0A0F7FAD0|A0A0F7FAD0_PAEDU 6-pyruvoyl tetrahydrobiopterin synthase OS=Paenibacillus durus ATCC 35681 OX=1333534 GN=VK70_10630 PE=4 SV=1
MLGEVTVCKIFSFDAAHQLVGHKGKCANVHGHTYKLEVVLKGKPVAEEGRSDEGFVTDFGDIKALVKEHVVDKLDHAFLAKGDEPVLESLKVSGSKTAELSFRTTAENLASYIAYTLKMSGLPVHSIKLWETPTAWAEVLAADIPEEGPSYRLYGGCDL

SEQ ID NO: 23438 - protein, 158 aa, Paenibacillus elgii
  REGION 1..158: note = tr|A0A2T6G507|A0A2T6G507_9BACL 6-carboxytetrahydropterin synthase QueD OS=Paenibacillus elgii OX=189691 GN=queD PE=4 SV=1
MTYEIPKKVQTLGEDIQRSELKYHDREVLVSKEFTFDSAHHLHCYEGKCKSLHGHTYKLQVVMRGKVDDRGITIDFADIKRIAKERIIDRLDHRYLNEVLPPMNTTAENMVVWMYEQLRDALRSEGLFPAVRLEEVRLWETPTSYAAVTARLMGDDPA

SEQ ID NO: 23439 - protein, 158 aa, Paenibacillus elgii
  REGION 1..158: note = tr|A0A165RBZ3|A0A165RBZ3_9BACL 6-pyruvoyl tetrahydrobiopterin synthase OS=Paenibacillus elgii; OX = 189691 GN=AV654_11290 PE=4 SV=1
MTYEIPKKVQTLGEDIQRSELKYHDREVLVSKEFTFDSAHHLHCYEGKCKSLHGHTYKLQVVMRGKVDDRGITIDFADIKRIAKERIIDRLDHRYLNEVLPPMNTTAENMVVWMYEQLRDALRSEGLFPAVRLEEVRLWETPTSYASVTARLMGDDPA

SEQ ID NO: 23440 - protein, 160 aa, unidentified
  source 1..160: note = Paenibacillus etheri
  REGION 1..160: note = tr|A0A0W1AYZ2|A0A0W1AYZ2_9BACL 6-pyruvoyl tetrahydrobiopterin synthase OS=Paenibacillus etheri; OX = 1306852 GN=UQ64_13855 PE=4 SV=1
MLNEVSVCKIFTFDSAHQLVGHKGKCSNLHGHTYKLEVVLKGKPMAAEGHSDEGFVIDFSDIKTTVQQTLVDRLDHAFLAMGNEPVFETLTNTGSKVALLSFRTTVENMSSYIAYKLKQAGLPLYAVKLWETPTSWAEVLAEDVPDEGPSYRLYGGCDCE

SEQ ID NO: 23441 - protein, 164 aa, unidentified
  source 1..164: note = Paenibacillus faecis
  REGION 1..164: note = tr|A0A5D0CZJ1|A0A5D0CZJ1_9BACL 6-carboxytetrahydropterin synthase QueD OS=Paenibacillus faecis OX=862114 GN=queD PE=4 SV=1
MSRMPGEFRIVDNLQALGRDIDEAQLQYHRRRVLVSKEFTFDAAHHLHAYEGKCKNLHGHTYKVVFGISAIPDKRGISLDFGTIKQIWKDEIEGFLDHRYLNETLPPMNTTAENMVVWLYEKMEAALSSERYRDASAEARTEFVRLYETPNSYAEARREWMGDE

SEQ ID NO: 23442 - protein, 157 aa, unidentified
  source 1..157: note = Paenibacillus ferrarius
  REGION 1..157: note = tr|A0A1V4HKH9|A0A1V4HKH9_9BACL 6-carboxytetrahydropterin synthase QueD OS=Paenibacillus ferrarius OX=1469647 GN=BC351_25385 PE=4 SV=1
MSYDIPRDVQMLGRDIQENQLKYHNKFVLISKEFTFDSAHHLHCYEGKCKNLHGHTYKLQVIMRGQVDSRGIAIDFGDIKRIAKERVIDRLDHKYLNDVLPAMNTTAENMIVWMYEEIHQALVNEQLFPAIKLEEIRLWETPTSYAAITRAMMEEDL

SEQ ID NO: 23443 - protein, 146 aa, Paenibacillus ginsengarvi
  REGION 1..146: note = tr|A0A3B0BIN1|A0A3B0BIN1_9BACL 6-carboxy-5,6,7,8-tetrahydropterin synthase; OS = Paenibacillus ginsengarvi OX=400777 GN=D7M11_27945 PE=3; SV = 1
MMQQIYPTIPHPYAYELNKDLQFAAAHYVPAEEAGNCRKLHGHTYFANITVAGDTLDSAGFLVNFSILKRLIHERFDHTVLNDDRESFDDQHPDRFPTTEVVARTICDIVQRYLDGTENKPRCLQVYLRETPTSYCLYRPKAGDGR

SEQ ID NO: 23444 - protein, 169 aa, Paenibacillus glacialis
  REGION 1..169: note = tr|A0A168NN11|A0A168NN11_9BACL 6-pyruvoyl tetrahydrobiopterin synthase OS=Paenibacillus glacialis; OX = 494026 GN=PGLA_00730 PE=4 SV=1
MNYTPGVFRIIDNLQRFGEDIQHDELKYHTKRVLVCKEFTFDAAHHLHAYEGKCKNLHGHTYKAVFGISGVPNDIGITVDFGEIKDIWKDRIEPYLDHRYLNETLPKMNTTAENMVVWLFEQMEQALQGSIHLNHEDIPHSNVIRTEFVRLYETPTSYAESRREWMLSE

SEQ ID NO: 23445 - protein, 163 aa, Paenibacillus glucanolyticus
  REGION 1..163: note = tr|A0A163KNE1|A0A163KNE1_9BACL 6-pyruvoyl tetrahydrobiopterin synthase OS=Paenibacillus glucanolyticus OX=59843 GN=AWU65_16300 PE=4 SV=1
MSREPGTFRIVEHLQKLGEDIDAGSLRYHRKRVLVSKEFTFDAAHHLHCYEGKCKNLHGHTYKVVFGISGIPNEVGITVDFGDIKDCWKTDIEPYLDHRYLNETLPPMNTTAENMVVWLFEKMEDALRSKESHEQQGTRTEFVRLFETPTSYAEVRREWMIHE

SEQ ID NO: 23446 - protein, 160 aa, Paenibacillus graminis
  REGION 1..160: note = tr|A0A089MC81|A0A089MC81_9BACL 6-pyruvoyl tetrahydrobiopterin synthase OS=Paenibacillus graminis; OX = 189425 GN=PGRAT_16835 PE=4 SV=1
MLGEVSVCKIFTFDSAHQLVGHKGKCSNLHGHTYKLEVVLKGKPLVEEGHSDEGFVVDFSDIKAAVQESLVDHLDHAFLAMGNEPVLETLMNTGSKVALLSFRTTVENMSAYIAYKLKQASLPLYSVKLWETPTSWAEVLAADIPAEGPSYRLFGGCDCE

SEQ ID NO: 23447 - protein, 147 aa, unidentified
  source 1..147: note = Paenibacillus hemerocallicola
  REGION 1..147: note = tr|A0A5C4T8P7|A0A5C4T8P7_9BACL 6-carboxy-5,6,7,8-tetrahydropterin synthase; OS = Paenibacillus hemerocallicola OX=1172614 GN=FE784_14675; PE = 3 SV=1
MMQQIYPVASHSYAYELNKDMQFAAAHYVPAEEAGKCRKLHGHTYFANITVAGDTLDSAGFLVNFAILKQLIHERFDHSVLNDDTESFSADEPDRFPTTEAVARTICEIVQRHLDGTENRARCLQVYLRETPTSYCIYRPKAGIAHA

SEQ ID NO: 23448 - protein, 148 aa, unidentified
  source 1..148: note = Paenibacillus herberti
  REGION 1..148: note = tr|A0A229NYF7|A0A229NYF7_9BACL 6-carboxy-5,6,7,8-tetrahydropterin synthase; OS = Paenibacillus herberti OX=1619309 GN=queD PE=3 SV=1
MQQIYPAPPPHVYRYELNKEFHFAAAHYIPAEAAGSCSRVHGHTYYCNVTVGGDKLDDCGFLVNFSEVKKLVRDRFDHRLLNDDERFGGGASELDPQHFPTTEVVARTVWELVQEELDRRDNGARCLQVFLRETPSSYVIYRPEAQHG

SEQ ID NO: 23449 - protein, 163 aa, unidentified
  source 1..163: note = Paenibacillus ihbetae
  REGION 1..163: note = tr|A0A1B2DXL7|A0A1B2DXL7_9BACL 6-carboxytetrahydropterin synthase QueD OS=Paenibacillus ihbetae OX=1870820 GN=BBD41_07730 PE=4 SV=1
MSREPGAFRIVERLQKLGEDIDAGSLRYHRKRVLVSKEFTFDAAHHLHAYEGKCKNLHGHTYKVVFGISGIPDEVGITVDFGDIKEIWKSEIEPYLDHRYLNETLPPMNTTAENMVVWLFEKMEAALSAKPSHEQQGTRTEFVRLFETPTSYAEVRREWMLGE

SEQ ID NO: 23450 - protein, 163 aa, Paenibacillus illinoisensis
  REGION 1..163: note = tr|A0A2W0CCD1|A0A2W0CCD1_9BACL 6-pyruvoyl tetrahydrobiopterin synthase OS=Paenibacillus illinoisensis OX=59845 GN=PIL02S_04475 PE=4 SV=1
MREPGTFRIVEHLQRIGEDILPSQLRYHRKRVLVSKEFTFDAAHHLHCYEGKCKNLHGHTYRVVFGISGYPGETGLTVDFGHIKDIWKTKIEGYLDHQYLNETLPLMNTTAENMVVWLFEQMEHALQTEPYAGLTEGGRTEFVRLYETPTSYAEARREWMIDE

SEQ ID NO: 23451 - protein, 160 aa, Paenibacillus jilunlii
  REGION 1..160: note = tr|A0A1G9KCC1|A0A1G9KCC1_9BACL PreQ(0) biosynthesis protein QueD OS=Paenibacillus jilunlii OX=682956; GN = SAMN05216191_103202 PE=4 SV=1
MLGEVSVCKIFTFDSAHQLIGHKGKCSNLHGHTYKLEVVLKGKPLAVEGHSDEGFVADFSDIKATVQERLVDHLDHAFLAMGNEPVLETLKNTGSKVALLSFRTTVENMSAYIAYTLKQASLPLYSVKLWETPTSWAEVLAADIPAEGPSYRLNGGCDCE

SEQ ID NO: 23452 - protein, 163 aa, Paenibacillus kribbensis
  REGION 1..163: note = tr|A0A222WQC1|A0A222WQC1_9BACL 6-carboxytetrahydropterin synthase QueD OS=Paenibacillus kribbensis OX=172713 GN=B4V02_19545 PE=4 SV=1
MREPGTFHIVNKLQQFGTDIQHAQLRYHRKRVLVSKQFTFDAAHHLHCYEGKCKNLHGHTYIVVFGISGIPDETGLTMDFGDIKTIWKERIEPYLDHRYLNETLPPMNTTAENMVVWIFEQMESALSSDAYRSRVEGGRTEFVRLFETPTSYAEFRREWMLDE

SEQ ID NO: 23453 - protein, 163 aa, Paenibacillus lactis
  REGION 1..163: note = tr|G4HI40|G4HI40_9BACL Uncharacterized protein; OS = Paenibacillus lactis 154 OX=743719 GN=PaelaDRAFT_3651; PE = 4 SV=1
MSREPGAFRIVERLQKLGEDIDAGSLRYHRKRVLVSKEFTFDAAHHLHAYEGKCKNLHGHTYKVVFGISGIPDEVGITVDFGEIKDIWKSEIEPYLDHRYLNETLPPMNTTAENMVVWLFEKMEAALSAKPSHEQQGTRTEFVRLFETPTSYAEVRREWMLGE

SEQ ID NO: 23454 - protein, 161 aa, Paenibacillus larvae
  REGION 1..161: note = tr|V9W372|V9W372_9BACL Queuosine biosynthesis protein QueD OS=Paenibacillus larvae subsp. larvae DSM 25430 OX=697284 GN=queD PE=4 SV=1
MTRPGDFRIVDKLQRAGQDIACSQLRYHHKRVLVSKEFTFDASHHLHAYEGKCKNLHGHTYKAVFGISGRVNDIGLMVDFADIKEIWKQDIEPYLDHRYLNETLPAMNTTAENMVVWLFEKMEESLPDRIMEEQGARVEFVRLYETPTSFAEARREWITGD

SEQ ID NO: 23455 - protein, 161 aa, Paenibacillus larvae
  REGION 1..161: note = tr|A0A1U9YMG9|A0A1U9YMG9_9BACL 6-carboxytetrahydropterin synthase QueD OS=Paenibacillus larvae subsp. pulvifaciens OX=1477 GN=B5S25_08465 PE=4 SV=1
MTRPGDFRIVDKLQRAGQDITCSQLRYHHKRVLVSKEFTFDASHHLHAYEGKCKNLHGHTYKAVFGISGRVNDIGLMVDFADIKEIWKQDIEPYLDHRYLNETLPAMNTTAENMVVWLFEKMEESLPDRIMEEQGARVEFVRLYETPTSFAEARREWITGD

SEQ ID NO: 23456 - protein, 163 aa, Paenibacillus lautus
  REGION 1..163: note = tr|A0A1R1B2J9|A0A1R1B2J9_PAELA 6-carboxytetrahydropterin synthase QueD OS=Paenibacillus lautus OX=1401 GN=BK123_14170 PE=4 SV=1
MSREPGAFRIVEQLQKLGEDIDAGSLRYHRKRVLVSKEFTFDAAHHLHCYEGKCKNLHGHTYKVVFGISGIPNEVGITVDFGDIKDCWKTDIEPYLDHRYLNETLPPMNTTAENMVVWLFEKMEEALRSKESHERQGTRTEFVRLFETPTSYAEVRREWMIDE

SEQ ID NO: 23457 - protein, 163 aa, Paenibacillus lautus
  REGION 1..163: note = tr|A0A385TU78|A0A385TU78_PAELA 6-carboxytetrahydropterin synthase QueD OS=Paenibacillus lautus OX=1401 GN=queD PE=4 SV=1
MSREPGAFRIVEHLQKLGEDIDAGSLRYHRKRVLVSKEFTFDAAHHLHCYEGKCKNLHGHTYKVVFGISGTPNEVGITVDFGDIKDCWKTSIEPYLDHRYLNETLPPMNTTAENMVVWLFEKMEEALRSRESYEQQGMRTEFVRLFETPTSYAEVRREWMIHE

SEQ ID NO: 23458 - protein, 164 aa, unidentified
  source 1..164: note = Paenibacillus lentus
  REGION 1..164: note = tr|A0A3Q8S6D5|A0A3Q8S6D5_9BACL 6-carboxytetrahydropterin synthase QueD OS=Paenibacillus lentus OX=1338368 GN=queD PE=4 SV=1
MSFVPGEFRIVDKLQKLGEDIPHSELRYHKRRVLVSKEFTFDAAHHLHAYEGKCKNLHGHTYRVIFGISGIPDELGLTIDFGTIKTIWKQEIEGYLDHQYLNESLPLMNTTAENMVVWLYEQMEQALQSDAYRSSSLQARTEFVRLYETPTSYAEARREWMSGE

SEQ ID NO: 23459 - protein, 164 aa, Paenibacillus macerans
  REGION 1..164: note = tr|A0A090ZBQ9|A0A090ZBQ9_PAEMA Queuosine biosynthesis protein QueD OS=Paenibacillus macerans; OX = 44252 GN=queD PE=4 SV=1
MSRTPGEFRIVESLQKLGRDIGKEQLRYHRRRVLVSKEFTFDAAHHLHAYEGKCKNLHGHTYKAVFGISALPNEIGITVDFGTIKEIWKNEIEVYLDHRYLNETLPPMNTTAENTVVWLFEKMEAALGSETYRNVVLEGRTEFVRLYETPTSYAEVRREWMLDE

SEQ ID NO: 23460 - protein, 169 aa, Paenibacillus macquariensis
  REGION 1..169: note = tr|A0A1N6UXM6|A0A1N6UXM6_9BACL 6-pyruvoyltetrahydropterin/6-carboxytetrahydropterin synthase OS=Paenibacillus macquariensis OX=948756; GN = SAMN05421578_103453 PE=4 SV= 1
MNHTPGEFRIIDNLQRFGEDIQRDELKYHNKRVLVCKEFTFDAAHHLHAYEGKCKNLHGHTYKAVFGISGVPNDIGITVDFGEIKDIWKDLIEPYLDHRYLNETLPKMNTTAENMVAWLFEQMEQALQGSIHLKHEDIPCSNDIRTEFVRLYETPTSYAEARREWMLSE

SEQ ID NO: 23461 - protein, 169 aa, Paenibacillus macquariensis; identical to SEQ ID NO: 23460
  REGION 1..169: note = tr|A0A162LYZ7|A0A162LYZ7_PAEMC 6-pyruvoyl tetrahydrobiopterin synthase OS=Paenibacillus macquariensis OX=1468 GN=PMSM_07880 PE=4 SV=1

SEQ ID NO: 23462 - protein, 160 aa, unidentified
  source 1..160: note = Paenibacillus montanisoli
  REGION 1..160: note = tr|A0A328U852|A0A328U852_9BACL 6-carboxytetrahydropterin synthase QueD OS=Paenibacillus montanisoli OX=2081970 GN=queD PE=4 SV=1
MTYEIPKQIERLGEEIQEHQLRYHNRRVIVSKEFTFDSAHHLHLYEGKCKSLHGHTYKLQTILSGKTDHRGLTIDFADMKRIAKERVIDKLDHRYLNEVLPPMNTTAENMVVWIYEQIHHALIEEGHYPNIRIEEIRLWETPTSFAAVTREMMEADENDG

SEQ ID NO: 23463 - protein, 156 aa, Paenibacillus mucilaginosus
  REGION 1..156: note = tr|F8FPI7|F8FPI7_PAEMK Queuosine biosynthesis protein QueD OS=Paenibacillus mucilaginosus (strain KNP414) OX=1036673 GN=KNP414_01648 PE=4 SV=1
MEYEIPKKVQILGEDIQQSQLKYHDREVLVSKEFTFDSAHHLHCYEGKCQSLHGHTYKLQVIMRGKVDHRGITIDFGDIKRIAKERVIDRLDHRYLNDVLPPMNTTAENMVVWMYEQLAAALREENLYPAVRLEEVRLWETPTSFAAVTARLMGEE

SEQ ID NO: 23464 - protein, 156 aa, Paenibacillus mucilaginosus; identical to SEQ ID NO: 23463
  REGION 1..156: note = tr|H6NA12|H6NA12_9BACL Queuosine biosynthesis protein QueD OS=Paenibacillus mucilaginosus 3016; OX = 1116391 GN=PM3016_1952 PE=4 SV=1

SEQ ID NO: 23465 - protein, 149 aa, Paenibacillus nanensis
  REGION 1..149: note = tr|A0A3A1V3R8|A0A3A1V3R8_9BACL 6-carboxy-5,6,7,8-tetrahydropterin synthase; OS = Paenibacillus nanensis OX=393251 GN=queD PE=3 SV=1
MLQQVYPSPQHDYVYELNKDFHFAAAHYVPSEEAGKCQRVHGHTYYANVTVAGDELDAAGFLVNFAIIKKLIHERFDHTLLNDDTDSFDEADPNRFPTTEVVARTVCELVQQYLDGTANKPVCVQVFLRETPTSYCVYRPKRKGGKSHE

SEQ ID NO: 23466 - protein, 158 aa, Paenibacillus naphthalenovorans
  REGION 1..158: note = tr|A0A0U2VXL1|A0A0U2VXL1_9BACL 6-carboxytetrahydropterin synthase QueD OS=Paenibacillus naphthalenovorans OX=162209 GN=IJ22_06590 PE=4 SV=1
MEYEIPKKVQTLGEDIQKSQLKYHDREVLVSKEFTFDSAHHLHCYEGKCKSLHGHTYKLQVIMRGKVDERGITIDFADIKRIAKARILDRLDHRYLNEVLPPMNTTAENMVVWMYEQLRDALASEGLYPAVRVEEVRLWETPTSYASVTARLMGDELS

SEQ ID NO: 23467 - protein, 162 aa, unidentified
  source 1..162: note = Paenibacillus nuruki
  REGION 1..162: note = tr|A0A1E3KZ79|A0A1E3KZ79_9BACL 6-pyruvoyltetrahydropterin synthase OS=Paenibacillus nuruki OX=1886670 GN=queD PE=4 SV=1
MNQPGPFRIVEKLQQYGTDIQHEQLRYHRRRVLVNKEFTFDAAHHLHAYDGKCMNLHGHTYRVIFGISGIPSDNGIVVDFGDIKNIWKAHIEPFLDHRYLNETLPPMNTTAENMVVWLYEQMELALQSEPYAGQVEGGRVEFVQLYETPTSYAEARREWMQA

SEQ ID NO: 23468 - protein, 160 aa, Paenibacillus odorifer
  REGION 1..160: note = tr|A0A1R0XY09|A0A1R0XY09_9BACL 6-pyruvoyl tetrahydrobiopterin synthase OS=Paenibacillus odorifer; OX = 189426 GN=BSO21_01955 PE=4 SV=1
MLNEVSVCKIFTFDAAHQLVGHKGKCSNLHGHTYKLEVVLKGKPMAAEGHSDEGFVIDFSDIKMTVQQSLVDRLDHAFLAMGNEAVLETLTNTGSKVALLSFRTTVENMSSYIAYKLKQAGLPLYSVKLWETPTSWAEVLGEDVPDEGPSYRLYGGCDCE

SEQ ID NO: 23469 - protein, 160 aa, Paenibacillus odorifer
  REGION 1..160: note = tr|A0A1R0Z6P7|A0A1R0Z6P7_9BACL 6-pyruvoyl tetrahydrobiopterin synthase OS=Paenibacillus odorifer; OX = 189426 GN=BJP51_10340 PE=4 SV=1
MLNEVSVCKIFTFDAAHQLVGHKGKCSNLHGHTYKLEVVLKGKPMAAEGHSDEGFVIDFSDIKMTVQQSLVDRLDHAFLAMGNEPVLETLTNTGSKVALLSFRTTVENMSSYIAYKLKQAGLPLYSVKLWETPTSWAEVLAEDVPDEGPSYRLYGGCDCE

SEQ ID NO: 23470 - protein, 159 aa, unidentified
  source 1..159: note = Paenibacillus oryzae
  REGION 1..159: note = tr|A0A1A5YJW6|A0A1A5YJW6_9BACL 6-pyruvoyl tetrahydrobiopterin synthase OS=Paenibacillus oryzae; OX = 1844972 GN=A7K91_18245 PE=4 SV=1
MMNEVSVCKIFTFDSAHQLIGHSGKCANVHGHTYKLEVVLKAPVIAEEGVSDEGFVMDFSHLKSIVKEHILSHLDHAFLAAGNEPVLESLQNTGSKIAKLGFRTTAENLASYICWRLLSHGLPVFSVKLWETGSAWAEVEAADIPAEGPLYRKFGDCDF

SEQ ID NO: 23471 - protein, 157 aa, unidentified
  source 1..157: note = Paenibacillus oryzisoli
  REGION 1..157: note = tr|A0A198AN50|A0A198AN50_9BACL 6-carboxytetrahydropterin synthase QueD OS=Paenibacillus oryzisoli OX=1850517 GN=A8708_12180 PE=4 SV=1
MSYEIPRSVQELGRDIQENQLKYHHKSVLISKEFTFDSAHHLHCYEGKCKSLHGHTYKLQVIMRGKVDSRGIAIDFGDIKRITKERVIDRLDHRYLNDVLPPMNTTAENMVVWIYEEIHQALLDEKLYPAISLDEIRLWETPTSYAAITRSMMEEDL

SEQ ID NO: 23472 - protein, 163 aa, Paenibacillus pabuli
  REGION 1..163: note = tr|A0A327PLH9|A0A327PLH9_9BACL 6-pyruvoyltetrahydropterin/6-carboxytetrahydropterin synthase OS=Paenibacillus pabuli OX=1472 GN=DET54_110135; PE = 4 SV=1
MREPGTFRIVERLQRIGEDILPAQLRYHRKRVLVSKEFTFDAAHHLHCYEGKCKNLHGHTYKVVFGISGYPGETGLTVDFGHIKEIWQTQIEGYLDHQYLNETLPLMNTTAENMVVWLFEQMEHALQTEPYAALTEGGRTEFVRLYETPTSYAEARREWMIDE

SEQ ID NO: 23473 - protein, 148 aa, unidentified
  source 1..148: note = Paenibacillus paeoniae
  REGION 1..148: note = tr|A0A371PP14|A0A371PP14_9BACL 6-carboxy-5,6,7,8-tetrahydropterin synthase; OS = Paenibacillus paeoniae OX=2292705 GN=DX130_11200 PE=3; SV = 1
MLQQIYPSVPHFYLYELNKDFQFDAAHFVPAEAAGKCQRIHGHTYYANVTVVGDALDESGFLVNFAAIKGLIHGRFDHTLLNDDGESFDAANPDRFPTTEVVARTIWELVQRYLDGMPNKPVCLQVYLRETPTSYCIYRPKRKAASHE

SEQ ID NO: 23474 - protein, 219 aa, Paenibacillus pasadenensis
  REGION 1..219: note = tr|A0A2N5N116|A0A2N5N116_9BACL 6-carboxytetrahydropterin synthase, Queuosine biosynthesis QueD, PTPS-I OS=Paenibacillus pasadenensis OX=217090; GN = B8V81_2462 PE=4 SV= 1
MMHAIYPAPAHPFRYELNKEFHFAAAHYIPAEAAGRCSRVHGHTYYCNVTVGGDRLDECGFLVNFSEIKKLVQDRFDHRLLNEDELFGGPARLPNGGEAAEAVVQGSKAAEAMRHGKADAARGAWAERAAAVEAAGEQGAASGAVRHGKADAAWQGSAAIADSALDPERFPTTEVVARTVWQLVQEELDRRGNGARCLQVFLRETPSSYVIYRPEAAHG

SEQ ID NO: 23475 - protein, 157 aa, Paenibacillus pectinilyticus
  REGION 1..157: note = tr|A0A1C0ZV65|A0A1C0ZV65_9BACL 6-carboxytetrahydropterin synthase QueD OS=Paenibacillus pectinilyticus OX=512399 GN=A8709_29535 PE=4 SV=1
MSYEIPRDVQELGRDIQENQLKYHHKSVLVSKEFTFDSAHHLHCYEGKCKSLHGHTYKLQVIMRGKVDSRGISIDFGDIKRITKERVIDRLDHKYLNDVLPPMNTTAENMVVWIYEEIHQALLEEKLYPAIALEEIRLWETPTSYAAITRSMMEEDV

SEQ ID NO: 23476 - protein, 163 aa, Paenibacillus peoriae
  REGION 1..163: note = tr|A0A0K2F5G3|A0A0K2F5G3_9BACL 6-pyruvoyl tetrahydrobiopterin synthase OS=Paenibacillus peoriae; OX = 59893 GN=ABE82_05615 PE=4 SV=1
MREPGTFRIVDKLQQFGTDIEHSQLRYHRKRVLVSKQFTFDAAHHLHCYEGKCKNLHGHTYIVVFGISGIPGETGLTLDFGDIKTIWKERLEPFLDHRYLNETLPPMNTTAENMVVWIFEQMESALTSDAYCNRVEGGRTEFVRLFETPTSYAEFRREWMLDE

SEQ ID NO: 23477 - protein, 163 aa, Paenibacillus peoriae
  REGION 1..163: note = tr|A0A2S6NWF0|A0A2S6NWF0_9BACL 6-carboxytetrahydropterin synthase QueD OS=Paenibacillus peoriae OX=59893 GN=queD PE=4 SV=1
MREPGTFRIVDKLQQFGTDIEHSQLRYHRKRVLVSKQFTFDAAHHLHCYEGKCKNLHGHTYIVVFGISGIPGETGLTLDFGDIKTIWKERIEPFLDHRYLNETLPPMNTTAENMVVWIFEQMESALTSDAYCNRVEGGRTEFVRLFETPTSYAEFRREWMLDE

SEQ ID NO: 23478 - protein, 164 aa, Paenibacillus pini
  REGION 1..164: note = tr|W7YZ64|W7YZ64_9BACL Queuosine biosynthesis QueD; OS = Paenibacillus pini JCM 16418 OX=1236976; GN = JCM16418_1687 PE=4 SV=1
MSRTPGEYRIVEHLQVLGEEIQISDLRYHNRRALVSKEFTFDAAHHLHAYEGKCKNLHGHTYKVVFGISALPNDIGITADFGLIKQIWKNHIETFLDHRYLNETLPLMNTTAENMVVWLYERMEEALNSTEYRPIIHEGRTEFVRLYETPTSYAEIRREWMHGE

SEQ ID NO: 23479 - protein, 148 aa, unidentified
  source 1..148: note = Paenibacillus pinisoli
  REGION 1..148: note = tr|A0A3A6PPP6|A0A3A6PPP6_9BACL 6-carboxy-5,6,7,8-tetrahydropterin synthase; OS = Paenibacillus pinisoli OX=1276110 GN=queD PE=3 SV=1
MLQQIYPSAPHDYSYELNKDFQFDAAHFVPSEAAGKCQRIHGHTYYANVTVAGDELDESGFLVNFALIKELIHGRFDHTLLNDDSASFDGENPDRFPTTEVVARTVWELVQAYLDGMPNKPVCLQVYLRETPTSYCIYRPKRKAASHE

SEQ ID NO: 23480 - protein, 163 aa, Paenibacillus polymyxa
  REGION 1..163: note = tr|A0A1D7MLE9|A0A1D7MLE9_PAEPO 6-carboxytetrahydropterin synthase QueD OS=Paenibacillus polymyxa OX=1406 GN=AOU00_18405 PE=4 SV=1
MREPGTFRIVDKLQQFGTDISHSQLRYHRKRVLVSKQFTFDAAHHLHCYEGKCKNLHGHTYIVVFGISGIPGETGLTLDFGDIKTIWKERIEPFLDHRYLNETLPPMNTTAENMVVWIFEQMESALTSDAYCNRVEGGRTEFVRLFETPTSYAEFRREWMLDE

SEQ ID NO: 23481 - protein, 163 aa, Paenibacillus polymyxa
  REGION 1..163: note = tr|E0RL57|E0RL57_PAEP6 6-pyruvoyl tetrahydrobiopterin synthase OS=Paenibacillus polymyxa (strain E681) OX=349520 GN=PPE_01079 PE=4 SV=1
MREPGTFRIVDKLQQLGTDIEHSQLRYHRKRVLVSKQFTFDAAHHLHCYEGKCKNLHGHTYVVVFGISGIPGETGLTLDFGDIKTIWKERIEPFLDHRYLNETLPPMNTTAENMVVWIFEQMESALTSDAYCNRVEGGRTEFVRLFETPTSYAEFRREWMLDE

SEQ ID NO: 23482 - protein, 163 aa, unidentified
  source 1..163: note = Paenibacillus polysaccharolyticus
  REGION 1..163: note = tr|A0A1G5GHK0|A0A1G5GHK0_9BACL 6-pyruvoyltetrahydropterin/6-carboxytetrahydropterin synthase OS=Paenibacillus polysaccharolyticus OX=582692; GN = SAMN05720606_105269 PE =4 SV=1
MREPGTFRIVERLQRIDQDILPTQLRYHRKRVLVSKEFTFDAAHHLHCYEGKCKNLHGHTYKVVFGISGYPGETGLTVDFGHIKDIWKSRIEGYLDHQYLNETLPLMNTTAENMVVWLFEQMEHALQTEPYAGLTDGARTEFVRLFETPTSYAEARREWMIDE

SEQ ID NO: 23483 - protein, 162 aa, Paenibacillus popilliae
  REGION 1..162: note = tr|M9LPH9|M9LPH9_PAEPP 6-pyruvoyl-tetrahydropterin synthase OS=Paenibacillus popilliae ATCC 14706 OX=1212764; GN = PPOP_1818 PE=4 SV=1
MNRPGPFRIVEKLQQYGTDISRESLRYHKRRVLVSKEFTFDAAHHLHAYEGKCKNLHGHTYKAVFGLSGYTNDIGIALDFGDIKEIWKDRIETYLDHRYLNETLPPMNTTAENMVVWLYEQMSAALAEEPYRARCEGGRVEFVRLYETPTSYAEARREWMEQ

SEQ ID NO: 23484 - protein, 271 aa, Paenibacillus prosopidis
  REGION 1..271: note = tr|A0A368W084|A0A368W084_9BACL 6-pyruvoyltetrahydropterin/6-carboxytetrahydropterin synthase OS=Paenibacillus prosopidis OX=630520; GN = DFP97_10769 PE=4 SV=1
MIYLSRKLYFSASNRYRVEDWSDEENRQVFGLRSNPNGYGQDYTLEVMVKGPLDERSGIVVNITDIDKVVKHLIQEEFDGKFLNYEHPYFAERIPTTENIAEYLWNALENQIEGCELHKIRLHENHYLLSEKGSDKMVQLSRKYHFCAAHRLHSDLLTDEENKQIFGKCNNPHGHGHNYYLDVTVSGRPDSVTGMVINLAELDEKVNRIVIDKFDHKNLNLDTEEFRNINPTSDIMVKVIWEMLETSLPGLYKIGLWETEKNYFEYLGPGR

SEQ ID NO: 23485 - protein, 150 aa, Paenibacillus prosopidis
  REGION 1..150: note = tr|A0A368VW54|A0A368VW54_9BACL PreQ(0) biosynthesis protein QueD OS=Paenibacillus prosopidis OX=630520; GN = DFP97_110149 PE=4 SV=1
MMLQQIYPAANHPYQYELNKDLHFAAAHFVPAEEAGKCRLLHGHTYYANVTVAGDELDAAGFLVNFAVIKQLIHTRFDHSVLNDDTESFDDVNPDRFPTTEVVARTICEIVQKHLDGTANRPQCVQVYLRETPTSYCIYRPKRKAGSHVG

SEQ ID NO: 23486 - protein, 161 aa, Paenibacillus rhizosphaerae
  REGION 1..161: note = tr|A0A1R1F226|A0A1R1F226_9BACL 6-carboxytetrahydropterin synthase QueD OS=Paenibacillus rhizosphaerae OX=297318 GN=BK138_05965 PE=4 SV=1
MTKTPGEFRIVDRLQKLGEDIQPSDLRYHHKRVLVSKEFTFDAAHHLHAYEGKCKNLHGHTYKAVFGISAFLDEVGITADFGLIKQIWKERIEPSLDHRYLNETLPPMNTTAENIVVWLFERMEEALNCGDYRIEGGRTEFVRLYETPTSYAEARREWMYE

SEQ ID NO: 23487 - protein, 158 aa, Paenibacillus rigui
  REGION 1..158: note = tr|A0A229UL18|A0A229UL18_9BACL 6-carboxytetrahydropterin synthase QueD OS=Paenibacillus rigui OX=554312 GN=queD PE=4 SV=1
MEYEIPVKVQRLGVEIQEEQLKYHDKEVLVSKEFTFDSAHHLHCYDGKCKSLHGHTYKLQVFMRGKVDHRGITIDFADIKRIAKERILDRLDHRYLNDALPLMNTTAENMVVWMYEQLSSALKEEGLTPRVRLEEVRLWETPTSFAAVTASMMGDDSN

SEQ ID NO: 23488 - protein, 160 aa, Paenibacillus riograndensis
  REGION 1..160: note = tr|A0A132U9W1|A0A132U9W1_9BACL 6-pyruvoyl tetrahydrobiopterin synthase OS=Paenibacillus riograndensis OX=483937 GN=AMQ84_04845 PE=4 SV=1
MLGEVSVCKIFTFDSAHQLVGHKGKCSNLHGHTYKLEVVLKGKPLAEEGHSDEGFVADFSDIKATVQEGLLDHLDHAFLAMGNEPVLETLKNTGSKVALLSFRTTVENMSAYIAYKLIQASLPLYSVKLWETPTSWAEVLAADIPAEGPAYRLYGGCDCE

SEQ ID NO: 23489 - protein, 160 aa, Paenibacillus riograndensis
  REGION 1..160: note = tr|A0A0E4CX89|A0A0E4CX89_9BACL 6-pyruvoyl tetrahydrobiopterin synthase OS=Paenibacillus riograndensis SBR5 OX=1073571 GN=PRIO_3711 PE=4 SV=1
MLGEVSVCKIFTFDSAHQLVGHKGKCSNLHGHTYKLEVVLKGKPLAEEGHSDEGFVADFSDIKATVQESLLDHLDHAFLAMGNEPVLETLKNTGSKIALLSFRTTVENMSAYIAYKLIQASLPLYSVKLWETPTSWAEVLAADIPAEGPAYRLYGGCDCE

SEQ ID NO: 23490 - protein, 159 aa, Paenibacillus sabinae
  REGION 1..159: note = tr|X4ZDF6|X4ZDF6_9BACL 6-pyruvoyl tetrahydrobiopterin synthase OS=Paenibacillus sabinae T27; OX = 1268072 GN=PSAB_13390 PE=4 SV=1
MLGEVTVCKIFSFDAAHQLVGHKGKCANVHGHTYRLEVVLKGKPVAEEGRSDEGFVVDFGDIKALVKEQVVDLLDHAFLAKGDEPVLESLKESGSKTAVLSFRTTAENLASYITYTLKASGLPVYSVKLWETPTAWAEVLAADIPEEGPSYRLYGGCDL

SEQ ID NO: 23491 - protein, 164 aa, unidentified
  source 1..164: note = Paenibacillus selenitireducens
  REGION 1..164: note = tr|A0A1T2X349|A0A1T2X349_9BACL 6-carboxytetrahydropterin synthase QueD OS=Paenibacillus selenitireducens OX=1324314 GN=BVG16_24460 PE=4 SV=1
MNRTPGPFRIVEHLQKFGDDITKEQLRYHNRRVLVSKEFTFDAAHHLHAYEGKCKNLHGHTYKVVFGISGLPDQIGITVDFGTIKEIWKHEIEIFLDHRYLNETLPPMNTTAENMVVWLFEKMELALQSAPYQSTLIEARTEFVRLYETGTSYAEVRREWMYDA

SEQ ID NO: 23492 - protein, 163 aa, unidentified
  source 1..163: note = Paenibacillus silvae
  REGION 1..163: note = tr|A0A2W6NXD8|A0A2W6NXD8_9BACL 6-carboxytetrahydropterin synthase QueD OS=Paenibacillus silvae OX=1325358 GN=queD PE=4 SV=1
MREPGTFRIVERLQRIDQDILPSQLRYHRKRVLVSKEFTFDAAHHLHCYEGKCKNLHGHTYKVIFGISGYPGDTGLTVDFGHIKDIWKSRIEGYLDHQYLNETLPLMNTTAENMVVWLFEQMEQALQSEPYAGLTDGARTEFVRLFETPTSYAEARREWMIDE

SEQ ID NO: 23493 - protein, 163 aa, unidentified
  source 1..163: note = Paenibacillus solani
  REGION 1..163: note = tr|A0A0M1P211|A0A0M1P211_9BACL 6-pyruvoyl tetrahydrobiopterin synthase OS=Paenibacillus solani; OX = 1705565 GN=AM231_02425 PE=4 SV=1
MSREPGAFRIVEHLQKLGEDIDASSLRYHRKRVLVSKEFTFDAAHHLHCYEGKCKNLHGHTYKVVFGISGIPNEVGITIDFGDIKDCWKTEIEPYLDHRYLNETLPPMNTTAENMVVWLFEKMEEALSSRECHEQQGARTEFVRLFETPTSYAEVRREWMIHE

SEQ ID NO: 23494 - protein, 159 aa, Paenibacillus sophorae
  REGION 1..159: note = tr|A0A1H8FNB0|A0A1H8FNB0_9BACL 6-pyruvoyltetrahydropterin/6-carboxytetrahydropterin synthase OS=Paenibacillus sophorae OX=1333845; GN = SAMN04487895_101182 PE=4 SV=1
MLHEVSVCKIFSFDAAHQLVGHKGKCANVHGHTYKLEVVLKGKPIAEEGRSDEGFVVDFGDIKELVKERVVDRLDHAFLAKGDEPVLEALKSSGSKTAVLSFRTTAENLASYIAYTLKTSGLPVYSVKLWETPTAWAEVLAGDIPEEGPSYRLYGGCDL

SEQ ID NO: 23495 - protein, 160 aa, Paenibacillus sp.
  REGION 1..160: note = tr|A0A1Q5XLA6|A0A1Q5XLA6_9BACL 6-pyruvoyl tetrahydrobiopterin synthase OS=Paenibacillus sp. P46E; OX = 1349436 GN=A3849_27630 PE=4 SV=1
MMGEVSVCKIFTFDSAHQLVGHKGKCSNLHGHTYKLEVVLKGKPLVEEGHSDEGFVIDFSDIKATVQESLVDHLDHAFLAMGNEPVLETLVNTGSKVALLSFRTTVENMSAYIAYRLMQASLPLYSVKLWETPTSWAEVLAADIPDEGPSYRLYGGCDCE

SEQ ID NO: 23496 - protein, 158 aa, Paenibacillus sp.
  REGION 1..158: note = tr|A0A0P9FF72|A0A0P9FF72_9BACL 6-pyruvoyl tetrahydrobiopterin synthase OS=Paenibacillus sp. A3; OX = 1337054 GN=QJ48_32580 PE=4 SV=1
MTYEIPKKVQTLGEDIQRSELKYHDREVLVSKEFTFDSAHHLHCYEGKCKSLHGHTYKLQVVMRGKVDDRGITIDFADIKRIAKERIIDRLDHRYLNEVLPPMNTTAENMVVWMYEQLRDALRSEGLFPAVRLEEVRLWETPTSYAAVTARLMGDGPA

SEQ ID NO: 23497 - protein, 159 aa, Paenibacillus stellifer
  REGION 1..159: note = tr|A0A089LTF5|A0A089LTF5_9BACL 6-pyruvoyl tetrahydrobiopterin synthase OS=Paenibacillus stellifer; OX = 169760 GN=PSTEL_15070 PE=4 SV=1
MLHEVSVCKIFSFDAAHQLIGHKGKCANVHGHTYRLEVVLKGRPVTEEGRSDEGFVADFGDIKALVKARIVDKLDHAFMAKGDEPVLETLEASGSKVAVLSFRTTAENLAGYIAYTLKTSGLPVYSVKLWETPTAWAEVLAADIPEHGPAYCLNGGCDL

SEQ ID NO: 23498 - protein, 142 aa, unidentified
  source 1..142: note = Paenibacillus swuensis
  REGION 1..142: note = tr|A0A172TML4|A0A172TML4_9BACL 6-carboxy-5,6,7,8-tetrahydropterin synthase; OS = Paenibacillus swuensis OX=1178515 GN=SY83_19700 PE=3; SV = 1
MLFQYYPAPAHNYKYELHKDMNFSAAHFIPAASAGQCARMHGHTYVADITVAGNELNEAGFLVNFSDLKKLIHGRYDHTLLNDHEEFTGESSSEPERYPTTEVLARQVWETVEAYLQQFPNKATCLQVLVRETPTSYVIYRP

SEQ ID NO: 23499 - protein, 163 aa, Paenibacillus taichungensis
  REGION 1..163: note = tr|A0A329R4Q8|A0A329R4Q8_9BACL 6-carboxytetrahydropterin synthase QueD OS=Paenibacillus taichungensis OX=484184 GN=queD PE=4 SV=1
MREPGTFRIVERLQRIGEDILPAQLRYHRKRVLVSKEFTFDAAHHLHCYEGKCKNLHGHTYKVVFGISGYPGETGLTVDFGHIKEIWKTQIEGYLDHQYLNETLPLMNTTAENMVVWLFEQMEHALQTEPYATLTEGGRTEFVRLYETPTSYAEARREWMIDE

SEQ ID NO: 23500 - protein, 163 aa, Paenibacillus taichungensis; identical to SEQ ID NO: 23472
  REGION 1..163: note = tr|A0A2V3S8V3|A0A2V3S8V3_9BACL 6-pyruvoyltetrahydropterin/6-carboxytetrahydropterin synthase OS=Paenibacillus taichungensis OX=484184; GN = DEU73_101352 PE=4 SV=1

SEQ ID NO: 23501 - protein, 160 aa, unidentified
  source 1..160: note = Paenibacillus taihuensis
  REGION 1..160: note = tr|A0A3D9RWR0|A0A3D9RWR0_9BACL 6-pyruvoyltetrahydropterin/6-carboxytetrahydropterin synthase OS=Paenibacillus taihuensis OX=1156355; GN = A8990_11587 PE=4 SV=1
MTYEIPKHIQQFGTDIEEQQLRYHNRRVLVSKEFTFDSAHHLHLYEGKCKSLHGHTYKLQTIMSGKTDKRGLTIDFADMKRIAKERVIDKLDHRYLNEVLPPMNTTAENMVVWIYEQIHEALVEEGHYPDIRIEEIRLWETPTSYAAVTRELMEADEHAG

SEQ ID NO: 23502 - protein, 163 aa, Paenibacillus terrae
  REGION 1..163: note = tr|G7VYT4|G7VYT4_PAETH 6-pyruvoyl tetrahydrobiopterin synthase OS=Paenibacillus terrae (strain HPL-003) OX=985665 GN=HPL003_13615 PE=4 SV=1
MREPGPFRIVDKLQQFGTDIERSQLRYHRKRVLVSKQFTFDAAHHLHCYEGKCKNLHGHTYIVVFGISGIPGETGLTLDFGDIKTIWKERIEPYLDHRYLNETLPPMNTTAENMVVWIFEQMESALTSDAYRSRVEGGRTEFVRLFETPTSYAEFRREWMLDE

SEQ ID NO: 23503 - protein, 163 aa, Paenibacillus terrae
  REGION 1..163: note = tr|A0A4U2PWR4|A0A4U2PWR4_9BACL 6-carboxytetrahydropterin synthase QueD OS=Paenibacillus terrae OX=159743 GN=queD PE=4 SV=1
MREPGPFRIVDKLQQFGTDIERSQLRYHRKRVLVSKQFTFDAAHHLHCYEGKCKNLHGHTYIVVFGISGIPGETGLTLDFGDIKTIWKERIEPYLDHRYLNETLPPMNTTAENMVVWIFEQMESALTSEAFRHRVECGRTEFVRLFETPTSYAEFRREWMLDE

SEQ ID NO: 23504 - protein, 164 aa, unidentified
  source 1..164: note = Paenibacillus thermophilus
  REGION 1..164: note = tr|A0A388MM03|A0A388MM03_9BACL 6-carboxytetrahydropterin synthase OS=Paenibacillus thermophilus OX=1181891 GN=PbJCM17693_07470 PE=4 SV=1
MSRMPGEFRIVESLQKLGRDIGKEQLRYHRHRVLVSKEFTFDAAHHLHAYEGKCKNLHGHTYKAVFGISALPNEIGITVDFGTIKEIWKNEIEVYLDHRYLNETLPPMNTTAENMVVWLFEKMEAALGSETYRNVVLEGRTEFVRLYETPTSYAEVRREWMLDE

SEQ ID NO: 23505 - protein, 162 aa, Paenibacillus thiaminolyticus
  REGION 1..162: note = tr|A0A515LV77|A0A515LV77_PANTH 6-carboxytetrahydropterin synthase QueD OS=Paenibacillus thiaminolyticus OX=49283 GN=queD PE=4 SV=1
MNRPGPFRIVEKLQQYGTDISREALRYHMRRVLVSKEFTFDAAHHLHAYEGKCKNLHGHTYKVVFGLSSYTNDIGIALDFGDIKEIWKEQIEPYLDHRYLNETLPPMNTTAENMVVWLYEQMSAALAEEPYRTRCEGGRVEFVRLYETPTSYAEARREWMEL

SEQ ID NO: 23506 - protein, 162 aa, Paenibacillus thiaminolyticus
  REGION 1..162: note = tr|A0A3A3GBM1|A0A3A3GBM1_PANTH 6-carboxytetrahydropterin synthase QueD OS=Paenibacillus thiaminolyticus OX=49283 GN=queD PE=4 SV=1
MNRPGSFRIVEKLQQYGTDISRESLRYHKRRVLVSKEFTFDAAHHLHAYEGKCKNLHGHTYQAVFGLSGYTNDIGIALDFGDIKEIWKERIEPYLDHRYLNETLPLMNTTAENMVVWLYEQMSAALAEEPYRTRCEGGRVEFVRLYETPTSYAEARWEWMEP

SEQ ID NO: 23507 - protein, 158 aa, Paenibacillus tianmuensis; identical to SEQ ID NO: 23438
  REGION 1..158: note = tr|A0A1G4RPU2|A0A1G4RPU2_9BACL 6-pyruvoyltetrahydropterin/6-carboxytetrahydropterin synthase OS=Paenibacillus tianmuensis OX=624147; GN = SAMN04487970_10186 PE=4 SV=1

SEQ ID NO: 23508 - protein, 160 aa, unidentified
  source 1..160: note = Paenibacillus typhae
  REGION 1..160: note = tr|A0A1G8GVR1|A0A1G8GVR1_9BACL PreQ(0) biosynthesis protein QueD OS=Paenibacillus typhae OX=1174501; GN = SAMN05216192_102214 PE=4 SV=1
MLGEVTVCKIFTFDSAHQLVGHKGKCSNLHGHTYKLEVMLKGKPLTEPGHSDEGFVIDFSDIKATVQQQLVDRLDHAFLAMGNEPVLETLNQTGSKVALLGFRTTVENMSAYIAHRLKLADLPLYSVKLWETPTSWAEVLASDIPEDGPAYRIHGGCDCE

SEQ ID NO: 23509 - protein, 158 aa, unidentified
  source 1..158: note = Paenibacillus tyrfis
  REGION 1..158: note = tr|A0A081P6F9|A0A081P6F9_9BACL 6-pyruvoyl tetrahydrobiopterin synthase OS=Paenibacillus tyrfis; OX = 1501230 GN=ET33_35045 PE=4 SV=1
MTYEIPKKVQTLGEDIQRSELKYHDREVLVSKEFTFDSAHHLHCYEGKCKSLHGHTYKLQVVMRGKVDDRGISIDFVDIKQIAKERIIDRLDHRYLNEVLPPMNTTAENMVVWMYEQLREALRSEGLFPAVRLEEVRLWETPTSYAAVTARLMGDDPA

SEQ ID NO: 23510 - protein, 145 aa, unidentified
  source 1..145: note = Paenibacillus tyrfis
  REGION 1..145: note = tr|A0A081NU68|A0A081NU68_9BACL 6-carboxy-5,6,7,8-tetrahydropterin synthase; OS = Paenibacillus tyrfis OX=1501230 GN=ET33_28395 PE=3 SV=1
MLQQIYPSVNHSFVYELNKDLQFAAAHYIPSDLAGKCSRIHGHTYFMNVCIVGDVLDDTGFLVNFSDLKALIHDRFDHKLINEDPLFNEEQGNIFPSTEVVARTAWTIIQDYLDSLPNQPKCLQIFLRETPTSYVIYRPRIGDRS

SEQ ID NO: 23511 - protein, 163 aa, Paenibacillus uliginis
  REGION 1..163: note = tr|A0A1X7HMY5|A0A1X7HMY5_9BACL 6-pyruvoyltetrahydropterin/6-carboxytetrahydropterin synthase OS=Paenibacillus uliginis N3/975 OX=1313296; GN = SAMN05661091_4685 PE=4 SV =1
MTRQPGAFRIVEQLQKLGEDIDTGSLRYHRKRVLVSKEFTFDAAHHLHAYEGKCKNLHGHTYKVVFGISGKPDEVGITVDFGQIKEIWKSAIEPFLDHRYLNETLPPMNTTAENMVVWLYEQMELALTQQETFTQQETRTEFVRLYETPTSYAEVRREWMEHE

SEQ ID NO: 23512 - protein, 163 aa, unidentified
  source 1..163: note = Paenibacillus vortex
  REGION 1..163: note = tr|A0A2R9SZ10|A0A2R9SZ10_9BACL 6-pyruvoyl tetrahydrobiopterin synthase OS=Paenibacillus vortex V453; OX = 715225 GN=PVOR_07295 PE=4 SV=1
MNKVPGQFVIVDALQKFGMDITENQLKYHQRRVLVSKEFTFDAAHHLHAYEGKCKNLHGHTYKVVFGISGYTNEIGLTIDFSMLKTIWREQIEPFLDHRYLNETLPLMNTTAENIVVWLYEQMEAALSTEKYSSKEVDARTEFVRLFETPTSYAEARREWMAD

SEQ ID NO: 23513 - protein, 206 aa, unidentified
  source 1..206: note = Paenibacillus vortex
  REGION 1..206: note = tr|A0A2R9SYG4|A0A2R9SYG4_9BACL 6-pyruvoyl tetrahydrobiopterin synthase OS=Paenibacillus vortex V453; OX = 715225 GN=PVOR_09220 PE=4 SV=1
MSREPGTFRIVEHLQKLGEDIDAGSLRYHRKRVLVSKEFTFDAAHHLHCYEGKCKNLHGHTYKVVFGISGIPNEVGITVDFGDIKDCWKTDIEPYLDHRYLNETLPPMNTTAENMVVWLFEKMEDALRSKESHEQQGHTNRIRSPVRDADQLRRGQTGVDDPVNDQHVTTANDTGPTASSAAANGGPGRFPSWKSSVPPFKVKAWS

SEQ ID NO: 23514 - protein, 157 aa, unidentified
  source 1..157: note = Paenibacillus whitsoniae
  REGION 1..157: note = tr|A0A430J710|A0A430J710_9BACL 6-carboxytetrahydropterin synthase QueD OS=Paenibacillus whitsoniae OX=2496558 GN=queD PE=4 SV=1
MSYDIPSDIQRLGRDIQENQLKYHHKSVLVSKEFTFDSAHHLHCYEGKCKSLHGHTYKLQVIMRGKVDHRGIAIDFGDIKRIAKERVIDRLDHRYLNEVLPPMNTTAENMVVWMYEEIHRGLLDEGLHPGIQLEEIRLWETPTSYAAITRAMMEEDV

SEQ ID NO: 23515 - protein, 136 aa, unidentified
  source 1..136: note = Paenibacillus whitsoniae
  REGION 1..136: note = tr|A0A430JIZ9|A0A430JIZ9_9BACL 6-carboxy-5,6,7,8-tetrahydropterin synthase; OS = Paenibacillus whitsoniae OX=2496558 GN=queD PE=3 SV=1
MNTYFPFTPHAFRYELHKEMHLSAAHFIPAESAGKCQRIHGHTYQIDLMIVGDELDANGFLIDFKLLKSIVHDRYDHTLLNEHPEFRVLHPTTEVMAKTIYTFIQEYLDGTSNKPSCLQVIVRETPTSYVVYRPKK

SEQ ID NO: 23516 - protein, 160 aa, Paenibacillus wynnii
  REGION 1..160: note = tr|A0A098M578|A0A098M578_9BACL 6-pyruvoyl tetrahydrobiopterin synthase OS=Paenibacillus wynnii; OX = 268407 GN=PWYN_21430 PE=4 SV=1
MLNEVSVCKIFTFDSAHQLVGHKGKCSNLHGHTYKLEVVLKGRPLTTEGHSDEGFVIDFSDMKTLVKEAVVDRLDHSFLAMGNEPVLETLVSTGSKVSHLSFRTTVENMSCYIAYQLKLAGLPLYSVKLWETPTAWAEVLAEDIPDEGPAYRLYGGCDCE

SEQ ID NO: 23517 - protein, 160 aa, unidentified
  source 1..160: note = Paenibacillus xerothermodurans
  REGION 1..160: note = tr|A0A2W1NB90|A0A2W1NB90_9BACL 6-carboxytetrahydropterin synthase QueD OS=Paenibacillus xerothermodurans OX=1977292 GN=queD PE=4 SV=1
MEYHIPMKVQQLGVDIDKSQLKYHDKEVLVSKEFTFDSAHHLHCYEGKCKSLHGHTYKLQVIMRGKVDERGITIDFADIKRIAKERVIDPLDHRYLNEVLPLMNTTAENMVVWMYEQLNTAVREEGLYPQVRVEEVRLWETPTSYAAVTAAMMGDAAGER

SEQ ID NO: 23518 - protein, 163 aa, Paenibacillus xylanexedens
  REGION 1..163: note = tr|A0A3N6BZ03|A0A3N6BZ03_9BACL 6-carboxytetrahydropterin synthase OS=Paenibacillus xylanexedens OX=528191 GN=EDO6_05155 PE=4 SV=1
MREPGTFRIVEHLQRIGEDILPTQLRYHRKRVLVSKEFTFDAAHHLHCYEGKCKNLHGHTYKVIFGISGYPGETGLTVDFGHIKDIWKTQIEGYLDHQYLNETLPLMNTTAENMVVWLFEQMEHALQTEPYAGLTDGGRTEFVRLFETPTSYAEARREWMIHE

SEQ ID NO: 23519 - protein, 163 aa, Paenibacillus xylanexedens; identical to SEQ ID NO: 23413
  REGION 1..163: note = tr|A0A1L5LLL3|A0A1L5LLL3_9BACL 6-carboxytetrahydropterin synthase QueD OS=Paenibacillus xylanexedens OX=528191 GN=BS614_09935 PE=4 SV=1

SEQ ID NO: 23520 - protein, 169 aa, unidentified
  source 1..169: note = Paenibacillus yonginensis
  REGION 1..169: note = tr|A0A1B1MWP1|A0A1B1MWP1_9BACL 6-pyruvoyl tetrahydrobiopterin synthase OS=Paenibacillus yonginensis; OX = 1462996 GN=AWM70_02435 PE=4 SV=1
MSQVNQSRRTAGEFRIVESLQQFGRDITKDQLRYHNRRVLVSKEFTFDAAHHLHAYEGKCKNLHGHTYIVVFGISGLPDETGITVDFGVIKEIWKNEIEGYLDHRYLNETLPPMNTTAENMVVWLYEQMEQALEQANAEGRMIEARTEFVRLFETPTSFAEIRREWMQA

SEQ ID NO: 23521 - protein, 126 aa, unidentified
  source 1..126: note = Paeniglutamicibacter gangotriensis
  REGION 1..126: note = tr|M7MYL8|M7MYL8_9MICC 6-pyruvoyl tetrahydropterin synthase OS=Paeniglutamicibacter gangotriensis Lz1y; OX = 1276920 GN=ADIAG_00139 PE=4 SV=1
MYSLTVRDHVMIAHSLPDPFFGPAQSLHGATLVVEATWRRAELGPQSVVMDIGAATSMLSEVLETLRYSNLDEHPAFAGRLSTTEAIAGYISTELCVRFDTTQYAGLEVLLREHPDAWASHDIAFD

SEQ ID NO: 23522 - protein, 117 aa, unidentified
  source 1..117: note = Paenimaribius caenipelagi
  REGION 1..117: note = tr|A0A547PUK6|A0A547PUK6_9RHOB 6-carboxy-5,6,7,8-tetrahydropterin synthase; OS = Paenimaribius caenipelagi OX=2489174 GN=queD PE=3 SV=1
MYRIRKEFHFSASHQLTHLPDDHQCARLHGHNYIVVVELASETLNADGFVRDYHDLKPLKVYIDDTFDHRHLNDVMDVPSTAENMAKHFYDWCKSRWPETSAVQVSETPKTWAEYRP

SEQ ID NO: 23523 - protein, 79 aa, unidentified
  source 1..79: note = Paenisporosarcina antarctica
  REGION 1..79: note = tr|A0A4P7A148|A0A4P7A148_9BACL Uncharacterized protein OS=Paenisporosarcina antarctica OX=417367; GN = E2636_16305 PE=4 SV=1
MFGFKIVDGLQKYGGDLTYWNELLPPVNTTAENMVYWIYKKMEEGIDSKPKIVEGIAVEFARLYETPTSYAEFRMEWDK

SEQ ID NO: 23524 - protein, 141 aa, unidentified
  source 1..141: note = Paenisporosarcina antarctica
  REGION 1..141: note = tr|A0A4P6ZV73|A0A4P6ZV73_9BACL 6-carboxy-5,6,7,8-tetrahydropterin synthase; OS = Paenisporosarcina antarctica OX=417367 GN=queD PE=3 SV=1
MIQQFYPQTPHTYRFELNKDMHLSAAHFIPHDDAGNCQYLHGHTYFINITIAGDQLDEMGFLIDFKIIKNLVHKRYDHTVLNNHEEFEDKFPTTEQVAEEIWKTIQNNLKTLVHEPKCIQVLVRETPTSYVVYRPRAEDLL

SEQ ID NO: 23525 - protein, 141 aa, Paenisporosarcina sp.
  REGION 1..141: note = tr|A0A2T6KGI9|A0A2T6KGI9_9BACL 6-carboxy-5,6,7,8-tetrahydropterin synthase; OS = Paenisporosarcina sp. OV554 OX=2135694 GN=C8K15_10558; PE = 3 SV=1
MIQQFYPQTPHSYRFELNKDMHLSAAHFIPHDDAGNCQYMHGHTYFINITIAGDQLDEMGFLIDFKVIKNLVHKRYDHTVLNDHPEFKQKFPTTEQVAHEIWMTIHNKLKTLPHQPRCLQVVVRETPTSYVVYRPKAEELL

SEQ ID NO: 23526 - protein, 141 aa, Paenisporosarcina sp.
  REGION 1..141: note = tr|S2XXE3|S2XXE3_9BACL 6-carboxy-5,6,7,8-tetrahydropterin synthase; OS = Paenisporosarcina sp. HGH0030 OX=1078085; GN = HMPREF1210_03259 PE=3 SV=1
MIQQFYPQTPHTYRFELNKDMHLSAAHFIPHADAGNCQYMHGHTYFINITIAGDELDEMGFLIDFKVIKHLIHKKYDHTVLNDHPEFKQNNPTTEQVAQVIWTTIQQKLMTLSNQPKCIQVVVRETPTSYVVYRPKAEDLL

SEQ ID NO: 23527 - protein, 120 aa, unidentified
  source 1..120: note = Pajaroellobacter abortibovis
  REGION 1..120: note = tr|A0A1L6MV22|A0A1L6MV22_9DELT 6-carboxy-5,6,7,8-tetrahydropterin synthase; OS = Pajaroellobacter abortibovis OX=1882918 GN=BCY86_00420; PE = 3 SV=1
MQLVHEFRFEAAHRLPCVPAGHKCARLHGHSFRIEVAVQGPVDENTGWLIDFEQIHQAWEPLQEMLDHHYLNEIDGLQNPTSEMLARWIWDRLYPTLPILTQITVFETCNARCEYRRENY

SEQ ID NO: 23528 - protein, 116 aa, Paludibacter propionicigenes
  REGION 1..116: note = tr|E4T1V7|E4T1V7_PALPW 6-carboxy-5,6,7,8-tetrahydropterin synthase; OS = Paludibacter propionicigenes (strain DSM 17365 / JCM 13257 / WB4) OX=694427 GN=Palpr_0542 PE=3SV=1
MYTISKEFHFSASHQLHGLKNDHPCGRIHGHNYTLKIFLRGEPNKDGFVQDYNDLKPISDWVNNTLDHRHLNDVFDFQTSVENMSKYIFDLFKPEFPLLVAVEMSETPKTNCRYEE

SEQ ID NO: 23529 - protein, 340 aa, unidentified
  source 1..340: note = Paludibacterium purpuratum
  REGION 1..340: note = tr|A0A4R7B026|A0A4R7B026_9NEIS 6-pyruvoyltetrahydropterin/6-carboxytetrahydropterin synthase OS=Paludibacterium purpuratum OX=1144873; GN = DFP86_11396 PE=4 SV=1
MHTTFLLAATGFEAARRIPGATDERLINTHGHSFRALARADATHTDQATLEAALATAAAPLHYAQINDTLADPDDLGIARYLADSISSPVTLALQSSMRRGALVDNNLALVSLTVSFEAAHQLPQVPAGHKCGRLHGHRFGVRLFADAARCDHMRLEAAWQPLFERLNHRYLNDIDGLDNPTSEVLAKWLFERLRDTLPGLAWVEVRETHSAGSQYDGQHFNIWKEQRFESAVPFAQDGAYTGHSYLIRLMLTGDLDRTMGWVLDFGDVKDRFKPVYRQLDHNPLDRLSGIRNGKSTSVAEWVHVHLAPLVPELSRIDLYDTAERGVSLTFDHDMRWPLL

SEQ ID NO: 23530 - protein, 158 aa, unidentified
  source 1..158: note = Paludifilum halophilum
  REGION 1..158: note = tr|A0A235B779|A0A235B779_9BACL 6-carboxytetrahydropterin synthase QueD OS=Paludifilum halophilum OX=1642702 GN=queD PE=4 SV=1
MEFKIPDQVEKLGVDIRRDELKYHHKRVAVTKAFTFDAAHHLHCYEGKCKNLHGHTYKLVITFSGYVNEIGIVVDFSDVKRMFKEEIESRLDHRYLNEVLPKMNTSAENMIVWIWERLRDRIRGEDWAGRGIRLEELTLYETPTSFATLKREWMEADA

SEQ ID NO: 23531 - protein, 137 aa, unidentified
  source 1..137: note = Paludisphaera borealis
  REGION 1..137: note = tr|A0A1U7CKR9|A0A1U7CKR9_9BACT Uncharacterized protein OS=Paludisphaera borealis OX=1387353; GN = BSF38_00958 PE=4 SV=1
MYRVTREIEFCYGHRLLNYDGKCRHLHGHNGRAVVTLEGSRLDSRGMLVDFGEIKQTIQRWIDEQLDHNMLLCREDPLLPLLRERGERVFVMDANPTAENIARLIYDHGRGAGLPISEVVLWETPNCFAAYSGEDDR

SEQ ID NO: 23532 - protein, 163 aa, unidentified
  source 1..163: note = Paludisphaera borealis
  REGION 1..163: note = tr|A0A1U7CIM7|A0A1U7CIM7_9BACT Uncharacterized protein OS=Paludisphaera borealis OX=1387353; GN = BSF38_00160 PE=4 SV=1
MSSSRYKVRVTKDFLVFSSGHFITFEGNQCERVHGHNYRTAVEVDGDLDGNHYVVDFIALRDMTRTICDELDHRMLLPAGSPYIRLEDDGPNIVARYRDRYWSFPRDECVVLPIANTTAELLAKYIADRLLVAMRARGWADPRAVRVEVEECFGQSAEVELTL

SEQ ID NO: 23533 - protein, 281 aa, Panacagrimonas perspica
  REGION 1..281: note = tr|A0A4R7NXE0|A0A4R7NXE0_9GAMM 6-pyruvoyl tetrahydropterin synthase-like protein OS=Panacagrimonas perspica OX=381431 GN=B1810_12360 PE=4 SV=1
MSTLFVEHLTVIDCAYLDAARGLVGQSWIVDVELEGDLDQQSMVLDFGEVKRRLKRAIDSGLDHTLIVPTQAPELSLAHTGDISELQFRSALGAYEHRSPALAITPVDAAAIDEAAVTAHLRTSLAPILPANVARLDLRLRTEVIDGASYQYVHGLKKHAGQCQRIAHGHRSRIEMRVDGTRDAALEQDIALAWADIYLGTREDLITRANGELRFAYSAPEGRFELALPEAHAELLDADTTVERIAEHLAWVGAARLPGKTVEARAYEGVMKGAVGRVRGS

SEQ ID NO: 23534 - protein, 137 aa, unidentified
  source 1..137: note = Panacibacter ginsenosidivorans
  REGION 1..137: note = tr|A0A5B8VG28|A0A5B8VG28_9BACT 6-carboxy-5,6,7,8-tetrahydropterin synthase; OS = Panacibacter ginsenosidivorans OX=1813871; GN = FRZ67_22785 PE=3 SV=1
MSKKVAVYRKEHFNAAHRLHNPDWTDEMNDKVFGKCNNPNYHGHNYELEVKLVGEPDERTGYVMDMKELSNIINATVLERFDHKNLNLDTEEFKYLNPTAENIVVVIYELLRAKIDSRFDLQVRLYETPRNFVEYPV

SEQ ID NO: 23535 - protein, 136 aa, unidentified
  source 1..136: note = Panacibacter ginsenosidivorans
  REGION 1..136: note = tr|A0A5B8VHC2|A0A5B8VHC2_9BACT 6-carboxytetrahydropterin synthase OS=Panacibacter ginsenosidivorans OX=1813871 GN=FRZ67_22790 PE=4 SV=1
MVYLTRLEHFNAAHKLYNPDWSKEKNEEMFGACANENWHGHNFDLYVTIKGDPNQETGFLMDVKKLKLIIKEHVIVKVDHKNLNLDVEFLKGKMCSTENLAIGIWNQLTPNLPQNVQLHCVKLYETPRIYVEYFGD

SEQ ID NO: 23536 - protein, 136 aa, unidentified
  source 1..136: note = Panacibacter sp.
  REGION 1..136: note = tr|A0A4U3LCC2|A0A4U3LCC2_9BACT 6-carboxy-5,6,7,8-tetrahydropterin synthase; OS = Panacibacter sp. 17mud1-8 OX=2575867 GN=FC093_00330; PE = 3 SV=1
MVYLTRIEHFNAAHKLYNPRWSKEKNEELFGVCANENWHGHNFDLHVTIKGTPDPDTGFLMDAKKLSKLINEKILEQLDHKNLNLDVPFLKDMMCTTENLATAIWQQLTPHLPSEVQLHAIKLYETPRIYVEYFGE

SEQ ID NO: 23537 - protein, 137 aa, unidentified
  source 1..137: note = Panacibacter sp.
  REGION 1..137: note = tr|A0A4U3KVX1|A0A4U3KVX1_9BACT 6-carboxytetrahydropterin synthase OS=Panacibacter sp. 17mud1-8 OX=2575867 GN=FC093_16510 PE=4 SV=1
MSKVAVCRVEHFNAAHRLHVPEWSDAVNTTVFGKCNNPNYHGHNYQLIVRVTGEPNATTGYVMDMKVLSDIIKAEVLQRFDHKNLNLDTQEFKNLNPTAENIAITIYNLLRARIEPALELKITLYETERNFVEYPAS

SEQ ID NO: 23538 - protein, 147 aa, Pandoraea apista
  REGION 1..147: note = tr|A0A0B5FF22|A0A0B5FF22_9BURK 6-carboxytetrahydropterin synthase QueD OS=Pandoraea apista OX=93218 GN=queD PE=4 SV=1
MITITRKLEFDAGHRIPDHRSQCRNLHGHRYVLEITLAGEVSRESGASDNGMVMDFADVKALANEHLVSVWDHAFLVYEGDTAVRNFLETMPDHKTVIFDRVPTVENLAAAAFDKLSSVFDSHYGHDLRLVRLRLYETPNCWSEVTA

SEQ ID NO: 23539 - protein, 161 aa, Pandoraea apista
  REGION 1..161: note = tr|A0A0G4JFL5|A0A0G4JFL5_9BURK 6-carboxy-5,6,7,8-tetrahydropterin synthase OS=Pandoraea apista OX=93218 GN=queD PE=4 SV=1
MSREGADSPHGVRARALKRTAPRSTRNLAVVASRAQFTLSRSFVFEAAHTLSRRDIDPPSIDASRRIHGHSYRATVEVTGNPQGESGMVLDLACLDAELTRVRERLDHRLLDDVAGLGPATLENLCAFIWRALAPTLEGLSRVTVSRDARGDACSLTLRER

SEQ ID NO: 23540 - protein, 147 aa, Pandoraea faecigallinarum
  REGION 1..147: note = tr|A0A0H3WSV5|A0A0H3WSV5_9BURK 6-carboxy-5,6,7,8-tetrahydropterin synthase OS=Pandoraea faecigallinarum OX=656179 GN=AB870_12190 PE=3 SV=1
MITITRKLEFDAGHRIPDHRSQCRNLHGHRYVLEITLAGEVSRESGASDNGMVMDFADVKALANEHLVSVWDHAFLVYEGDTAVRNFLETMPGHKTVVFDRVPTVENLAAAAFDKLSHVFDAHYGRDLRLVRLRLYETPNCWSEVTA

SEQ ID NO: 23541 - protein, 161 aa, unidentified
  source 1..161: note = Pandoraea fibrosis
  REGION 1..161: note = tr|A0A5E4U5X7|A0A5E4U5X7_9BURK 6-carboxytetrahydropterin synthase OS=Pandoraea fibrosis; OX = 1891094 GN=PFI31113_01813 PE=4 SV=1
MSRGGSGESPDGRERALKRTTQRKTRSLAVVESRAQFTLSRSFVFEAAHTLIRRDIDPPSIDASRRIHGHSYRATVEVTGDPQGESGMVLDLGRLDAELTRVRERLDHRLLDDVAGLGPATLENLCAFLWRALAPTLDGLSRVTVSRDARGDACSLTLRER

SEQ ID NO: 23542 - protein, 147 aa, unidentified
  source 1..147: note = Pandoraea fibrosis
  REGION 1..147: note = tr|A0A0B3TSF0|A0A0B3TSF0_9BURK 6-carboxy-5,6,7,8-tetrahydropterin synthase OS=Pandoraea fibrosis OX=1891094 GN=PJ20_08130 PE=3 SV=1
MITITRKLEFDAGHRIPDHRSQCRNLHGHRYVLEITLAGEVSRESGASDNGMVMDFADVKALANEHLVSVWDHAFLVYEGDTAVRNFLETMPDHKTVVFDRVPTVENLAAAAFDKLSSVFDTHYGHDLRLVRLRLYETPNCWSEVTA

SEQ ID NO: 23543 - protein, 147 aa, Pandoraea norimbergensis
  REGION 1..147: note = tr|A0A0U2MCU0|A0A0U2MCU0_9BURK 6-carboxy-5,6,7,8-tetrahydropterin synthase OS=Pandoraea norimbergensis OX=93219 GN=AT302_08955 PE=3 SV=1
MITITRKLEFDAGHRIPDHRSQCRNLHGHRYVLEITLAGEVSRESGASDNGMVMDFADVKALANEHLVSVWDHAFLVYEGDTAVRDFLATMPDHKTVVFDRVPTVENLAAAAFDKLSGVFDAHYGRDLRLVRLRLYETPNCWSEVTA

SEQ ID NO: 23544 - protein, 134 aa, Pandoraea norimbergensis
  REGION 1..134: note = tr|A0A0U2Y7P8|A0A0U2Y7P8_9BURK 6-carboxy-5,6,7,8-tetrahydropterin synthase OS=Pandoraea norimbergensis OX=93219 GN=AT302_10030 PE=3 SV=1
MNGSADRAQFTLSRSFVFEAAHTLARRDIDPPSIDASRRIHGHSYRATVEVTGKPQGETGMVLDLAVFDAALAQVCERLDHRLLDDVAGLGPATLENLCSFIWRSLAPRLVGLSRVTVSRDARGDACSLVIGPA

SEQ ID NO: 23545 - protein, 123 aa, Pandoraea oxalativorans
  REGION 1..123: note = tr|A0A0E3U9H1|A0A0E3U9H1_9BURK 6-carboxy-5,6,7,8-tetrahydropterin synthase OS=Pandoraea oxalativorans OX=573737 GN=MB84_06405 PE=3 SV=1
MSRSFVFEAAHTLNRRDIDPPSMDASRRIHGHSYRATVEVTGAPMGESGMVLDLAQLDAALTRVSERLDHRLLDDVAGLGPATLENLCAFIWRALAPHLVGLSRVTVSRDARGDACSLSMREA

SEQ ID NO: 23546 - protein, 147 aa, Pandoraea oxalativorans
  REGION 1..147: note = tr|A0A0E3U5Y2|A0A0E3U5Y2_9BURK 6-carboxy-5,6,7,8-tetrahydropterin synthase OS=Pandoraea oxalativorans OX=573737 GN=MB84_05280 PE=3 SV=1
MITITRKLEFDAGHRIPDHRSQCRNLHGHRYVLEITLAGEVSRESGASDNGMVMDFADVKALANEHLVSVWDHAFLVYEGDTAVRTFLETMPDHKTVVFDRVPTVENLAAAAFDKLSHVFDAHYGRDLRLVRLRLYETPNCWSEVTA

SEQ ID NO: 23547 - protein, 147 aa, Pandoraea pnomenusa
  REGION 1..147: note = tr|A0A518QXB3|A0A518QXB3_9BURK 6-carboxy-5,6,7,8-tetrahydropterin synthase OS=Pandoraea pnomenusa OX=93220 GN=queD PE=3 SV=1
MITITRKLEFDAGHRIPDHRSQCRNLHGHRYVLEITLAGEVSRESGASDNGMVMDFADVKALANQHLVSVWDHAFLVYEGDTAVRAFLETMPDHKTVVFDRVPTVENLAAAAFETLSGVFDAHYGRDLRLVRLRLYETPNCWSEVTA

SEQ ID NO: 23548 - protein, 147 aa, Pandoraea pnomenusa
  REGION 1..147: note = tr|A0A378YR13|A0A378YR13_9BURK 6-carboxy-5,6,7,8-tetrahydropterin synthase OS=Pandoraea pnomenusa OX=93220 GN=NCTC13160_02978 PE=3 SV=1
MITITRKLEFDAGHRIPDHRSQCRNLHGHRYVLEITLAGEVSRESGASDNGMVMDFADVKALANEHLVSVWDHAFLVYEGDTAVRAFLETMPDHKTVVFDRVPTVENLAAAAFETLSGVFDAHYGRDLRLVRLRLYETPNCWSEVTA

SEQ ID NO: 23549 - protein, 147 aa, Pandoraea pulmonicola
  REGION 1..147: note = tr|A0A378Z6V3|A0A378Z6V3_9BURK 6-carboxy-5,6,7,8-tetrahydropterin synthase OS=Pandoraea pulmonicola OX=93221 GN=NCTC13159_02402 PE=3 SV=1
MITITRKLEFDAGHRIPDHRSQCRNLHGHRYVLEITLAGEVSRESGASDNGMVMDFADVKALANEHLVSVWDHAFLVYEGDTAVRTFLETMPDHKTVVFDRVPTVENLAAAAFDKLSGVFDAHYGRDLRLVRLRLYETPNCWSEVTA

SEQ ID NO: 23550 - protein, 157 aa, Pandoraea pulmonicola
  REGION 1..157: note = tr|A0A378Z4A0|A0A378Z4A0_9BURK 6-carboxy-5,6,7,8-tetrahydropterin synthase OS=Pandoraea pulmonicola OX=93221 GN=queD PE=4 SV=1
MSRGRTGVASGTRTKAVERMDATGPAPQRRAQFTLSRSFVFEAAHTLARRGIDPPSIDASRRIHGHSYRATIEVTGSPQGATGMVLDLARLDAELAHVSERLDHRLLDDVAGLGPATLENLCAFIWRSLAPRLSGLTRVTVSRDARGDACSLTMQAT

SEQ ID NO: 23551 - protein, 161 aa, Pandoraea sp.
  REGION 1..161: note = tr|R7WV72|R7WV72_9BURK Uncharacterized protein; OS = Pandoraea sp. SD6-2 OX=1286093 GN=C266_23136 PE=4 SV=1
MSREGSPKSRGERERPLKRTVERGPRSLAVTQKRAQFTLSRSFVFEAAHTLIRHDIDSPSIDASRRIHGHSYRATVEVTGSPQGESGMVLDLACLDAQLRRVSERLDHRLLDDVAGLGPATLENLCAFIWRALAPHLAGLSRVTVSRDARGDACSLTMRDA

SEQ ID NO: 23552 - protein, 147 aa, Pandoraea sp.
  REGION 1..147: note = tr|A0A522ES19|A0A522ES19_9BURK 6-carboxytetrahydropterin synthase QueD OS=Pandoraea sp.; OX = 1883445 GN=queD PE=4 SV=1
MITITRKLEFDAGHRIPDHRSQCRNLHGHRYVLEITLCGEIMQHEGASDNGMVMDFADVKTLAREHLIDVWDHAFLVYENDAAVRGFLDSLPDHKTVVLDRVPTVENLAAVAFDVLAAVFDAHYGVNLRLTRVRLYETPNCWAEVCR

SEQ ID NO: 23553 - protein, 164 aa, Pandoraea sputorum
  REGION 1..164: note = tr|A0A239S727|A0A239S727_9BURK 6-carboxy-5,6,7,8-tetrahydropterin synthase OS=Pandoraea sputorum OX=93222 GN=queD PE=4 SV=1
MSRTHAQKPVAARQRALKRTPEPSDRHARAHASTETRAQFTLSRSFVFEAAHTLNRRDIDPPSMDASRRIHGHSYRATVEVTGAPMGESGMVLDLAQLDAALTRVSERLDHRLLDDVAGLGPATLENLCAFIWRALAPHLVGLSRVSVSRDARGDACSLSMREA

SEQ ID NO: 23554 - protein, 164 aa, Pandoraea sputorum
  REGION 1..164: note = tr|A0A5E5B6R9|A0A5E5B6R9_9BURK 6-carboxytetrahydropterin synthase OS=Pandoraea sputorum; OX = 93222 GN=PSP31120_02946 PE=4 SV=1
MSRTHAQKPVAARQRALKRTPEPSDRSARAHASTETRAQFTLSRSFVFEAAHTLNRRDIDPPSMDASRRIHGHSYRATVEVTGAPMGESGMVLDLAQLDAALTRVSERLDHRLLDDVAGLGPATLENLCAFIWRALAPHLVGLSRVSVSRDARGDACSLSMREA

SEQ ID NO: 23555 - protein, 147 aa, unidentified
  source 1..147: note = Pandoraea terrae
  REGION 1..147: note = tr|A0A5E4TA10|A0A5E4TA10_9BURK 6-carboxy-5,6,7,8-tetrahydropterin synthase OS=Pandoraea terrae OX=1537710 GN=PTE30175_01251 PE=3 SV=1
MITITRKLEFDAGHRIPDHRSQCRNLHGHRYVLEITLTGEVSRQAGASDNGMVMDFADVKALANEHLVSVWDHAFIVYEGDAAVRDFLASLPDHKTVVLDRVPTVENLAAVAFDKLAAVFDAHYGRDLRLMRLRLYETPNCWAEVTA

SEQ ID NO: 23556 - protein, 121 aa, Pandoraea thiooxydans
  REGION 1..121: note = tr|A0A0G3EX98|A0A0G3EX98_9BURK 6-carboxy-5,6,7,8-tetrahydropterin synthase OS=Pandoraea thiooxydans OX=445709 GN=ABW99_16830 PE=3 SV=1
MNYELSQKFYFEAAHTLHREIDAEGSRRVHGHTYHAQIFVRGRPDPSTRMVADLGQLRREIEHVRDQLDHRFLDEVPGLGAPTLEGLCAFIYRSLSRALPNISKVRVERPASGDCCDLDPA

SEQ ID NO: 23557 - protein, 147 aa, Pandoraea thiooxydans
  REGION 1..147: note = tr|A0A0G3EU58|A0A0G3EU58_9BURK 6-carboxy-5,6,7,8-tetrahydropterin synthase OS=Pandoraea thiooxydans OX=445709 GN=ABW99_16355 PE=4 SV=1
MITITRKLEFDAGHRIPDHRSQCRNLHGHRYVLEITLCGEIMQHEGASDNGMVMDFADVKTLAREHLIDVWDHAFLVYENDAAVRGFLDTLPDHKTVVLDRVPTVENLAAVAFDILAAVFDAHYGVNLRLARVRLYETPNCWAEVCR

SEQ ID NO: 23558 - protein, 147 aa, Pandoraea vervacti
  REGION 1..147: note = tr|A0A0C5JVJ3|A0A0C5JVJ3_9BURK 6-carboxy-5,6,7,8-tetrahydropterin synthase OS=Pandoraea vervacti OX=656178 GN=UC34_00915 PE=3 SV=1
MITITRKLEFDAGHRIPDHRSQCRNLHGHRYVLEITLAGEVSRESGASDNGMVMDFADVKALANEHLVSVWDHAFLVYEGDTAVRNFLETMPDHKTVVFDRVPTVENLAAAAFDKLSHVFDAHYGRDLRLVRLRLYETPNCWSEVTA

SEQ ID NO: 23559 - protein, 132 aa, Pandoraea vervacti
  REGION 1..132: note = tr|A0A0C5K5N4|A0A0C5K5N4_9BURK 6-carboxy-5,6,7,8-tetrahydropterin synthase OS=Pandoraea vervacti OX=656178 GN=UC34_01965 PE=3 SV=1
MGETRAQFTLSRSFVFEAAHTLVRRDIDPPSMDASRRIHGHSYRATVEITGVPTGESGMVIDLARLDGVLSQVSNRLDHRLLDDVAGLGPATLENLCVFIWRALAPQLVGLSRVTVGRDARGDACSLSMRDA

SEQ ID NO: 23560 - protein, 133 aa, unidentified
  source 1..133: note = Pannonibacter indicus
  REGION 1..133: note = tr|A0A0K6HP46|A0A0K6HP46_9RHOB 6-pyruvoyl-tetrahydropterin synthase OS=Pannonibacter indicus OX=466044 GN=Ga0061067_10243 PE=4 SV=1
MFAVEVRDHVMIAHSFKGELFGPAQALHGATFVVDAAFLADRLDINGVVIDIGRAHEVLKEVLSPLNYRNLDEVPEFAGINTTTEFLTRHVHDHLAQAARDNRLGRPGSEIRAIRVTISESHVARAWYEAPVA

SEQ ID NO: 23561 - protein, 126 aa, unidentified
  source 1..126: note = Pannonibacter indicus
  REGION 1..126: note = tr|A0A0K6HSG5|A0A0K6HSG5_9RHOB 6-carboxy-5,6,7,8-tetrahydropterin synthase; OS = Pannonibacter indicus OX=466044 GN=Ga0061067_102541; PE = 3 SV=1
MFRIAKEFHFSASHQLFGLPDDHPCARLHGHNYVVEVELMSETLDSVGFVRDYRELGPFKTWLDDTLDHRHLNDVLGNGNVTAERMARLFYDWCKARWPEVSAVRVRETPKTMAEYRPKGSCGCSA

SEQ ID NO: 23562 - protein, 133 aa, Pannonibacter phragmitetus
  REGION 1..133: note = tr|A0A378ZQW2|A0A378ZQW2_9RHOB Queuosine biosynthesis protein QueD OS=Pannonibacter phragmitetus; OX = 121719 GN=NCTC13350_00357 PE=4 SV=1
MFAVEVRDHVMIAHSFKGELFGPAQALHGATFVVDAAFLADRLDVNGVVIDIGRAHEALKEVLSPLNYRNLDEVPEFAGINTTTEFLTKHVHDHLAQAARDNRLGRPGSEIRAIRVTISESHVARAWYEAPVA

SEQ ID NO: 23563 - protein, 128 aa, Pannonibacter phragmitetus
  REGION 1..128: note = tr|A0A0U3P1W0|A0A0U3P1W0_9RHOB 6-carboxy-5,6,7,8-tetrahydropterin synthase; OS = Pannonibacter phragmitetus OX=121719 GN=APZ00_06940; PE = 3 SV=1
MFRIAKEFHFSASHQIFGLPDDHPCARLHGHNYVVEVELMSETLDSVGFVRDYRELGPFKTWLDDTLDHRHLNDVLGNDNVTAERMARLFYDWCKARWPEVSAVRVRETPKTMAEYRPKGSCGCGYGA

SEQ ID NO: 23564 - protein, 120 aa, unidentified
  source 1..120: note = Pantoea alhagi
  REGION 1..120: note = tr|A0A1W6B683|A0A1W6B683_9GAMM 6-carboxy-5,6,7,8-tetrahydropterin synthase OS=Pantoea alhagi OX=1891675 GN=B1H58_11525 PE=3 SV=1
MATTLFKDFQFEAAHRLPHVPEGHKCGRLHGHSFLVRLEITGDVDPYTGWIMDFAELKAAFKPVYDRLDHYYLNDIAGLENPTSEVLAQWIWQQMKPVVPLLSAVMIKETCTAGCVYRGE

SEQ ID NO: 23565 - protein, 119 aa, Pantoea allii
  REGION 1..119: note = tr|A0A2V2BKM6|A0A2V2BKM6_9GAMM 6-carboxy-5,6,7,8-tetrahydropterin synthase OS=Pantoea allii OX=574096 GN=C7431_103512 PE=3 SV=1
MSTTLFKEFQFEAAHHLPNVPAGHKCGRLHGHSFLVRLEITGEVDAHTGWVMDFAELKAAFKPLYDRLDHYYLNEIPGLENPTSEVLAKWIWDHMKPRLPLLSAVMIKETCTAGCTYRG

SEQ ID NO: 23566 - protein, 119 aa, Pantoea allii
  REGION 1..119: note = tr|A0A4S3BIB8|A0A4S3BIB8_9GAMM 6-carboxy-5,6,7,8-tetrahydropterin synthase OS=Pantoea allii OX=574096 GN=queD PE=3 SV=1
MSTTLFKEFQFEAAHHLPNVPAGHKCGRLHGHSFLVRLEITGEVDAHTGWVMDFAELKAAFKPLYNRLDHYYLNDIPGLENPTSEVLAKWIWEQMKPQLPLLSAVMIKETCTAGCVYRG

SEQ ID NO: 23567 - protein, 119 aa, unidentified
  source 1..119: note = Pantoea ananas
  REGION 1..119: note = tr|A0A2V1ZXR1|A0A2V1ZXR1_PANAN 6-carboxy-5,6,7,8-tetrahydropterin synthase OS=Pantoea ananas OX=553 GN=C7427_10839 PE=3 SV=1
MSTTLFKEFQFEAAHYLPNVPAGHKCGRLHGHSFLVRLEITGEVDAHTGWVMDFAELKAAFKPLYDRLDHYYLNEIPGLENPTSEVLAKWIWDHMKPRLPLLSAVMIKETCTAGCTYRG

SEQ ID NO: 23568 - protein, 119 aa, unidentified
  source 1..119: note = Pantoea ananas
  REGION 1..119: note = tr|A0A2S7ZVH1|A0A2S7ZVH1_PANAN 6-carboxy-5,6,7,8-tetrahydropterin synthase OS=Pantoea ananas OX=553 GN=queD PE=3 SV=1
MSTTLFKEFQFEAAHHLPNVPAGHKCGRLHGHSFLVRLEITGEVDAHTGWVMDFAELKAAFKPLYNRLDHYYLNDIPGLENPTSEVLAKWIWDQMKPELPLLSAVMIKETCTAGCVYRG

SEQ ID NO: 23569 - protein, 119 aa, Pantoea ananatis; identical to SEQ ID NO: 23567
  REGION 1..119: note = tr|A0A0H3KZF9|A0A0H3KZF9_PANAA 6-carboxy-5,6,7,8-tetrahydropterin synthase OS=Pantoea ananatis (strain AJ13355) OX=932677 GN=ygcM PE=3 SV=1

SEQ ID NO: 23570 - protein, 119 aa, Pantoea ananatis; identical to SEQ ID NO: 23567
  REGION 1..119: note = tr|D4GLI2|D4GLI2_PANAM 6-carboxy-5,6,7,8-tetrahydropterin synthase OS=Pantoea ananatis (strain LMG 20103) OX=706191 GN=ygcM PE=3 SV=1

SEQ ID NO: 23571 - protein, 119 aa, Pantoea anthophila
  REGION 1..119: note = tr|A0A506NQW3|A0A506NQW3_9GAMM 6-carboxy-5,6,7,8-tetrahydropterin synthase OS=Pantoea anthophila OX=470931 GN=queD PE=3 SV=1
MSTTLFKEFQFEAAHHLPNVPAGHKCGRLHGHSFLVRLEITGEVDAHTGWVMDFAELKAAFKPVYDRLDHYYLNDIPGLENPTSEVLAKWIWDQMKPQLPLLSAVMIKETCTAGCVYRG

SEQ ID NO: 23572 - protein, 119 aa, unidentified
  source 1..119: note = Pantoea coffeiphila
  REGION 1..119: note = tr|A0A2S9I914|A0A2S9I914_9GAMM 6-carboxy-5,6,7,8-tetrahydropterin synthase OS=Pantoea coffeiphila OX=1465635 GN=queD PE=3 SV=1
MATTLFKDFQFEAAHHLPNVPAGHKCGRLHGHSFMVRLEITGEVDAHTGWVIDFSEIKAAFKPVYDRLDHYYLNDIPGLENPTSEVLAAWIWQQMKPVLPLLSAVMVKETCTAGCVYRG

SEQ ID NO: 23573 - protein, 119 aa, Pantoea cypripedii
  REGION 1..119: note = tr|A0A1X1EX88|A0A1X1EX88_PANCY 6-carboxy-5,6,7,8-tetrahydropterin synthase OS=Pantoea cypripedii OX=55209 GN=HA50_15365 PE=3 SV=1
MSTTLFKEFQFEAAHRLPHVPEGHKCGRLHGHSFLVRLEITGEVDAYTGWVMDFAELKAAFAPIYDRLDHHYLNDIPGLSNPTSEVLAKWIWDEMKPILPELSAVMIKETCTAGCVYRG

SEQ ID NO: 23574 - protein, 119 aa, Pantoea deleyi
  REGION 1..119: note = tr|A0A506PXP3|A0A506PXP3_9GAMM 6-carboxy-5,6,7,8-tetrahydropterin synthase OS=Pantoea deleyi OX=470932 GN=queD PE=3 SV=1
MSTTLFKEFQFEAAHHLPNVPAGHKCGRLHGHSFLVRLEITGEVDAHTGWVMDFAELKAAFKPVYDRLDHYYLNEIPGLENPTSEVLARWIWDQMKPQLPLLTAVMIKETCTAGCVYRG

SEQ ID NO: 23575 - protein, 289 aa, Pantoea dispersa
  REGION 1..289: note = tr|A0A518XJL5|A0A518XJL5_9GAMM Isocitrate dehydrogenase OS=Pantoea dispersa OX=59814 GN=D8B20_20825; PE = 4 SV=1
MVLFVCNLTTIDFSWLDPLRGLVGESLIVDVSLTGELDEQSMVMDFSLVKKEIKKYLDASVDHALVLPLRNPRVTCTCCAERVDVMLFSDAGKVDCFVSGPAASFLPIDAASIETTELEKWLNKKIKEILPANIDDAAITLRHEEHAGYYYHYAHGLKKHAGNCQRIAHGHRSTIQIFINDKRDAYWEKYWAERWKNSYLMSENDVVAASQLSAKAQAVYHDKLLASAYTSSQGYFEILLSHEQVEILPDDTTVERIGCFIKQEIGRLNPQLGHVTVHAFEGVGKGARI

SEQ ID NO: 23576 - protein, 119 aa, Pantoea dispersa
  REGION 1..119: note = tr|A0A437T5Z8|A0A437T5Z8_9GAMM 6-carboxy-5,6,7,8-tetrahydropterin synthase OS=Pantoea dispersa OX=59814 GN=queD PE=3 SV=1
MSTTLFKEFQFEAAHRLPHVPEGHKCGRLHGHSFLVRLEITGEVDAHTGWVMDFAELKAAFRPIYDRLDHHYLNDIPGLENPTSEVLAKWIWDEMKPILPELSAVMIKETCTAGCVYRG

SEQ ID NO: 23577 - protein, 119 aa, Pantoea eucalypti; identical to SEQ ID NO: 23568
  REGION 1..119: note = tr|A0A506P6X6|A0A506P6X6_9GAMM 6-carboxy-5,6,7,8-tetrahydropterin synthase OS=Pantoea eucalypti OX=470933 GN=queD PE=3 SV=1

SEQ ID NO: 23578 - protein, 119 aa, unidentified
  source 1..119: note = Pantoea latae
  REGION 1..119: note = tr|A0A1V9DCN6|A0A1V9DCN6_9GAMM 6-carboxy-5,6,7,8-tetrahydropterin synthase OS=Pantoea latae OX=1964541 GN=B2J69_17670 PE=3 SV=1
MSTTLFKEFQFEAAHHLPNVPAGHKCGRLHGHSFLVRLEITGEVDAHTGWVMDFAELKAAFSPLYDRLDHHYLNEIPGLENPTSEVLAKWIWDEMKPLLPELSAVMIKETCTAGCVYKG

SEQ ID NO: 23579 - protein, 119 aa, unidentified
  source 1..119: note = Pantoea rodasii
  REGION 1..119: note = tr|A0A0B1RAJ0|A0A0B1RAJ0_9GAMM 6-carboxy-5,6,7,8-tetrahydropterin synthase OS=Pantoea rodasii OX=1076549 GN=QU24_10495 PE=3 SV=1
MSTTLFKEFQFESAHRLPHVPEGHKCGRLHGHSFLVRLEITGEVDAHTGWVMDFAELKAAFKPIYDRLDHHYLNDIPGLENPTSEVLAKWIWDQMKPILPELSAVMIKETCTAGCVYRG

SEQ ID NO: 23580 - protein, 119 aa, unidentified
  source 1..119: note = Pantoea rodasii
  REGION 1..119: note = tr|A0A2M9W8H6|A0A2M9W8H6_9GAMM 6-carboxy-5,6,7,8-tetrahydropterin synthase OS=Pantoea rodasii OX=1076549 GN=queD PE=3 SV=1
MSTTLFKEFQFESAHRLPHVPEGHKCGRLHGHSFLVRLEITGEVDAHTGWVMDFAELKAAFMPIYDRLDHHYLNDIPGLENPTSEVLAKWIWDQMKPILPELSAVMIKETCTAGCTYKG

SEQ ID NO: 23581 - protein, 119 aa, unidentified
  source 1..119: note = Pantoea rwandensis
  REGION 1..119: note = tr|A0A1X1CS59|A0A1X1CS59_9GAMM 6-carboxy-5,6,7,8-tetrahydropterin synthase OS=Pantoea rwandensis OX=1076550 GN=HA51_20115 PE=3 SV=1
MSTTLFKEFQFESAHHLPHVPEGHKCGRLHGHSFLVRLEITGEVDAHTGWVMDFAELKAAFMPIYDRLDHHYLNDIPGLENPTSEVLAKWIWDQMKPILPELSAVMIKETCTAGCVYRG

SEQ ID NO: 23582 - protein, 120 aa, unidentified; identical to SEQ ID NO: 20131
  source 1..120: note = Pantoea sesami
  REGION 1..120: note = tr|A0A1M5UHR4|A0A1M5UHR4_9GAMM 6-carboxy-5,6,7,8-tetrahydropterin synthase OS=Pantoea sesami OX=1881110 GN=SAMN05428958_106241 PE=3 SV=1

SEQ ID NO: 23583 - protein, 119 aa, Pantoea sp.; identical to SEQ ID NO: 23568
  REGION 1..119: note = tr|E0M4N4|E0M4N4_9GAMM 6-carboxy-5,6,7,8-tetrahydropterin synthase OS=Pantoea sp. aB OX=517433 GN=PanABDRAFT_4353 PE=3 SV=1

SEQ ID NO: 23584 - protein, 119 aa, Pantoea sp.
  REGION 1..119: note = tr|A0A2P5ISZ2|A0A2P5ISZ2_9GAMM 6-carboxy-5,6,7,8-tetrahydropterin synthase OS=Pantoea sp. PSNIH6 OX=2080494 GN=queD PE=3 SV=1
MSTTLFKEFQFEAAHHLPNVPEGHKCGRLHGHSFLVRLEITGEVDAHTGWVMDFAELKAAFKPLYDRLDHNYLNDIPGLENPTSEVLAKWIWDEMKPLLPELSAVMIKETCTAGCVYKG

SEQ ID NO: 23585 - protein, 119 aa, Pantoea stewartii
  REGION 1..119: note = tr|H3RGV8|H3RGV8_PANSE 6-carboxy-5,6,7,8-tetrahydropterin synthase OS=Pantoea stewartii subsp. stewartii DC283 OX=660596 GN=CKS_1306; PE = 3 SV=1
MSTTLFKEFQFEAAHHLPNVPAGHKCGRLHGHSFLVRLEITGEVDAHTGWVMDFAELKAAFKPLYDRLDHYYLNDIPGLENPTSEVLAKWIWDHMKPRLPLLSAVMIKETCTAGCTYRG

SEQ ID NO: 23586 - protein, 119 aa, Pantoea vagans
  REGION 1..119: note = tr|E1SC30|E1SC30_PANVC 6-carboxy-5,6,7,8-tetrahydropterin synthase OS=Pantoea vagans (strain C9-1) OX=712898 GN=ygcM PE=3 SV=1
MSTTLFKEFQFEAAHHLPNVPAGHKCGRLHGHSFLVRLEITGEVDAHTGWVMDFAELKAAFKPLYNRLDHYYLNDIPGLENPTSEVLAKWIWDQMKPQLPLLSAVMIKETCTAGCVYRG

SEQ ID NO: 23587 - protein, 119 aa, Pantoea vagans; identical to SEQ ID NO: 23579
  REGION 1..119: note = tr|A0A0U3TFQ7|A0A0U3TFQ7_9GAMM 6-carboxy-5,6,7,8-tetrahydropterin synthase OS=Pantoea vagans OX=470934 GN=LK04_03435 PE=3 SV=1

SEQ ID NO: 23588 - protein, 119 aa, unidentified
  source 1..119: note = Pantoea wallisii
  REGION 1..119: note = tr|A0A1X1D9S3|A0A1X1D9S3_9GAMM 6-carboxy-5,6,7,8-tetrahydropterin synthase OS=Pantoea wallisii OX=1076551 GN=HA48_09485 PE=3 SV=1
MSTTLFKEFQFEAAHRLPHVPEGHKCGRLHGHSFLVRLEITGEVDAHTGWVMDFAELKAAFMPIYDRLDHHYLNDIPGLDNPTSEVLAKWIWDQMKPLLPELSAVMIKETCTAGCVYKG

SEQ ID NO: 23589 - protein, 110 aa, unidentified
  source 1..110: note = Parabacteroides acidifaciens
  REGION 1..110: note = tr|A0A3D8HF65|A0A3D8HF65_9BACT 6-carboxy-5,6,7,8-tetrahydropterin synthase; OS = Parabacteroides acidifaciens OX=2290935 GN=queD PE=3; SV = 1
MYTVIKRMEISAAHSLSLSYPSKCENLHGHNWIITVYCRSEELNPDGMVVDFSHIKRIVKDQLDHRNLNEVLPFNPTAENIARWICDQLPTCYKVEVQESEGNTAIYEKD

SEQ ID NO: 23590 - protein, 110 aa, unidentified
  source 1..110: note = Parabacteroides chinchillae
  REGION 1..110: note = tr|A0A1H5Y9H8|A0A1H5Y9H8_9BACT 6-carboxy-5,6,7,8-tetrahydropterin synthase; OS = Parabacteroides chinchillae OX=871327; GN = SAMN05444001_12014 PE=3 SV=1
MYTVIKRMEISASHSLRLSYPSKCENLHGHNWIITVYCRSKELNADGMVIDFSHIKKIVKSTLDHQNLNEILPFNPTAENIARWICDQLHSCFKVEIQESEGNTAIYEKD

SEQ ID NO: 23591 - protein, 111 aa, Parabacteroides distasonis
  REGION 1..111: note = tr|A0A174VTR5|A0A174VTR5_9BACT 6-carboxy-5,6,7,8-tetrahydropterin synthase; OS = Parabacteroides distasonis OX=823 GN=queD_2 PE=3 SV=1
MYTVRKRLEISASHRLSLSYASKCENLHGHNWIVIVWCRSKQLNPDGMVVDFAHVKRMIQEKLDHKNLNEVLSFNPTAENIAKWICDQIPQCFKVMVQESENNIAWYEEDK

SEQ ID NO: 23592 - protein, 110 aa, Parabacteroides distasonis
  REGION 1..110: note = tr|A0A3L7ZUA7|A0A3L7ZUA7_9BACT 6-carboxy-5,6,7,8-tetrahydropterin synthase; OS = Parabacteroides distasonis OX=823 GN=D7V78_02090 PE=3; SV = 1
MYTVIKRMEISASHSLRLSYPSKCENLHGHNWMITVYCRSKELNADGMVVDFSHIKRAVKSLLDHQNLNDILPFNPTAENIAFWVYEQIPSCFKVEVKESEGNTAIYEED

SEQ ID NO: 23593 - protein, 110 aa, Parabacteroides goldsteinii
  REGION 1..110: note = tr|S0GTC5|S0GTC5_9BACT 6-carboxy-5,6,7,8-tetrahydropterin synthase; OS = Parabacteroides goldsteinii dnLKV18 OX=1235789; GN = C803_01334 PE=3 SV=1
MYTVIKRMEISAAHSLRLSYSSKCENLHGHNWIITVYCRSKELNADGMVIDFSHIKESIKNKLDHQNLNEVLPFNPTAENMARWICDQLPNCYKVEVKESESNTAIYEKD

SEQ ID NO: 23594 - protein, 110 aa, Parabacteroides goldsteinii; identical to SEQ ID NO: 23593
  REGION 1..110: note = tr|A0A0J6CFR1|A0A0J6CFR1_9BACT 6-carboxy-5,6,7,8-tetrahydropterin synthase; OS = Parabacteroides goldsteinii OX=328812 GN=ACM15_19585; PE = 3 SV=1

SEQ ID NO: 23595 - protein, 110 aa, Parabacteroides gordonii
  REGION 1..110: note = tr|A0A0F5J8K3|A0A0F5J8K3_9BACT 6-carboxy-5,6,7,8-tetrahydropterin synthase; OS = Parabacteroides gordonii MS-1 = DSM 23371 OX=1203610; GN = HMPREF1536_03690 PE=3 SV=1
MYTVVKRMEVSAAHSLKLSYPSKCENLHGHNWIITVYCRSKELNADGMVIDFSHIKNLIKSKLDHQNLNEVLPFNPTAENMARWICDQIPTCYKVEVNESESNTAIYEKD

SEQ ID NO: 23596 - protein, 110 aa, Parabacteroides johnsonii
  REGION 1..110: note = tr|K5ZR11|K5ZR11_9BACT 6-carboxy-5,6,7,8-tetrahydropterin synthase; OS = Parabacteroides johnsonii CL02T12C29 OX=999419; GN = HMPREF1077_03538 PE=3 SV=1
MYTVIKRMEISAAHSLSLSYPSKCEYLHGHNWIITVHCRSKELNTDGMVIDFTHIKQVVKDQLDHRNLNEVLPFNPTAENIARWICDQLPTCYKVEVQESEGNTAIYEKD

SEQ ID NO: 23597 - protein, 110 aa, Parabacteroides johnsonii; identical to SEQ ID NO: 23596
  REGION 1..110: note = tr|R5DJN0|R5DJN0_9BACT 6-carboxy-5,6,7,8-tetrahydropterin synthase; OS = Parabacteroides johnsonii CAG:246 OX=1263091; GN = BN560_00549 PE=3 SV=1

SEQ ID NO: 23598 - protein, 110 aa, Parabacteroides merdae; identical to SEQ ID NO: 23596
  REGION 1..110: note = tr|A7AAG5|A7AAG5_9BACT 6-carboxy-5,6,7,8-tetrahydropterin synthase; OS = Parabacteroides merdae ATCC 43184 OX=411477; GN = PARMER_00366 PE=3 SV=1

SEQ ID NO: 23599 - protein, 110 aa, Parabacteroides merdae
  REGION 1..110: note = tr|A0A3R5WYV9|A0A3R5WYV9_9BACT 6-carboxy-5,6,7,8-tetrahydropterin synthase; OS = Parabacteroides merdae OX=46503 GN=queD PE=3 SV=1
MYTVIKRMEISAAHSLLLSYPSKCEYLHGHNWIITVHCRSKELNADGMVIDFSHIKRVVKDQLDHRNLNKVLPFNPTAENIARWICNQLPTCYKVEVQESEGNTAIYEKD

SEQ ID NO: 23600 - protein, 110 aa, Parabacteroides sp.
  REGION 1..110: note = tr|E1YVT5|E1YVT5_9BACT 6-carboxy-5,6,7,8-tetrahydropterin synthase; OS = Parabacteroides sp. 20_3 OX=469591 GN=DXC95_15330 PE=3; SV = 1
MYTVIKRMEISASHSLRLSYPSKCENLHGHNWMITVYCRSKELNADGMVVDFSHIKRSVKSLLDHQNLNDILPFNPTAENIAFWVYEQIPSCFKVEVKESEGNTAIYEED

SEQ ID NO: 23601 - protein, 110 aa, Parabacteroides sp.; identical to SEQ ID NO: 23600
  REGION 1..110: note = tr|C7XB67|C7XB67_9BACT 6-carboxy-5,6,7,8-tetrahydropterin synthase; OS = Parabacteroides sp. D13 OX=563193 GN=HMPREF0619_02709; PE = 3 SV=1

SEQ ID NO: 23602 - protein, 147 aa, unidentified
  source 1..147: note = Paraburkholderia aromaticivorans
  REGION 1..147: note = tr|A0A248VMR9|A0A248VMR9_9BURK 6-carboxy-5,6,7,8-tetrahydropterin synthase; OS = Paraburkholderia aromaticivorans OX=2026199 GN=queD; PE = 3 SV=1
MTITRKLEFDAGHRIPDHRSQCRNLHGHRYVLEITLQGDLVDTEGAPDRGMVMDFADVKSLAVEHLVDKWDHAFLVYEGDTQVRGFLETMADHKTVVLDRIPTVENLAAVAFDVLANVYDAHYGVNLRLHKLRLYETPNCWADVVRD

SEQ ID NO: 23603 - protein, 148 aa, unidentified
  source 1..148: note = Paraburkholderia aspalathi
  REGION 1..148: note = tr|A0A1I7CGE4|A0A1I7CGE4_9BURK 6-carboxy-5,6,7,8-tetrahydropterin synthase; OS = Paraburkholderia aspalathi OX=1324617; GN = SAMN05192563_1006224 PE=3 SV=1
MLTITRKLEFDAGHRIPDHRSQCRNLHGHRYVLEITLQGDLVDTEGAPDRGMVMDFADVKSLAVEHLVDKWDHAFLVYEGDTQVRGFLETMAGHKTVVLDRIPTVENLAAVAFDILANVYDAHYGVNLRLHKVRLFETPNCWADVVRD

SEQ ID NO: 23604 - protein, 190 aa, unidentified
  source 1..190: note = Paraburkholderia aspalathi
  REGION 1..190: note = tr|A0A1I7B750|A0A1I7B750_9BURK 6-pyruvoyltetrahydropterin/6-carboxytetrahydropterin synthase OS=Paraburkholderia aspalathi OX=1324617; GN = SAMN05192563_1004239 PE=4 SV =1
MLIRKLFSFEGAHVVRHASSHRCAWSIHGHSYRVEIILEADALDHGQMVYDFGLLKGEVREIVDAFDHTLVFWNCDDPAYMEMCRSHSQRWIALPVSPSAEQLSRVFFVLVDVVMRAMPMRNGEADVRVQSVIVHETATGYAQCFRRDAYNPRMGLVSPALIGFSDAVRREATTGILDELTSAVACAPAC

SEQ ID NO: 23605 - protein, 147 aa, unidentified
  source 1..147: note = Paraburkholderia azotifigens
  REGION 1..147: note = tr|A0A5C6VW23|A0A5C6VW23_9BURK 6-carboxy-5,6,7,8-tetrahydropterin synthase; OS = Paraburkholderia azotifigens OX=2057004 GN=queD PE=3; SV = 1
MTITRKLEFDAGHRIPDHRSQCRNLHGHRYVLEITLQGDLVETEGAPDRGMVMDFADVKALANEHLVDKWDHAFLVYEGDTQVRGFLETMAGHKTVVLDRIPTVENLAAVAFDILANVYDAHYGVNLRLHKVRLYETPNCWADVVRD

SEQ ID NO: 23606 - protein, 148 aa, unidentified
  source 1..148: note = Paraburkholderia bryophila
  REGION 1..148: note = tr|A0A329C0A8|A0A329C0A8_9BURK 6-carboxy-5,6,7,8-tetrahydropterin synthase; OS = Paraburkholderia bryophila OX=420952 GN=BX591_11258; PE = 3 SV=1
MLTITRKLEFDAGHRIPDHRSQCRNLHGHRYVLEITLQGDLVDTEGAPDRGMVMDFADVKSLANEHLVDKWDHAFLVFEGDTQVRGFLETMAGHKTVVLDRIPTVENLAAVAFDILANVYDAHYGVNLRLHKLRLYETPNCWADVVRD

SEQ ID NO: 23607 - protein, 190 aa, unidentified
  source 1..190: note = Paraburkholderia caballeronis
  REGION 1..190: note = tr|A0A1H7F3P0|A0A1H7F3P0_9BURK 6-pyruvoyltetrahydropterin/6-carboxytetrahydropterin synthase OS=Paraburkholderia caballeronis OX=416943; GN = SAMN05192542_101150 PE=4 S V=1
MLIRKLFSFEGAHVVRHASSHRCAWSIHGHSYRVEIILEADALDHGQMVYDFGLLKAEVREIVDAFDHTLVFWKCDDPAYIAMCRSHSQRWIALPVSPSAEQLSRVFFVLIDAVMRAMPMRNGEADVSVQSVIVHETATGYAQCFRRDAYNPRMGRVAPALIGFSDAVRREAATGILDELASTAACAPAC

SEQ ID NO: 23608 - protein, 148 aa, unidentified
  source 1..148: note = Paraburkholderia caballeronis
  REGION 1..148: note = tr|A0A1H7HCY1|A0A1H7HCY1_9BURK 6-carboxy-5,6,7,8-tetrahydropterin synthase; OS = Paraburkholderia caballeronis OX=416943; GN = SAMN05192542_102220 PE=3 SV=1
MLTITRKLEFDAGHRIPDHRSQCRNLHGHRYVLEITLQGDLVDTEGAPDRGMVMDFADVKALANQHLIDRWDHAFLVYEGDTQVRGFLETLPGHKTVVLDRIPTVENLAAVAFDILASVYDAHYGVNLRLHRVRLYETPNCWADVIRD

SEQ ID NO: 23609 - protein, 147 aa, unidentified
  source 1..147: note = Paraburkholderia caledonica
  REGION 1..147: note = tr|A0A2Z5MFM4|A0A2Z5MFM4_9BURK 6-carboxy-5,6,7,8-tetrahydropterin synthase; OS = Paraburkholderia caledonica OX=134536 GN=queD PE=3 SV=1
MTITRKLEFDAGHRIPDHRSQCRNLHGHRYVIEITLQGDLVDTEGAPDRGMVMDFADVKSLAVEHLVDKWDHAFLVYEGDTQVRGFLETMAGHKTVVLDRIPTVENLAAVAFDILANVYDAHYGVNLRLHKLRLYETPNCWADVVRD

SEQ ID NO: 23610 - protein, 148 aa, unidentified
  source 1..148: note = Paraburkholderia caribensis
  REGION 1..148: note = tr|A0A0P0R587|A0A0P0R587_9BURK 6-carboxy-5,6,7,8-tetrahydropterin synthase; OS = Paraburkholderia caribensis MBA4 OX=1323664; GN = K788_0003500 PE=3 SV=1
MLTITRKLEFDAGHRIPDHRSQCRNLHGHRYVLEITLQGDLVETEGAPDRGMVMDFADVKALANEHLVDKWDHAFLVYEGDTQVRGFLESMAGHKTIVLDRIPTVENLAAVAFDILANVYDAHYGVNLRLHKVRLYETPNCWADVVRD

SEQ ID NO: 23611 - protein, 147 aa, unidentified
  source 1..147: note = Paraburkholderia caribensis
  REGION 1..147: note = tr|A0A2T3YLS6|A0A2T3YLS6_9BURK 6-carboxy-5,6,7,8-tetrahydropterin synthase; OS = Paraburkholderia caribensis OX=75105 GN=queD PE=3 SV=1
MTITRKLEFDAGHRIPDHRSQCRNLHGHRYVLEITLQGDLVETEGAPDRGMVMDFADVKALANEHLVDKWDHAFLVYEGDTQVRGFLESMAGHKTIVLDRIPTVENLAAVAFDILANVYDAHYGVNLRLHKVRLYETPNCWADVVRD

SEQ ID NO: 23612 - protein, 148 aa, unidentified
  source 1..148: note = Paraburkholderia diazotrophica
  REGION 1..148: note = tr|A0A1H6RDS3|A0A1H6RDS3_9BURK 6-carboxy-5,6,7,8-tetrahydropterin synthase; OS = Paraburkholderia diazotrophica OX=667676; GN = SAMN05192539_100248 PE=3 SV=1
MLTITRKLEFDAGHRIPDHRSQCRNLHGHRYVLEITLQGDLVETEGAPDRGMVMDFADVKALANEHLVDKWDHAFLVYEGDTQVRGFLDSMAGHKTVVLDRIPTVENLAAVAFEILANVYDAHYGVNLRLHKVRLYETPNCWADVVRD

SEQ ID NO: 23613 - protein, 147 aa, unidentified
  source 1..147: note = Paraburkholderia dipogonis
  REGION 1..147: note = tr|A0A4Y8NBS1|A0A4Y8NBS1_9BURK 6-carboxy-5,6,7,8-tetrahydropterin synthase; OS = Paraburkholderia dipogonis OX=1211383 GN=queD PE=3 SV=1
MTITRKLEFDAGHRIPDHRSQCRNLHGHRYVLEITLQGDLVDTEGAPDRGMVMDFADVKSLAVEHLVDKWDHAFLVYEGDTQVRGFLETMAGHKTVVLDRIPTVENLAAVAFDILANVYDAHYGVNLRLHKLRLYETPNCWADVVRD

SEQ ID NO: 23614 - protein, 172 aa, unidentified
  source 1..172: note = Paraburkholderia eburnea
  REGION 1..172: note = tr|A0A2S4MNY7|A0A2S4MNY7_9BURK 6-pyruvoyltetrahydropterin/6-carboxytetrahydropterin synthase OS=Paraburkholderia eburnea OX=1189126; GN = B0G62_101859 PE=4 SV=1
MAPVDADAQIPEHSLILPFSVEAAVLTITRKLEFDAGHRIPDHRSQCRNLHGHRYVLEITLQGDTVETEGAPDRGMVMDFADVKALANQHLVDLWDHAFLVFEGDTQVRGFLETLPGHKTVVIDRIPTVENLAAIAFEILANVYDAHYGVNLQLYKVRLYETPNCWAEVIRD

SEQ ID NO: 23615 - protein, 148 aa, unidentified
  source 1..148: note = Paraburkholderia endofungorum
  REGION 1..148: note = tr|A0A2P5KD95|A0A2P5KD95_9BURK 6-carboxy-5,6,7,8-tetrahydropterin synthase; OS = Paraburkholderia endofungorum OX=417203 GN=B0O95_10277; PE = 3 SV=1
MLTITRKLAFDAGHRIPDHRSQCRNLHGHRYVLEITLQGELVDTEGAPDRGMVMDFADVKRLAMEHLVNVWDHAFIVYEQDVMVRSFLDTLPEHKTVVLDRIPTVENLAAKAFEILAHVYDAHYGINLRLAKIRLYETPNCWADIIRD

SEQ ID NO: 23616 - protein, 148 aa, unidentified; identical to SEQ ID NO: 23603
  source 1..148: note = Paraburkholderia fungorum
  REGION 1..148: note = tr|A0A3R7I928|A0A3R7I928_9BURK 6-carboxy-5,6,7,8-tetrahydropterin synthase; OS = Paraburkholderia fungorum OX=134537 GN=BCY88_28925 PE=3; SV = 1

SEQ ID NO: 23617 - protein, 148 aa, unidentified
  source 1..148: note = Paraburkholderia fungorum
  REGION 1..148: note = tr|A0A1H0YZK4|A0A1H0YZK4_9BURK 6-carboxy-5,6,7,8-tetrahydropterin synthase; OS = Paraburkholderia fungorum OX=134537; GN = SAMN05443245_0364 PE=3 SV=1
MLTITRKLEFDAGHRIPDHRSQCRNLHGHRYVLEITLQGDLVDTEGAPDRGMVMDFADVKSLANEHLVDKWDHAFLVYEGDAQVRGFLETMAGHKTVVLDRIPTVENLAAVAFDLLASVYDAHYGVNMRLQKLRLYETPNCWADVVRD

SEQ ID NO: 23618 - protein, 148 aa, unidentified
  source 1..148: note = Paraburkholderia ginsengiterrae
  REGION 1..148: note = tr|A0A1A9NCC1|A0A1A9NCC1_9BURK 6-carboxy-5,6,7,8-tetrahydropterin synthase; OS = Paraburkholderia ginsengiterrae OX=1462993; GN = A6V37_00675 PE=3 SV=1
MLTITRKLEFDAGHRIPDHRSQCRNLHGHRYVLEITLQGDLVDTEGAPDRGMVMDFADVKSLAVEHLIDKWDHAFLVYEGDTQVRGFLETMAGHKTVVLDRIPTVENLAAVAFDILANVYDAHYGVNLRLHKVRLYETPNCWADVVRD

SEQ ID NO: 23619 - protein, 148 aa, unidentified
  source 1..148: note = Paraburkholderia graminis
  REGION 1..148: note = tr|B1G3M6|B1G3M6_PARG4 6-carboxy-5,6,7,8-tetrahydropterin synthase; OS = Paraburkholderia graminis (strain ATCC 700544 / DSM 17151 / LMG 18924 / NCIMB 13744 / C4D1M) OX =396598; GN = BgramDRAFT_3971 PE=3 SV=1
MLTITRKLEFDAGHRIPDHRSQCRNLHGHRYVLEITLQGDLVDTEGAPDRGMVMDFADVKSLAVEHLVDKWDHAFLVYECDSQVRGFLETMAGHKTVVLDRIPTVENLAAVAFDVLANVYDAHYGVNLRLHKVRLYETPNCWADVVRD

SEQ ID NO: 23620 - protein, 148 aa, unidentified; identical to SEQ ID NO: 23610
  source 1..148: note = Paraburkholderia hospita
  REGION 1..148: note = tr|A0A244DGA9|A0A244DGA9_9BURK 6-carboxy-5,6,7,8-tetrahydropterin synthase; OS = Paraburkholderia hospita OX=169430 GN=CA603_39320 PE=3; SV = 1

SEQ ID NO: 23621 - protein, 148 aa, unidentified
  source 1..148: note = Paraburkholderia insulsa
  REGION 1..148: note = tr|A0A2T1B4F1|A0A2T1B4F1_9BURK 6-carboxy-5,6,7,8-tetrahydropterin synthase; OS = Paraburkholderia insulsa OX=1441714 GN=BX589_103291; PE = 3 SV=1
MLTITRKLEFDAGHRIPDHRSQCRNLHGHRYVLEITLQGDLVDTEGAPDRGMVMDFADVKSLAVEHLVDKWDHAFLVYEGDTQVRGFLETMAGHKTVVLDRIPTVENLAAAAFDILANVYDAHYGVNLRLHKVRLFETPNCWADVVRD

SEQ ID NO: 23622 - protein, 148 aa, unidentified
  source 1..148: note = Paraburkholderia megapolitana
  REGION 1..148: note = tr|A0A1I3UTL7|A0A1I3UTL7_9BURK 6-carboxy-5,6,7,8-tetrahydropterin synthase; OS = Paraburkholderia megapolitana OX=420953; GN = SAMN05192543_112106 PE=3 SV=1
MLTITRKLEFDAGHRIPDHRSQCRNLHGHRYVLEITLQGDLVETEGAPDRGMVMDFADVKSLAIEHLVDKWDHAFLVFEGDTRVRGFLESMPDHKTVVLDRIPTVENLAAVAFDILANVYDAHYGVNLRLHHVRLYETPNCWADVVRD

SEQ ID NO: 23623 - protein, 148 aa, unidentified
  source 1..148: note = Paraburkholderia monticola
  REGION 1..148: note = tr|A0A149PXS5|A0A149PXS5_9BURK 6-carboxy-5,6,7,8-tetrahydropterin synthase; OS = Paraburkholderia monticola OX=1399968 GN=CI15_06650; PE = 3 SV=1
MLTITRKLEFDAGHRIPDHRSQCRNLHGHRYVLEITLQGDLVDTEGAPDRGMVMDFADVKSLANEHLVDRWDHAFLVFEGDTQVRGFLDSMAGHKTVVIDRIPTVENLAAIAFDILANVYDAHYGVNLRLHKVRLYETPNCWADVVRD

SEQ ID NO: 23624 - protein, 148 aa, unidentified
  source 1..148: note = Paraburkholderia phenazinium
  REGION 1..148: note = tr|A0A1N6ELD8|A0A1N6ELD8_9BURK 6-carboxy-5,6,7,8-tetrahydropterin synthase; OS = Paraburkholderia phenazinium OX=60549; GN = SAMN05444168_0764 PE=3 SV=1
MLTITRKLEFDAGHRIPDHRSQCRNLHGHRYVLEITLQGDLVETEGAPDRGMVMDFADVKSLAVEHLVDKWDHAFLVYEGDTQVRGFLDSMQGHKTVVLDRIPTVENLAAIAFELLANVYDAHYGVNLRLHKVRLYETPNCWADVVRD

SEQ ID NO: 23625 - protein, 148 aa, unidentified
  source 1..148: note = Paraburkholderia phenazinium
  REGION 1..148: note = tr|A0A1N6L6L6|A0A1N6L6L6_9BURK 6-carboxy-5,6,7,8-tetrahydropterin synthase; OS = Paraburkholderia phenazinium OX=60549; GN = SAMN05444165_6240 PE=3 SV=1
MLTITRKLEFDAGHRIPDHRSQCRNLHGHRYVLEITLQGDLVDTEGAPDRGMVMDFADVKSLAVEHLVDKWDHAFLVYEGDTHVRGFLDSMPGHKTVVLDRIPTVENLAAVAFDLLANVYDAHYGVNLRLHKVRLYETPNCWADVVRD

SEQ ID NO: 23626 - protein, 148 aa, unidentified
  source 1..148: note = Paraburkholderia phenoliruptrix
  REGION 1..148: note = tr|K0DE79|K0DE79_9BURK 6-carboxy-5,6,7,8-tetrahydropterin synthase; OS = Paraburkholderia phenoliruptrix BR3459a OX=1229205; GN = BUPH_03966 PE=3 SV=1
MLTITRKLEFDAGHRIPDHRSQCRNLHGHRYVLEITLQGDLVDTEGAPDRGMVMDFADVKSLAVEHLVDKWDHAFLVYEGDSQVRGFLDTMAGHKTVVLDRIPTVENLAAVAFEVLANVYDAHYGVNLRLHKVRLYETPNCWADVVRD

SEQ ID NO: 23627 - protein, 148 aa, unidentified
  source 1..148: note = Paraburkholderia phymatum
  REGION 1..148: note = tr|B2JJV3|B2JJV3_PARP8 6-carboxy-5,6,7,8-tetrahydropterin synthase; OS = Paraburkholderia phymatum (strain DSM 17167 / CIP 108236 / LMG 21445 / STM815) OX=391038 GN=Bph y_0045 PE=3; SV = 1
MLTITRKLEFDAGHRIPDHRSQCRNLHGHRYVLEITLQGDLVETEGAPDRGMVMDFADVKALANEHLVDKWDHAFLVYEGDTQVRGFLETMAGHKTVVLDRIPTVENLAAVAFDILANVYDAHYGVNLRLHKLRLYETPNCWADVVRD

SEQ ID NO: 23628 - protein, 148 aa, unidentified
  source 1..148: note = Paraburkholderia phytofirmans
  REGION 1..148: note = tr|B2T1L5|B2T1L5_PARPJ 6-carboxy-5,6,7,8-tetrahydropterin synthase; OS = Paraburkholderia phytofirmans (strain DSM 17436 / LMG 22146 / PsJN) OX=398527 GN=Bphyt_0319 PE= 3 SV=1
MLTITRKLEFDAGHRIPDHRSQCRNLHGHRYVLEITLQGDLVDTEGAPDRGMVMDFADVKSLAVEHLVDKWDHAFLVYEGDTQVRGFLETMVGHKTVVLDRIPTVENLAAVAFDILANVYDAHYGVNLRLHKLRLYETPNCWADVVRD

SEQ ID NO: 23629 - protein, 148 aa, unidentified
  source 1..148: note = Paraburkholderia piptadeniae
  REGION 1..148: note = tr|A0A1N7RJ92|A0A1N7RJ92_9BURK 6-carboxy-5,6,7,8-tetrahydropterin synthase; OS = Paraburkholderia piptadeniae OX=1701573 GN=BN2476_20068; PE = 3 SV=1
MLTITRKLEFDAGHRIPDHRSQCRNLHGHRYVLEITLQGDLVETEGAPDRGMVMDFADVKALANEHLVDKWDHAFLVYEGDTQVRGFLDSMAGHKTVVLDRIPTVENLAAAAFEILANVYDAHYGVNLRLHKVRLYETPNCWADVVRD

SEQ ID NO: 23630 - protein, 148 aa, unidentified
  source 1..148: note = Paraburkholderia rhizosphaerae
  REGION 1..148: note = tr|A0A4V3HEP7|A0A4V3HEP7_9BURK 6-carboxy-5,6,7,8-tetrahydropterin synthase; OS = Paraburkholderia rhizosphaerae OX=480658 GN=BX592_11074; PE = 3 SV=1
MLTITRKLEFDAGHRIPDHRSQCRNLHGHRYVLEITLQGDLVETEGAPDRGMVMDFADVKSLAMEHLVNQWDHAFIVYEGDTQLCRFLESMPGHKTVVLDRIPTVENLAAVAFGILANVYDAHYGVNLRLQRVRLYETPNCWADFVRE

SEQ ID NO: 23631 - protein, 148 aa, unidentified
  source 1..148: note = Paraburkholderia rhizoxinica
  REGION 1..148: note = tr|E5ANB2|E5ANB2_PARRH 6-carboxy-5,6,7,8-tetrahydropterin synthase; OS = Paraburkholderia rhizoxinica (strain DSM 19002 / CIP 109453 / HKI 454) OX=882378 GN=RBRH_02246PE=3 SV=1
MLTITRKLEFDAGHRIPDHRSQCRNLHGHRYVLEITLQGELVDTEGASDRGMVMDFADVKRLAMEHLVNVWDHAFIVYEQDVTVRSFLDTLPGHKTVVLDRIPTVENLAAKAFEILAHVYDAHYGINLRLAKVRLYETPNCWADITRD

SEQ ID NO: 23632 - protein, 147 aa, unidentified
  source 1..147: note = Paraburkholderia rhynchosiae
  REGION 1..147: note = tr|A0A2N7WQD2|A0A2N7WQD2_9BURK 6-carboxy-5,6,7,8-tetrahydropterin synthase; OS = Paraburkholderia rhynchosiae OX=487049 GN=queD PE=3 SV=1
MTITRKLEFDAGHRIPDHRSQCRNLHGHRYVLEITLQGDLVDTEGAPDRGMVMDFADVKSLAVEHLVDKWDHAFLVYEGDTQVRGFLETMEGHKTVVLDRIPTVENLAAVAFDILANVYDAHYGVNLRLYKVRLYETPNCWADVVRD

SEQ ID NO: 23633 - protein, 190 aa, unidentified
  source 1..190: note = Paraburkholderia rhynchosiae
  REGION 1..190: note = tr|A0A2N7WWN2|A0A2N7WWN2_9BURK 6-carboxytetrahydropterin synthase QueD; OS = Paraburkholderia rhynchosiae OX=487049 GN=C0Z16_03495; PE = 4 SV=1
MLIRKLFSFEGAHVVRHASSHRCAWSIHGHSYRVEIILEADALDHGQMVYDFGLLKGEVREIVDAFDHTLVFWNCDDPGYMEMCRSHSQRWIALPVSPSAEQLSRVFFVLVDVVMRAMPMRNGEADVRVQSVIVHETATGYAQCFRRDAYNPRMGLISPALIGFSDAVRREATTGILDELTSAVACAPAC

SEQ ID NO: 23634 - protein, 148 aa, unidentified
  source 1..148: note = Paraburkholderia ribeironis
  REGION 1..148: note = tr|A0A1N7RJT5|A0A1N7RJT5_9BURK 6-carboxy-5,6,7,8-tetrahydropterin synthase; OS = Paraburkholderia ribeironis OX=1247936 GN=BN2475_40142; PE = 3 SV=1
MLTITRKLEFDAGHRIPDHRSQCRNLHGHRYVLEITLQGDLVDSEGAPDRGMVMDFADVKSLAVEHLVGQWDHAFLVYEGDTPVRGFLETMPGHKTVVLDRIPTVENLAAIAFDILASVYDAHYGVNLRLHKVRLYETPNCWADVVRD

SEQ ID NO: 23635 - protein, 138 aa, unidentified
  source 1..138: note = Paraburkholderia ribeironis
  REGION 1..138: note = tr|A0A1N7SJC9|A0A1N7SJC9_9BURK Uncharacterized protein OS=Paraburkholderia ribeironis OX=1247936; GN = BN2475_750024 PE=4 SV=1
MLQAERHHDISCGRRVYGHEGKCQYPHGHNCRIHFVCEAASPEGLGRVIDFRRDQALLYNWVEDHWDHRMLLWADAPFYAHVRDMDASVVRVPFNPTAENMAQWLVTVLGPEVLEGAGVRLVEVRIEETRKCSATYRL

SEQ ID NO: 23636 - protein, 148 aa, unidentified
  source 1..148: note = Paraburkholderia sacchari
  REGION 1..148: note = tr|A0A0A6T335|A0A0A6T335_9BURK 6-carboxy-5,6,7,8-tetrahydropterin synthase; OS = Paraburkholderia sacchari OX=159450 GN=NH14_05350 PE=3; SV = 1
MLTITRKLEFDAGHRIPDHRSQCRNLHGHRYVLEVTLQGDTVETEGAPDRGMVMDFADVKALANQHLVDLWDHAFIVFEGDAQVRGFLDTLPGHKTVVIDRIPTVENLAAIAFEILANVYDAHYGVNLQLQKLRLYETPNCWAEVTRD

SEQ ID NO: 23637 - protein, 148 aa, unidentified
  source 1..148: note = Paraburkholderia sartisoli
  REGION 1..148: note = tr|A0A1H4FSL1|A0A1H4FSL1_9BURK 6-carboxy-5,6,7,8-tetrahydropterin synthase; OS = Paraburkholderia sartisoli OX=83784; GN = SAMN05192564_10553 PE=3 SV=1
MLTITRKLEFDAGHRIPDHRSQCRNLHGHRYVLEITLQGDLVETEGAPDRGMVMDFADVKSLANEHLVDLWDHAFLVYEGDAQVRGFLETMPGHKTVVLDRIPTVENLAAVAFDILANVYDAHYGVNLRLHKVRLYETPNCWADIVRD

SEQ ID NO: 23638 - protein, 148 aa, unidentified; identical to SEQ ID NO: 23603
  source 1..148: note = Paraburkholderia sediminicola
  REGION 1..148: note = tr|A0A419U791|A0A419U791_9BURK 6-carboxy-5,6,7,8-tetrahydropterin synthase; OS = Paraburkholderia sediminicola OX=458836 GN=DFH24_05355; PE = 3 SV=1

SEQ ID NO: 23639 - protein, 148 aa, unidentified
  source 1..148: note = Paraburkholderia silvatlantica
  REGION 1..148: note = tr|A0A2V4UE30|A0A2V4UE30_9BURK 6-carboxy-5,6,7,8-tetrahydropterin synthase; OS = Paraburkholderia silvatlantica OX=321895; GN = C7410_103247 PE=3 SV=1
MLTITRKLEFDAGHRIPDHRSQCRNLHGHRYVLEITLEGDLVETEGAPDRGMVMDFADVKSLANQHLVDLWDHAFLVFSGDTQVRGFLETLPGHKTVVIDRIPTVENLAAIAFDILANVYDAHYGVNLRLHKLRLYETPNCWAEVTRD

SEQ ID NO: 23640 - protein, 122 aa, unidentified
  source 1..122: note = Paraburkholderia sp.
  REGION 1..122: note = tr|A0A3D9MDQ4|A0A3D9MDQ4_9BURK 6-carboxy-5,6,7,8-tetrahydropterin synthase; OS = Paraburkholderia sp. BL27I4N3 OX=1938805 GN=B0G71_0085; PE = 3 SV=1
MIFELSQRFFFDAAHTLHREIDQEGSRRIHGHTYHAHVFVRGNPNPETGMIVDLGLLNQAIERVRNQLDHRFLDDIPELGPATLESLCAFILRKIRDSFPEVTRVRVERTAGGDACDLYVQG

SEQ ID NO: 23641 - protein, 147 aa, unidentified
  source 1..147: note = Paraburkholderia sp.
  REGION 1..147: note = tr|A0A372K5J1|A0A372K5J1_9BURK 6-carboxy-5,6,7,8-tetrahydropterin synthase; OS = Paraburkholderia sp. DHOC27 OX=2303330 GN=queD PE=3 SV=1
MTITRKLEFDAGHRIPDHRSQCRNLHGHRYVLEVTLQGDLVETEGAPDRGMVMDFADVKSLAVEHLVDVWDHAFIVYEGDTQVRGFLDAMPGHKTVVLDRIPTVENLAAVAFNILANVYDAHYGVNLRLHKVRLYETPNCWADVVRD

SEQ ID NO: 23642 - protein, 148 aa, unidentified
  source 1..148: note = Paraburkholderia sprentiae
  REGION 1..148: note = tr|A0A1I9YIG8|A0A1I9YIG8_9BURK 6-carboxy-5,6,7,8-tetrahydropterin synthase; OS = Paraburkholderia sprentiae WSM5005 OX=754502; GN = BJG93_12355 PE=3 SV=1
MLTITRKLEFDAGHRIPDHRSQCRNLHGHRYVLEITLQGDLVDTEGAPDRGMVMDFADVKSLAVEHLVDKWDHAFLVYEGDTQVRGFLDSMVGHKTVVIDRIPTVENLAAIAFDMLANVYDAHYGVNLRLHKVRLYETPNCWADVVRD

SEQ ID NO: 23643 - protein, 148 aa, unidentified
  source 1..148: note = Paraburkholderia susongensis
  REGION 1..148: note = tr|A0A1X7K5R5|A0A1X7K5R5_9BURK 6-carboxy-5,6,7,8-tetrahydropterin synthase; OS = Paraburkholderia susongensis OX=1515439; GN = SAMN06265784_103385 PE=3 SV=1
MLTITRKLEFDAGHRIPDHRSQCRNLHGHRYVLEITLQGDLVDTEGAPDRGMVMDFADVKSLAVEHLVDKWDHAFLVYEGDTQVRSFLESMAGHKTVVLDRIPTVENLAAIAFEMLANVYDAHYGVNLRLHKVRLYETPNCWADVVRD

SEQ ID NO: 23644 - protein, 147 aa, unidentified; identical to SEQ ID NO: 23611
  source 1..147: note = Paraburkholderia terrae
  REGION 1..147: note = tr|A0A2I8EN18|A0A2I8EN18_9BURK 6-carboxy-5,6,7,8-tetrahydropterin synthase; OS = Paraburkholderia terrae OX=311230 GN=queD PE=3 SV=1

SEQ ID NO: 23645 - protein, 148 aa, unidentified; identical to SEQ ID NO: 23610
  source 1..148: note = Paraburkholderia terrae
  REGION 1..148: note = tr|I5CWM9|I5CWM9_9BURK 6-carboxy-5,6,7,8-tetrahydropterin synthase; OS = Paraburkholderia terrae BS001 OX=1171375 GN=WQE_14746; PE = 3 SV=1

SEQ ID NO: 23646 - protein, 148 aa, unidentified
  source 1..148: note = Paraburkholderia terricola
  REGION 1..148: note = tr|A0A1M6SF36|A0A1M6SF36_9BURK 6-carboxy-5,6,7,8-tetrahydropterin synthase; OS = Paraburkholderia terricola OX=169427; GN = SAMN05192548_102243 PE=3 SV=1
MLTITRKLEFDAGHRIPDHRSQCRNLHGHRYVLEITLQGDLVDTEGAPDRGMVMDFADVKSLAVEHLVDKWDHAFLVYEGDTQVRGFLETMAGHKTVVLDRIPTVENLAAVAFDILANVYDAHYGVNLRLHKLRLYETPNCWADVVRD

SEQ ID NO: 23647 - protein, 148 aa, unidentified
  source 1..148: note = Paraburkholderia tropica
  REGION 1..148: note = tr|A0A1A5X834|A0A1A5X834_9BURK 6-carboxy-5,6,7,8-tetrahydropterin synthase; OS = Paraburkholderia tropica OX=92647 GN=A6456_00680 PE=3; SV = 1
MLTITRKLEFDAGHRIPDHRSQCRNLHGHRYVLEITLQGDTVETEGAPDRGMVMDFADVKSLANQHLVDLWDHAFLVFEGDTQVRGFLETLPGHKTVVIDRIPTVENLAAIAFEILANVYDAHYGVNLQLHKVRLYETPNCWAEVVRD

SEQ ID NO: 23648 - protein, 190 aa, unidentified
  source 1..190: note = Paraburkholderia tuberum
  REGION 1..190: note = tr|A0A1H1GQQ0|A0A1H1GQQ0_9BURK 6-pyruvoyltetrahydropterin/6-carboxytetrahydropterin synthase OS=Paraburkholderia tuberum OX=157910; GN = SAMN05445850_3027 PE=4 SV=1
MLIRKLFSFEGAHVVRHASSHRCAWSIHGHSYRVEIILEADALDHGQMVYDFGLLKGEVREIVDAFDHTLVFWNCDDPAYMEMCRSHSQRWIALPVSPSAEQLSRVFFVLVDVVMRAMPMRNGEADVTVQSVIVHETATGYAQCFRRDAYNPRMGLVSPALIGFSDAVRREATTGILDELTSAVACAPAC

SEQ ID NO: 23649 - protein, 152 aa, unidentified
  source 1..152: note = Paraburkholderia tuberum
  REGION 1..152: note = tr|A0A1H1CWQ9|A0A1H1CWQ9_9BURK 6-pyruvoyltetrahydropterin/6-carboxytetrahydropterin synthase OS=Paraburkholderia tuberum OX=157910; GN = SAMN05445850_1404 PE=4 SV=1
MLTITRKLEFDAGHRIPDHRSQCRNLHGHRYVLEITLLGDLVDTEGAPDRGMVMDFADVKSLANEHLVDKWDHAFLVYEGDTQVRGFLDSMADHKTVVIDRIPTVENLAAVAFDILANVYDAHYGVNLRLHKVRLYETPNCWAEVVRDSLPT

SEQ ID NO: 23650 - protein, 148 aa, unidentified
  source 1..148: note = Paraburkholderia unamae
  REGION 1..148: note = tr|A0A328Y648|A0A328Y648_9BURK 6-carboxy-5,6,7,8-tetrahydropterin synthase; OS = Paraburkholderia unamae OX=219649 GN=C7401_102336 PE=3; SV = 1
MLTITRKLEFDAGHRIPDHRSQCRNLHGHRYVLEITLQGDLVETEGAPDRGMVMDFADVKSLANQHLVDLWDHAFLVFEGDTQVRGFLETLPGHKTVVIDRIPTVENLAAIAFDILANVYDAHYGVNLRLHKLRLYETPNCWAEVTRD

SEQ ID NO: 23651 - protein, 148 aa, unidentified
  source 1..148: note = Paraburkholderia xenovorans
  REGION 1..148: note = tr|Q146Z4|Q146Z4_PARXL 6-carboxy-5,6,7,8-tetrahydropterin synthase; OS = Paraburkholderia xenovorans (strain LB400) OX=266265; GN = Bxe_A4405 PE=3 SV=1
MLTITRKLEFDAGHRIPDHRSQCRNLHGHRYVLEITLQGDLVDTEGAPDRGMVMDFADVKSLAVEHLVDKWDHAFLVYEGDTQVRGFLETMAGHKTVVLDRIPTVENLAAVAFGILANVYDAHYGVNLRLHKLRLYETPNCWADVIRD

SEQ ID NO: 23652 - protein, 151 aa, Parachlamydia acanthamoebae
  REGION 1..151: note = tr|A0A0C1CD36|A0A0C1CD36_9BACT 6-carboxy-5,6,7,8-tetrahydropterin synthase; OS = Parachlamydia acanthamoebae OX=83552 GN=queD PE=4 SV=1
MLYNKEFKMNTVKCTRKIHFCAGHRVMNHENKCATAHGHNYYVHLTAEAPQLDSLGRVIDFSVLKEKVGGWIDEHWDHTFLVCEHDKELIQALRSLPRKKEPFICPFNPTAEEIAIYLLREVSPKVLAGSNVMITKVVVHETDNCYAEVSL

SEQ ID NO: 23653 - protein, 143 aa, Parachlamydia acanthamoebae
  REGION 1..143: note = tr|F8KX34|F8KX34_PARAV 6-carboxy-5,6,7,8-tetrahydropterin synthase; OS = Parachlamydia acanthamoebae (strain UV7) OX=765952; GN = queD-B PE=4 SV=1
MNTVKCTRKIHFCAGHRVMNHENKCATAHGHNYYVHLTAEAPQLDSLGRVIDFSVLKEKVGGWIDEHWDHTFLVCEHDKELIQALRSLPRKKEPFICPFNPTAEEIAIYLLREVSPKVLAGSNVMITKVVVHETDNCYAEVSL

SEQ ID NO: 23654 - protein, 122 aa, Parachlamydia sp.
  REGION 1..122: note = tr|A0A2H9SWW8|A0A2H9SWW8_9BACT 6-carboxy-5,6,7,8-tetrahydropterin synthase; OS = Parachlamydia sp. OX=2052048 GN=queD PE=3 SV=1
MYELEKTFHFEAGHVLEYHDGKCRGPHGHSYTLTVKIRSNTLIASGPKMNMVQDFSDISAIVKPMIEKHLDHKWLNDSLNTKTPTTEVIVKWIYDYLEPRLPLLYSICISETASSKVTYTRS

SEQ ID NO: 23655 - protein, 131 aa, Paracoccus aestuarii
  REGION 1..131: note = tr|A0A419A203|A0A419A203_9RHOB 6-carboxytetrahydropterin synthase OS=Paracoccus aestuarii; OX = 453842 GN=D3P06_02035 PE=4 SV=1
MFAVEVRDHIMIAHSFPSPTFGPAQGVHGATFTVDCAFFAREMDDESLVVDIGLATEALADTLAPLRYKNLDDIEEFKGRMTTTEFLCKHIFDRMAAKVRAGDLKDGGRVCKLRVLLHESHMARAWFEGDI

SEQ ID NO: 23656 - protein, 117 aa, Paracoccus aestuarii
  REGION 1..117: note = tr|A0A418ZS74|A0A418ZS74_9RHOB 6-carboxy-5,6,7,8-tetrahydropterin synthase OS=Paracoccus aestuarii OX=453842 GN=D3P06_13970 PE=3 SV=1
MFRITKEFHFSASHVLDHLPADHQCARLHGHNYVVVVELAAPALNGDGFVRDFHELAALKAYLDEHFDHRHLNDVIEGPTTAEALARHLHDWCRARWPETAAVRVSETPKTWAEYRP

SEQ ID NO: 23657 - protein, 117 aa, Paracoccus alcaliphilus
  REGION 1..117: note = tr|A0A1H8LWT4|A0A1H8LWT4_9RHOB 6-carboxy-5,6,7,8-tetrahydropterin synthase OS=Paracoccus alcaliphilus OX=34002 GN=SAMN04489859_103429 PE=3 SV=1
MYRIAKEFHFSASHQLSHLPPDHQCARLHGHNYVVVVELAAPALNADGFVRDYHELAALKRYIDDRFDHRHLNDVLDGPSTAEALARHFFDWSRARWPEVAAVRVSETPKTWAEYRP

SEQ ID NO: 23658 - protein, 117 aa, Paracoccus bengalensis
  REGION 1..117: note = tr|A0A3D9XR80|A0A3D9XR80_9RHOB 6-carboxy-5,6,7,8-tetrahydropterin synthase OS=Paracoccus bengalensis OX=302403 GN=BDD41_0668 PE=3 SV=1
MFRIAKEFHFSASHQLAHLPPDHQCARLHGHNYVVVVELAAAELNADGFVRDYHELVPLKHYIDTHFDHRHLNEVLDGPSTAENMARHFHDWCKARWPETVAVRVSETPKTWAEYRP

SEQ ID NO: 23659 - protein, 117 aa, Paracoccus denitrificans
  REGION 1..117: note = tr|A1B9Q4|A1B9Q4_PARDP 6-carboxy-5,6,7,8-tetrahydropterin synthase OS=Paracoccus denitrificans (strain Pd 1222) OX=318586 GN=Pden_4184 PE=3; SV = 1
MFRISKEFHFSASHQLAHLPPDHQCARLHGHNYIVVVELAAEELNADGFVRDYHELAPLKHYIDTHFDHRHLNDVLDGPSTAENMARHFHDWCKARWPETVAVRVSETPKTWAEYRP

SEQ ID NO: 23660 - protein, 131 aa, unidentified
  source 1..131: note = Paracoccus gahaiensis
  REGION 1..131: note = tr|A0A4U0RED0|A0A4U0RED0_9RHOB 6-carboxytetrahydropterin synthase OS=Paracoccus gahaiensis OX=1706839 GN=FA743_05480 PE=4 SV=1
MFAVEVRDHIMIAHSFPSPTFGPAQGMHGATFTVDAAFFAEEMDHESLVVDIGLATEALAATLAPLRYKNLDEIPEFAGKMTTTEFLCKHIFDQMAGKVRAGDLKDGGRVKKLRILLHESHMARAWFEGDL

SEQ ID NO: 23661 - protein, 117 aa, unidentified
  source 1..117: note = Paracoccus gahaiensis
  REGION 1..117: note = tr|A0A4U0REK9|A0A4U0REK9_9RHOB 6-carboxy-5,6,7,8-tetrahydropterin synthase OS=Paracoccus gahaiensis OX=1706839 GN=queD PE=3 SV=1
MFRISKEFHFSASHRLDHLAADHQCARLHGHNYIVVVELSAPDLNADGFVRDYHELAPLKAYLDGQFDHRHLNDVLDMPSTAENLARHLFDWCRARWPETSAVKVSETPKTWAEYRP

SEQ ID NO: 23662 - protein, 131 aa, Paracoccus haeundaensis
  REGION 1..131: note = tr|A0A5C4R734|A0A5C4R734_9RHOB 6-carboxytetrahydropterin synthase OS=Paracoccus haeundaensis OX=225362 GN=FHD67_07465 PE=4 SV=1
MFAVEVRDHIMIAHSFPSPTFGPAQGVHGATFTVDCAFFAAEMDDESLVVDIGLATEALAETLAPLRYKNLDDIPEFKGKMTTTEFLCKHIFDQMAGTVRAGGLKDGGRVKKLRVLLHESHMARAWYEGDI

SEQ ID NO: 23663 - protein, 117 aa, Paracoccus haeundaensis
  REGION 1..117: note = tr|A0A5C4R789|A0A5C4R789_9RHOB 6-carboxy-5,6,7,8-tetrahydropterin synthase OS=Paracoccus haeundaensis OX=225362 GN=queD PE=3 SV=1
MFRISKEFHFSASHRLDHLAPDHQCARLHGHNYIVVVELAAPDLNADGFVRDYHELAALKAYVDGTFDHRHLNDVLDVPSTAENLARHFFDWCRARWPETSAVKVSETPKTWAEYRP

SEQ ID NO: 23664 - protein, 117 aa, unidentified
  source 1..117: note = Paracoccus hibiscisoli
  REGION 1..117: note = tr|A0A4U0QU39|A0A4U0QU39_9RHOB 6-carboxy-5,6,7,8-tetrahydropterin synthase OS=Paracoccus hibiscisoli OX=2023261 GN=queD PE=3 SV=1
MFRISKEFHFSASHRLDHLAPDHQCARLHGHNYIVVVELAAADLNRDGFVRDYHELAPLKAYLDESFDHRHLNDVLDVPSTAENLARHLFDWCRARWPETSAVKVSETPKTWAEYRP

SEQ ID NO: 23665 - protein, 131 aa, unidentified
  source 1..131: note = Paracoccus hibiscisoli
  REGION 1..131: note = tr|A0A4U0R2X2|A0A4U0R2X2_9RHOB 6-carboxytetrahydropterin synthase OS=Paracoccus hibiscisoli OX=2023261 GN=FA740_14525 PE=4 SV=1
MFAVEVRDHIMIAHSFPSPTFGPAQGMHGATFTVDTAFFAEEMDHESLVVDIGLATEALAETLSPLRYKNLDEIPEFAGKMTTTEFLCKHIFDQMAAKVRAGDLKDGGRVKKLRVLLHESHMARAWFEGDI

SEQ ID NO: 23666 - protein, 117 aa, Paracoccus homiensis
  REGION 1..117: note = tr|A0A1I0ENL3|A0A1I0ENL3_9RHOB 6-carboxy-5,6,7,8-tetrahydropterin synthase OS=Paracoccus homiensis OX=364199 GN=SAMN04489858_105234 PE=3 SV=1
MFRIRKEFHFSASHQLTHLPADHQCARLHGHNYIVVVELAAQALNADGFVRDYHDLGALKSYIDDGFDHRHLNDVLDGPSTAENMALHFFDWCKDRWPETSAVMVSETPKTWAEYRP

SEQ ID NO: 23667 - protein, 117 aa, unidentified
  source 1..117: note = Paracoccus laeviglucosivorans
  REGION 1..117: note = tr|A0A521B4N6|A0A521B4N6_9RHOB 6-carboxy-5,6,7,8-tetrahydropterin synthase OS=Paracoccus laeviglucosivorans OX=1197861 GN=SAMN06265221_102111 PE=3; SV = 1
MYRISKEFHFSASHQLGHLPADHQCARLHGHNYIVSVELASTTLNADGFVRDYHELSALKHYIDSELDHRHLNDVLDLPSTAENMARHFYDWSKARWPETVAVRVSETPKTWAEYRP

SEQ ID NO: 23668 - protein, 117 aa, Paracoccus pantotrophus
  REGION 1..117: note = tr|A0A495P1P1|A0A495P1P1_PARPN 6-carboxy-5,6,7,8-tetrahydropterin synthase OS=Paracoccus pantotrophus OX=82367 GN=BDE18_3441 PE=3 SV=1
MFRIAKEFHFSASHQLAHLPPDHQCARLHGHNYVVVVELAAAELNADGFVRDYHELAALKHYIDTHFDHRHLNDVLDGPSTAENMARHFHDWCKARWPETVAVRVSETPKTWAEYRP

SEQ ID NO: 23669 - protein, 117 aa, Paracoccus pantotrophus
  REGION 1..117: note = tr|A0A1K2F1Z8|A0A1K2F1Z8_PARPN 6-carboxy-5,6,7,8-tetrahydropterin synthase OS=Paracoccus pantotrophus OX=82367 GN=SAMN04244548_04290 PE=3 SV=1
MFRIAKEFHFSASHQLAHLPPDHQCARLHGHNYVVVVELAAAELNADGFVRDYHELAPLKHYIDTHFDHRHLNEVLDGPSTAENMARHFHDWCKARWPETVAVRVSETPKTWAEYRP

SEQ ID NO: 23670 - protein, 117 aa, Paracoccus saliphilus
  REGION 1..117: note = tr|A0A1N7PHK2|A0A1N7PHK2_9RHOB 6-carboxy-5,6,7,8-tetrahydropterin synthase OS=Paracoccus saliphilus OX=405559 GN=SAMN05421772_11820 PE=3 SV=1
MYRIAKEFHFSASHQLSHLPPDHQCARLHGHNYVVVVELAAQELNAAGFVRDYHELGPLKAYIDDNFDHRHLNDIIDGPSTAEILARHFYDWCKARWPETAAVRVSETPKTWAEYRP

SEQ ID NO: 23671 - protein, 117 aa, Paracoccus seriniphilus
  REGION 1..117: note = tr|A0A239PWC2|A0A239PWC2_9RHOB 6-carboxy-5,6,7,8-tetrahydropterin synthase OS=Paracoccus seriniphilus OX=184748 GN=SAMN05444959_106178 PE=3 SV=1
MFRIRKEFHFSASHRLSHLPDDHQCARLHGHNYIVVVELAAKALNPDGFVRDYHDLKPLKTHIDDHFDHRHLNDVLEGPSTAENLARHFFDWCAARWPETSAVLVSETPKTWAEYRP

SEQ ID NO: 23672 - protein, 120 aa, unidentified
  source 1..120: note = Paracoccus siganidrum
  REGION 1..120: note = tr|A0A419A6C1|A0A419A6C1_9RHOB 6-carboxy-5,6,7,8-tetrahydropterin synthase OS=Paracoccus siganidrum OX=1276757 GN=queD PE=3 SV=1
MYRISKEFHFSASHQLAHLPADHQCARLHGHNYVVVVELAAADLNADGFVRDYHELKALKSYIDTHFDHRHLDDVLEVPSTAENLARHFFDWCRARWPETAAVRVSETPKTWAEYRPGPA

SEQ ID NO: 23673 - protein, 131 aa, Paracoccus sp.
  REGION 1..131: note = tr|A0A3A3DI62|A0A3A3DI62_9RHOB 6-carboxytetrahydropterin synthase OS=Paracoccus sp. JM45; OX = 2283626 GN=DWB67_02025 PE=4 SV=1
MFAVEVRDHIMIAHSFPSPTFGPAQGVHGATFTVDAAFFTDSIDDEGLVIDMGLATDALGAALAPLRYQNLDDVPAFKGKFTTTEFLCKEIFDSLAQTARDGGLGDASRLKKLRITLHESHVARAWYEANL

SEQ ID NO: 23674 - protein, 117 aa, Paracoccus sp.
  REGION 1..117: note = tr|A0A4P7HPE0|A0A4P7HPE0_9RHOB 6-carboxy-5,6,7,8-tetrahydropterin synthase OS=Paracoccus sp. 2251 OX=2560053 GN=queD PE=3 SV=1
MFRISKEFHFSASHRLDHLAADHQCARLHGHNYIVVVELAAPDLNADGFVRDYHELAPLKAYLDGQFDHRHLNEVLDMPSTAENLARHLFDWCRARWPETSAVRVSETPKTWAEYRP

SEQ ID NO: 23675 - protein, 117 aa, Paracoccus versutus
  REGION 1..117: note = tr|A0A3E0BPM3|A0A3E0BPM3_PARVE 6-carboxy-5,6,7,8-tetrahydropterin synthase OS=Paracoccus versutus OX=34007 GN=ATH84_103341 PE=3 SV=1
MFRIAKEFHFSASHQLAHLPPDHQCARLHGHNYVVVVELAAAELNADGFVRDYHELALLKHYIDTHFDHRHLNDVLDGPSTAENMARHFHDWCKVRWPETVAVRVSETPKTWAEYRP

SEQ ID NO: 23676 - protein, 117 aa, Paracoccus versutus; identical to SEQ ID NO: 23669
  REGION 1..117: note = tr|A0A369U2B6|A0A369U2B6_PARVE 6-carboxy-5,6,7,8-tetrahydropterin synthase OS=Paracoccus versutus OX=34007 GN=DVR11_09510 PE=3 SV=1

SEQ ID NO: 23677 - protein, 133 aa, Paracraurococcus sp.
  REGION 1..133: note = tr|A0A4R4DSD6|A0A4R4DSD6_9PROT 6-carboxytetrahydropterin synthase OS=Paracraurococcus sp. NE82 OX=2527868 GN=EXY23_04890 PE=4 SV=1
MFSLTVCDHIMVAHSFRGAEFGPAQRLHGATFAVEAEFRAPVLDHLHLLVDIGLAKQELRRALDSLDYRNLDAEPQFAGLNTTTEYLCLHIHRLLCAALKEGRLGPQGGNVSSLKVLLRESPNAWAAYEGDAA

SEQ ID NO: 23678 - protein, 175 aa, Paracraurococcus sp.
  REGION 1..175: note = tr|A0A4R4DPA7|A0A4R4DPA7_9PROT 6-carboxytetrahydropterin synthase OS=Paracraurococcus sp. NE82 OX=2527868 GN=EXY23_08990 PE=4 SV=1
MFELVFSRRFSMAHRLIAGAAEPCAIPHGHNEVVTVRLRAAVPMPLDGHANMVEPFERAKSRWHGWIDGCVDHALQLSAADPLLGWFRAQEPHRLSRILVTPGDPTTEMLAALFMAKLNAFLAADGGRLACVHLAIEETPTNTVTFAGDPLGVLPVRDGWWRRPDSSINDLGGAA

SEQ ID NO: 23679 - protein, 140 aa, Paraeggerthella hongkongensis
  REGION 1..140: note = tr|A0A369LHG1|A0A369LHG1_9ACTN 6-carboxy-5,6,7,8-tetrahydropterin synthase; OS = Paraeggerthella hongkongensis OX=230658 GN=C1879_05940; PE = 3 SV=1
MYGLKTEASFDSAHFLTDYYGKCENLHGHRWRTVVYLETGELQTEGTMRDMVLDFGVFKRAVRDLAEELDHTFLVEEGSLGEATLAALAAEGFSLTVLPFRTTAENLARYVCERLTEQGLPVSQVDMYETPNNCAVYRAR

SEQ ID NO: 23680 - protein, 140 aa, Paraeggerthella hongkongensis
  REGION 1..140: note = tr|A0A3N0BG55|A0A3N0BG55_9ACTN 6-carboxy-5,6,7,8-tetrahydropterin synthase; OS = Paraeggerthella hongkongensis OX=230658 GN=DMP08_03995; PE = 3 SV=1
MYGLKTEASFDSAHFLTDYYGKCENLHGHRWRTVVYLETDELQTEGTMRDMVLDFGVFKRAVRDLAEELDHTFLVEEGSLGEATMAALAAEGFSLTVLPFRTTAENLARYVCERLTEQGLPVSQVDMYETPNNCAVYRAR

SEQ ID NO: 23681 - protein, 165 aa, unidentified
  source 1..165: note = Parafilimonas terrae
  REGION 1..165: note = tr|A0A1I5SAZ0|A0A1I5SAZ0_9BACT 6-pyruvoyltetrahydropterin/6-carboxytetrahydropterin synthase OS=Parafilimonas terrae OX=1465490; GN = SAMN05444277_101676 PE=4 SV=1
MYSLLKARSLQLAPKACVCRNFAQIFKAAMVYLTRLEHFNAAHKLYNPAWSKERNEAVFGACANENWHGHNFELFVTVKGVPDIDTGFIMDAKQLSRIIKEHVIEKLDHKNLNLDVEFLEGKMCSTENLIVEIWKQLQPHIPANVTLHSLKLYETPRIYVEYFGE

SEQ ID NO: 23682 - protein, 137 aa, unidentified
  source 1..137: note = Parafilimonas terrae
  REGION 1..137: note = tr|A0A1I5SB37|A0A1I5SB37_9BACT 6-pyruvoyltetrahydropterin/6-carboxytetrahydropterin synthase OS=Parafilimonas terrae OX=1465490; GN = SAMN05444277_101677 PE=4 SV=1
MNEKVAVYRKEHFNAAHRLHNDAFDEATNQKVFGKCNNPNYHGHNYELIVKVTGVPDAQTGFVIDLKELSDIIRENVLARFDHKNLNLDVEEFKSLNPTAENIAIIIYKILRPLINSEFDLRVRLYETERNFVEYPA

SEQ ID NO: 23683 - protein, 145 aa, unidentified; identical to SEQ ID NO: 20745
  source 1..145: note = Parageobacillus caldoxylosilyticus
  REGION 1..145: note = tr|A0A023DCW1|A0A023DCW1_9BACI 6-carboxy-5,6,7,8-tetrahydropterin synthase; OS = Parageobacillus caldoxylosilyticus NBRC 107762; OX = 1220594 GN=queD PE=3 SV=1

SEQ ID NO: 23684 - protein, 145 aa, unidentified; identical to SEQ ID NO: 20745
  source 1..145: note = Parageobacillus caldoxylosilyticus
  REGION 1..145: note = tr|A0A150L4Z9|A0A150L4Z9_9BACI 6-carboxy-5,6,7,8-tetrahydropterin synthase; OS = Parageobacillus caldoxylosilyticus OX=81408; GN = B4119_1299 PE=3 SV=1

SEQ ID NO: 23685 - protein, 145 aa, unidentified
  source 1..145: note = Parageobacillus genomosp.
  REGION 1..145: note = tr|A0A023CTM1|A0A023CTM1_9BACI 6-carboxy-5,6,7,8-tetrahydropterin synthase; OS = Parageobacillus genomosp. 1 OX=1295642 GN=H839_03681; PE = 3 SV=1
MIYQLYPQVFHDYRYELNKDMHIAAAHFIPHKQAGKCANIHGHTYVINITVAGDELDETGFLVNFQKLKELIHGKLDHTLLNEHHDWFDTKNSNDFPTTEVVARKIYETVQAYLDTLPHKPKCLQVFVRETPTSYVVYRPKAGDR

SEQ ID NO: 23686 - protein, 144 aa, unidentified
  source 1..144: note = Parageobacillus thermantarcticus
  REGION 1..144: note = tr|A0A1I0T9C0|A0A1I0T9C0_9BACI 6-carboxy-5,6,7,8-tetrahydropterin synthase; OS = Parageobacillus thermantarcticus OX=186116; GN = SAMN05192569_101718 PE=3 SV=1
MIHQLYPQVFHNYQYELNKDMHIAAAHFIPHEKAGKCANMHGHIYTVNITVAGDELDDAGFLVNFQELKELIHGKLDHTLMNEHRDWFNDQNSNDFPTSEVIARKIYETVQAHLDTLPNKPKCLQVFVRETPTSYVVYRPKAGK

SEQ ID NO: 23687 - protein, 144 aa, unidentified
  source 1..144: note = Parageobacillus thermoglucosidasius
  REGION 1..144: note = tr|A0A178TWH5|A0A178TWH5_PARTM 6-carboxy-5,6,7,8-tetrahydropterin synthase; OS = Parageobacillus thermoglucosidasius OX=1426; GN = BAA00_13470 PE=3 SV=1
MIHQLYPQVFHNYQYELNKDMHIAAAHFIPHEKAGKCANMHGHIYTVNITVAGDELDDAGFLVNFQELKKLIHGKLDHTLMNEHQDWFNEQNSNDFPTSEVIARKIYETVQAHLDTLPNKPKCLQVFVRETPTSYVVYRPKAGK

SEQ ID NO: 23688 - protein, 144 aa, unidentified
  source 1..144: note = Parageobacillus thermoglucosidasius
  REGION 1..144: note = tr|A0A401XWI4|A0A401XWI4_PARTM 6-carboxy-5,6,7,8-tetrahydropterin synthase; OS = Parageobacillus thermoglucosidasius OX=1426 GN=queD; PE = 3 SV=1
MIHQLYPQVFHNYQYELNKDMHIAAAHFIPHEKAGKCANMHGHIYTVNITVAGDELDDAGFLVNFQELKKLIHDKLDHTLMNEHQDWFNEQNSNDFPTSEVIARKIYETVQAHLDTLPNKPKCLQVFVRETPTSYVVYRPKAGK

SEQ ID NO: 23689 - protein, 143 aa, unidentified
  source 1..143: note = Parageobacillus toebii
  REGION 1..143: note = tr|A0A150N691|A0A150N691_9BACI 6-carboxy-5,6,7,8-tetrahydropterin synthase; OS = Parageobacillus toebii OX=153151 GN=B4110_1040 PE=3 SV=1
MHQLYPQVFHDYRYELNKDMHIAAAHFIPHKQAGKCANIHGHTYIVNITVAGDVLDDSGFLVNFQKLKELIHGKLDHSLMNEHQDWFNDQNSNDFPTSEVIARKIYETVQAYLDTMPNKPKCLQVFVRETPTSYVVYRPKAGK

SEQ ID NO: 23690 - protein, 144 aa, unidentified; identical to SEQ ID NO: 20738
  source 1..144: note = Parageobacillus toebii
  REGION 1..144: note = tr|A0A3M0EYG9|A0A3M0EYG9_9BACI 6-carboxy-5,6,7,8-tetrahydropterin synthase; OS = Parageobacillus toebii NBRC 107807 OX=1223503; GN = DER53_1851 PE=3 SV=1

SEQ ID NO: 23691 - protein, 291 aa, unidentified
  source 1..291: note = Paraglaciecola agarilytica
  REGION 1..291: note = tr|K6XC52|K6XC52_9ALTE Uncharacterized protein; OS = Paraglaciecola agarilytica NO2 OX=1125747 GN=GAGA_0799; PE = 4 SV=1
MQLFVNDLTVMDFSYLCPKRGMVGESWIVDVVLDGDLNEESMVLDFSKVKKQLKHLIDEYVDHKLLIPVEHEYSHILRDEKNDRVSVDFMRPDGRSIHLNCPSEAYAFVYSKHVTMSSVSQYLKQVIATHLPDNVAGLELALRAEVITTPYYHYTHGLKKHDGNCQRIAHGHRSKITIVENQHESQEWQQYWAERWCDIYVGSNEDLVSADKVNFVKSDTDFSEHFLFGYESSQGWFELAIPKAETEMVDTDTTVECLAQYIADEQKRLVPDSEFKVFAFEGVGKGAIAYA

SEQ ID NO: 23692 - protein, 291 aa, unidentified
  source 1..291: note = Paraglaciecola arctica
  REGION 1..291: note = tr|K6YVE9|K6YVE9_9ALTE Uncharacterized protein; OS = Paraglaciecola arctica BSs20135 OX=493475 GN=GARC_5217; PE = 4 SV=1
MQLFVNDLTVMDFSYLCPERGMVGESWIVDVILSGDLNEESMVLDFGKVKKQLKQLIDEYIDHKLLVPVEHQYSRVKHDEKSDRVKVDFIRPDGKSIHLNCPAEAYAFVYSPNVTMPSVSDYLKDVIATHLPENVAGLELNLRAEVINTPYYHYTHGLKKHDGNCQRIAHGHRSKVVVFENQQESTKWQQYWADRWCDIYIGSTEDIVDIGETVFSLPDDDATQHYVFAYESSQGRFELAIPKAESEMLDTDTTVECLAQYMADEHKRLQSNSDFKVLAYEGVGKGAIAFA

SEQ ID NO: 23693 - protein, 199 aa, unidentified
  source 1..199: note = Paraglaciecola hydrolytica
  REGION 1..199: note = tr|A0A136A1Z7|A0A136A1Z7_9ALTE QueD like protein; OS = Paraglaciecola hydrolytica OX=1799789 GN=AX660_14010; PE = 4 SV=1
MELAILLMVLVIIVAVCVMKLNEPQLAFPFKKKTNLFTQVERNFLALIEDAVGKDYRILCRVKLVDILAVRQSTDKKTSKNAVSKANSRYLDFVLCSKTDMTPVLAIDLVHNNGKDGYKTQRDWFVNGSLDAASIPHVRIKVRSGYKTQDIKDCIEAKLPSKIPKQLKAPIMQGTLNLPEELKQKAKPTRPVGRSVIAA

SEQ ID NO: 23694 - protein, 291 aa, unidentified
  source 1..291: note = Paraglaciecola hydrolytica
  REGION 1..291: note = tr|A0A148KMF2|A0A148KMF2_9ALTE 6-pyruvoyl tetrahydropterin synthase OS=Paraglaciecola hydrolytica; OX = 1799789 GN=AX660_22520 PE=4 SV=1
MQLFVNDLTVMDFSYLCPQRGMVGESWIVDVILNGDLNEESMVLDFSKVKKQLKYLIDLHIDHKLLVPVEHSYSQVERDNKTDYVKVDFMRPQGRSIHLNCPAEAYAFVYADQVTMPTVSDYLKDVIATHLPDNVEGIELMLRAEVIHTPYYHYTHGLKKHDGNCQRIAHGHRSKVLVYQDQQDSLELQTYWAQRWADIYIGSTEDVVTTADVCFKLDTGDFNAHWLFAYESSQGRFELAIPKAESELIDTDTTVECLAQFMANEHKRLDLSHSYKVLAFEGVGKGAIAYA

SEQ ID NO: 23695 - protein, 291 aa, unidentified
  source 1..291: note = Paraglaciecola mesophila
  REGION 1..291: note = tr|K6ZSL3|K6ZSL3_9ALTE Uncharacterized protein; OS = Paraglaciecola mesophila KMM 241 OX=1128912; GN = GMES_4012 PE=4 SV=1
MQLFVNDLTVMDFSYLCPKRGMVGESWIVDVVLDGDLNEESMVLDFSKVKKQLKHLIDEYVDHKLLIPVEHEYSHIWRDEKNDRVSVDFMRPEGRSIHLNCPSEAYAFVYSKHVTMSSVSQYLKQVIATHLPDNVAGLELNLRAEVINTPYYHYTHGLKKHDGNCQRIAHGHRSKITIVENQHESLEWQQYWAERWCDIYVGSNEDLVSADKVNFVKNQTDFTGHYLFGYESSQGWFELAIPKAETEMVDTDTTVECLAQYIADEQKRLVPESEFKIFAFEGVGKGAIAYA

SEQ ID NO: 23696 - protein, 291 aa, unidentified
  source 1..291: note = Paraglaciecola polaris
  REGION 1..291: note = tr|K6YP40|K6YP40_9ALTE Uncharacterized protein; OS = Paraglaciecola polaris LMG 21857 OX=1129793; GN = GPLA_3596 PE=4 SV=1
MQLFVNDLTVMDFSYLCPKRGMVGESWIVDVILDGDLNEESMVLDFSKVKKQLKHLIDEYVDHKLLIPVEHEYSHILRDEKNDRVSVDFMRPEGRSLHLNCPSEAYAFVYSKHVTMSSVSQYLKQVIATHLPENVAGIELTLRAEVINTPYYHYTHGLKKHDGNCQRIAHGHRSKITIVENQHESQEWQQYWAERWCDIYVGSNEDLVSLDKVNFVKSDTDLTQHYLFGYESSQGWFELAIPKAETEMVDTDTTVECLAQYIADEQKRLEPESDFKVYAFEGVGKGAIAYA

SEQ ID NO: 23697 - protein, 291 aa, unidentified
  source 1..291: note = Paraglaciecola psychrophila
  REGION 1..291: note = tr|K7ATN9|K7ATN9_9ALTE Uncharacterized protein; OS = Paraglaciecola psychrophila 170 OX=1129794 GN=C427_4577; PE = 4 SV=1
MQLFVNDLTVMDFSYLCPERGMVGESWIVDVILSGDLNEESMVLDFGKVKKQLKQLIDEYIDHKLLVPVEHEYSRIEHDEKSDRVKVDFIRPDNQSIHLNCPAEAYAFVYSPNVTMPSVSDYLKDVIATHLPENVAGIELNLRAEVINTPFYHYTHGLKKHDGNCQRIAHGHRSKVVVFENQQESIKWQEYWSERWCDIYIGSTEDIVDVSETVFSLPNGDLEQHNVFAYESSQGRFELAIPKAESEMLDTDTTVECLAQFMADEHKRLNNNSDFKVLAYEGVGKGAIAFA

SEQ ID NO: 23698 - protein, 291 aa, unidentified
  source 1..291: note = Paraglaciecola sp.
  REGION 1..291: note = tr|A0A2N1DFC0|A0A2N1DFC0_9ALTE Uncharacterized protein OS=Paraglaciecola sp. MB-3u-78 OX=2058332; GN = CXF95_06630 PE=4 SV=1
MQLFVNDLTVMDFSYLCPERGMVGESWIVDVILSGDLNEESMVLDFGKVKKQLKQLIDEYIDHKLLVPVEHEYSHVEHDEKSDRVKVDFIRPDNKSIHLNCPAEAYAFVYSQHVTMPSVSNYLKDVIATHLPENVAGLELNLRAEVINTPFYHYTHGLKKHDGNCQRIAHGHRSKVVVFENQQESIKWQEYWAKRWCDIYIGSTEDIVEASETVFCLPNANSEKHNVFAYESSQGRFELAIPKAESEMIDTDTTVECLAQFMADEHKRLNSNSDFRVLAYEGVGKGAIAFA

SEQ ID NO: 23699 - protein, 162 aa, unidentified
  source 1..162: note = Parahaliea aestuarii
  REGION 1..162: note = tr|A0A5C8ZUG3|A0A5C8ZUG3_9GAMM 6-pyruvoyl tetrahydropterin synthase OS=Parahaliea aestuarii; OX = 1852021 GN=FV139_15680 PE=4 SV=1
MERLTTLHIDKESHKFSAAHYTIFSASERERLHGHNYSVSARIVAPMGDNGFSADYNVYKRRIKQLCDELDEYMLLAGDSPHQQIGEEGDYYRVRFAGEQMLFLRSDTLVLPIRNATVEEFSHYLLGRLVERSRGEDLREIELGVASGPGQRGSARWQCAPD

SEQ ID NO: 23700 - protein, 120 aa, unidentified
  source 1..120: note = Parahaliea aestuarii
  REGION 1..120: note = tr|A0A5C8ZZ20|A0A5C8ZZ20_9GAMM 6-carboxy-5,6,7,8-tetrahydropterin synthase OS=Parahaliea aestuarii OX=1852021 GN=queD PE=3 SV=1
MPMEIYKEFHFEAAHRLPNVPEGHKCARLHGHSFHVRISVTGDAPEPSGWVMDFGDLKAAFKPVLEQLDHYYLNDITGLENPTSENLARWIWQRLQPDLPLLSAVEIRETCTSGCIYRGD

SEQ ID NO: 23701 - protein, 149 aa, Paralcaligenes ureilyticus
  REGION 1..149: note = tr|A0A4R3MFD0|A0A4R3MFD0_9BURK 6-carboxy-5,6,7,8-tetrahydropterin synthase; OS = Paralcaligenes ureilyticus OX=627131 GN=EDC26_101169; PE = 3 SV=1
MLTITKRLEFDAGHRIPDHKSKCRNLHGHRYALEITLQGEPIDSPGASDNGMLMDFSDVKQIAMEHLVDIWDHAFLVYEGDSLMQLLLSGLPDHKTVVVPQIPTVENLAIIAYQILAPRYRQRFGAKLQLAKIRLYETPTSWADYTASN

SEQ ID NO: 23702 - protein, 131 aa, unidentified
  source 1..131: note = Paramaledivibacter caminithermalis
  REGION 1..131: note = tr|A0A1M6QZ91|A0A1M6QZ91_9CLOT 6-carboxy-5,6,7,8-tetrahydropterin synthase; OS = Paramaledivibacter caminithermalis DSM 15212 OX=1121301; GN = SAMN02745912_02786 PE=3 SV=1
MKLKKVVYKEFLFDAAHKLLNYEGDCKFLHGHTYKLIVGIKGKLNEIGMIIDYKEIKEIWDKKIKNSLDHTNLNDSIDVPNTTAEYIASWIFKKWDAEIRLISTNKNELELESITLYETPTSFVVVEKEKV

SEQ ID NO: 23703 - protein, 118 aa, unidentified
  source 1..118: note = Paramesorhizobium deserti
  REGION 1..118: note = tr|A0A135HZG3|A0A135HZG3_9RHIZ 6-carboxy-5,6,7,8-tetrahydropterin synthase; OS = Paramesorhizobium deserti OX=1494590 GN=ATN84_01810; PE = 3 SV=1
MYRITKEFHFSASHRLTGLPEEHPCARLHGHNYMVVVELSAAELDAHGFVRDYRELAPLKRYIDEALDHRHLNDVFGHERVTAEFLARELYGWCKARWPEVTAVRVSETPKTWAEYRP

SEQ ID NO: 23704 - protein, 117 aa, unidentified
  source 1..117: note = Paramuribaculum intestinale
  REGION 1..117: note = tr|A0A2V1IQD9|A0A2V1IQD9_9BACT 6-carboxy-5,6,7,8-tetrahydropterin synthase; OS = Paramuribaculum intestinale OX=2094151 GN=C5O25_12370; PE = 3 SV=1
MYYISKKIEVSGSHRLELSYESKCGNVHGHNWIVTVFCRAETLNADGMVCDFTRIKEDIMGRLDHRHLNDVLPFNPTAENIARWITEQIPECYKTIVQESEGNVAAYVRDDCGDCVL

SEQ ID NO: 23705 - protein, 137 aa, Parapedobacter composti
  REGION 1..137: note = tr|A0A1I1IXL5|A0A1I1IXL5_9SPHI 6-carboxy-5,6,7,8-tetrahydropterin synthase; OS = Parapedobacter composti OX=623281 GN=SAMN05421747_11097; PE = 3 SV=1
MIYLTRRERFNAAHKLYREGWTLEQNEEVFGKCSNPNWHGHNYELFVTVKGKINPETGFVIDLKELKKIIKAQVVNKLDHRNINLDVDFMQGKMASTEVLAVEIFNQLKPHVEAHGVFLHSIKLVETENNAVEYFGG

SEQ ID NO: 23706 - protein, 137 aa, unidentified
  source 1..137: note = Parapedobacter indicus
  REGION 1..137: note = tr|A0A1I3TAI4|A0A1I3TAI4_9SPHI 6-carboxy-5,6,7,8-tetrahydropterin synthase; OS = Parapedobacter indicus OX=1477437; GN = SAMN05444682_112102 PE=3 SV=1
MIYLTRRERFNAAHKLYREGWTLEQNEAVFGKCSNPNWHGHNYELFVTVKGEVNPETGFVIDLKELKKIITTYVIDKLDHRNVNLDVDFMQGKMASTEVLAIEIFHQLKPHVEAHQAFLHSVRLVETENNSVEYFGD

SEQ ID NO: 23707 - protein, 138 aa, Parapedobacter koreensis
  REGION 1..138: note = tr|A0A1H7IET4|A0A1H7IET4_9SPHI 6-carboxy-5,6,7,8-tetrahydropterin synthase; OS = Parapedobacter koreensis OX=332977; GN = SAMN05421740_102196 PE=3 SV=1
MIYVTRRERFSAAHFMYNKALSREENMRLYGKCAGIHGHNYELFVTVSGEINPETGYLIDLGILGHIIREHVVDLLDHRNLNENVAFLEGLPTSTEVLAGEIFHQLEALVAAAGISLHKVKLVETKNNYTEYGGDTWQ

SEQ ID NO: 23708 - protein, 137 aa, Parapedobacter koreensis
  REGION 1..137: note = tr|A0A1H7T9S4|A0A1H7T9S4_9SPHI 6-carboxy-5,6,7,8-tetrahydropterin synthase; OS = Parapedobacter koreensis OX=332977; GN = SAMN05421740_110147 PE=3 SV=1
MIYLTRRERFNAAHKLYRDEWTLEQNEAVFGKCSNPNWHGHNYELFVTVKGEVNPKTGFVIDLKELKNIIMAYVIDKVDHRNINLDVDFMRGKMASTEVLAIEIFNQLRPHIEAHDVILHSVRLVETENNSVEYFGS

SEQ ID NO: 23709 - protein, 137 aa, Parapedobacter luteus
  REGION 1..137: note = tr|A0A1T5F908|A0A1T5F908_9SPHI 6-carboxy-5,6,7,8-tetrahydropterin synthase; OS = Parapedobacter luteus OX=623280 GN=SAMN05660226_03834; PE = 3 SV=1
MIYLTRRERFNAAHKLYRDEWTLEQNEAVFGKCSNPNWHGHNYELFVTVKGEVNPETGFVIDLKELKNIIMFYVIDKLDHRNINMDVDFMQGKMASTEVLAIEIFNQLKPHVEAHDVILHSVRLVETENNSVEYFGE

SEQ ID NO: 23710 - protein, 137 aa, Parapedobacter sp.
  REGION 1..137: note = tr|A0A3N7H751|A0A3N7H751_9SPHI 6-carboxytetrahydropterin synthase OS=Parapedobacter sp.; OX = 1958893 GN=EAS52_08835 PE=4 SV=1
MIYLTRRERFNAAHKLYREGWTLEQNEAVFGKCSNPNWHGHNYELFVTVKGEVNPETGFVIDLKELKSIITTYVIDKLDHRNVNLDVDFMQGKMASTEVLAIEIFHQLKAHIEAHGAILHSVRLVETENNSVEYFGD

SEQ ID NO: 23711 - protein, 200 aa, Paraperlucidibaca baekdonensis
  REGION 1..200: note = tr|A0A3E0H327|A0A3E0H327_9GAMM 6-pyruvoyltetrahydropterin/6-carboxytetrahydropterin synthase OS=Paraperlucidibaca baekdonensis OX=748120; GN = DFR26_2069 PE=4 SV=1
MLIRKLFRFENAHIVRNCSSDRCKRSIHGHSYQVEVLLEAHALDNGQMVYDFGLMKDDIRNLIDAFDHAVAFWDEDDADYIAACKQFSARWIALPVSPSAEQFSRMFFTLIDRALSLTDMANGEQDVALHSVIVHETATGYAQCFRADIDNPRIGPVDMQRVVFSEQVISEWSDTTLWQRLLRGKRKHNPRVEQQVISNR

SEQ ID NO: 23712 - protein, 120 aa, unidentified
  source 1..120: note = Paraphotobacterium marinum
  REGION 1..120: note = tr|A0A220VET0|A0A220VET0_9GAMM 6-carboxy-5,6,7,8-tetrahydropterin synthase; OS = Paraphotobacterium marinum OX=1755811 GN=queD PE=3 SV=1
MTTEIFKEFTFEAAHKLPNVPEGHKCGRLHGHSFVVRLYITGNVDPHTGWILDFSEVSKVFKPIYNQLDHYYLNDIPGLENPTSEVLAKWIYKKVKPNLPLLSKVMIMETCTAGCFYTED

SEQ ID NO: 23713 - protein, 188 aa, Paraprevotella clara
  REGION 1..188: note = tr|A0A412UDW9|A0A412UDW9_9BACT Rubredoxin; OS = Paraprevotella clara OX=454154 GN=DWW55_04510 PE=4 SV=1
MRSITTFDLQYAHRFYGFQGEAQYLHGHTGVLTIEVEDTVNEGVNMVYPCNEIQKVAWDVLKNFDHALVLREDDPLLPAILDVYEKQGIKNGHPQNKMKGEAFKTPLATAYPDCRLVVTKETMTVEGMIKIVYDLLKEKLNIAKITFTSGVNAGSAEFETKNNIERCPLCGITLNKEGVCPKCGYKKK

SEQ ID NO: 23714 - protein, 188 aa, Paraprevotella clara; identical to SEQ ID NO: 23713
  REGION 1..188: note = tr|R5NZA3|R5NZA3_9BACT Uncharacterized protein; OS = Paraprevotella clara CAG:116 OX=1263095 GN=BN471_00857; PE = 4 SV=1

SEQ ID NO: 23715 - protein, 284 aa, unidentified
  source 1..284: note = Pararheinheimera mesophila
  REGION 1..284: note = tr|A0A3P3QQ87|A0A3P3QQ87_9GAMM Uncharacterized protein OS=Pararheinheimera mesophila OX=1547515; GN = EIK76_00915 PE=4 SV=1
MILFVRDLTVIDFSYLCQQRGLLGESYIVDVELHGSLDQTSMVFDFGLVKKVIKKAIDQLVDHKLVIPALSPATELRSGEVEQVLFRSDKGLLQVASPAEAFAIIQTDKIDMTSVGDFLTAQIKPLLPDNVAKLLLQLRTEHVSGFSYHYTHGLKKHDGNCQRIAHGHRSTIQIFDNGMLSPKLGKYWCERWEDIYLATAEDQVDASVLRYLQAEAGALNFAYSSAQGYFEISLPAATCEVVPCDTTVECLADYIAASVKASHQLSAVKVIAYEGVGKGAIAFA

SEQ ID NO: 23716 - protein, 284 aa, unidentified
  source 1..284: note = Pararheinheimera tangshanensis
  REGION 1..284: note = tr|A0A5C8LZ95|A0A5C8LZ95_9GAMM Uncharacterized protein OS=Pararheinheimera tangshanensis OX=400153; GN = FU839_09710 PE=4 SV=1
MILFVRDLTVIDFSYLCQQRGLLGESYIVDVELHGDLDQTSMVFDFGLVKKVIKKAIDQLVDHKLAIPALSSATQLLSGEVEQVLFSCAKGLLQIASPAEAFAVIQAEKIDMTSVTEFLTEQIKPLLPDNVAKLVLQLRTEQVSGFSYHYTHGLKKHDGNCQRIAHGHRSTIQIFDNGMLSPRLGKYWCERWEDIYLATAEDQIEASALRYLKAEAGALNFAYSSDQGYFEISLPASTCEVVPCDTTVECLADYIAASIKESHQLRAVKVVAFEGVGKGAIAFA

SEQ ID NO: 23717 - protein, 118 aa, unidentified
  source 1..118: note = Pararhizobium polonicum
  REGION 1..118: note = tr|A0A1C7P0H1|A0A1C7P0H1_9RHIZ 6-carboxy-5,6,7,8-tetrahydropterin synthase; OS = Pararhizobium polonicum OX=1612624 GN=ADU59_16010 PE=3; SV = 1
MFRITKEFHFSASHQLTHLPAEHQCARLHGHNYIVVVELSAAALNGDGFVRDYHELAPLKRYIDDSFDHRHLNEVLGHDRVTSECLAKHFYDWCKDRLPETSAVRVSETPKTWAEYRP

SEQ ID NO: 23718 - protein, 184 aa, unidentified
  source 1..184: note = Parasaccharibacter apium
  REGION 1..184: note = tr|A0A2S4PDG9|A0A2S4PDG9_9PROT 6-pyruvoyl tetrahydropterin synthase OS=Parasaccharibacter apium; OX = 1510841 GN=ASQ42_08320 PE=4 SV=1
MSDITRTELVFTRRFCMGHRLISGSSERCAIPHGHNEYVTVTLVPGPNAPQDRRLDGHGNMLLPFAEAKGRWHRFIDERMDHSFQLSESDPLLGWFAEHEPQRLDRLVVTPGDPTTELLAALLMSKLQAFLTAQGGLLSPASLEIKETPTNTVRLHGDPSLYLPLVDRPADRCWWHRADDTTRD

SEQ ID NO: 23719 - protein, 184 aa, unidentified
  source 1..184: note = Parasaccharibacter apium
  REGION 1..184: note = tr|A0A2C6IW54|A0A2C6IW54_9PROT 6-pyruvoyl tetrahydropterin synthase OS=Parasaccharibacter apium; OX = 1510841 GN=BG621_02940 PE=4 SV=1
MSDITRTELVFTRRFCMGHRLISGCSERCAIPHGHNEYVTVTLIPGPNAPQGQRLDGHHNMMLPFAEAKGRWHRFIDERMDHSFQLSASDPLLQWFTTHEPQRLERIVVTPGDPTTELLAALLMSKLQAFLTAQGGLLAPASLEIKETPTNTVRLHGEPTLYLPLMDRPAEQCWWHRADDSTRD

SEQ ID NO: 23720 - protein, 289 aa, unidentified
  source 1..289: note = Parashewanella curva
  REGION 1..289: note = tr|A0A3L8PZQ8|A0A3L8PZQ8_9GAMM Uncharacterized protein OS=Parashewanella curva OX=2338552 GN=D5018_05940; PE = 4 SV=1
MLLFVNDLTVIDFSYLCAERGMVGESWIVDVVLEGGLDDQNMVLDFAKVKKTIKRTIDDVLDHRLAVPSLSHATSYQVQDDDTVRVDFNSQKGSIHLRCPEQAFTSIDTNVIDLAATIQFLNNELKKVLPDNVLNIELTLRAEELNRPYYHYSHGLKKHDGNCQRIAHGHRSPISVFIDGEESQQWNEYWAKRWQDIYLGSEEDLVQLADLDVNSKGISDESHFAFKYQAPQGEFQLAISKEVCDIIPHDTTVELLADFVANHVANEIQDSKVLVKAYEGVGKGAIAKV

SEQ ID NO: 23721 - protein, 167 aa, unidentified
  source 1..167: note = Parashewanella curva
  REGION 1..167: note = tr|A0A3L8PWI9|A0A3L8PWI9_9GAMM 6-pyruvoyl tetrahydropterin synthase OS=Parashewanella curva; OX = 2338552 GN=D5018_10665 PE=4 SV=1
MTQTNRRLTHLVLAKEYMKFSAAHFTIFSVTERERLHGHNFQVSLELTLPVGNDGLSHSYRLFKDQARALCETLDEYCLLPNHSPYLDIHQNNNEYHVKFHNETLRFPVSDTLLLPIKNTSVEELSFYLLEQIIRALPPVKYGIEHVTVSVSSGAGQSGSSSWKKEE

SEQ ID NO: 23722 - protein, 292 aa, unidentified
  source 1..292: note = Parashewanella spongiae
  REGION 1..292: note = tr|A0A3A6UMQ6|A0A3A6UMQ6_9GAMM Uncharacterized protein OS=Parashewanella spongiae OX=342950; GN = D5R81_02670 PE=4 SV=1
MLLFVKDLTVIDFSYLCEKRGMIGESWIVDVVLEGGLDEQNMVLDFAKVKRAIKNTIDDVADHRLLVPVHSDATQFEQTIDKTFVDFESEVGALHLACPDEAFAFINSDSITYESVVDFLRIELGKVLPDNVEGIELTLRTEALDKPFYHYSHGLKKHDGNCQRIAHGHRSPISVYENGVESMKWNEYWAERWQDIYLGSKEDIYDVMALTLSENAKVSSDEHYGFSYVAPQGLFQLAIPKSCCEIIPHDTTVELLAEFVANDLSAQRPDSDFKVVAFEGVGKGAIASKAKQ

SEQ ID NO: 23723 - protein, 164 aa, unidentified
  source 1..164: note = Parashewanella spongiae
  REGION 1..164: note = tr|A0A3A6TVG1|A0A3A6TVG1_9GAMM QueD-like protein; OS = Parashewanella spongiae OX=342950 GN=D5R81_06050 PE=4; SV = 1
MQLERALINELDTGLSLNLATVSNRRSDFSLLLALMSQDIRDMAQFELEHSQADAEKLKLRKKFKLPAEETLIADLSTQTLPVDHSATFQAQGVIEFRLQQNLKPEAIVSRGKYPADFTEAINNCDIHVSRKINGIDGDKKLKSVPFITQLEQQRTMSKLIAQA

SEQ ID NO: 23724 - protein, 208 aa, Parasutterella excrementihominis
  REGION 1..208: note = tr|F3QH32|F3QH32_9BURK Uncharacterized protein; OS = Parasutterella excrementihominis YIT 11859 OX=762966; GN = HMPREF9439_00223 PE=4 SV=1
MRQEKTLNRIEIDTVLTKEKSMRSITSFDLQYAHRFLNFQGEAQYLHGHTGVLTIEVEDTIEPGVNMVFPCNEIRKTAWEVLKNFDHALILREDDPLLPAILAVYDAQGIRNGAPSNRMKGAPVKTDLITCYPDCRLVVTKETLTTEGMIKIAYDLLKDKLNIAKITFTSGVNAASQEYKPQGTVDRCPLCGIALDENGVCPKCGYRK

SEQ ID NO: 23725 - protein, 148 aa, unidentified
  source 1..148: note = Parcubacteria group
  REGION 1..148: note = tr|A0A2D6FNK2|A0A2D6FNK2_9BACT 6-pyruvoyl tetrahydrobiopterin synthase OS=Parcubacteria group bacterium OX=2026774 GN=CMI54_08935 PE=4 SV=1
MKIITATRRIQFCCGHRVMLHESKCAHLHGHNYVAFFTASAELDAVGRVMDFSAIKTLIGGWIDKYWDHGFILNKADELGIKVVSIFEPREGIVQKLYLMPTNPTAENMAEYLVNTVCPSLMKGTGVEITKVRIWETENCYADAEEDR

SEQ ID NO: 23726 - protein, 168 aa, unidentified
  source 1..168: note = Parcubacteria group
  REGION 1..168: note = tr|A0A1V5WFV3|A0A1V5WFV3_9BACT 6-pyruvoyl tetrahydropterin synthase OS=Parcubacteria group bacterium ADurb.Bin216 OX=1852939 GN=BWY21_02252 PE=4 SV=1
MKTYISKIINIGVCYRLLNLPKSHPYCKLFKQNLTLTLNFCGPQKEDKEWIIDYAKLDEMEEVILEDFNHRCLNMNELMYEKSDIEVNATLENMAQYFYHYITKKFPGYAELLDSVELDNNEGLVATVIRDEEKRLEEEIPTIKTTDYYPYITYPPFFYRPWYWNEKL

SEQ ID NO: 23727 - protein, 284 aa, unidentified
  source 1..284: note = Parendozoicomonas haliclonae
  REGION 1..284: note = tr|A0A1X7AF87|A0A1X7AF87_9GAMM 6-pyruvoyl tetrahydropterin synthase OS=Parendozoicomonas haliclonae; OX = 1960125 GN=EHSB41UT_00473 PE=4 SV=1
MSSLFVNQLTTIDFSYLCPERGLVGETWLVDVILSGELNEEGMVFDFGHVKKEIKAMIDSSADHALLVPALHPAIQVEELADKQRSVRLNINSGNEIICQAPEQAIMSLPVSEITPENVRPLLEEHVLKQLPDNVTGIEFSLYPDTIQGAYFHYSHGLKKHSGDCQRIAHGHRSPLKVFICGEEREELAQEQAKSWRDIYLATTEDLQSRYQHNGQQHLTFAYTANQGDFLLSIPESHCYLLETDTTIELLADHLAQCMLDKTGSENIKVIANEGFCKGAIGIR

SEQ ID NO: 23728 - protein, 161 aa, unidentified
  source 1..161: note = Parolsenella catena
  REGION 1..161: note = tr|A0A3G9KAD3|A0A3G9KAD3_9ACTN 6-carboxytetrahydropterin synthase QueD OS=Parolsenella catena OX=2003188 GN=Pcatena_13570 PE=4 SV=1
MYGLQAEAHFDGAHFLTDYYGKCENLHGHRWRVVATIEVERLQGAHDGAGELRDDGTSTAAGTMRDMVVDFGVFKRTVAEVADELDHTFLVEEGSLAPATVAALEGEGFSLTMLPFRTTAENLARWFFDRLAERGLPVSQVEVDETPNNRAFYARDGHVGR

SEQ ID NO: 23729 - protein, 142 aa, unidentified
  source 1..142: note = Parvibacter caecicola
  REGION 1..142: note = tr|A0A3N0ABK6|A0A3N0ABK6_9ACTN 6-carboxy-5,6,7,8-tetrahydropterin synthase OS=Parvibacter caecicola OX=747645 GN=queD PE=3 SV=1
MYGLKTESSFDAAHFLTDYHGKCENLHGHRWRVVAILATDELQEAGTCKDMVMDFGEFKRILRALTEELDHSFIVEEGSLKPQTMKCLEEEGFTLSVMPFRTTAENLARYFWQRLDEAGVPVMVVEVYETPNNCAIYERGRN

SEQ ID NO: 23730 - protein, 142 aa, unidentified
  source 1..142: note = Parvibacter caecicola
  REGION 1..142: note = tr|A0A4T9TB92|A0A4T9TB92_9ACTN 6-carboxy-5,6,7,8-tetrahydropterin synthase OS=Parvibacter caecicola OX=747645 GN=E5982_05815 PE=3 SV=1
MYGLKTESSFDAAHFLTDYHGKCENLHGHRWRVVAILATDELQEAGTCKDMVMDFGEFKRILRALTEELDHSFIVEEGSLKPQTMKCLEEEGFTLSVMPFRTTVENLARYFWQRLDEAGVPVMVVEVYETPNNCAIYERGRN

SEQ ID NO: 23731 - protein, 122 aa, Parvibaculum lavamentivorans
  REGION 1..122: note = tr|A7HXX3|A7HXX3_PARL1 6-carboxy-5,6,7,8-tetrahydropterin synthase; OS = Parvibaculum lavamentivorans (strain DS-1 / DSM 13023 / NCIMB 13966) OX=402881 GN=Plav_3150 PE= 3 SV=1
MKIYKEFLFDAAHFLPYAEEGHPNRRMHGHSFRVVVWLKGKPAAETGIVRHFEDVEREIMAVREKLDHHLLNEIEGLEFPTLERIAAWIWDALATPLPEIARVEVHRASCREGCIYDGPEAE

SEQ ID NO: 23732 - protein, 125 aa, Parvibaculum sp.
  REGION 1..125: note = tr|A0A2D8XBR5|A0A2D8XBR5_9RHIZ 6-carboxy-5,6,7,8-tetrahydropterin synthase; OS = Parvibaculum sp. OX=2024848 GN=CMI60_02950 PE=3 SV=1
MRIYKEFGFEAAHFLPSAPEGHPNSRLHGHSFRAVVWMEGEPDPETGLIREFGSLLDVLNEVKADLDHRCLNEIEGLSVPTLENICVWLWDRLSPNLRRLSRVEVHRDSCREGCVYDGPGDTSKG

SEQ ID NO: 23733 - protein, 122 aa, Parvibaculum sp.
  REGION 1..122: note = tr|A0A2D8RU17|A0A2D8RU17_9RHIZ 6-carboxy-5,6,7,8-tetrahydropterin synthase; OS = Parvibaculum sp. OX=2024848 GN=CMI61_02225 PE=3 SV=1
MRIYKEFFFDAAHFLPYAEEGHPNRRMHGHSFRVVVWLSGKPDASTGLVRHFEDLEREVMAVREKLDHHLLNEIEGLELPTLEHIAVWIWHELAAPLPEIARVEIHRASCREGCVYDGPEAE

SEQ ID NO: 23734 - protein, 125 aa, unidentified
  source 1..125: note = Parvibium lacunae
  REGION 1..125: note = tr|A0A368L6F5|A0A368L6F5_9BURK 6-carboxy-5,6,7,8-tetrahydropterin synthase OS=Parvibium lacunae OX=1888893 GN=DU000_00125 PE=3 SV=1
MHELTQSFIFEAAHTLNRAYLADPAAVLGSKRIHGHSYRALVTVRGIADPTTGMLLDLHTFRQQLHTVQSQLDHHLLDEVADLGPATLENLTQYIWRQLQPTLASLYRVTVERVLTGDSCSYYGT

SEQ ID NO: 23735 - protein, 136 aa, Parvularcula bermudensis
  REGION 1..136: note = tr|E0TEJ4|E0TEJ4_PARBH 6-carboxy-5,6,7,8-tetrahydropterin synthase; OS = Parvularcula bermudensis (strain ATCC BAA-594 / HTCC2503 / KCTC 12087) OX=314260 GN=PB2503_1211 9 PE=3 SV=1
MTFLRDASPFPDFGMYYQSYSFFFEAAHELGEMKPEDSAHLYAEIHGHSFEVTVTLAAATIEPEGWIMDFAELKAACETVRGLLDHRLLNRIEGLSRPTLERLADFIIERLSPDLPALSEVEIARPSLNERLRRVR

SEQ ID NO: 23736 - protein, 118 aa, Parvularcula sp.
  REGION 1..118: note = tr|A0A2E1XB41|A0A2E1XB41_9PROT 6-carboxy-5,6,7,8-tetrahydropterin synthase; OS = Parvularcula sp. OX=1979207 GN=queD PE=3 SV=1
MRIVKSMSFDAAHYLDHDPDARPYARLHGHSFTLEVVIEGEPQEETGWVVDFGDVAEALQGLHEALDHRLLNEVEGLERPTLENICRWAAEKLKPQFPGLAEVRVSRPSIGESCVHLL

SEQ ID NO: 23737 - protein, 125 aa, Parvularcula sp.
  REGION 1..125: note = tr|A0A355BX75|A0A355BX75_9PROT 6-carboxy-5,6,7,8-tetrahydropterin synthase; OS = Parvularcula sp. OX=1979207 GN=DDZ68_01585 PE=3 SV=1
MVYEQSLQFSFEAAHELGAAVRGEGDHPYARIHGHSFVVTVTLRAGALTSAGWIMDFAELRRISERVRDLLDHRLLNLIAGLERPTLENLAAWIFKAFAAEVEGLWRVEVARPTLNERVACYATG

SEQ ID NO: 23738 - protein, 152 aa, unidentified
  source 1..152: note = Parvularculaceae bacterium
  REGION 1..152: note = tr|A0A520RBJ7|A0A520RBJ7_9PROT 6-carboxytetrahydropterin synthase OS=Parvularculaceae bacterium OX=2510335 GN=EVA70_03900 PE=4 SV=1
MRALGRLYAAAAPQMVGGTRSMYEQTYSFTFEAAHALATSPPAQQKADTATGPHPYARLHGHSFVATIMLQSEELGGDHWVADFADVRAACDKVKNALDHQLLNEIDGLETPTLEVLSRWIYDRLASDFPAIAKVSVARPTLSESASFAAKR

SEQ ID NO: 23739 - protein, 139 aa, Pasteurella aerogenes
  REGION 1..139: note = tr|A0A448K5L5|A0A448K5L5_PASAE 6-carboxy-5,6,7,8-tetrahydropterin synthase OS=Pasteurella aerogenes OX=749 GN=queD PE=3 SV=1
MFKVSKEFSFDMAHILDGHDGKCQNLHGHTYKLQVEVSGDLVLEGAKKGMVVDFTDVKRVVKEAILDPMDHAFIYDTTSERECKIAALLNELNSKTFGIPMRTTAEEMARFMFNCLKDKLPISAIRLWETPTSFCEYRE

SEQ ID NO: 23740 - protein, 141 aa, Pasteurella bettyae
  REGION 1..141: note = tr|I3D6J7|I3D6J7_9PAST 6-carboxy-5,6,7,8-tetrahydropterin synthase OS=Pasteurella bettyae CCUG 2042 OX=1095749 GN=queD PE=3 SV=1
MFKVSKEFSFDMAHILDGHDGKCQNLHGHTYKLQVEVSGNLHAEGAKKGMVIDFSDVKEIVKAFILDPMDHAFIYDINSERETKIANLLVELKSKTFGIPVRTTAEEMSRFIFNRLKHEVGLPVSAIRLWETPTSFCEYRE

SEQ ID NO: 23741 - protein, 141 aa, unidentified
  source 1..141: note = Pasteurella caecimuris
  REGION 1..141: note = tr|A0A4S2E538|A0A4S2E538_9PAST 6-carboxy-5,6,7,8-tetrahydropterin synthase OS=Pasteurella caecimuris OX=1796644 GN=queD PE=3 SV=1
MFKISKEFSFDMAHLLDNHDGKCQNLHGHTYKLQVEITGDLHENGAKKSMVMDFSDLKNTVKKAILDPMDHAFIYDQTSERESKIAALLQELNSKTFAVPFRTTAEEMARFIFNRLKYDEKLAVSAIRLWETPTSFCEYSE

SEQ ID NO: 23742 - protein, 130 aa, Pasteurella canis
  REGION 1..130: note = tr|A0A379EUV2|A0A379EUV2_9PAST 6-carboxy-5,6,7,8-tetrahydropterin synthase OS=Pasteurella canis OX=753 GN=queD PE=3 SV=1
MAHMLDGHDGKCKNLHGHTYKLQVELCGDLHQSGPKRGMVIDFSDLKSIVKQHILDPMDHAFIYDSHSEKETKVAALLQSLDSKTFALTTRTTAEEMARFIFNCLKYEAHLPISAIRLWETPTSFCEYEE

SEQ ID NO: 23743 - protein, 141 aa, Pasteurella dagmatis
  REGION 1..141: note = tr|C9PRY5|C9PRY5_9PAST 6-carboxy-5,6,7,8-tetrahydropterin synthase OS=Pasteurella dagmatis ATCC 43325 OX=667128 GN=queD PE=3 SV=1
MFKIVKEFSFDMAHMLDGHDGKCKNLHGHTYKLQVEICGELHQSGPKKGMVIDFSDLKAIVKKRILEPMDHAFIYDCTSERESKVANLLQSLDSKTFSLPTRTTAEEMARFIFNCLKYEEHLPVSAIRLWETPSSFCEYEE

SEQ ID NO: 23744 - protein, 139 aa, Pasteurella langaaensis
  REGION 1..139: note = tr|A0A2U0SKH0|A0A2U0SKH0_9PAST 6-carboxy-5,6,7,8-tetrahydropterin synthase OS=Pasteurella langaaensis DSM 22999 OX=1122935 GN=C8D76_1197 PE=3 SV=1
MFKVSKEFSFDMAHILDGHDGKCRNLHGHTYKLQVEVSGELIANGAKKGMVVDFTDVKAIVKSVILDQMDHAFIYDSTSERECKIASLLNELNSKTFGIPVRTTAEEMARFIFNQLKDKLPLSAIRLWETPTSFCEYRE

SEQ ID NO: 23745 - protein, 139 aa, unidentified
  source 1..139: note = [Pasteurella] mairii
  REGION 1..139: note = tr|A0A379B6T8|A0A379B6T8_9PAST 6-carboxy-5,6,7,8-tetrahydropterin synthase; OS = [Pasteurella] mairii OX=757 GN=queD PE=3 SV=1
MFKVSKEFSFDMAHILDGHDGKCQNLHGHTYKLQVEVSGDLVPEGAKKSMVVDFTDVKTAVKEAILDPMDHAFIYDTTSERECKIAALLNELNSKTFGIPVRTTAEEMARFMFNRLKDKLPISAIRLWETPTSFCEYRE

SEQ ID NO: 23746 - protein, 141 aa, Pasteurella multocida
  REGION 1..141: note = tr|A0A1D7R2P4|A0A1D7R2P4_PASMD 6-carboxy-5,6,7,8-tetrahydropterin synthase OS=Pasteurella multocida OX=747 GN=queD PE=3 SV=1
MFKIAKEFSFDMAHMLDGHDGKCKNLHGHTYKLQVELCGELHQTGPKKGMVIDFSDLKDIVKQHILDPMDHAFIYDCSSEKESKVAHLLQSLDSKTFALPTRTTAEEMARFMFNCLKYEAHLPVSAIRLWETPTSFCEYKE

SEQ ID NO: 23747 - protein, 141 aa, Pasteurella multocida; identical to SEQ ID NO: 23746
  REGION 1..141: note = tr|V4NFF1|V4NFF1_PASMD 6-carboxy-5,6,7,8-tetrahydropterin synthase OS=Pasteurella multocida subsp. multocida P1062 OX=1331042; GN = P1062_0206855 PE=3 SV=1

SEQ ID NO: 23748 - protein, 141 aa, Pasteurella sp.
  REGION 1..141: note = tr|A0A4Y9GWQ2|A0A4Y9GWQ2_9PAST 6-carboxy-5,6,7,8-tetrahydropterin synthase OS=Pasteurella sp. WM03 OX=2558280 GN=queD PE=3 SV=1
MFKISKEFSFDMAHLLDNHDGKCQNLHGHTYKLQVEITGDLHENGAKKAMVMDFSDLKNTVKKAILDPMDHAFIYDQTSERESKIAALLQELNSKTFAVPFRTTAEEMARFIFNRLKYDEKLAVSAIRLWETPTSFCEYSE

SEQ ID NO: 23749 - protein, 142 aa, Pasteurella testudinis
  REGION 1..142: note = tr|A0A1W1UL70|A0A1W1UL70_9PAST 6-carboxy-5,6,7,8-tetrahydropterin synthase OS=Pasteurella testudinis DSM 23072 OX=1122938 GN=SAMN05660772_01962 PE=3; SV = 1
MFKISKEFSFDMAHMLDGHDGKCKNLHGHTYKLQVELCAPLLTDAAKCGMVMDYSDLKSVVDDLILKPMDHAFIYDQHSEKERKVAELLQELDSKVFALPYRTTAEQMSQFIFQRLQHAGLPISAVRLWETPTSFCEYTDSE

SEQ ID NO: 23750 - protein, 142 aa, unidentified
  source 1..142: note = Pasteurellaceae bacterium
  REGION 1..142: note = tr|A0A5C4QN31|A0A5C4QN31_9PAST 6-carboxy-5,6,7,8-tetrahydropterin synthase; OS = Pasteurellaceae bacterium BK431 OX=2585026 GN=queD PE=3; SV = 1
MFKISKEFSFDMAHMLDGHDGKCKNLHGHTYKLQIELCAPLLTDPAKCGMVMDYSDLKNTVNELIIKPMDHAFIFDENSEKESKVARLLQELDSKVFALPYRTTAELMSQFIFQRLQQAGLPISAVRLWETPTSFCEYSCNQ

SEQ ID NO: 23751 - protein, 141 aa, unidentified; identical to SEQ ID NO: 23741
  source 1..141: note = Pasteurellaceae bacterium
  REGION 1..141: note = tr|A0A1B3JDU2|A0A1B3JDU2_9PAST 6-carboxy-5,6,7,8-tetrahydropterin synthase; OS = Pasteurellaceae bacterium NI1060 OX=1679001; GN = AC062_0147 PE=3 SV=1

SEQ ID NO: 23752 - protein, 23 aa, unidentified
  source 1..23: note = Patescibacteria group
  REGION 1..23: note = tr|A0A351TBC2|A0A351TBC2_9BACT Uncharacterized protein OS=Patescibacteria group bacterium OX=2052139; GN = DCZ31_03400 PE=4 SV=1
MPNHTSQCKNIHGHRYKIEITLE

SEQ ID NO: 23753 - protein, 368 aa, unidentified
  source 1..368: note = Paucibacter aquatile
  REGION 1..368: note = tr|A0A2N8KZJ6|A0A2N8KZJ6_9BURK 6-pyruvoyl tetrahydropterin synthase OS=Paucibacter aquatile; OX = 2070761 GN=C1O66_15895 PE=4 SV=1
MNTDTLYSASSGFESACQIPALPSGHRSRGLHGHSYFATIRAQLPAGWAPFPGAEVEELRRRLEACVAPLDHALLNQTIEQPTDENIARWIRLRLEHEFGVPGIQQVGIQSTQHSGVDLDVKGMAHVWRRYRFQAAHKLPNVPMGHKCGRMHGHGFEVIVHANQDLGERDISIDYDHLDEVWAPFHAELNYHCLNEIEGLSNPTSEVISAWLWARMKPLLPELSWLTVYETGSCGANFDGQNYRIWKELTLDSAIQLKAAPADSPLRAIHGHTYTLRLHLSAELDAVMGWTVDFGDVKTLFDPIFKAIDHRPLYEIADLPDGDTASLAAWVLGKARVDLPQLDRVDMYETRGCGSIVSVATAVDLIPV

SEQ ID NO: 23754 - protein, 368 aa, Paucibacter sp.
  REGION 1..368: note = tr|A0A3N7C483|A0A3N7C483_9BURK 6-pyruvoyl tetrahydropterin synthase OS=Paucibacter sp. KBW04; OX = 2153361 GN=DBR47_10075 PE=4 SV=1
MNTLTLFSASCGFESACQITALPMGHRSRGLHGHSYFATIRAELPEGWAPFPGAEVEELRRRLEACVAPLDHALLNRCIEEPTDENIARWIRQRLETEFEVPGIQQVGIQSTPHSGVDLDAQGMAHVWRRYRFQAAHQLPNVPMGHKCGRMHGHGFEVIIHANQDLGERAISIDYDHLDEVWAPFHMLLNYHCLNEIEGLHNPTSEVISAWLWARMKSELPELSWITVYETGSCGANFDGQHYRIWKELTLDSAIQLKRAPTDSPLRGIHGHTYTLRLHLHAELDQLMGWTVDFGDVKTLFDPIFKAIDHRPLYEIADLPDGDTASLAAWVLAKGRAALPQLDRIDMYETRGCGSIVSASSDGPVIPV

SEQ ID NO: 23755 - protein, 368 aa, Paucibacter sp.
  REGION 1..368: note = tr|A0A0U3EJZ1|A0A0U3EJZ1_9BURK 6-pyruvoyl tetrahydropterin synthase OS=Paucibacter sp. KCTC 42545; OX = 1768242 GN=AT984_18460 PE=4 SV=1
MKTLTIFSASCGFESACQITALPVGHRSHGLHGHSYFATVRAELPADWAPFPGGEVEELRKRLEACVEPLDHALLNRCVEEPTDENIARWIRQRLETEFGVPGIQQIGIQSTQHSGVDLDANGSAHVWRRYRFQAAHQLPNVPMGHKCGRMHGHGFEVIIHANQDLGERALSIDYDHLDEVWAPWHMLLNYQCLNSIEGLHNPTSEVISAWLWAGLKPVLPELSWITVYETGSCGANFDGTNYRIWKELTLDSAIQLKRAPTDSPLRGIHGHTYTLRLHLSAELDKVQGWTVDFGDVKTLFDPIFKAIDHRPLYEIADLPDGDTASLAAWVLAKGAAVLPQIDRVDMYETRGCGSIVSSSGDEALIPV

SEQ ID NO: 23756 - protein, 365 aa, Paucibacter toxinivorans
  REGION 1..365: note = tr|A0A4R6QKI8|A0A4R6QKI8_9BURK 6-pyruvoyltetrahydropterin/6-carboxytetrahydropterin synthase OS=Paucibacter toxinivorans OX=270368; GN = DES47_104109 PE=4 SV=1
MTTPHTLFSAASGFESAAQVTLLPVGHRSRGLHGHSYLATVRADLSAGWAPFPGGEVEALRARLEECLAPLDYQLLNNTIAQPTDENIARWIRERLDVPGIAQIGIQSTAHSGVDLDAAGMAHVWRRYRFQAAHRLPQVPLGHKCGRMHGHGFEVIVHANQDLGTRDLSIDYDHLDEVWAPLHHQLNYQCLNDIAGLDNPTSEVISSWLWQRLKPQLPELSWVTVYETGSCGANFDGESYRIWKELTLDSAIQLKRAPDGSALRSIHGHTYTLRLHLSAPLDTVMGWTVDFGDVKTLFDPIFKAIDHRPLYEIADMADGDTASIAAWILEKARAQLPQLDRVDLYETRGCGAIVSAASEGPALPV

SEQ ID NO: 23757 - protein, 118 aa, Paucimonas lemoignei
  REGION 1..118: note = tr|A0A2X4AWL1|A0A2X4AWL1_PAULE 6-carboxy-5,6,7,8-tetrahydropterin synthase OS=Paucimonas lemoignei OX=29443 GN=queD PE=3 SV=1
MEIFKEFTFESAHLLPHVPAGHKCGRLHGHSFRIAIHLEGEVDPHIGWIRDFSEIKAIFKPLYERLDHNYLNDIPGLENPTSENLAKWIFAELKPLLPELSAIRIHETCTSGCIYRGD

SEQ ID NO: 23758 - protein, 147 aa, Paucimonas lemoignei
  REGION 1..147: note = tr|A0A4R3I1N8|A0A4R3I1N8_PAULE 6-pyruvoyltetrahydropterin/6-carboxytetrahydropterin synthase OS=Paucimonas lemoignei OX=29443 GN=EDC30_101464; PE = 4 SV=1
MLTITRKLEFDAGHRIPDHKSQCRNLHGHRYTLEITLVGEVIKEEGSSDQGMIMDFSDVKALAKQHLVDVWDHAFLVYAKDEKVRDFLEALEGHKTVIIDSIPTVENLAQTAFNILKPAYQDRYGTGLRLHKLVLHETPNCWAEITE

SEQ ID NO: 23759 - protein, 125 aa, Pectinatus cerevisiiphilus
  REGION 1..125: note = tr|A0A4R3KCP4|A0A4R3KCP4_9FIRM 6-carboxy-5,6,7,8-tetrahydropterin synthase OS=Pectinatus cerevisiiphilus OX=86956 GN=EDC37_10413 PE=3 SV=1
MFELSVRDDFGAAHRIIGYPGKCNNLHGHNWVVEAVVCGSKLNELGMLIDFKKLKGALKEIIGELDHHYLNELEPFSTANPSAENIAAYLYHKLSQHENIKGKCHVKFVKVWETEKSAVSYCEEA

SEQ ID NO: 23760 - protein, 120 aa, unidentified
  source 1..120: note = Pectobacterium actinidiae
  REGION 1..120: note = tr|A0A1V2R3W7|A0A1V2R3W7_9GAMM 6-carboxy-5,6,7,8-tetrahydropterin synthase; OS = Pectobacterium actinidiae OX=1507808 GN=BSK71_09255; PE = 3 SV=1
MVTTLFKDFQFEAAHHLPHVPDGHKCGRLHGHSFMVRLEITGEVDPHTGWVMDFSELKAAFKPTWERLDHHYLNEIPGLENPTSEVLAHWIWHQLKPILPLLSAVMVKETCTAGCVYKGE

SEQ ID NO: 23761 - protein, 120 aa, unidentified
  source 1..120: note = Pectobacterium aquaticum
  REGION 1..120: note = tr|A0A3R8PLZ9|A0A3R8PLZ9_9GAMM 6-carboxy-5,6,7,8-tetrahydropterin synthase; OS = Pectobacterium aquaticum OX=2204145 GN=queD PE=3 SV=1
MVTTLFKDFQFEAAHHLPHVPDGHKCGRLHGHSFMVRLEITGEVDPHTGWVMDFSELKAAFKPTWERLDHHYLNEIPGLENPTSEVLAHWIWHQLKPTLPLLSAVMVKETCTAGCVYKGE

SEQ ID NO: 23762 - protein, 138 aa, Pectobacterium atrosepticum
  REGION 1..138: note = tr|Q6D195|Q6D195_PECAS 6-carboxy-5,6,7,8-tetrahydropterin synthase; OS = Pectobacterium atrosepticum (strain SCRI 1043 / ATCC BAA-672) OX=218491 GN=ECA3553 PE=3 SV=1
MHTMFWKPLFQNETGNIAMVTTLFKDFQFEAAHHLPHVPEGHKCGRLHGHSFMVRLEITGEVDPYTGWVMDFSELKAAFKPTWERLDHHYLNEIPGLENPTSEVLAHWIWQQLKPTLPLLSAVMVKETCTAGCVYKGE

SEQ ID NO: 23763 - protein, 120 aa, Pectobacterium betavasculorum
  REGION 1..120: note = tr|A0A093T1T5|A0A093T1T5_9GAMM 6-carboxy-5,6,7,8-tetrahydropterin synthase; OS = Pectobacterium betavasculorum OX=55207 GN=KP22_12190; PE = 3 SV=1
MVTTLFKDFQFEAAHHLPHVPEGHKCGRLHGHSFMVRLEITGEVDPYTGWVMDFSELKAAFKPTWERLDHHYLNEIPGLENPTSEVLAHWIWQQLKPTLPLLSAVMVKETCTAGCVYKGE

SEQ ID NO: 23764 - protein, 120 aa, unidentified
  source 1..120: note = Pectobacterium brasiliense
  REGION 1..120: note = tr|A0A086F2D2|A0A086F2D2_9GAMM 6-carboxy-5,6,7,8-tetrahydropterin synthase; OS = Pectobacterium brasiliense OX=180957 GN=IW01_00205 PE=3; SV = 1
MVTTLFKDFQFEAAHHLPHVPDGHKCGRLHGHSFMVRLEITGEVDPYTGWVMDFSELKAAFKPTWERLDHHYLNEIPGLENPTSEVLAHWIWHQLKPELPLLSAVMVKETCTAGCVYKGE

SEQ ID NO: 23765 - protein, 120 aa, unidentified
  source 1..120: note = Pectobacterium brasiliense
  REGION 1..120: note = tr|A0A086EFK1|A0A086EFK1_9GAMM 6-carboxy-5,6,7,8-tetrahydropterin synthase; OS = Pectobacterium brasiliense OX=180957 GN=F126LOC_04169; PE = 3 SV=1
MVTTLFKDFQFEAAHHLPHVPDGHKCGRLHGHSFMVRLEITGEVDPYTGWVMDFSELKAAFKPTWERLDHHYLNEIPGLENPTSEVLAHWIWHQLKPTLPLLSAVMVKETCTAGCVYKGE

SEQ ID NO: 23766 - protein, 120 aa, Pectobacterium carotovorum
  REGION 1..120: note = tr|C6DDI1|C6DDI1_PECCP 6-carboxy-5,6,7,8-tetrahydropterin synthase; OS = Pectobacterium carotovorum subsp. carotovorum (strain PC1) OX=561230 GN=PC1_3372 PE=3 SV=1
MVTTLFKDFQFEAAHHLPHVPEGHKCGRLHGHSFMVRLEITGEVDPHTGWVMDFSELKAAFKPTWERLDHHYLNEIPGLENPTSEVLAHWIWHQLKPTLPLLSAVMVKETCTAGCVYKGE

SEQ ID NO: 23767 - protein, 120 aa, Pectobacterium carotovorum; identical to SEQ ID NO: 23765
  REGION 1..120: note = tr|A0A255BQI9|A0A255BQI9_PECCA 6-carboxy-5,6,7,8-tetrahydropterin synthase; OS = Pectobacterium carotovorum OX=554 GN=queD PE=3 SV=1

SEQ ID NO: 23768 - protein, 120 aa, unidentified
  source 1..120: note = Pectobacterium odoriferum
  REGION 1..120: note = tr|A0A094SYD5|A0A094SYD5_9GAMM 6-carboxy-5,6,7,8-tetrahydropterin synthase; OS = Pectobacterium odoriferum OX=78398 GN=KU75_00970 PE=3; SV = 1
MVTTLFKDFQFEAAHHLPHVPDGHKCGRLHGHSFMVRLEITGEVDPHTGWVMDFSELKAAFKPTWERLDHHYLNEIPGLENPTSEVLAHWIWQQLKPTLPLLSAVMVKETCTAGCVYKGE

SEQ ID NO: 23769 - protein, 120 aa, unidentified
  source 1..120: note = Pectobacterium parmentieri
  REGION 1..120: note = tr|A0A0H3ICI3|A0A0H3ICI3_PECPM 6-carboxy-5,6,7,8-tetrahydropterin synthase; OS = Pectobacterium parmentieri OX=1905730 GN=queD PE=3 SV=1
MVTTLFKDFQFEAAHHLPHVPEGHKCGRLHGHSFMVRLEITGEVDPYTGWVMDFSELKAAFKSTWERLDHHYLNEIPGLENPTSEVLAHWIWHQLKPALPLLSAVMVKETCTAGCVYKGE

SEQ ID NO: 23770 - protein, 120 aa, unidentified
  source 1..120: note = Pectobacterium peruviense
  REGION 1..120: note = tr|A0A0J5XE74|A0A0J5XE74_9GAMM 6-carboxy-5,6,7,8-tetrahydropterin synthase; OS = Pectobacterium peruviense OX=2066479 GN=G033_16605 PE=3; SV = 1
MVTTLFKDFQFEAAHHLPHVPEGHKCGRLHGHSFMVRLEITGEVDPYTGWVMDFSELKAAFKATWERLDHHYLNEIPGLENPTSEVLAHWIWQQLKPTLPLLSAVMVKETCTAGCVYKGE

SEQ ID NO: 23771 - protein, 120 aa, unidentified; identical to SEQ ID NO: 23765
  source 1..120: note = Pectobacterium polaris
  REGION 1..120: note = tr|A0A093SDY6|A0A093SDY6_9GAMM 6-carboxy-5,6,7,8-tetrahydropterin synthase; OS = Pectobacterium polaris OX=2042057 GN=queD PE=3 SV=1

SEQ ID NO: 23772 - protein, 120 aa, unidentified; identical to SEQ ID NO: 23763
  source 1..120: note = Pectobacterium polonicum
  REGION 1..120: note = tr|A0A4U7KFJ1|A0A4U7KFJ1_9GAMM 6-carboxy-5,6,7,8-tetrahydropterin synthase; OS = Pectobacterium polonicum OX=2485124 GN=queD PE=3 SV=1

SEQ ID NO: 23773 - protein, 120 aa, unidentified; identical to SEQ ID NO: 23763
  source 1..120: note = Pectobacterium punjabense
  REGION 1..120: note = tr|A0A2T3VXW0|A0A2T3VXW0_9GAMM 6-carboxy-5,6,7,8-tetrahydropterin synthase; OS = Pectobacterium punjabense OX=2108399 GN=queD PE=3 SV=1

SEQ ID NO: 23774 - protein, 120 aa, Pectobacterium wasabiae
  REGION 1..120: note = tr|A0A1D7YXE6|A0A1D7YXE6_9GAMM 6-carboxy-5,6,7,8-tetrahydropterin synthase; OS = Pectobacterium wasabiae CFBP 3304 OX=1175631; GN = A7983_02770 PE=3 SV=1
MVTTLFKDFQFEAAHHLPHVPEGHKCGRLHGHSFMVRLEITGEVDPYTGWVMDFSELKAAFKPTWEQLDHHYLNEIPGLENPTSEVLAHWIWHQLKPVLPLLSAVMVKETCTAGCVYKGE

SEQ ID NO: 23775 - protein, 123 aa, Pediococcus acidilactici
  REGION 1..123: note = tr|A0A410LDQ1|A0A410LDQ1_PEDAC 6-pyruvoyl tetrahydropterin synthase OS=Pediococcus acidilactici; OX = 1254 GN=EQJ92_08390 PE=4 SV=1
MPLVHTYKIKSYVNASHAMRWKDGEGKQHNHTWEVVCEIKSKDDHMIVFRDIEKKIQDVLGSFSGQFLNELPYFKEINPTVENVTIWLFDLLSSILEELSAKLVRIEVGESPTRSYVISDIDD

SEQ ID NO: 23776 - protein, 123 aa, Pediococcus acidilactici; identical to SEQ ID NO: 23775
  REGION 1..123: note = tr|D2EHH0|D2EHH0_PEDAC 6-pyruvoyl tetrahydropterin synthase-related domain protein OS=Pediococcus acidilactici 7_4 OX=563194 GN=HMPREF9024_00232 PE=4 SV=1

SEQ ID NO: 23777 - protein, 104 aa, Pediococcus cellicola
  REGION 1..104: note = tr|A0A0R2IPC7|A0A0R2IPC7_9LACO Uncharacterized protein OS=Pediococcus cellicola OX=319652; GN = IV80_GL000968 PE=4 SV=1
MRWKGGEGKQHNHTWEIVCEIHTKGDHMIIFNDLEKAVTEILSQINGKFLNDLDYFKKINSSVENVTEYLFDQIGPELKKLEASLIRIEVGESPTRFYCITVDD

SEQ ID NO: 23778 - protein, 137 aa, Pedobacter africanus
  REGION 1..137: note = tr|A0A1W2B626|A0A1W2B626_9SPHI 6-carboxy-5,6,7,8-tetrahydropterin synthase OS=Pedobacter africanus OX=151894 GN=SAMN04488524_1961 PE=3 SV=1
MIYITRKASFNAAHKLSRPDWTEAQNTEVYGKCANPNWHGHNYQLYVTVKGEINPETGFLVDLKWLKDITNTYVVDKIDHKNLNLDVDFMKGKLASTENLAVAIWDELVNLIAESGAQLHSIKIYETENNFVEYFGH

SEQ ID NO: 23779 - protein, 136 aa, Pedobacter alluvionis
  REGION 1..136: note = tr|A0A497XWS9|A0A497XWS9_9SPHI 6-carboxytetrahydropterin synthase OS=Pedobacter alluvionis OX=475253 GN=BCL90_3569 PE=4 SV=1
MIYITRKASFNAAHKLARTDWDDDKNNEVYGKCANPNWHGHNYWLYVTVKGEVNPETGFLVDLKWLKDVMNDYVVDKVDHKNLNLDVDFMKGKLASTENLAIEIWKQLWAPIAESGAVLHCVKIYETENNFVEYFG

SEQ ID NO: 23780 - protein, 106 aa, unidentified
  source 1..106: note = Pedobacter antarcticus
  REGION 1..106: note = tr|A0A081PLM3|A0A081PLM3_9SPHI Uncharacterized protein OS=Pedobacter antarcticus 4BY OX=1358423; GN = N180_18595 PE=4 SV=1
MIIYKLFRFDSAHYLPNVPAGHPCGGMHGQTGTHTGWVIDYTAIKELVGPWVKKLDHQVINQLDGLENPTAENICLWFWRNLQPELPGLFRLELNETPDSGVIYEG

SEQ ID NO: 23781 - protein, 106 aa, unidentified; identical to SEQ ID NO: 23780
  source 1..106: note = Pedobacter antarcticus
  REGION 1..106: note = tr|A0A1I2IX69|A0A1I2IX69_9SPHI 6-pyruvoyltetrahydropterin/6-carboxytetrahydropterin synthase OS=Pedobacter antarcticus OX=34086; GN = SAMN03003324_04023 PE=4 SV=1

SEQ ID NO: 23782 - protein, 137 aa, Pedobacter bauzanensis
  REGION 1..137: note = tr|A0A4V2PXQ5|A0A4V2PXQ5_9SPHI 6-carboxy-5,6,7,8-tetrahydropterin synthase OS=Pedobacter bauzanensis OX=653929 GN=C8N28_1588 PE=3 SV=1
MIYITRRERFSAAHKLARNDWNEDQNLKVFGKCSNANWHGHNYELFVTVKGEVNSETGFLIDLRVLKEIIQEEAIDKLDHKNINLDVDFMQGKMASTEMIAIEIFKRLAPRIENEGAQLHCIKLCETENNFVEYFGN

SEQ ID NO: 23783 - protein, 136 aa, Pedobacter borealis
  REGION 1..136: note = tr|A0A4R8P7S1|A0A4R8P7S1_9SPHI 6-pyruvoyltetrahydropterin/6-carboxytetrahydropterin synthase OS=Pedobacter borealis OX=475254 GN=C8F03_3464; PE = 4 SV=1
MIYITRKASFNAAHKLARTDWDDDRNNEVFGKCANPNWHGHNYWLYVTVKGEVNPETGFLVDLKWLKDVMNDYVVDKVDHKNLNLDVDFMKGKLASTENLAIEIWKQLWGPIEASGAILHCVKIYETENNFVEYFG

SEQ ID NO: 23784 - protein, 117 aa, Pedobacter caeni
  REGION 1..117: note = tr|A0A1M5MUH2|A0A1M5MUH2_9SPHI 6-carboxy-5,6,7,8-tetrahydropterin synthase OS=Pedobacter caeni OX=288992 GN=SAMN04488522_107328 PE=3 SV=1
MIIYKTFSFDSAHYLPLVPIGHKCGGMHGHTYTLKVFISGDPEPHSGWVIDYTDLKNGIRPLIEMLDHKVLNDIPGLENPTSEQLSIWLWNRVKPIFPGLIRIELNETQSSGVIYEG

SEQ ID NO: 23785 - protein, 136 aa, Pedobacter caeni
  REGION 1..136: note = tr|A0A1M5P542|A0A1M5P542_9SPHI 6-carboxy-5,6,7,8-tetrahydropterin synthase OS=Pedobacter caeni OX=288992 GN=SAMN04488522_10913 PE=3 SV=1
MIYITRKASFNAAHKLSRPDWSEDKNTEVYGKCANPNWHGHNYQLYVTVKGEINPETGFLVDLKWLKDITNTYVVDKIDHRNLNLDVDFMKGKLASTENLAIAIWDELLPFIEESGAKLHCIKIYETENNFVEYFG

SEQ ID NO: 23786 - protein, 156 aa, unidentified
  source 1..156: note = Pedobacter chitinilyticus
  REGION 1..156: note = tr|A0A3S3SRE6|A0A3S3SRE6_9SPHI 6-carboxytetrahydropterin synthase OS=Pedobacter chitinilyticus OX=2233776 GN=DPV69_10645 PE=4 SV=1
MQNQMIRVTKEFTFDMAHALFNYDGPCKNIHGHTYRLQVTVSGYANQDPQNVKCGMLIDFGQLKKVVAEHVIDKYDHALVLNEAVPASLRASCYAISEKVHFVSFQPTCENMLLSIKFTLLPILESDGFTLQAVRLYETPTSWAEWRREDQPKSFQ

SEQ ID NO: 23787 - protein, 136 aa, unidentified
  source 1..136: note = Pedobacter chitinilyticus
  REGION 1..136: note = tr|A0A3S3STL3|A0A3S3STL3_9SPHI 6-carboxytetrahydropterin synthase OS=Pedobacter chitinilyticus OX=2233776 GN=DPV69_13565 PE=4 SV=1
MIYITRRESFNAAHKLARPDWSEDENTAVFGKCANPNWHGHNYQLFVTVKGEVNPETGFLVDLKWLKQVINKHVIDKVDHKNLNLDVDFMKGKLASTENLAIAIWDILAPHVGESGAQLHCIKIYETDNNYVEYFG

SEQ ID NO: 23788 - protein, 136 aa, Pedobacter cryoconitis
  REGION 1..136: note = tr|A0A127VIU1|A0A127VIU1_9SPHI 6-pyruvoyl tetrahydrobiopterin synthase OS=Pedobacter cryoconitis; OX = 188932 GN=AY601_4380 PE=4 SV=1
MIYITRKESFNAAHKLARPDWSDDHNLEVFGKCANPNWHGHNYQLFVTVKGEINPETGFLVDLKWMKEIINEHIIDKLDHRNLNLDVDFMKDKLASTENLVIAVWDQLLPHIQQGGAILHCVKIYETENNFVEYFG

SEQ ID NO: 23789 - protein, 136 aa, Pedobacter cryoconitis
  REGION 1..136: note = tr|A0A327RZY0|A0A327RZY0_9SPHI 6-pyruvoyltetrahydropterin/6-carboxytetrahydropterin synthase OS=Pedobacter cryoconitis OX=188932 GN=LY11_04810; PE = 4 SV=1
MIYITRKESFNAAHKLARPDWSDDHNLEVFGKCANPNWHGHNYQLFVTVKGEINPETGFLVDLKWMKEIINEHVIDKLDHRNLNLDVDFMKDKLASTENLVIAVWDQLLPHIQQGGAILHCVKIYETENNFVEYFG

SEQ ID NO: 23790 - protein, 136 aa, Pedobacter duraquae
  REGION 1..136: note = tr|A0A4R6IDL6|A0A4R6IDL6_9SPHI 6-carboxy-5,6,7,8-tetrahydropterin synthase OS=Pedobacter duraquae OX=425511 GN=CLV32_3792 PE=3 SV=1
MIYITRKESFNAAHKLSRPDWSQDKNNEVYGKCANPNWHGHNYQLYVTVKGEVNPETGFLIDLKWLKEIINVNVVDKIDHRNLNLDVDFMEGILASTENLAIAIWNILFPLIEQEGAILHAIKIFETENNSVEYFG

SEQ ID NO: 23791 - protein, 136 aa, Pedobacter ginsengisoli
  REGION 1..136: note = tr|A0A2D1U969|A0A2D1U969_9SPHI 6-carboxy-5,6,7,8-tetrahydropterin synthase OS=Pedobacter ginsengisoli OX=363852 GN=CPT03_17645 PE=3 SV=1
MIYITRKASFNAAHKLSRPDWTEDKNTEVYGKCANPNWHGHNYQLYVTVKGEINPETGFLVDLKWLKDITNTYVVDKIDHKNLNLDVDFMKGKLASTENLAIAIWDQLYALIAESGAHLHSIKIYETENNFVEYFG

SEQ ID NO: 23792 - protein, 136 aa, unidentified; identical to SEQ ID NO: 23779
  source 1..136: note = Pedobacter ginsenosidimutans
  REGION 1..136: note = tr|A0A0T5VN55|A0A0T5VN55_9SPHI 6-pyruvoyl tetrahydrobiopterin synthase OS=Pedobacter ginsenosidimutans OX=687842 GN=ASU31_15700 PE=4 SV=1

SEQ ID NO: 23793 - protein, 137 aa, Pedobacter glucosidilyticus
  REGION 1..137: note = tr|A0A0B8YGD3|A0A0B8YGD3_9SPHI 6-pyruvoyl tetrahydropterin synthase/QueD family protein; OS = Pedobacter glucosidilyticus OX=1122941 GN=PBAC_15820; PE = 4 SV=1
MKQKIAVYRKEHFNAAHRLHNPLWSDEENKKVFGKCNNPSFHGHNYELIVKVIGYTDEQTGYLVDMKILSDIIQEHVVEKFDHKNLNLDVAEFKDLNPTAENIAMVIWNILRAHIDNALDLYVTLFETERNYVEYPA

SEQ ID NO: 23794 - protein, 137 aa, Pedobacter glucosidilyticus
  REGION 1..137: note = tr|A0A0B8YBW2|A0A0B8YBW2_9SPHI 6-carboxy-5,6,7,8-tetrahydropterin synthase OS=Pedobacter glucosidilyticus OX=1122941 GN=queD PE=3 SV=1
MIYITRKEHFNAAHKLYREDWSKEKNEELFGRCANANWHGHNYDLYVTIKGNINPDTGFVIDLKELKDIILVNVIDKLDHRNLNLDVDFMKGKMASTEVLAIEIWKQLAPHITARGAQLHSIKLYETANNYVEYFGD

SEQ ID NO: 23795 - protein, 136 aa, Pedobacter hartonius
  REGION 1..136: note = tr|A0A1H4HHX7|A0A1H4HHX7_9SPHI 6-pyruvoyltetrahydropterin/6-carboxytetrahydropterin synthase OS=Pedobacter hartonius OX=425514; GN = SAMN05443550_11912 PE=4 SV=1
MIYITRKESFNAAHKLARPDWSDDHNLEVYGKCANPNWHGHNYQLFVTVKGEINPETGFLVDLKWLKNMINEHIIDKVDHKNLNLDVDFMKDKLASTENLAIAIWEQLLPHINAGGAQLHSIKIYETENNIIEYLG

SEQ ID NO: 23796 - protein, 91 aa, Pedobacter hartonius
  REGION 1..91: note = tr|A0A1H4EYT5|A0A1H4EYT5_9SPHI PreQ(0) biosynthesis protein QueD OS=Pedobacter hartonius OX=425514; GN = SAMN05443550_106215 PE=4 SV=1
MHGHTYTLKIFISGKPSIYTGWIMDFSDLKDIVKPWIALLDHQVLNNVEGLENPTSENLCLWLWKKIKAEIPNLCRIELNETPDSGVIYEG

SEQ ID NO: 23797 - protein, 137 aa, Pedobacter heparinus
  REGION 1..137: note = tr|C6XWQ2|C6XWQ2_PEDHD 6-carboxy-5,6,7,8-tetrahydropterin synthase OS=Pedobacter heparinus (strain ATCC 13125 / DSM 2366 / CIP 104194 / JCM 7457 / NBRC 12017 / NCIMB9290 / NRRL B-14731 / HIM 762-3); OX = 485917 GN=P
MIYITRKASFNAAHKLSRPDWTEAQNTEVYGKCANPNWHGHNYQLYVTVKGEINPETGFLVDLKWLKDITNTYVVDKIDHKNLNLDVNFMKGKLASTENLAIAIWEELVNLIAESGAQLHSIKIYETENNFVEYFGQ

SEQ ID NO: 23798 - protein, 136 aa, Pedobacter insulae
  REGION 1..136: note = tr|A0A1I2SXM0|A0A1I2SXM0_9SPHI 6-pyruvoyltetrahydropterin/6-carboxytetrahydropterin synthase OS=Pedobacter insulae OX=414048; GN = SAMN04489864_101107 PE=4 SV=1
MIYITRRESFNAAHKLSRSDWSQDKNTEVYGKCANPNWHGHNYQLYVTVKGEVNPETGFLVDLKWLKHLINVHVIDQVDHRNLNLDVDFMKGILASTENLAIAIWNILSPYINESGAQLHCIKIYETENNFVEYFG

SEQ ID NO: 23799 - protein, 136 aa, unidentified
  source 1..136: note = Pedobacter jejuensis
  REGION 1..136: note = tr|A0A3N0BPE9|A0A3N0BPE9_9SPHI 6-carboxytetrahydropterin synthase OS=Pedobacter jejuensis; OX = 1268550 GN=D7004_17735 PE=4 SV=1
MIYITRKASFNAAHKLARPDWDDEKNNAFYGKCANPNWHGHNYWLYVTVKGEVDPETGFLVDLKWLKDVMNTYVVDKVDHKNLNLDVDFMKGILASTENLAIAVWEQLYAPIAESGAILHSVKIYETENNFVEYLG

SEQ ID NO: 23800 - protein, 136 aa, unidentified; identical to SEQ ID NO: 23779
  source 1..136: note = Pedobacter kyonggii
  REGION 1..136: note = tr|A0A4Q9HC69|A0A4Q9HC69_9SPHI 6-carboxytetrahydropterin synthase OS=Pedobacter kyonggii; OX = 1926871 GN=EYS08_13965 PE=4 SV=1

SEQ ID NO: 23801 - protein, 136 aa, unidentified
  source 1..136: note = Pedobacter kyungheensis
  REGION 1..136: note = tr|A0A0C1FIK4|A0A0C1FIK4_9SPHI 6-pyruvoyl tetrahydrobiopterin synthase OS=Pedobacter kyungheensis; OX = 1069985 GN=OC25_15455 PE=4 SV=1
MIYITRKASFNAAHKLARTDWDDDKNSEVYGKCANPNWHGHNYWLYVTVKGEVNPETGFLVDLKWLKDVMNNYVVDKVDHKNLNLDVDFMKGKLASTENLAIEIWKQLWAPIAESGAILHCVKIYETENNYVEYFG

SEQ ID NO: 23802 - protein, 136 aa, unidentified
  source 1..136: note = Pedobacter lusitanus
  REGION 1..136: note = tr|A0A0D0GP23|A0A0D0GP23_9SPHI Contig68, whole genome shotgun sequence OS=Pedobacter lusitanus OX=1503925; GN = TH53_16190 PE=4 SV=1
MIYITRKESFNAAHKLARPDWSDDHNLEVFGKCANPNWHGHNYQLFVTVKGEVNPETGFLVDLKWMKEIINEHIIDKLDHRNLNLDVDFMKDKLASTENLVIAVWDQLLPHIKAGGAELHCVKIYETENNFVEYFG

SEQ ID NO: 23803 - protein, 137 aa, unidentified
  source 1..137: note = Pedobacter luteus
  REGION 1..137: note = tr|A0A1T5DVY3|A0A1T5DVY3_9SPHI 6-carboxy-5,6,7,8-tetrahydropterin synthase OS=Pedobacter luteus OX=572036 GN=SAMN05661099_2647 PE=3 SV=1
MIYITRRERFNAAHKLFREEWSDEKNLETFGKCSNPNWHGHNYELFVTVKGEINPETGFVVDLKELKAIITSYVTSELDHKNINLDVDFMKGKLASTEILAVTIFERLKPYIEEQGAQLHSVKLFETENNSVEYFGS

SEQ ID NO: 23804 - protein, 136 aa, Pedobacter metabolipauper
  REGION 1..136: note = tr|A0A4R6SYH5|A0A4R6SYH5_9SPHI 6-carboxy-5,6,7,8-tetrahydropterin synthase OS=Pedobacter metabolipauper OX=425513 GN=ATK78_1892 PE=3 SV=1
MIFITRKASFNAAHKLSRPDWTEDENTAVYGKCANPNWHGHNYQLYVTVKGEVNPETGFLVDLKWLKDITNTYVVDKIDHRNLNLDVDFMQGKLASTENLAIAIWDELHNLIAESGAALHCIKIYETENNFVEYFG

SEQ ID NO: 23805 - protein, 117 aa, Pedobacter metabolipauper
  REGION 1..117: note = tr|A0A4R6T4B4|A0A4R6T4B4_9SPHI 6-carboxy-5,6,7,8-tetrahydropterin synthase OS=Pedobacter metabolipauper OX=425513 GN=ATK78_0019 PE=3 SV=1
MIIYKTFQFDSAHYLPHVPKGHKCGKMHGHTYMLKIFISGTPELNAGWVLDYKDLKEGINPIINLLDHNTLNEIPGLENPTSENLCIWLWNIIKPIFPGLIKIELNETPTSGVIYEG

SEQ ID NO: 23806 - protein, 136 aa, unidentified
  source 1..136: note = Pedobacter nutrimenti
  REGION 1..136: note = tr|A0A318UKC4|A0A318UKC4_9SPHI 6-carboxy-5,6,7,8-tetrahydropterin synthase OS=Pedobacter nutrimenti OX=1241337 GN=B0O44_102170 PE=3 SV=1
MIYITRKASFNAAHKLSRPDWSEDKNTEVYGKCANPNWHGHNYQLYVTVKGEVNPETGFLVDLKWLKEVVNEYVVEKIDHRNLNLDVDFMKGKLASTENLVIAVWEELLPHIEKEGVQLHSIKIYETENNFVEYFG

SEQ ID NO: 23807 - protein, 117 aa, unidentified
  source 1..117: note = Pedobacter nutrimenti
  REGION 1..117: note = tr|A0A318U9B3|A0A318U9B3_9SPHI 6-carboxy-5,6,7,8-tetrahydropterin synthase OS=Pedobacter nutrimenti OX=1241337 GN=B0O44_107131 PE=3 SV=1
MIIYKCFSFDAAHFLPNVPAGHKCGRMHGHTYHLKVFVSGEIDPESCWFMDFSDLKAIVNPLIKRLDHHTLNEIDGLENPTSESLMVWIWEKLKPLLPALVKLELQETPGSGVIYEG

SEQ ID NO: 23808 - protein, 71 aa, Pedobacter nyackensis
  REGION 1..71: note = tr|A0A1W2FBK9|A0A1W2FBK9_9SPHI 6-pyruvoyl tetrahydropterin synthase OS=Pedobacter nyackensis; OX = 475255 GN=SAMN04488101_1331 PE=4 SV=1
MDYTELKNSIKPFLDILDHKLLNEIPGLENPTSENLSIWLWKIIKPIFPDLVRIELKETPTSGVIYEGQRA

SEQ ID NO: 23809 - protein, 137 aa, Pedobacter nyackensis
  REGION 1..137: note = tr|A0A1W2E4K9|A0A1W2E4K9_9SPHI 6-carboxy-5,6,7,8-tetrahydropterin synthase OS=Pedobacter nyackensis OX=475255 GN=SAMN04488101_11014 PE=3 SV=1
MIYITRKASFNAAHKLSRPDWTEDKNTEVYGKCANPNWHGHNYQLYVTVKGEINPETGFLVDLKWLKDITNTHVVEKIDHKNLNLDVDFMKDKLASTENLAIAIWDQLVDLIAESGAQLHSIKIYETENNFVEYFGH

SEQ ID NO: 23810 - protein, 139 aa, unidentified
  source 1..139: note = Pedobacter psychrophilus
  REGION 1..139: note = tr|A0A179DLK0|A0A179DLK0_9SPHI 6-pyruvoyl tetrahydrobiopterin synthase OS=Pedobacter psychrophilus; OX = 1826909 GN=A5893_00745 PE=4 SV=1
MNQKQKVAVYRKEHFNAAHRLNNPNWSDERNQSVYGKCNNPNYHGHNYDLIVKVSGFVDEEVGYLMDLKILSDLIKEKILDRFDHMNLNLDVEEFKKLNPTAENIAMVIYDQLRSEINTDLDLKITLFETERNYVEYPA

SEQ ID NO: 23811 - protein, 137 aa, unidentified
  source 1..137: note = Pedobacter psychrophilus
  REGION 1..137: note = tr|A0A179DDY4|A0A179DDY4_9SPHI 6-pyruvoyl tetrahydrobiopterin synthase OS=Pedobacter psychrophilus; OX = 1826909 GN=A5893_11280 PE=4 SV=1
MIYVTRKEHFNAAHKLYREEWSQEKNDEVFGRCANANWHGHNYDLFVTVKGEINHETGFVIDLKDLKSLIIKYITDKLDHKNLNLDVDFMKGKMASTEILAIEIWKQLAPHIEEKGAKLHCIKLYETASNFVEYFGD

SEQ ID NO: 23812 - protein, 136 aa, unidentified
  source 1..136: note = Pedobacter psychrotolerans
  REGION 1..136: note = tr|A0A4R2HFJ1|A0A4R2HFJ1_9SPHI 6-pyruvoyltetrahydropterin/6-carboxytetrahydropterin synthase OS=Pedobacter psychrotolerans OX=1843235; GN = EV200_103187 PE=4 SV=1
MIYITRKASFNAAHKLARTDWDDDKNNEVYGKCANPNWHGHNYWLYVTVKGEVNPETGFLVDLKWLKDVMNVYVVDKVDHKNLNLDVDFMKGKLASTENLAIEIWNQLLTPITEAGALLHSVKIYETENNYVEYFG

SEQ ID NO: 23813 - protein, 136 aa, Pedobacter rhizosphaerae
  REGION 1..136: note = tr|A0A1H9J7Z3|A0A1H9J7Z3_9SPHI 6-carboxy-5,6,7,8-tetrahydropterin synthase OS=Pedobacter rhizosphaerae OX=390241 GN=SAMN04488023_101251 PE=3 SV=1
MIYITRKASFNAAHKLSRTDWDQDQNDAVYGKCANPNWHGHNYWLYVTVKGEVNPETGFLVDLKWLKDVMNTYVVDKVDHKNLNLDVDFMKGKLASTENLAIEIWNQLIAPIAESGAILHSVKIYETENNYVEYFG

SEQ ID NO: 23814 - protein, 118 aa, unidentified
  source 1..118: note = Pedobacter ruber
  REGION 1..118: note = tr|A0A1G9THK9|A0A1G9THK9_9SPHI 6-carboxy-5,6,7,8-tetrahydropterin synthase OS=Pedobacter ruber OX=990371 GN=SAMN05421813_11325 PE=3 SV=1
MIIYKQFSFDSAHFLPAVPLGHKCGNMHGHTYMLIVFIEGQPDEKSGWIIDYGDLKKKIQPVIELLDHHLLNDIPGLENPTSENLSIWLWNKIKPLVMGLKKIELKETPSSGVIYEGF

SEQ ID NO: 23815 - protein, 136 aa, unidentified
  source 1..136: note = Pedobacter ruber
  REGION 1..136: note = tr|A0A1G9PZB3|A0A1G9PZB3_9SPHI 6-pyruvoyltetrahydropterin/6-carboxytetrahydropterin synthase OS=Pedobacter ruber OX=990371; GN = SAMN05421813_10551 PE=4 SV=1
MIYITRRERFNAAHKLYREEWSDEQNLEIFGKCSNPNWHGHNYELFITVKGEINPETGFVIDLKDLKRIITVYVTDVLDHKNINLDVNFMKGKMASTEVLAVTIFDVLKPHIDGQGAILHSVKLFETENNFVEYFG

SEQ ID NO: 23816 - protein, 136 aa, Pedobacter soli; identical to SEQ ID NO: 23801
  REGION 1..136: note = tr|A0A1G6QWN4|A0A1G6QWN4_9SPHI 6-pyruvoyltetrahydropterin/6-carboxytetrahydropterin synthase OS=Pedobacter soli OX=390242; GN = SAMN04488024_103479 PE=4 SV=1

SEQ ID NO: 23817 - protein, 136 aa, Pedobacter sp.
  REGION 1..136: note = tr|A0A0Q5UCX2|A0A0Q5UCX2_9SPHI 6-pyruvoyl tetrahydrobiopterin synthase OS=Pedobacter sp. Leaf194; OX = 1736297 GN=ASG14_01520 PE=4 SV=1
MIYITRKASFNAAHKLARTDWDDEKNAEVYGKCANPNWHGHNYWLYVTVKGEVNPETGFLVDLKWLKDVMNTCVVDKVDHKNLNLDVDFMKGKLASTENLAIAVWDQLVNPIAEAGAILHAVKIYETENNYVEYFG

SEQ ID NO: 23818 - protein, 117 aa, Pedobacter sp.
  REGION 1..117: note = tr|A6EFM8|A6EFM8_9SPHI 6-carboxy-5,6,7,8-tetrahydropterin synthase OS=Pedobacter sp. BAL39 OX=391596 GN=PBAL39_03559 PE=3 SV=1
MIIYKKFSFDSAHYLPLVPASHKCGRMHGHTYQLTVYLSGTPDPHSGWVADFGDLKRGIQPFVDLLDHRLLNDIPGLENPTSENLSVWLWQKIKPVFPALAKIELSETPGTGVIYEG

SEQ ID NO: 23819 - protein, 117 aa, Pedobacter steynii
  REGION 1..117: note = tr|A0A1H0MLE1|A0A1H0MLE1_9SPHI 6-carboxy-5,6,7,8-tetrahydropterin synthase OS=Pedobacter steynii OX=430522 GN=SAMN05421820_1276 PE=3 SV=1
MIIYKTFSFDSAHYLPRVPAGHKCGGMHGHTYTLKVFISGVPEPHSGWILDYTDLKKGISPLIDMLDHKTLNDIPGLENPTSEQVSIWLWDKIKPVFPGLIRIELNETPSSGVIYEG

SEQ ID NO: 23820 - protein, 117 aa, Pedobacter steynii
  REGION 1..117: note = tr|A0A1D7QD10|A0A1D7QD10_9SPHI 6-carboxy-5,6,7,8-tetrahydropterin synthase OS=Pedobacter steynii OX=430522 GN=BFS30_04485 PE=3 SV=1
MIIYKTFSFDAAHYLPHVPAGHKCGRMHGHTYSLKVFITGDPEPHSGWVMDYTDLKNGISPLIEILDHKVLNDIPGLENPTSEQLSIWLWNKIKPVFPGLSRIELNETPSSGVIYEG

SEQ ID NO: 23821 - protein, 136 aa, Pedobacter suwonensis; identical to SEQ ID NO: 23783
  REGION 1..136: note = tr|A0A1I0TCU1|A0A1I0TCU1_9SPHI 6-pyruvoyltetrahydropterin/6-carboxytetrahydropterin synthase OS=Pedobacter suwonensis OX=332999; GN = SAMN04488511_108125 PE=4 SV=1

SEQ ID NO: 23822 - protein, 136 aa, Pedobacter terrae
  REGION 1..136: note = tr|A0A1G7XY52|A0A1G7XY52_9SPHI 6-pyruvoyltetrahydropterin/6-carboxytetrahydropterin synthase OS=Pedobacter terrae OX=405671; GN = SAMN05421827_112130 PE=4 SV=1
MIYITRKASFNAAHKLARTDWDDDKNNEVYGKCANPNWHGHNYWLYVTVKGEVNPETGFLVDLKWLKDVMNDYVVDKVDHKNLNLDVDFMKGKLASTENLAIEIWKQLWAPIAESGAILHCVKIYETENNFVEYFG

SEQ ID NO: 23823 - protein, 136 aa, Pedobacter terrae
  REGION 1..136: note = tr|A0A561GJ16|A0A561GJ16_9SPHI 6-pyruvoyltetrahydropterin/6-carboxytetrahydropterin synthase OS=Pedobacter terrae OX=405671 GN=FHW25_103239; PE = 4 SV=1
MIYITRKASFNAAHKLARTDWNDDKNNEVYGKCANPNWHGHNYWLYVTVKGEVNPETGFLVDLKWLKDVMNDYVVDKVDHKNLNLDVDFMKGKLASTENLAIEIWKQLWTPIAESGAVLHCVKIYETENNFVEYFG

SEQ ID NO: 23824 - protein, 118 aa, unidentified
  source 1..118: note = Pedobacter tournemirensis
  REGION 1..118: note = tr|A0A4Q0MD15|A0A4Q0MD15_9SPHI 6-carboxy-5,6,7,8-tetrahydropterin synthase OS=Pedobacter tournemirensis OX=699437 GN=queD PE=3 SV=1
MIIYKQFFFDSAHFLPKVPKGHKCGDLHGHTYKLTVFFEGDLDPEQGWLIDFNEIKKIVDPVVSSIDHKLLNDIPGLENPTSELLSVWLWNKIKPELPLLIRIELNETPTSGVVYEGA

SEQ ID NO: 23825 - protein, 141 aa, unidentified
  source 1..141: note = Pedobacter tournemirensis
  REGION 1..141: note = tr|A0A4Q0MED9|A0A4Q0MED9_9SPHI 6-carboxytetrahydropterin synthase OS=Pedobacter tournemirensis OX=699437 GN=BDE36_0456 PE=4 SV=1
MIYITRREQFNAAHKLYREEWSDEKNLEVFGKCSNPNWHGHNYELYVTVKGEINPETGYLIDLKTLKDLIRTCITDKLDHKNVNLDVDFMRGKMASTEVMTVEIFNQLKGPLEQRSVTLYKVKLVETENNFVEYYGEEPAL

SEQ ID NO: 23826 - protein, 136 aa, Pedobacter westerhofensis
  REGION 1..136: note = tr|A0A521CFG9|A0A521CFG9_9SPHI 6-carboxy-5,6,7,8-tetrahydropterin synthase OS=Pedobacter westerhofensis OX=425512 GN=SAMN06265348_103499 PE=3 SV=1
MIYITRKESFNAAHKLARPDWSEDHNLEVYGKCANPNWHGHNYQLFVTVKGEINPETGFLVDLKWLKMIINEHIIDKLDHRNLNLDVDFMKDKLASTENLAIAIWEQLLPHITAGGAQLHSIKIYETENNFVEYFG

SEQ ID NO: 23827 - protein, 178 aa, unidentified
  source 1..178: note = Pedobacter xixiisoli
  REGION 1..178: note = tr|A0A286AEG2|A0A286AEG2_9SPHI 6-pyruvoyltetrahydropterin/6-carboxytetrahydropterin synthase OS=Pedobacter xixiisoli OX=1476464; GN = SAMN06297358_3981 PE=4 SV=1
METDNCFSKKNSILNFFVSVYLRLSNLCLSTLYCIFAFYFEKMIYITRRESFNAAHKLARPDWTEDENTAVFGKCANPNWHGHNYQLYVTVKGEVNPETGFLVDLKWLKQVINTHVIDKVDHRNLNLDVDFMKGKLASTENLAIAVWDILKPHVNESGAELHCIKIYETDNNYVEYFG

SEQ ID NO: 23828 - protein, 156 aa, unidentified
  source 1..156: note = Pedobacter xixiisoli
  REGION 1..156: note = tr|A0A286AD19|A0A286AD19_9SPHI 6-pyruvoyltetrahydropterin/6-carboxytetrahydropterin synthase OS=Pedobacter xixiisoli OX=1476464; GN = SAMN06297358_3452 PE=4 SV=1
MQNQMIRVTKEFTFDMAHALFNYDGPCKNIHGHTYRLQVTVSGYANQDPQNVKCGMLIDFGQLKKIVTEKIIDKYDHALVLNEAVPASLRASCYAISEKVHFVAFQPTCENLLLDMKFKLQTAFEHDGFILQAIRLYETPTSWAEWCKEDQPKAFQ

SEQ ID NO: 23829 - protein, 136 aa, unidentified
  source 1..136: note = Pedobacter yonginense
  REGION 1..136: note = tr|A0A317EPK6|A0A317EPK6_9SPHI 6-pyruvoyl tetrahydrobiopterin synthase OS=Pedobacter yonginense; OX = 651869 GN=DHW03_09455 PE=4 SV=1
MIYITRKASFNAAHKLARTDWDDEKNAEVYGKCANPNWHGHNYWLYVTVKGEINPETGFLVDLKWLKDVMNNYVVDLVDHKNLNLDVDFMKGQLASTENLAIAIWNQLLAPIAESGTILHSVKLYETENNYVEYFG

SEQ ID NO: 23830 - protein, 136 aa, unidentified
  source 1..136: note = Pedobacter yulinensis
  REGION 1..136: note = tr|A0A2T3HNG6|A0A2T3HNG6_9SPHI 6-pyruvoyl tetrahydrobiopterin synthase OS=Pedobacter yulinensis; OX = 2126353 GN=C7T94_04430 PE=4 SV=1
MIYITRKASFNAAHKLARPDWDDETNESVYGKCANKNWHGHNYELFVTVKGELNPETGFLIDLKLLKDIMNVYVVDKIDHKNLNMDVDFMQGKLTSTENLAMAVWNELLAPIAAQGATLHCVKIYETDNNFVEYFG

SEQ ID NO: 23831 - protein, 120 aa, unidentified
  source 1..120: note = Pedosphaera parvula
  REGION 1..120: note = tr|B9XN00|B9XN00_PEDPL 6-carboxy-5,6,7,8-tetrahydropterin synthase OS=Pedosphaera parvula (strain Ellin514) OX=320771 GN=Cflav_PD1969 PE=3; SV = 1
MKMELRKTFQFEAAHLLPGLPKTHKCRRLHGHSFKAEIVVSGEVDPKLGWVMDYAEISAAFKPIWEKLDHHYLNEIPGLENPTSEILAIWIWKKLKPKLPQLSEVVVAETCTARCVYRGE

SEQ ID NO: 23832 - protein, 118 aa, unidentified
  source 1..118: note = Pedosphaera sp.
  REGION 1..118: note = tr|A0A2A2QYC6|A0A2A2QYC6_9BACT 6-carboxy-5,6,7,8-tetrahydropterin synthase OS=Pedosphaera sp. Tous-C6FEB OX=1982324 GN=queD PE=3 SV=1
MELRKSFQFEAAHLLPLLPEAHKCRRLHGHSFKVELVIAGECDPKLGWLMDYADIKAAFKPLWEQLDHRYLNEVPGLENPTSENVAVWIWERLKPTLPLLTEVVVAETCTAQAVYRGS

SEQ ID NO: 23833 - protein, 118 aa, unidentified
  source 1..118: note = Pedosphaera sp.
  REGION 1..118: note = tr|A0A2D7BAI6|A0A2D7BAI6_9BACT 6-carboxy-5,6,7,8-tetrahydropterin synthase OS=Pedosphaera sp. OX=2024890 GN=queD PE=3 SV=1
MELRKTFQFEAAHLLPHLPKDHKCRRLHGHSFSAEIVVEGPCDPALGWVMDYADISKAFRPLWEQLDHYYLNEVEGLANPTSENIAIWIWKRLSPQLPMLTEVVVAETCTARCVYRGE

SEQ ID NO: 23834 - protein, 117 aa, Pelagibaca sp.
  REGION 1..117: note = tr|A0A2D6BA92|A0A2D6BA92_9RHOB 6-carboxy-5,6,7,8-tetrahydropterin synthase OS=Pelagibaca sp. OX=1979400 GN=queD PE=3 SV=1
MFRIRKEFHFSASHQLAHLPADHQCARLHGHNYIVVVELAAETLNEDGFVRDYHDLKPLKSYIDDTFDHRHLNDVLDMPSTAENMAKHFHDWCKARWPETSAVLVSETPKTWAEYRP

SEQ ID NO: 23835 - protein, 120 aa, unidentified
  source 1..120: note = Pelagibacteraceae bacterium
  REGION 1..120: note = tr|A0A1Z9SQS9|A0A1Z9SQS9_9PROT 6-carboxy-5,6,7,8-tetrahydropterin synthase; OS = Pelagibacteraceae bacterium TMED258 OX=1986820; GN = CBE18_01735 PE=3 SV=1
  VARIANT 66: note = Xaa can be any naturally occurring amino acid
MFELTRKYEFHAARKLTLVDIDHPCYQLHGHTFSVVVELSGDIDPSKGWVVDFYDIDRIYKDEIHXLLDHKYLNDIKELSNPTTEHIAKWIWNKIQPKLSGLTGVTVSEGPSYSCTYRGA

SEQ ID NO: 23836 - protein, 123 aa, unidentified
  source 1..123: note = Pelagibacteraceae bacterium
  REGION 1..123: note = tr|A0A2E5LFP1|A0A2E5LFP1_9PROT 6-carboxy-5,6,7,8-tetrahydropterin synthase; OS = Pelagibacteraceae bacterium OX=2026775 GN=CMI97_01740; PE = 3 SV=1
MTDIFEITKQFTFEAAHFFPNMPKGHIYRKIHGHSFVVEVTFYGKKNKNNQWVTDFDKVSESLKEIKKKLDHKCINDIKEIGLPTLENISSWIGKQLKKKYSNVYSIKLSRPSCGEFCLYKIK

SEQ ID NO: 23837 - protein, 123 aa, unidentified
  source 1..123: note = Pelagibacterales bacterium
  REGION 1..123: note = tr|A0A2E1BX09|A0A2E1BX09_9PROT 6-carboxy-5,6,7,8-tetrahydropterin synthase; OS = Pelagibacterales bacterium OX=2026776 GN=CMJ07_09880; PE = 3 SV=1
  VARIANT 19: note = Xaa can be any naturally occurring amino acid
  VARIANT 44: note = Xaa can be any naturally occurring amino acid
  VARIANT 46: note = Xaa can be any naturally occurring amino acid
  VARIANT 50: note = Xaa can be any naturally occurring amino acid
  VARIANT 54: note = Xaa can be any naturally occurring amino acid
MIIYRDFTFDAAHVLEGYXETHPYGRVHGHSFRARVWVKGEPEXEXSMIXDLGXIAKECELVKNLLDHNTLNNVDGLYNPTLEGLCVFIWNKLIIKISNLNKIEVHRDQSGEGCIYYGPENNE

SEQ ID NO: 23838 - protein, 121 aa, unidentified
  source 1..121: note = Pelagibacterales bacterium
  REGION 1..121: note = tr|A0A2D7ALH7|A0A2D7ALH7_9PROT 6-carboxy-5,6,7,8-tetrahydropterin synthase; OS = Pelagibacterales bacterium OX=2026776 GN=CMJ06_00525; PE = 3 SV=1
MKKIISKNFYFEAAHKLESSVNEKNNNVHGHSYFVEIAILDLNSNIEKTGYILDFNLFNLEIKNIKNCLDHSYLNDITGLENPTLENIGVYIYKKLKERKLNVCRIVVKRKSCGESFYLEI

SEQ ID NO: 23839 - protein, 119 aa, Pelagibacterium luteolum
  REGION 1..119: note = tr|A0A1G7W264|A0A1G7W264_9RHIZ 6-carboxy-5,6,7,8-tetrahydropterin synthase; OS = Pelagibacterium luteolum OX=440168; GN = SAMN04487974_105167 PE=3 SV=1
MTYRITKEFHFSASHQLVSLPSDHQCARLHGHNYIVEVELKADELNEHGFVRDYQDLSVLKHYIDTAFDHRHLNDVLGHGRVTAECLAKHFFDWCKTRLPEVSAVRVSETAKTWAEYRP

SEQ ID NO: 23840 - protein, 126 aa, Pelagibacterium sp.
  REGION 1..126: note = tr|A0A2E7FVT7|A0A2E7FVT7_9RHIZ 6-carboxy-5,6,7,8-tetrahydropterin synthase; OS = Pelagibacterium sp. OX=1967288 GN=queD PE=3 SV=1
MSATYTLKILADFASAHTLRDYPGDCRRMHGHNWKLEVEVTANALNQHGMGMDFKTIKTATRELAKTLDHRYLNDIPPFDEINPTAENIAQFFYQRLSDTLNTDTARVSGVTVWETDRACVKYSED

SEQ ID NO: 23841 - protein, 117 aa, unidentified
  source 1..117: note = Pelagibaculum spongiae
  REGION 1..117: note = tr|A0A2V1GV22|A0A2V1GV22_9GAMM 6-carboxy-5,6,7,8-tetrahydropterin synthase; OS = Pelagibaculum spongiae OX=2080658 GN=queD PE=3 SV=1
MEIYKDFTFEAAHKLPHVPDGHQCGRLHGHSFQVRIVVEGEPDPKTGWIIDFAEIKATFKPIWSQLDHYYLNDIPGLENPTSEVLCKWIWQQLKPQMPLLSRIEIKETCTSGCIYRG

SEQ ID NO: 23842 - protein, 118 aa, unidentified
  source 1..118: note = Pelagicola litorisediminis
  REGION 1..118: note = tr|A0A1Y5RDR2|A0A1Y5RDR2_9RHOB 6-carboxy-5,6,7,8-tetrahydropterin synthase OS=Pelagicola litorisediminis OX=1312363 GN=queD PE=3 SV=1
MYRISKEFHFSASHQLKGLPEDHQCARLHGHNYVVVIELQSEALNANGFVRDYLDLAALKRYIDETLDHRHLNDVLGDDRVTAEHLARHFYDWCKARWSEVSAAKVSETPKTWAEYRP

SEQ ID NO: 23843 - protein, 118 aa, Pelagicola sp.
  REGION 1..118: note = tr|A0A2U2CUN8|A0A2U2CUN8_9RHOB 6-carboxy-5,6,7,8-tetrahydropterin synthase OS=Pelagicola sp. LXJ1103 OX=2175247 GN=queD PE=3 SV=1
MYRITKEFHFSASHQLFGLPEEHQCARLHGHNYIVVIELASPELNDHGFIRDYLDLAPLKRYIDDTFDHRHLNDVLGDDGVTAERMAKHFYDWCAAQWPETAAVKISETPKTWAEYRP

SEQ ID NO: 23844 - protein, 118 aa, unidentified
  source 1..118: note = Pelagivirga sediminicola
  REGION 1..118: note = tr|A0A2T7G7Q3|A0A2T7G7Q3_9RHOB 6-carboxy-5,6,7,8-tetrahydropterin synthase OS=Pelagivirga sediminicola OX=2170575 GN=queD PE=3 SV=1
MYRITKEFHFSASHQLFGLPEDHQCARLHGHNYVVVVELASEALNAHGFVRDYLELAPLKQYIDDELDHRHLNDVLGDDCVTAERMAKHLYDWCAARWAETAAVKISETPKTWAEYRP

SEQ ID NO: 23845 - protein, 142 aa, unidentified
  source 1..142: note = Pelistega indica
  REGION 1..142: note = tr|V8FWS3|V8FWS3_9BURK 6-carboxy-5,6,7,8-tetrahydropterin synthase OS=Pelistega indica OX=1414851 GN=V757_10265 PE=3 SV=1
MKVVKIFTFDSSHLLDGHDGKCKNLHGHTYKLEVEVSGELIESGPKEGMVLDFGDLKKIVQREIIDKMDHAFLYNRLNERERSIAQMLEGWSMKTYPLEQRTTAEVMSKHIFHVLKAHQLPVTRVRLWETPTSYSEYEPNVG

SEQ ID NO: 23846 - protein, 122 aa, Pelobacter acetylenicus
  REGION 1..122: note = tr|A0A1L3GIW7|A0A1L3GIW7_PELAE 6-carboxy-5,6,7,8-tetrahydropterin synthase OS=Pelobacter acetylenicus OX=29542 GN=A7E75_13030 PE=3 SV=1
MYRLMISTYFAAAHNLMHYQGDCENLHGHNWKVEVTVATRQLDKSGLGIDFKVLKKETKRILGLLDHKYLNELPFFKDISPSSENIARFVFEELQQVFNEAVVIESVCIWESENACASYALQ

SEQ ID NO: 23847 - protein, 122 aa, Pelobacter carbinolicus
  REGION 1..122: note = tr|Q3A420|Q3A420_PELCD 6-carboxy-5,6,7,8-tetrahydropterin synthase OS=Pelobacter carbinolicus (strain DSM 2380 / NBRC 103641 / GraBd1); OX = 338963 GN=queD PE=3 SV=1
MYRLMICTHFAAAHNLMNYQGDCENLHGHNWKVEVTVATRELDKAGLGVDFKILKKETNRILDLLDHKYLNDLPFFKGISPSSENIARFVFEELSKVFQESVVVENVRIWESDNACASYSLD

SEQ ID NO: 23848 - protein, 122 aa, Pelobacter propionicus
  REGION 1..122: note = tr|A1APX8|A1APX8_PELPD 6-carboxy-5,6,7,8-tetrahydropterin synthase OS=Pelobacter propionicus (strain DSM 2379 / NBRC 103807 / OttBd1); OX = 338966 GN=Ppro_1786 PE=3 SV= 1
MYKLTIRTSFAAAHNLVNYQGDCENLHGHNWKVDVAVIARQLDKAGLGIDFKVLKREAGVVINELDHKYLNDNPAFAGISPSSEHISRFLFERLSEHLNSDVIKVESVTVWESDNASACYYE

SEQ ID NO: 23849 - protein, 164 aa, Pelobacter sp.
  REGION 1..164: note = tr|A0A1L3GPI6|A0A1L3GPI6_9DELT Uncharacterized protein OS=Pelobacter sp. SFB93 OX=1842532 GN=A7E78_06910; PE = 4 SV=1
MSDDKYTSIVNLDFQYAHRFMNWPREAKHLHGHSGLLTIELEDTVDPVTGFAHACKDGFKKAWEICDHFHHATLFQEGDPLLDAVLAVYKKEGINNDPENCVPLKKIDHALAWSYPEYRIVVTKKVSTCENLCELFYELLKNKMPIKKITFRSSSMNAASKEFK

SEQ ID NO: 23850 - protein, 123 aa, Pelobacter sp.
  REGION 1..123: note = tr|A0A1L3GLE5|A0A1L3GLE5_9DELT 6-carboxy-5,6,7,8-tetrahydropterin synthase OS=Pelobacter sp. SFB93 OX=1842532 GN=A7E78_02175 PE=3 SV=1
MYYLTIHTQFAAAHNLIHYQGDCENLHGHNWKVEVTVTAKELDKAGLGIDFKVLKRETNKQLDLLDHKYLNDLPAFRESSPSSENIARFLYEQLQGVLNDGNVAVDKVTVWESDYACASYVAD

SEQ ID NO: 23851 - protein, 137 aa, unidentified
  source 1..137: note = Pelobium manganitolerans
  REGION 1..137: note = tr|A0A419SA36|A0A419SA36_9SPHI 6-carboxy-5,6,7,8-tetrahydropterin synthase OS=Pelobium manganitolerans OX=1842495 GN=BCY91_14440 PE=3 SV=1
MIYITRKEHFNAAHKLYREDWTFEKNEEVFGRCANTNWHGHNYDLFVTVKGQINEDTGFVIDLKDLKKLIVEHVVDKLDHKNLNIDVDFMRGKMASTEVLAVEIWKQLASKIKEKGAALHCVKLYETANNYVEYFGE

SEQ ID NO: 23852 - protein, 137 aa, unidentified
  source 1..137: note = Pelobium manganitolerans
  REGION 1..137: note = tr|A0A419S8V0|A0A419S8V0_9SPHI 6-pyruvoyl tetrahydrobiopterin synthase OS=Pelobium manganitolerans; OX = 1842495 GN=BCY91_15625 PE=4 SV=1
MKQKVAVFRKEHFNAAHRLHQPNWSDEKNQAFFGQCNNPNYHGHNYDLIVKLTGYVDEESGYLYDMKLLSALLHKKVIDKFDHRNLNLDTQEFKSLNPTAENIAMVIYDLLRPEIPQDLDLKITLYETERNFVEYPA

SEQ ID NO: 23853 - protein, 162 aa, unidentified
  source 1..162: note = Pelodictyon luteolum
  REGION 1..162: note = tr|Q3B4V1|Q3B4V1_PELLD 6-pyruvoyltetrahydropterin synthase OS=Pelodictyon luteolum (strain DSM 273 / 2530); OX = 319225 GN=Plut_0755 PE=4 SV=1
MKQKKTPLSSPPAAPPPAGQPRKVYVTRTIEFNAAHRLFNPKFSEEMNTRVYGKCANKYGHGHNYQLEITLGGTVDPETGYLFDLKELKKILEEEVTARFDHRHLNHDVPELEGLVPTTETLAVLIWDILEERIAAIDNREISLQAVKLHETGKNSVSYLGE

SEQ ID NO: 23854 - protein, 141 aa, unidentified
  source 1..141: note = Pelodictyon luteolum
  REGION 1..141: note = tr|A0A165LFE4|A0A165LFE4_PELLU 6-pyruvoyl tetrahydropterin synthase OS=Pelodictyon luteolum OX=1100; GN = A3K90_06980 PE=4 SV=1
MQISRKIEIDYGHTLPNHFSFCNQLHGHRGVVVATVEGPVVVRSGDSEEGMVMDFRFLKEIMVEHIHNRLDHGFAVWREDHEDLEFILKRNTRVLVTDDPPTAEYLAKWAFNEIRTHLPEGISLHNVRWYETPNNWADYDG

SEQ ID NO: 23855 - protein, 143 aa, unidentified
  source 1..143: note = Pelodictyon phaeoclathratiforme
  REGION 1..143: note = tr|B4SF76|B4SF76_PELPB Uncharacterized protein; OS = Pelodictyon phaeoclathratiforme (strain DSM 5477 / BU-1) OX=324925 GN=Ppha_0936 PE=4 SV=1
MMRISRKIEIDYGHTLPNSFSFCNQLHGHRGVVVATVEGNLIERKGDGEEGMVMDFKFLKDILIEHIHDKLDHGFAVWKEDHEDLDFIVKRNSRVLITDEPPTAECLAKWAFNQIQPHLPDGVTLKQLRWYETPNNWADFDGR

SEQ ID NO: 23856 - protein, 149 aa, unidentified
  source 1..149: note = Pelodictyon phaeoclathratiforme
  REGION 1..149: note = tr|B4SBX7|B4SBX7_PELPB 6-carboxy-5,6,7,8-tetrahydropterin synthase OS=Pelodictyon phaeoclathratiforme (strain DSM 5477 / BU-1) OX=324925; GN = Ppha_1857 PE=3 SV=1
MNDLLRKPRKVYVSRKIEFNAAHRLFNPLFTEQENLELYGKCSNTFGHGHNYLLDVTISGIANQETGFLFDLKELKIILEEEIIARFDHKHLNHDVPELQECVPTTEVLAVLIWDILEKRLHNINNRELSLHEVTIYETGKNAVRYLGE

SEQ ID NO: 23857 - protein, 364 aa, Pelomonas puraquae
  REGION 1..364: note = tr|A0A254MXL2|A0A254MXL2_9BURK 6-pyruvoyl tetrahydropterin synthase OS=Pelomonas puraquae OX=431059; GN = CDO81_26870 PE=4 SV=1
MSNAAYTVASCRLESARRVSVLPRDHKCRHVHGHSFLISVFAEVPVGWAPFPGGEVSELQRRLEGCVAPLNYQLLNEFLEQPTDENIARWVRQRLDVPGIDRVAVQSTANQGVDLDAQGHAHVWRRYRFQAAHQLPNVPLGHKCGRLHGHGFEVIVHADQDVGERDLSIDYDHLDAIWAPFHYELNYQYLNEIEGLHNPTSEVISAWLWRRLKLALPELSWVTVFETGSCGANFDGTQYRIWKEFTLDSAVQYRRAPADVPQARIHGHTYTLRLHLSAPLDAMMGWTVDFGDVKAIFDPIFKSLDHHPLHQLTGILDCDTASLAAWIQNQASKELPQLVRVDLYETEGSGSIATVDQAGPALPV

SEQ ID NO: 23858 - protein, 370 aa, Pelomonas puraquae
  REGION 1..370: note = tr|A0A254NCV6|A0A254NCV6_9BURK 6-pyruvoyl tetrahydropterin synthase OS=Pelomonas puraquae OX=431059; GN = CDO81_17010 PE=4 SV=1
MSLSILHCASAGFESACRIPALPAHHRSHGLHGHSYFATVRSALPSGWAASVGSFAGGEVAALRERMGRTVAPLDHALLNDHLSEPTDENLARWVRRHLAADVPGIVQVGVQSTTHSGVDLDGAGQAHVWRRYRFQAAHQLPNVPAGHQCGRMHGHGFEVILHANADLGERDLAIDYDHLDEVWAPLHFELNYRCLNDIPGLANPTSENISAWLWQRLKPVLPELSWVTVYETGSSGANFNGQSYRIWKEMTLDSAVRMQQAPAGHALAGIHGHTFTLRLHLAAPLDQVMGWTVDFGDVKQLFNPIFKRLDHHPLYEIADLPDGDAASVAAWVLREGGAVLPQIDRVDLYETRGCGAIVSRADSEELIPV

SEQ ID NO: 23859 - protein, 364 aa, Pelomonas saccharophila
  REGION 1..364: note = tr|A0A4R3VDR9|A0A4R3VDR9_PELSC 6-pyruvoyltetrahydropterin/6-carboxytetrahydropterin synthase OS=Pelomonas saccharophila OX=304 GN=EV671_10074; PE = 4 SV=1
MSLSVLHCASAGFESACRIPALPASHRSHGLHGHSYFATVRSALPAGWAAFPGGEVEALRARMADTVAPLDHALLNDHLAEPTDENLARWVRSRLAVPGIAQVGVQSTPHSGVDLDGAGHAHVWRRYRFQAAHQLPHVPAGHQCGRMHGHGFEVILHANADLGERDLSIDYDHLDEVWAPLHFELNYRCLNDIPGLQNPTSENISAWLWQRLKPELPELSWVTVYETGSSGANFNGQSYRIWKEMTLDSAVRMRHAPAGHPLAGIHGHTFTLRLHLAAPLDQVMGWTVDFGDVKRLFNPIFKRLDHHPLFEIANLPDGDAASLAAWVLREGGGVLPQIDRVDLYETRGSGAIVSRADSEELIPV

SEQ ID NO: 23860 - protein, 364 aa, Pelomonas sp.
  REGION 1..364: note = tr|A0A397RXB9|A0A397RXB9_9BURK 6-pyruvoyltetrahydropterin/6-carboxytetrahydropterin synthase OS=Pelomonas sp. BT06 OX=2135721 GN=C8K28_0794; PE = 4 SV=1
MSLSVLHCASAGFESACRIPALPASHRSHGLHGHSYFATVRTALPAGWAAFPGGEVEALRARMADTVAPLDHALLNDHLTEPTDENLARWVRSRLEVPGIVQVGVQSTTHSGVDLDNAGHAHVWRRYRFQAAHQLPNVPAGHQCGRMHGHGFEVILHANADLGERDLSIDYDHLDEVWAPLHFELNYRCLNDIAGLQNPTSENISAWLWQRLKPELPELSWVTVYETGSSGANFNGQNYRIWKEMTLDSAVRMQQAPAGHPLAGIHGHTFTLRLHLAAPLDQVMGWTVDFGDVKTLFNPIFKRLDHHPLFEIANLPDGDAASIAAWVLREGGGVLPQIDRVDLYETRGSGAIVSRADSEELIPV

SEQ ID NO: 23861 - protein, 115 aa, Pelomonas sp.
  REGION 1..115: note = tr|A0A2R7SBY3|A0A2R7SBY3_9BURK 6-pyruvoyl tetrahydropterin synthase (Fragment) OS=Pelomonas sp. HMWF004 OX=2056841 GN=DBR42_19180 PE=4 SV=1
AVRLQHAPAGHALAGIHGHTFTLRLHLAAPLDEVMGWTVDFGDVKALFNPIFKALDHHPLYEIAGLPDGDAASIAAWVLREGSGVLPSLDRVDLYETRGSGAIVSRADSEELIPV

SEQ ID NO: 23862 - protein, 125 aa, Pelosinus fermentans
  REGION 1..125: note = tr|I8RJC1|I8RJC1_9FIRM 6-carboxy-5,6,7,8-tetrahydropterin synthase OS=Pelosinus fermentans B4 OX=1149862 GN=FB4_3434 PE=3 SV=1
MFELTIAVNFEAAHCIRNYPGKCNRLHGHNWKVEVNIYGSQLNELGMLVDFVDLKAAINGIMVNLDHYYLNEIEPFCRINPTAENLAKYIYEELAKTPIFNENVKLRSIRIWESSNSAAAYSQEA

SEQ ID NO: 23863 - protein, 125 aa, Pelosinus fermentans
  REGION 1..125: note = tr|I8TVS2|I8TVS2_9FIRM 6-carboxy-5,6,7,8-tetrahydropterin synthase OS=Pelosinus fermentans JBW45 OX=1192197 GN=JBW_02259 PE=3 SV=1
MFELTIAVNFEAAHCIRNYPGKCNRLHGHNWKVEVNIYGSQLNDLGMLVDFVDLKAAINGIMVNLDHYYLNEIEPFCRINPTAENLAKYIYEELAKTPIFNENVKLRSIRIWESSNSAAAYSQEA

SEQ ID NO: 23864 - protein, 125 aa, Pelosinus propionicus
  REGION 1..125: note = tr|A0A1I4HC77|A0A1I4HC77_9FIRM 6-carboxy-5,6,7,8-tetrahydropterin synthase OS=Pelosinus propionicus DSM 13327 OX=1123291 GN=SAMN04490355_1003138; PE = 3 SV=1
MFELTIAVNFEAAHCIRNYPGKCNRLHGHNWKVEVNIYGCQLNELGMLVDFVDLKAAINGIMVNLDHYYLNEIEPFCRINPTAENLAKYIYDELIKTPIFDENVKLRSIKLWESPNSAAAYSQEA

SEQ ID NO: 23865 - protein, 125 aa, Pelosinus sp.
  REGION 1..125: note = tr|A0A075KCK5|A0A075KCK5_9FIRM 6-carboxy-5,6,7,8-tetrahydropterin synthase OS=Pelosinus sp. UFO1 OX=484770 GN=UFO1_2359 PE=3 SV=1
MFELTIAVNFEAAHCIRNYPGKCSRIHGHNWKVEVNIYGSKLDELGMLIDFGDLKAAVNDIMLNLDHYYLNEIEPFCKINPTAENLAQYIYEKLAETAVFNPDVKLRSVRVWESPNSAAAYTQEA

SEQ ID NO: 23866 - protein, 128 aa, Pelotomaculum propionicicum
  REGION 1..128: note = tr|A0A4Y7RM87|A0A4Y7RM87_9FIRM 6-carboxy-5,6,7,8-tetrahydropterin synthase; OS = Pelotomaculum propionicicum OX=258475 GN=queD PE=3 SV=1
MFEIAVKTRFAAAHFLSGYKGPCASLHGHTWQVEVTFKGQNLDHSGMLLDFKEVKEKVRNIVDELDHVNLNDLTPFQKGGEDNPTAENLARYIYRRLKLEFSAHEPFVKITAVRVWESPDASASYLEE

SEQ ID NO: 23867 - protein, 132 aa, Pelotomaculum schinkii
  REGION 1..132: note = tr|A0A4Y7RD34|A0A4Y7RD34_9FIRM 6-carboxy-5,6,7,8-tetrahydropterin synthase; OS = Pelotomaculum schinkii OX=78350 GN=queD PE=3 SV=1
MYELSIRTRFAAAHCIEDYKGPCSRVHGHTWQIEATVLGPQLNRLGMLIDFQDLKRILKNIVHKLDHQNLNELEPFKGGGEKSPTAENLARYIFEQLKPEITAMQGDLRVGLVRVWESPDASAVYKEVQPLS

SEQ ID NO: 23868 - protein, 83 aa, Pelotomaculum sp.
  REGION 1..83: note = tr|A0A1V4W729|A0A1V4W729_9FIRM 6-carboxy-5,6,7,8-tetrahydropterin synthase; OS = Pelotomaculum sp. PtaB.Bin104 OX=1811693 GN=queD_1 PE=4; SV = 1
MLVDFKELKSGVKEVIEELDHQNLNMLEPFKQNSENNPTAENLARYIFSRLKTKFTNSLKGAKIAVVRVGESPEASAAYREEV

SEQ ID NO: 23869 - protein, 129 aa, Pelotomaculum sp.
  REGION 1..129: note = tr|A0A1V5BQQ4|A0A1V5BQQ4_9FIRM 6-carboxy-5,6,7,8-tetrahydropterin synthase; OS = Pelotomaculum sp. PtaU1.Bin065 OX=1811696 GN=queD PE=3; SV = 1
MYELTVRTRFAAAHSLMNYDGPCARLHGHTWQVEVVFQGHQLDQRGMLVDFKELKSSVKDVIDELDHQNLNMLEPFKQNSENNPTAENLARYIFNSLKTKFTNSLMEAKIAVVRVGESPEASAAYREED

SEQ ID NO: 23870 - protein, 129 aa, Pelotomaculum thermopropionicum
  REGION 1..129: note = tr|A5D2E2|A5D2E2_PELTS 6-carboxy-5,6,7,8-tetrahydropterin synthase; OS = Pelotomaculum thermopropionicum (strain DSM 13744 / JCM 10971 / SI) OX=370438 GN=PTH_1403 PE=3SV=1
MYEIVVRTSFAAAHSIKGYDGPCSRMHGHTWLVEAVLRGGQLDQKGMLVDFKEVKNILRSAVGELDHQNLNEIKPFAGGSGDSPTAENIARYLFCRIKPEIVKLERNIHLAMVRVWESDTAAASYLEVD

SEQ ID NO: 23871 - protein, 126 aa, Pelotomaculum thermopropionicum
  REGION 1..126: note = tr|A0A101HVP7|A0A101HVP7_9FIRM 6-carboxy-5,6,7,8-tetrahydropterin synthase; OS = Pelotomaculum thermopropionicum OX=110500 GN=XD97_0066; PE = 3 SV=1
MYELTVKNSFSSAHSIPDYDGKCARLHGHTWQVEVAVRGKHLDRKGMLVDFRKIKSGLDKIVTDLDHQYLNDLKIFKEEGINPTAENLAKYIYISLKEMINNYDVKLTMVRVWESPSASASYWEVD

SEQ ID NO: 23872 - protein, 156 aa, unidentified
  source 1..156: note = Peptoclostridium acidaminophilum
  REGION 1..156: note = tr|W8T538|W8T538_PEPAC Queuosine biosynthesis protein QueD OS=Peptoclostridium acidaminophilum DSM 3953; OX = 1286171 GN=queD PE=4 SV=1
MLPGWRQKKYWKGTWNNMYIIKTQQSFDSAHFLSGYEGKCANIHGHRWNVHAEISSQELLQGGQNDGMVVDFSDIKTVLKGLVDSLDHALLIQKGSMRSKTLECLVGDGFRVIELDFRPTAENFARYFFDKIKETGFTVKRVTVYETPKNCATYED

SEQ ID NO: 23873 - protein, 143 aa, unidentified
  source 1..143: note = Peptoclostridium litorale
  REGION 1..143: note = tr|A0A069RAQ0|A0A069RAQ0_PEPLI 6-carboxy-5,6,7,8-tetrahydropterin synthase; OS = Peptoclostridium litorale DSM 5388 OX=1121324 GN=queD; PE = 3 SV=1
MYILKAEHSFDSAHFLAEYEGKCANIHGHRWKVEIEVCSDSLTAGGQLDGMVVDFSDLKKDVKEMADSCDHALLVQRGTMRENTLQCLKEDGFNIIELDFRPTAENFSAFFFYEMKSRGYNVKRATVYETPSNCATYEETEAV

SEQ ID NO: 23874 - protein, 130 aa, unidentified
  source 1..130: note = Peptococcaceae bacterium
  REGION 1..130: note = tr|A0A0F2N257|A0A0F2N257_9FIRM 6-carboxy-5,6,7,8-tetrahydropterin synthase; OS = Peptococcaceae bacterium BRH_c4a OX=1629716; GN = VR68_15915 PE=3 SV=1
MFEISVKRRFAAAHRLEGYQGQCSALHGHTWIVEVAVAGSGLDSCGMLADFRIIKETVDGIVTDLDHSYLNDIVFFSGGDPKNNPTAENIAFYIYGKVKEQIIKISPGLMVRGVRVWESPDASALYREDL

SEQ ID NO: 23875 - protein, 129 aa, unidentified
  source 1..129: note = Peptococcaceae bacterium
  REGION 1..129: note = tr|A0A0J1F7K1|A0A0J1F7K1_9FIRM 6-carboxy-5,6,7,8-tetrahydropterin synthase; OS = Peptococcaceae bacterium CEB3 OX=999898 GN=queD PE=3; SV = 1
MALATIVKEFTFDAAHRLDGHHGHCGNIHGHTYKLQVGVCGAVRERPGASDDGMVMDFEELKEVVKTEIINRVDHQFLNEVLPFRTTAENISLWAVQVLRKAGLPVKFIRLYETPTSYVEVEERDVPVD

SEQ ID NO: 23876 - protein, 110 aa, Peptoniphilus asaccharolyticus
  REGION 1..110: note = tr|A0A1W1UK48|A0A1W1UK48_PEPAS 6-carboxy-5,6,7,8-tetrahydropterin synthase; OS = Peptoniphilus asaccharolyticus DSM 20463 OX=573058; GN = SAMN00017477_0361 PE=3 SV=1
MFKIKKTLEISAAHKLNLNYESKCQNLHGHNWIITIYCKSEELDENGMVYDFTHIKNKIHKRLDHTYINDIIPYNPTAENIAKWIAEEIGEKCYMVEVQESEGNVAIYEV

SEQ ID NO: 23877 - protein, 131 aa, Peptoniphilus indolicus
  REGION 1..131: note = tr|A0A379D8X4|A0A379D8X4_9FIRM 6-carboxy-5,6,7,8-tetrahydropterin synthase; OS = Peptoniphilus indolicus OX=33030 GN=queD PE=3 SV=1
MEFEIVWVLLNQLFINFEVKVMFKIKKTLEISAAHKLSLNYESKCQNLHGHNWIVNIYCKSKNLDENGMVYDFTHIKNKIHKRLDHTYLNDVIPYNPTAENIAKWIADEIGEKCYMVEVQESEGNVAIYEV

SEQ ID NO: 23878 - protein, 131 aa, Peptoniphilus indolicus; identical to SEQ ID NO: 23877
  REGION 1..131: note = tr|G4D5E1|G4D5E1_9FIRM 6-carboxy-5,6,7,8-tetrahydropterin synthase; OS = Peptoniphilus indolicus ATCC 29427 OX=997350; GN = HMPREF9129_1621 PE=3 SV=1

SEQ ID NO: 23879 - protein, 118 aa, unidentified
  source 1..118: note = Peptostreptococcaceae bacterium
  REGION 1..118: note = tr|U2JBH1|U2JBH1_9FIRM 6-carboxy-5,6,7,8-tetrahydropterin synthase; OS = Peptostreptococcaceae bacterium oral taxon 113 str. W5053 OX=1321784 GN=HMPREF1987_00832 PE=3 S V=1
MILIKEFEFDAAHHLTKYHGKCEHLHGHTYKLVVMLEGQPNFEDMVFDFVELKHMVQDKILSRLDHAYLNDLLPNPTAENIAVFVWKELFPLVKRENSSLHEIQVWETKTSGIIYRGE

SEQ ID NO: 23880 - protein, 181 aa, Peredibacter sp.
  REGION 1..181: note = tr|A0A2E5CDC3|A0A2E5CDC3_9PROT Uncharacterized protein OS=Peredibacter sp. OX=2024850 GN=CMJ16_07260 PE=4; SV = 1
MSECSYKLSDLKVRLFLDFNYSIKVYKQYFNFAASHFLIFEDGTREPLHGHNYRVMVKGEAPKLEGDMVFDFLDIKPIVREVCDSLDHRLLLPKDNQHLKIHDKGKSFKLTTPDESEFLIPKQDALVLPISNTSAERLAIYICEEITKITFERFQFRFSALEVEVEETPGQSAVYAHKETL

SEQ ID NO: 23881 - protein, 197 aa, Perlucidibaca sp.
  REGION 1..197: note = tr|A0A2P6AQZ8|A0A2P6AQZ8_9GAMM 6-carboxytetrahydropterin synthase QueD OS=Perlucidibaca sp. HR-E OX=2094561 GN=C5O18_08430 PE=4 SV=1
MLIRKLFRFENAHIVRNCSSDRCRRSIHGHSYQVEVLLEAHALDHGQMVYDFGLMKGDIRSLIDSFDHAVAFWDRDDPEYLDACRKFSARWIALPVSPSAEQFSRVFFALVDRVLALTDMANGEQDVRLHSVIVHETATGYAQCFREDIENPRMGELPLERIVFSDQVRAEWPDPDLWQRLLDGRRSRNPEVELQVR

SEQ ID NO: 23882 - protein, 285 aa, unidentified
  source 1..285: note = Permianibacter aggregans
  REGION 1..285: note = tr|A0A4R6UGV0|A0A4R6UGV0_9GAMM 6-pyruvoyl tetrahydropterin synthase-like protein OS=Permianibacter aggregans OX=1510150 GN=EV696_11920 PE=4 SV=1
MASLFVDHLTVIDCSALSAERGLIGASYIVDIELQGPLDRQGMVLDFSKVKKQIKRLIDDSVDHRLLVPTKYTGLQIAYQGEQVALQFRDQRDFLWQHSSPAVALAQIPLTDISAELLSPWLQQHIQEQLPRGMQLTLRLREEQIDGASYCYSHGLQKHDGACQRIAHGHRSRIEIFIDGERSTAWEQTWAKRFDDIYIVTRSHIHGEATDGETPMLLLRYRAQEGDYFLNLPKARCHTIDSESTVEHIAAHIAEVTQRETGADNVRVRAFEGVLKGAIAEKCAG

SEQ ID NO: 23883 - protein, 161 aa, Persephonella hydrogeniphila
  REGION 1..161: note = tr|A0A285NHK1|A0A285NHK1_9AQUI 6-pyruvoyltetrahydropterin/6-carboxytetrahydropterin synthase OS=Persephonella hydrogeniphila OX=198703; GN = SAMN06265182_1298 PE=4 SV=1
MRYEITKRFKFEAGHRVWKQNLISGKGAKLMGKEVPPNPCLNIHGHSYKVEVTVGSDKLNEQEMVIDFYHIKAALKDLIDNQIDHSFIIDRNDPLYPTFKEHFGFLKLFVVDFCPTAEALAKFIYDFLKGKLEEAELLDDIKVVSVTVWETETGKAVYKEE

SEQ ID NO: 23884 - protein, 115 aa, Persephonella hydrogeniphila
  REGION 1..115: note = tr|A0A285NNJ1|A0A285NNJ1_9AQUI 6-carboxy-5,6,7,8-tetrahydropterin synthase; OS = Persephonella hydrogeniphila OX=198703; GN = SAMN06265182_1873 PE=3 SV=1
MPYIIRVRREFNAAHYLTDYYGKPEPLHGHTWEVELFIRADSLDKGGMGFDFIEIQNFLSEILPDYKCMNDIYDFSPSAENVARYIYNKVKEKYPSLQKVVVWETKYGGAEYFEE

SEQ ID NO: 23885 - protein, 114 aa, Persephonella marina
  REGION 1..114: note = tr|C0QTV8|C0QTV8_PERMH 6-carboxy-5,6,7,8-tetrahydropterin synthase; OS = Persephonella marina (strain DSM 14350 / EX-H1); OX = 123214 GN=PERMA_0330 PE=3 SV=1
MPFIIRVKREFQAAHFLTDYHGKPEPLHGHTWLVEIFIRADKLDKGGMGYDFIEIQRFLDQIIPDYKCLNDIFDFSPSAENLAKWLYEKIKERYPTLQKVVVWETKEGGAEYFE

SEQ ID NO: 23886 - protein, 161 aa, Persephonella marina
  REGION 1..161: note = tr|C0QR57|C0QR57_PERMH Putative 6-pyruvoyl tetrahydrobiopterin synthase (Ptps)(Ptp synthase); OS = Persephonella marina (strain DSM 14350 / EX-H1); OX = 123214 GN=PERMA_13 85 PE=4 SV=1
MRYEITKRFKFEAGHRVWKQNLSSGKGAKLMADEIPPNPCINIHGHSYKVEVTVGSDKLNEQEMVIDFYHIKSALKDLIDNQLDHSFIIDKNDPLFPKFKENFGFLKLTVVDFCPTAEALAKYIYDFLEDKLREAGLLDEIKVVSVTIWETETGKAVYKGK

SEQ ID NO: 23887 - protein, 161 aa, Persephonella sp.
  REGION 1..161: note = tr|A0A432S6S0|A0A432S6S0_9AQUI 6-carboxy-5,6,7,8-tetrahydropterin synthase; OS = Persephonella sp. OX=2060922 GN=DSY53_00765 PE=4 SV=1
MKYKITKRFKFEAGHRVWKQNLLSGKGSKLLGKEIPPNPCLNIHGHSYKVEVVVGSDKLNEQEMVIDFYHIKSALKDLIDNQMDHSFIIDKNDPLYPKFKENFGFLKLFEVDFCPTAEALAKFIYEFLENKLKEADLLNDIKVVKVVVWETETGKAEYGIE

SEQ ID NO: 23888 - protein, 114 aa, Persephonella sp.
  REGION 1..114: note = tr|A0A432S569|A0A432S569_9AQUI 6-carboxy-5,6,7,8-tetrahydropterin synthase; OS = Persephonella sp. OX=2060922 GN=DSY53_04335 PE=3 SV=1
MPYIVRVRKEFQSAHFLTDYHGKPEPLHGHTWMIEVFIKADKLDKGGMGYDFVEIDKFLDEILPNYKCMNDIYDFSPSAENLAKYFYYKIKEKYPSLQKVVVWETKYGGAEYYE

SEQ ID NO: 23889 - protein, 121 aa, unidentified
  source 1..121: note = Petrimonas mucosa
  REGION 1..121: note = tr|A0A1G4G3F9|A0A1G4G3F9_9PORP 6-carboxy-5,6,7,8-tetrahydropterin synthase OS=Petrimonas mucosa OX=1642646 GN=queD PE=3 SV=1
MYKISKQFAFSAAHSLSGLPEDHPCTRLHGHNYVVTVHLRANELNSTGFVKDYNELRVVKQYIDEHLDHRNLNDIMHPLNSSAENLARLLYDIFKPILPELYAVEVSETPKTSAIYEPDGQ

SEQ ID NO: 23890 - protein, 120 aa, Petrimonas sp.
  REGION 1..120: note = tr|A0A3G9DN62|A0A3G9DN62_9PORP 6-carboxy-5,6,7,8-tetrahydropterin synthase OS=Petrimonas sp. IBARAKI OX=1978337 GN=PEIBARAKI_4086 PE=3 SV=1
MYKISKQFAFSAAHSLDGLPGDHPCTRLHGHNYVVTVHLRSKELNDTGFVKDYNELKVVKQYIDEHIDHRNLNDIMYPLNSSAENLARMFFDIFKPMLPELYAVEVSETPKTSAIYELDN

SEQ ID NO: 23891 - protein, 117 aa, Phaeobacter gallaeciensis
  REGION 1..117: note = tr|V9WNH7|V9WNH7_9RHOB 6-carboxy-5,6,7,8-tetrahydropterin synthase OS=Phaeobacter gallaeciensis DSM 26640 OX=1423144 GN=Gal_02945 PE=3 SV=1
MFRITKEFHFSASHQLSHLPDDHQCARLHGHNYIVVIELAGAELNSDGFVRDYHELAPLKNYIDGSFDHRHLNDVMEGPSTAENMARHFYDWCAARWPETAAVRVSETPKTWAEYRP

SEQ ID NO: 23892 - protein, 117 aa, Phaeobacter gallaeciensis
  REGION 1..117: note = tr|A0A1B0ZN60|A0A1B0ZN60_9RHOB 6-carboxy-5,6,7,8-tetrahydropterin synthase OS=Phaeobacter gallaeciensis OX=60890 GN=JL2886_00624 PE=3 SV=1
MFRIRKEFHFSASHQLSHLPDDHQCARLHGHNYIVVVELAAEALNDDGFVRDYHDLKPLKTYIDETFDHRHLNEVLDVASTAENMARHFHDWCAARWPETSAVLVSETPKTWAEYRP

SEQ ID NO: 23893 - protein, 117 aa, Phaeobacter inhibens
  REGION 1..117: note = tr|I7DMH5|I7DMH5_PHAIB 6-carboxy-5,6,7,8-tetrahydropterin synthase OS=Phaeobacter inhibens (strain ATCC 700781 / DSM 17395 / CIP 105210 / JCM 21319 / NBRC 16654 / NC IMB 13546 / BS107) OX=391619; GN = queD PE=3 SV=1
MFRITKEFHFSASHQLSHLPADHQCARLHGHNYIVVVELAGAELNSDGFVRDYHELAPLKNYIDGSFDHRHLNDVMDGPSTAENMARHFYEWCVARWPETSAVRVSETPKTWAEYRP

SEQ ID NO: 23894 - protein, 117 aa, Phaeobacter inhibens
  REGION 1..117: note = tr|A0A2I7K652|A0A2I7K652_9RHOB 6-carboxy-5,6,7,8-tetrahydropterin synthase OS=Phaeobacter inhibens OX=221822 GN=queD PE=3 SV=1
MFRITKEFHFSASHQLSHLPADHQCARLHGHNYIVVVELAGAKLNSDGFVRDYHELAPLKNYIDGSFDHRHLNDVMEGPSTAENMARHFYEWCVARWPETAAVRVSETPKTWAEYRP

SEQ ID NO: 23895 - protein, 117 aa, unidentified
  source 1..117: note = Phaeobacter italicus
  REGION 1..117: note = tr|A0A0H5D044|A0A0H5D044_9RHOB 6-carboxy-5,6,7,8-tetrahydropterin synthase OS=Phaeobacter italicus OX=481446 GN=queD PE=3 SV=1
MFRITKEFHFSASHQLTHLPADHQCARLHGHNYIVVVELAGAELNSDGFVRDYHELAPLKNYIDGSFDHRHLNDVMEGPSTAENMARHFYDWCVSRWPETAAVRVSETPKTWAEYRP

SEQ ID NO: 23896 - protein, 117 aa, unidentified
  source 1..117: note = Phaeobacter piscinae
  REGION 1..117: note = tr|A0A291FWS0|A0A291FWS0_9RHOB 6-carboxy-5,6,7,8-tetrahydropterin synthase OS=Phaeobacter piscinae OX=1580596 GN=queD PE=3 SV=1
MFRITKEFHFSASHQLTHLPADHQCARLHGHNYIVVVELAGAELNSDGFVRDYHELAPLKNYIDGSFDHRHLNDVMEGPSTAENMARHFYDWCAARWPETAAVRVSETPKTWAEYRP

SEQ ID NO: 23897 - protein, 117 aa, unidentified
  source 1..117: note = Phaeobacter piscinae
  REGION 1..117: note = tr|A0A291FKL8|A0A291FKL8_9RHOB 6-carboxy-5,6,7,8-tetrahydropterin synthase OS=Phaeobacter piscinae OX=1580596 GN=queD PE=3 SV=1
MFRITKEFHFSASHQLTHLPDDHQCARLHGHNYIVVIELAGAELNSDGFVRDYHELAPLKSYIDGSFDHRHLNDVMEGPSTAENMARHFYDWCAARWPETAAVRVSETPKTWAEYRP

SEQ ID NO: 23898 - protein, 117 aa, unidentified
  source 1..117: note = Phaeobacter porticola
  REGION 1..117: note = tr|A0A1L3I7Y6|A0A1L3I7Y6_9RHOB 6-carboxy-5,6,7,8-tetrahydropterin synthase OS=Phaeobacter porticola OX=1844006 GN=queD PE=3 SV=1
MYRITKEFHFSASHQLTHLPDDHQCARLHGHNYIVIVELAGAKLNSDGFVRDYHELAPLKNYIDGTFDHRHLNDVMDGPSTAENMARHFYDWCAARWPETTAVRISETPKTWAEYRP

SEQ ID NO: 23899 - protein, 117 aa, Phaeobacter sp.
  REGION 1..117: note = tr|A0A384GRJ7|A0A384GRJ7_9RHOB 6-carboxy-5,6,7,8-tetrahydropterin synthase OS=Phaeobacter sp. S60 OX=1569353 GN=OO25_12065 PE=3 SV=1
MFRITKEFHFSASHQLTHLPADHQCARLHGHNYIVVIELAGSELNSDGFVRDYHELAPLKNYIDGSFDHRHLNDVMEGPSTAENMARHFYDWCAARWPETAAVRVSETPKTWAEYRP

SEQ ID NO: 23900 - protein, 117 aa, Phaeobacter sp.
  REGION 1..117: note = tr|A0A0P6R690|A0A0P6R690_9RHOB 6-carboxy-5,6,7,8-tetrahydropterin synthase OS=Phaeobacter sp. 11ANDIMAR09 OX=1225647 GN=AN476_20085 PE=3 SV=1
MFRIRKEFHFSASHQLSHLPDDHQCARLHGHNYIVVVELAAERLNADGFVRDYHDLKSLKSYIDDHFDHRHLNDVMQGPSTAENMARHFYDWCVARWPETAAVLVSETPKTWAEYRP

SEQ ID NO: 23901 - protein, 135 aa, unidentified
  source 1..135: note = Phaeodactylibacter luteus
  REGION 1..135: note = tr|A0A5C6RHA2|A0A5C6RHA2_9BACT 6-carboxy-5,6,7,8-tetrahydropterin synthase; OS = Phaeodactylibacter luteus OX=1564516 GN=FRY97_17560; PE = 3 SV=1
MRIAVFRRAHFNAAHRLYNPAWSDEKNQEVFGLCNNPNYHGHNYELEVKVAGEVDPVTGYLIDLKDLKDLIKKEVELRFDHKNLNLDTEEFRNLNPTAENICFVIWNILRSHLDERYDLSVRLYETPRNYVEYPA

SEQ ID NO: 23902 - protein, 136 aa, unidentified
  source 1..136: note = Phaeodactylibacter luteus
  REGION 1..136: note = tr|A0A5C6RJI1|A0A5C6RJI1_9BACT 6-carboxytetrahydropterin synthase OS=Phaeodactylibacter luteus OX=1564516 GN=FRY97_13335 PE=4 SV=1
MVYLTRRERFNAAHKLWVDAWSDDRNREMFGKCSNKNWHGHNYDLFVTVKGKPDPVTGFIVDVKQLSKLIKSSIVDKVDHCNLNLDVDFIPKGMQPTTENLVILFWQQLEPLLEGCQLHCIKLYETENIFAEYYGE

SEQ ID NO: 23903 - protein, 136 aa, unidentified
  source 1..136: note = Phaeodactylibacter xiamenensis
  REGION 1..136: note = tr|A0A098S471|A0A098S471_9BACT 6-pyruvoyl tetrahydrobiopterin synthase OS=Phaeodactylibacter xiamenensis OX=1524460 GN=IX84_16035 PE=4 SV=1
MVYLTRRERFNAAHKLWVDSWSEEKNQTMFGKCSNKNWHGHNYDLFVTVKGKPDPVTGFIVDVKQLSKLIKSSIVDKVDHSNLNLDVDFIPEGMQPTTENLVILFWQQLEPLLEGCQLHCIKLYETENIFAEYYGE

SEQ ID NO: 23904 - protein, 123 aa, unidentified
  source 1..123: note = Phaeodactylibacter xiamenensis
  REGION 1..123: note = tr|A0A098S9P7|A0A098S9P7_9BACT 6-pyruvoyl tetrahydropterin synthase OS=Phaeodactylibacter xiamenensis OX=1524460 GN=IX84_06790 PE=4 SV=1
MFSVTIRQHIMIAHSLPHPDFGPAQRLHGATYVTDVTFYSQQLTEMGIVIDIALAHDALKKALAPLDYQNLDELPQFKGKLTTTEFLALYIHGQVKAAVADQFDGRIKVVLGESHEAWAAYEA

SEQ ID NO: 23905 - protein, 175 aa, Phaeospirillum fulvum
  REGION 1..175: note = tr|A0A1H6JBX5|A0A1H6JBX5_PHAFV 6-pyruvoyltetrahydropterin/6-carboxytetrahydropterin synthase OS=Phaeospirillum fulvum OX=1082; GN = SAMN04244559_03012 PE=4 SV=1
MSVFHIRRRIEIDAGHRIATHGSKCRNLHGHRYGIEAECAADALHAGGEQTDMAIDFAFLKEEMMARIDATCDHGLIVALSDVALLDLFAPDGRDPAEWRADLAERVARDGAALTSETKLGSKMYVVPFHPTAEALARHWYAVLAAPVAERSGGAARLVALRVWETPNCMAEYAP

SEQ ID NO: 23906 - protein, 175 aa, Phaeospirillum fulvum
  REGION 1..175: note = tr|S9S9T0|S9S9T0_PHAFV 6-pyruvoyl-tetrahydropterin synthase OS=Phaeospirillum fulvum MGU-K5 OX=1316936; GN = K678_14167 PE=4 SV=1
MSVFHIRRRIEIDAGHRIATHGSKCRNLHGHRYGIEAECAADALHDGGEQTDMAIDFAFLKEEMMARIDATCDHGLIVALSDVALLDLFAPDGRDPAEWRAGLAESVARDGAALTTETKLGSKIYVVPFHPTAEALARHWFAVLEAPVVTRSGGAARLIALRVWETPNCMAEYAP

SEQ ID NO: 23907 - protein, 175 aa, Phaeospirillum molischianum
  REGION 1..175: note = tr|H8FNB2|H8FNB2_PHAMO 6-pyruvoyl-tetrahydropterin synthase OS=Phaeospirillum molischianum DSM 120 OX=1150626; GN = PHAMO_10275 PE=4 SV=1
MSVFHIRRRIEIDAGHRIATHGSKCRNLHGHRYGIEAECAADALHDGGEQTDMALDFAFLKDEMMSRIDAFCDHGLIVALSDAALLDLFAPNGADPVVWRARLAQTVARDGAALTSDTRLGSKIYVVPFHPTAEALARHWFEVLAAPVVERSGGAARLVALRVWETPNCMAEYAP

SEQ ID NO: 23908 - protein, 119 aa, Phascolarctobacterium faecium
  REGION 1..119: note = tr|A0A3G9GRQ4|A0A3G9GRQ4_9FIRM 6-carboxy-5,6,7,8-tetrahydropterin synthase; OS = Phascolarctobacterium faecium OX=33025 GN=queD PE=3 SV=1
MFVLKEFEFDAAHYLPEYNGKCERLHGHTYKLVVKVEGTPDKEGMVIDFIRLKNIVKEEVLSKLDHACLNDILKQPSAENISVWVWQRLQKMLQGPNYKLYEVEVWETKTSGCIYRGDL

SEQ ID NO: 23909 - protein, 187 aa, Phascolarctobacterium faecium
  REGION 1..187: note = tr|A0A3G9H427|A0A3G9H427_9FIRM 6-pyruvoyl tetrahydropterin synthase OS=Phascolarctobacterium faecium; OX = 33025 GN=PFJ30894_00101 PE=4 SV=1
MRSITTLDLQYAHRFYGFKGEAQYLHGHSGILTIEVEDSVEPGVNMVFPCNEIQKTAWDVLKNFDHALILREDDPLLPAVLDVYEKQGIRNGAPQNQMKGAAFKTELATAYPDCRLVVTKETMTVEGMIKIVYDLLKDKLNIAKITFVSGVNTASAEFTTKNQIDRCPLCGIALNENGVCPKCGYKK

SEQ ID NO: 23910 - protein, 119 aa, Phascolarctobacterium sp.; identical to SEQ ID NO: 23908
  REGION 1..119: note = tr|R6I8H8|R6I8H8_9FIRM 6-carboxy-5,6,7,8-tetrahydropterin synthase; OS = Phascolarctobacterium sp. CAG:207 OX=1262914; GN = BN533_00736 PE=3 SV=1

SEQ ID NO: 23911 - protein, 119 aa, Phascolarctobacterium sp.
  REGION 1..119: note = tr|A0A316S1X8|A0A316S1X8_9FIRM 6-carboxy-5,6,7,8-tetrahydropterin synthase; OS = Phascolarctobacterium sp. OX=2049039 GN=queD PE=3 SV=1
MIVLKEFEFDAAHYLPEYNGKCERLHGHTYKLVVKVQGTPDHEGMVIDFIRLKNIVKENVLVHLDHACINDILPQPSAENISVWVWNKLKDLLHADNYDLYEVEVWETKTSGCIYRGDL

SEQ ID NO: 23912 - protein, 118 aa, Phascolarctobacterium succinatutens
  REGION 1..118: note = tr|E8LD21|E8LD21_9FIRM 6-carboxy-5,6,7,8-tetrahydropterin synthase; OS = Phascolarctobacterium succinatutens YIT 12067 OX=626939; GN = queD PE=3 SV=1
MIIIKEFDFDAAHYLPAYNGKCEHLHGHTYKLVVKVEGTPDHEGMVIDFIKLKNLVKEEVLAHLDHACLNDILPVPSAENISVWVWNKLVELLKSDHYHLYEVEVWETRTSGCVYRGE

SEQ ID NO: 23913 - protein, 118 aa, Phascolarctobacterium succinatutens
  REGION 1..118: note = tr|A0A3C1IK43|A0A3C1IK43_9FIRM 6-carboxy-5,6,7,8-tetrahydropterin synthase; OS = Phascolarctobacterium succinatutens OX=626940 GN=queD; PE = 3 SV=1
MIIIKEFDFDAAHYLPAYNGKCEHLHGHTYKLVVKVEGTPDHEGMVIDFIKLKNLVKEEVLAHLDHACLNDILPVPSAENISVWVWNKLVELLKSDHYHLFEVEVWETRTSGCVYRGE

SEQ ID NO: 23914 - protein, 125 aa, unidentified
  source 1..125: note = Phenylobacterium deserti
  REGION 1..125: note = tr|A0A328AS68|A0A328AS68_9CAUL 6-carboxy-5,6,7,8-tetrahydropterin synthase; OS = Phenylobacterium deserti OX=1914756 GN=DJ018_08340 PE=3; SV = 1
MNNSVFEITKAAGFDAAHHLPDGGPEGSPYTRLHGHSFRVEATVRGQMVPPVGWVADFAQLDAALKAIANDLDHGYLNDKPGLESPTLERICLYFAERLKPQFPGLCRVVLSRPTIGESCALIVE

SEQ ID NO: 23915 - protein, 125 aa, unidentified
  source 1..125: note = Phenylobacterium hankyongense
  REGION 1..125: note = tr|A0A328AYZ0|A0A328AYZ0_9CAUL 6-carboxy-5,6,7,8-tetrahydropterin synthase; OS = Phenylobacterium hankyongense OX=1813876 GN=DJ021_02870; PE = 3 SV=1
MSPNIFEITKAAGFDAAHHLPAGGAEGSPYTRLHGHSFRVEATVRGEAVQPVGWVADLAELDRALRAIAGELDHGLLNEKPGLESPTLERLCVYFAERLKPEFPGLSRIVVSRPTIGESCALLVG

SEQ ID NO: 23916 - protein, 123 aa, unidentified
  source 1..123: note = Phenylobacterium kunshanense
  REGION 1..123: note = tr|A0A328BAQ4|A0A328BAQ4_9CAUL 6-carboxy-5,6,7,8-tetrahydropterin synthase; OS = Phenylobacterium kunshanense OX=1445034 GN=DJ019_13825; PE = 3 SV=1
MTQPYFEITKAATFDAAHYLAEGPAHRPYTNLHGHSFKVEATVRGPAVEPVGWVADLADLESALKGVASELDHGLLNEKPGLERPTLEHICLYFAERLKPAFPGLSRIVVSRPTIGESCAFSL

SEQ ID NO: 23917 - protein, 123 aa, Phenylobacterium sp.
  REGION 1..123: note = tr|A0A2D7ZGD1|A0A2D7ZGD1_9CAUL 6-carboxy-5,6,7,8-tetrahydropterin synthase; OS = Phenylobacterium sp. OX=1871053 GN=CMJ17_02400 PE=3 SV=1
MTSHSFEITKVATFDAAHYLPDGPAESPYTRLHGHSFQVEATVAGAPQPPVGWVADLAELDGALRAVALELDHGLLNEKPGLESPTLENLCLYFAERLKRQFPGLSRIKVSRPTIGESCALTI

SEQ ID NO: 23918 - protein, 123 aa, Phenylobacterium sp.
  REGION 1..123: note = tr|A0A521PEV0|A0A521PEV0_9CAUL 6-carboxy-5,6,7,8-tetrahydropterin synthase; OS = Phenylobacterium sp. OX=1871053 GN=EPO51_24305 PE=3 SV=1
MSQPTFEITKAATFDAAHHFPQGPEHRPYSNLHGHSFKVEATVRGPAQEPVGWVADLADLDAALKAVAAQLDHGLLNEKPGLERPTLEHICLYFAERLTPTFPGLSRIVVSRPTIGESCALSL

SEQ ID NO: 23919 - protein, 125 aa, unidentified
  source 1..125: note = Phenylobacterium zucineum
  REGION 1..125: note = tr|B4RHW0|B4RHW0_PHEZH 6-carboxy-5,6,7,8-tetrahydropterin synthase; OS = Phenylobacterium zucineum (strain HLK1) OX=450851; GN = PHZ_c2742 PE=3 SV=1
MSQPVFEITKAATFDAAHYLAEGPAHRPYTNLHGHSFKVEATVRGQPQEPVGWVADLADLDEALKAVAGELDHGLLNEKPGLERPTLEHLCLYFAERLRPRFPGLSRVVVSRPTIGESCAMQVSA

SEQ ID NO: 23920 - protein, 170 aa, unidentified
  source 1..170: note = Phenylobacterium zucineum
  REGION 1..170: note = tr|B4RFN3|B4RFN3_PHEZH 6-pyruvoyl tetrahydrobiopterin synthase OS=Phenylobacterium zucineum (strain HLK1) OX=450851 GN=PHZ_c0700 PE=4 SV=1
MSWISTKTYGAERGLTCALRQWAADSHCALLHGYSLGFRFTFAAEQLDRRGWVVDFGSGGFGKIREWLHGTFDHALLVAEDDPGRPELARLADLGLARVQVVPGTSCEALARFVFEAAQPMVAAATQGRCWIAEVECFEHGANSAIYRNPEGVLREVSAEALTALAAAVA

SEQ ID NO: 23921 - protein, 216 aa, unidentified
  source 1..216: note = Phorcysia thermohydrogeniphila
  REGION 1..216: note = tr|A0A4R1GH55|A0A4R1GH55_9BACT 6-pyruvoyltetrahydropterin/6-carboxytetrahydropterin synthase OS=Phorcysia thermohydrogeniphila OX=936138; GN = CLV27_0101 PE=4 SV=1
MFEISKTFEFSAAHSVFSQRLSKRWAKNAYPKCRRLPGHGHNYRLVVYLQSEKLDSSQMVTDFGHLRWLKDFIGECFDHKLILSFEDPAFYVLLEKLGLLKNETFSLPVEGAQVEAVAVKEDYRLEKFNFKEMELSKFSSYTFVSFRYLGETSTPEGDFYSRLIDGIAFFRGSPTSENLARFFYYFVNENIKPLGVKCSKVSIFETPSSCATFGEV

SEQ ID NO: 23922 - protein, 296 aa, unidentified
  source 1..296: note = Phormidesmis priestleyi
  REGION 1..296: note = tr|A0A0P7ZTR1|A0A0P7ZTR1_9CYAN 6-pyruvoyltetrahydropterin/6-carboxytetrahydropterin synthase OS=Phormidesmis priestleyi Ana OX=1666911; GN = queD-2 PE=4 SV=1
MKCTINRRSQFCASHRYWLPELSESENLRLFGKCTRAPGHGHNYVLHAAITSELDAHGMVLNLTEAKAIIQREIIEPLDFSYLNDAWDEFAQTLPTTENIARVIWHRLVPHLPAPLRLTNIELYETPNLWASYPENRQGNGMNAYLTVAAHFSAAHRLALPELSYEQNCEIYGKCARPNGHGHNYRVEVTVKGDVHPRTGMLVDLVALQNVIDHHVIEPFDHTFLNKDVPYFVETVPTAENIVIRICQLLYQPIEDIGATLHKVKLIESPNNSAEVLAEELMDLKISQSRSLAAVI

SEQ ID NO: 23923 - protein, 129 aa, unidentified
  source 1..129: note = Phormidesmis priestleyi
  REGION 1..129: note = tr|A0A2W4X218|A0A2W4X218_9CYAN 6-carboxy-5,6,7,8-tetrahydropterin synthase; OS = Phormidesmis priestleyi OX=268141 GN=DCF15_15435 PE=3; SV = 1
MPQWKLSTEFTFDAAHFIRDYDGPCGRMHGHTYRVRIEASARQLQASQYCPHPAMVADFRTLRWAKKDMLKGGLDHCVLNEVMPANYETTAEMIAQFIHEKTSKMLNPNIHLKVCVSETPDSWVEYESD

SEQ ID NO: 23924 - protein, 129 aa, Phormidium ambiguum
  REGION 1..129: note = tr|A0A1U7ISW2|A0A1U7ISW2_9CYAN 6-carboxy-5,6,7,8-tetrahydropterin synthase OS=Phormidium ambiguum IAM M-71 OX=454136 GN=NIES2119_02975 PE=3 SV=1
MPKWKLITEFTFDSAHYIKDYNGPCGRMHGHTYKVRVEATSSTLHSSEFCPHPVMVADFRTLRWAKQDITKGGLDHGILNEVMPEEYETTAEMIAKFIYDQTKEKLPEDVQLKVAVSETLNSWVEYEDD

SEQ ID NO: 23925 - protein, 290 aa, Phormidium ambiguum
  REGION 1..290: note = tr|A0A1U7IPZ6|A0A1U7IPZ6_9CYAN 6-pyruvoyl tetrahydropterin synthase OS=Phormidium ambiguum IAM M-71; OX = 454136 GN=NIES2119_07080 PE=4 SV=1
MKCIINRRAKFSASHLYWLPELSEAENIQRFGACSRAPGHGHNYLFHVYMAGELDEYGMVLNLSDVKHTIKQEVTSQLDFSFLNDVWSEFQETLPTTENIARVIWQRLAPHLPIVRIQLFEHPELWADYLGNEMEAYLSIATHFSAAHRLARPDLSYEKNCEIYGKCARPHGHGHNYHLEVTVKGEIDPRTGMTVDLGELQKVVDDYVVEPFDHTFLNKDIPYFAEVVPTAENIAIHIRDLLQEPIRKLGAELFKVKLVESPNNSCEVYGTQLEKSLGNGKLNEQLLVRL

SEQ ID NO: 23926 - protein, 157 aa, Phormidium sp.
  REGION 1..157: note = tr|A0A522XDL4|A0A522XDL4_9CYAN 6-carboxytetrahydropterin synthase OS=Phormidium sp. SL48-SHIP OX=2518363 GN=EYR95_13090 PE=4 SV=1
MQARLTVNTYFSAAHRLARPDLDYTTNCGVYGKCARPHGHGHNYHLDVTVCGEVHPRTGMVVELGALRHLIQEVVIEPLDHRFLNKDIPHFETVVPTAENIAIYIRNLLLEPLRELGLSLEKLRLYESPNNSCELYGTMGGDRQGTPTQEKTKLLLV

SEQ ID NO: 23927 - protein, 287 aa, Phormidium sp.
  REGION 1..287: note = tr|A0A522XCN2|A0A522XCN2_9CYAN 6-carboxytetrahydropterin synthase OS=Phormidium sp. SL48-SHIP OX=2518363 GN=EYR95_14560 PE=4 SV=1
MDCIINRRAQFSAGHRYWLPELSEAENRRQFGACANVHGHGHNYVLYVSMAGELDEYGMVLNLSNIKHDIKREVTSQLDFSFLNEVWPEFKETLPTTENVARVIWQRLAPHLPLVKIQLSEHPDLWADYFGNGWEAHLTTCTHFSAAHRLAIPDASDDENDAIYGKCAYPHGHGHNYNLEVTVKGDIDQRTGMLVDLGALNQLIEDLVAEPFDHTFLNYDIPHFEKLVPTTENFVLHIRDILTQPIRDLGASLYKVKLIESPGNSCEVLGEADAETPPSEAELVGAV

SEQ ID NO: 23928 - protein, 288 aa, unidentified
  source 1..288: note = Phormidium tenue
  REGION 1..288: note = tr|A0A1U7J8C7|A0A1U7J8C7_9CYAN 6-pyruvoyl tetrahydropterin synthase OS=Phormidium tenue NIES-30; OX = 549789 GN=NIES30_06585 PE=4 SV=1
MKCIINRRAQFSASHRYWLSELSDAENIQRFGPCINFPGHGHNYVLYVAMEGDLDEYGMVLNLSDVKHMIKQEVTAQLDFAYLNEVWPEFQHTLPTTEYVAKVIWDRLAPHLPIVNIQLFEHPELWSDYSGNAMEAFLTVSTHFSAAHRLASPRLSYEENCEIYGKCARPHGHGHNYHLEVTVKGEIDPRTGMLVDLAALQAVIDEYVVEPFDHTFLNKDIPYFAEVVPTAENIAVHIRDLLQGPIADLGASLHKVKLIESPNNSAEVYASVPTDDAVAAAAPEFATV

SEQ ID NO: 23929 - protein, 129 aa, unidentified
  source 1..129: note = Phormidium tenue
  REGION 1..129: note = tr|A0A1U7IZ26|A0A1U7IZ26_9CYAN 6-carboxy-5,6,7,8-tetrahydropterin synthase OS=Phormidium tenue NIES-30 OX=549789 GN=NIES30_23545 PE=3 SV=1
MPKWSVKTEFSFDAAHYIKDYDGPCGRMHGHTYRVRVEATTSQLRASEFCPHPVMVADFRTLRWAKKDMLKGGLDHCVLNDVLPEDYETTAEMIAQYIYEKTKRSLPEGIQLKVAVSETPNSWVEYEDD

SEQ ID NO: 23930 - protein, 287 aa, unidentified
  source 1..287: note = Phormidium willei
  REGION 1..287: note = tr|A0A168TJ20|A0A168TJ20_9CYAN 6-pyruvoyl tetrahydropterin synthase OS=Phormidium willei BDU 130791; OX = 399101 GN=AY600_05585 PE=4 SV=1
MDCIINRRAQFSAGHRYWLPELSEAENRRQFGACANVHGHGHNYVLYVSMAGELDEYGMVLNLSNIKHDIKREVTSQLDFSFLNEVWPEFKETLPTTENVARVIWQRLAPHLPLVKIQLSEHPDLWADYFGNDWEAHLTTCTHFSAAHRLAIPDASDDENDAIYGKCAYPHGHGHNYNLEVTVKGDIDQRTGMLVDLGALNQLIEDLVAEPFDHTFLNYDIPHFEKIVPTTENFVLHIRDILTQPIRDLGASLYKVKLIESPGNSCEVLGEADAETPPSEAELVGAV

SEQ ID NO: 23931 - protein, 157 aa, unidentified
  source 1..157: note = Phormidium willei
  REGION 1..157: note = tr|A0A168VTB1|A0A168VTB1_9CYAN Uncharacterized protein OS=Phormidium willei BDU 130791 OX=399101; GN = AY600_04620 PE=4 SV=1
MQARLTVNTYFSAAHRLARPDLDYTTNCGVYGKCARPHGHGHNYHLDVTVCGEVHPRTGMVVELGALRHLIQEVVIEPLDHRFLNKDIPHFETVVPTAENIAIYIRNLLLEPLQELGLSLEKLRLYESPNNSCELYGTMGGHRQGTPTQEKTKLLLV

SEQ ID NO: 23932 - protein, 292 aa, Photobacterium angustum
  REGION 1..292: note = tr|Q1ZU22|Q1ZU22_PHOAS Uncharacterized protein; OS = Photobacterium angustum (strain S14 / CCUG 15956); OX = 314292 GN=VAS14_14764 PE=4 SV=1
MKLFVRDLTVIDASYLCTDRGMVGESWILDVVMSGELNEMSMVLDFSRVKKQIKQLVDQYVDHRLIVPAKSPAIHIAATKTGYATVDLLREDKNIHLHCPEQAFCFVDAETVTIKSVTEHVYYVLKDNLPENVQGLEVALRHEAIQGAFYHYSHGLKKHDGNCQRIAHGHRSPIELIVNGERNAELEKQWAKRWQDIYLGSEEDVCSVSELNLSECAKSVSDETHYGFRYTAPQGEFELAIARSETEMLATDTTVELLACYIAEKVKPSLSADDCLDVVAYEGVGKGAMATL

SEQ ID NO: 23933 - protein, 292 aa, Photobacterium angustum
  REGION 1..292: note = tr|A0A2T3M3D0|A0A2T3M3D0_PHOAN Uncharacterized protein OS=Photobacterium angustum OX=661 GN=CTM95_00695; PE = 4 SV=1
MKLFVRDLTVIDASYLCTDRGMVGESWILDVVMSGELNEMSMVLDFSRVKKQIKQLVDQYVDHRLIVPAKSPAIHTAATKTGYATVDLLREDKNIHLHCPDQAFCFIDAETVTIESVTAHVYHVLKDNLPENVQGLEVTLRHEAIQGAFYHYSHGLKKHDGNCQRIAHGHRSPIELIVNGERNAELEKQWAKRWQDIYLGSEEDVCSVSELNLSECAKSVSDETHYGFSYTAPQGEFELAIARSETEMLVTDTTVELLASYIAEKVKPSLSAADCLDVVAYEGVGKGAMATL

SEQ ID NO: 23934 - protein, 189 aa, Photobacterium aphoticum
  REGION 1..189: note = tr|A0A090QJ88|A0A090QJ88_9GAMM NADPH dependent preQ0 reductase OS=Photobacterium aphoticum OX=754436; GN = JCM19237_6098 PE=4 SV=1
MVGESWILDVVMSGELNEMSMVLDFSRVKKQIKQIVDEYVDHRLIVPSRSEAIRIAPTQPGYSTVDLLRGENSIHLHCPEQAFCLIDAESVSIESVTEHLYQVLAGKLPENVQGLALTLRHERIDGAFYHYSHGLKKHDGNCQRIAHGHRSPVELFIDGQRDAELEQQWASQWQDIYLAAAKTNVQSRH

SEQ ID NO: 23935 - protein, 168 aa, Photobacterium aphoticum
  REGION 1..168: note = tr|A0A090QU50|A0A090QU50_9GAMM Potential QueD like 2; OS = Photobacterium aphoticum OX=754436 GN=ABT58_14045 PE=4; SV = 1
MQIHTLDKAQLIHEVQLGSHLSHAVEGGRRADFALMLAMLSPDLLETTPLDAPPAEGKTESELRAYFELPPATPLSSTEHCYEHSARQAQAFHDSGLADVRLLSGLQPTALTYPPQGTKGMPEELYHNLSGHERRLLPPTETTRVPASPQDLYLSLLQAKRFAEMRLA

SEQ ID NO: 23936 - protein, 296 aa, unidentified
  source 1..296: note = Photobacterium aquae
  REGION 1..296: note = tr|A0A0J1JS72|A0A0J1JS72_9GAMM 6-pyruvoyl tetrahydropterin synthase OS=Photobacterium aquae; OX = 1195763 GN=ABT56_13050 PE=4 SV=1
MKLFVRDLTVVDASYLCPTRGMVGESWILDVVMSGELNEMSMVLDFSRVKKQIKHIVDEFVDHRLIIPAKNAAISIGQSTSGYQTVDLDRGDKSIYLHCPEQAYCIIDSDEVTIDSVTQHICKVLQGQLPENVQGLEITLRHEKIDGAFYHYSHGLKKHDGNCQRIAHGHRSPVELFVDGQRDAELEAKWAERWQDIYLGSEEDRCPVSELTLSDAAKGVVTDEAYFGFRYTAPQGEFELAIAQSETEILPTDTTVELLASYIAEQASCWVDAGKSIDVVAYEGVGKGAMASVVAR

SEQ ID NO: 23937 - protein, 175 aa, unidentified
  source 1..175: note = Photobacterium aquae
  REGION 1..175: note = tr|A0A0J1HBS9|A0A0J1HBS9_9GAMM Queuosine biosynthesis protein QueD OS=Photobacterium aquae; OX = 1195763 GN=ABT56_02710 PE=4 SV=1
MQIHTIDKAQLIHEGQLGNQLNHAVEHGRRADFALMLAMLSPDRLETTPIDIHQDPVHTDETMRAYFELQPPKPLTTSENCYNHSARQAKAFHESGLADVRLLDGLKPIALTFPPQGTKGMPEELYHNLSGHERRLLPPTETTPLKVSPQSLYRSLIEAKRFDEMYGSQRLSVAA

SEQ ID NO: 23938 - protein, 293 aa, Photobacterium aquimaris
  REGION 1..293: note = tr|A0A2T3I391|A0A2T3I391_9GAMM Uncharacterized protein OS=Photobacterium aquimaris OX=512643; GN = C0W81_00445 PE=4 SV=1
MKLFVRDLTVIDASYLCPQRGMVGESWILDVVMSGELNEMSMVLDFSRVKKQIKQLVDQYVDHRLLIPTASTAIQTATTKADYMTVDLVSEQHAIYLHSPEQAFCFVDAEAITIETVTEHVQQVLLGNLPSNVQGLEITLRHENIDGAFYHYSHGLKKHDGNCQRIAHGHRSPVELVVNGQRNAELEQQWAQRWQDIYLGSQEDVISVSELNLSAAAANINDETHYGFRYTAPQGEFELAIAKSVTEILATDTTVELLACYIAEQLKPQLVAIDRLDVFAYEGVGKGAMASIG

SEQ ID NO: 23939 - protein, 293 aa, Photobacterium aquimaris
  REGION 1..293: note = tr|A0A2T3IIG4|A0A2T3IIG4_9GAMM Uncharacterized protein OS=Photobacterium aquimaris OX=512643; GN = CTM88_13270 PE=4 SV=1
MKLFVRDLTVIDASYLCPQRGMVGESWILDVVMSGELNEMSMVLDFSRVKKQIKQLVDQYVDHRLLIPTASTAIQTAATKADYMTVDLVSEQHAIHLHSPEQAFCFVDAEAITIETVTEHVQQVLLGNLPSNVQGLEITLRHENIDGAFYHYSHGLKKHDGNCQRIAHGHRSPVELVVNGQRNADLEQQWAQRWQDIYLGSQEDVISVSELNLSAAAANINDETHYGFRYTAPQGEFELAITKSVTEILATDTTVELLACYIAEQLKPQLVATDRLDVFAYEGVGKGAMASIG

SEQ ID NO: 23940 - protein, 293 aa, unidentified
  source 1..293: note = Photobacterium carnosum
  REGION 1..293: note = tr|A0A2N4USE0|A0A2N4USE0_9GAMM Uncharacterized protein OS=Photobacterium carnosum OX=2023717; GN = CIK00_10765 PE=4 SV=1
MKLFVRDLTVIDASYLCPQRGMVGESWILDVVMSGELNEMSMVLDFSRVKKQIKQLVDQYVDHRLLIPATSTAIHTTITKTDYMTVDLISNEHAIHLHSPEQAFCFIDTDAITVESVTQYVQQLLLGHLPSNVQGLEITLRHEKIDGAFYHYSHGLKKHDGNCQRIAHGHRSPVELVVNGQRNADLEQQWAQRWHDIYLGSQEDVISVSELNLSSAAANINDETHYGFRYTAPQGEFELAIAKSATEILATDTTVELLASYIAEQIKPQLAATERLDVFAYEGVGKGAMVTLD

SEQ ID NO: 23941 - protein, 292 aa, unidentified
  source 1..292: note = Photobacterium damsela
  REGION 1..292: note = tr|A0A1Q9GWS1|A0A1Q9GWS1_PHODP 6-pyruvoyl tetrahydropterin synthase OS=Photobacterium damsela subsp. piscicida OX=38294 GN=BEI67_16225 PE=4 SV=1
MKLFVRDLTVIDASYLSVERGMVGESWILDVVMSGELNEMSMVLDFSRVKKQIKQLVDQFVDHRLIVPTQNSAIKAQQVEDGYFTVDLLRGDNSIYLKSPEQAFCFIEAQEVTIETVTKHLHNVLSGHMPANVEGLELTLRHEKIDGAFYHYSHGLKKHDGNCQRIAHGHRSPIELLVNGKRHSVLEQEWAERWQDIYLAAEEDVVELSLLDLSENAQNLSSEQYVGFSYQAPQGKFDLAIAKNKTEILPTDTTIELLAYYIAQQVKPKLETNDSLDVFAYEGVGKGAMASL

SEQ ID NO: 23942 - protein, 292 aa, Photobacterium damselae
  REGION 1..292: note = tr|A0A2T3ICF4|A0A2T3ICF4_9GAMM Uncharacterized protein OS=Photobacterium damselae OX=38293 GN=CTM90_00740; PE = 4 SV=1
MKLFVRDLTVIDASYLSVERGMVGESWILDVVMSGELNEMSMVLDFSRVKKQIKQLVDQFVDHRLIVPTQNSAIKAQQVEDGYFTVDLLRGDNSIYLKSPEQAFCFIEAQEVTIETVTKHLHNVLSGHMPANVEGLELTLRHEKIDGAFYHYSHGLKKHDGNCQRIAHGHRSPIELLVNGKRHSVLEQEWAERWQDIYLAAEEDVVELSLLDLSENAQNLSSEQYVGFSYQAPQGKFDLAIAKNKTEILPTDTTVELLAYYIAQQVKPKLETNDSLDVFAYEGVGKGAMASL

SEQ ID NO: 23943 - protein, 292 aa, Photobacterium damselae
  REGION 1..292: note = tr|A0A2S2CI65|A0A2S2CI65_9GAMM Uncharacterized protein OS=Photobacterium damselae OX=38293 GN=BST98_19335; PE = 4 SV=1
MKLFVRDLTVIDASYLSVERGMVGESWILDVVMSGELNEMSMVLDFSRVKKQIKQLVDQFVDHRLIVPTQNSAIKAQQVEDDYFTVDLLRGDNSIYLKSPEQAFCFIDAQEVTVETVTKHLHNVLSGHMPANVEGLELTLRHEKIDGAFYHYSHGLKKHDGNCQRIAHGHRSPIELLVNGQRHSVLEQEWAERWQDIYLAAEEDVVELSLLDLSENAQNLSSEQYVGFSYQAPQGKFDLAIAKNKTEILPTDTTVELLAYYIAQQVKPKLETNDSLDVFAYEGVGKGAMASL

SEQ ID NO: 23944 - protein, 291 aa, Photobacterium frigidiphilum
  REGION 1..291: note = tr|A0A2T3JNM6|A0A2T3JNM6_9GAMM Uncharacterized protein OS=Photobacterium frigidiphilum OX=264736; GN = C9J12_04530 PE=4 SV=1
MKLFVRDLTVIDASYLCDERGMVGESWILDVVMSGELNEMSMLLDFSRVKKQIKFLVDEHVDHRLIVPSNNTAIRTATTKSGYATVDLLRGDKSIHLHSPEEAYCFIDAEKVTIESVTAYLHNILKGNLPDNVEGLELTLRHEKIDGPFYHYSHGLKKHDGNCQRIAHGHRSPIELFVDGARHTELEQQWANRWEDIYLGTKEDMISVAELNLSEHATSITDDGYFGFRYTAPQGEFELAIAKSETEIIDTDTTVELLASYIANEVKQSLSDESLEVVAYEGVGKGAMASA

SEQ ID NO: 23945 - protein, 168 aa, Photobacterium gaetbulicola
  REGION 1..168: note = tr|A0A0B9GJ30|A0A0B9GJ30_9GAMM Queuosine biosynthesis protein QueD OS=Photobacterium gaetbulicola; OX = 1295392 GN=RJ45_04755 PE=4 SV=1
MQIHSLDKAQLINEVQLGSQLSHAVEGGRRADFALMLALLSPEQLETTPVDTLPATGKTESDLRAYFELPEPQPLSTTESSYQNAAQQAKAFHQSGLADARLLDGLNPTPLSYPPQGTKGMPEEVYHNLSGHERRLLPPTEDATIKASPQDLYLSLVQAKRFAEMYGV

SEQ ID NO: 23946 - protein, 298 aa, Photobacterium gaetbulicola
  REGION 1..298: note = tr|A0A0C5WIX5|A0A0C5WIX5_9GAMM Uncharacterized protein OS=Photobacterium gaetbulicola Gung47 OX=658445; GN = H744_1c1102 PE=4 SV=1
MKLFVRDLTVIDASYLCQQRGMVGESWILDVVMSGELNEMSMVLDFSRVKKQIKQIVDEYVDHRLIVPSQSAAIRTAATQPGYATVDLLRGDKSLHLHCPEQAYCFIDDSEVTIESVTRHIYKVLEGKLPDNVQGLELTLRHEQIEGPYYHYSHGLKKHDGNCQRIAHGHRSPVELLINGQRNLSLEQEWAERWQDIYLGSTEDECTLAELNLSPFAAKVNEQSHHAFRYTAPQGEFELAIAKNDVEMIGTDTTVELLAQYIAEQVSLSVEAGSAIDVIAYEGVGKGAMATAIGKLDA

SEQ ID NO: 23947 - protein, 169 aa, unidentified
  source 1..169: note = Photobacterium galatheae
  REGION 1..169: note = tr|A0A066RTV5|A0A066RTV5_9GAMM Uncharacterized protein OS=Photobacterium galatheae OX=1654360; GN = EA58_15595 PE=4 SV=1
MSSSVSQTGGSSEAMRFTVTKMFDDLPCSHRAWAQQGKCSFLHGYERVFTIEFGCNELEKDTGFVIDFGAMKTIRALLQDQFDHTTVIAENDPELELFQALSEKQIIDLRVMHHPGMEGAAEWVFHNVDALVKRQTNHRVHVLKVEARESRKNAVTFTPQRAQASEASL

SEQ ID NO: 23948 - protein, 292 aa, unidentified
  source 1..292: note = Photobacterium galatheae
  REGION 1..292: note = tr|A0A066RKY6|A0A066RKY6_9GAMM 6-pyruvoyl tetrahydropterin synthase OS=Photobacterium galatheae; OX = 1654360 GN=EA58_20075 PE=4 SV=1
MKLFVRDLTVIDASYLCPERGMVGDSWILDVVMSGELNEMSMVLDFGRVKKQIKKLVDEYVDHRLLVPVNHPSVQIAETTPGYATVDLLRGDQSIHLHCPEEAYCLVEAEAITIDTVTEHLYQVLAGELPENVQGLELVLRHEKIDGAFYHYSHGLKKHDGNCQRIAHGHRSPIELYVDGQRDSQLEADWAKRWTDIYLGTVEDQVSVTALNLSEHAKDVTDETHYGFRYTAPQGLFELAITKRETEMIHTDTTIELLAHFIAAEVKPMVGDNQHLEVVAYEGVGKGAMASL

SEQ ID NO: 23949 - protein, 173 aa, Photobacterium ganghwense
  REGION 1..173: note = tr|A0A0J1HI70|A0A0J1HI70_9GAMM Queuosine biosynthesis protein QueD OS=Photobacterium ganghwense; OX = 320778 GN=ABT57_00675 PE=4 SV=1
MQIHTLDKAQLINEVQLGSQLNQAVETGRRADFALMLAMLSPDRLETVPVDTLPATEQTEGDLRAYFELQPPRPLSASESCYENSARQAQAFHDGGMADVRLLSGLSPTALTYPPTGTKGMPEELYHNLSGHERRMLPPKEDVALKASPQDLYLSLVQAKRFAEMSHHFTVSA

SEQ ID NO: 23950 - protein, 298 aa, Photobacterium ganghwense
  REGION 1..298: note = tr|A0A0J1HFF8|A0A0J1HFF8_9GAMM 6-pyruvoyl tetrahydropterin synthase OS=Photobacterium ganghwense; OX = 320778 GN=ABT57_07305 PE=4 SV=1
MKLFVRDLTVIDASYLCEQRGMVGESWILDVVMSGELNEMSMVLDFSRVKKRIKQLVDEFVDHRLIVPRQSAAIRIAESQLGYSTVDLLRGEKSIYLNCPDEAYCFIDANEVTIESVTQHIYDVLKGQLPENVQGLELTLRHEAIPGAFYHYSHGLKKHDGNCQRIAHGHRSPIELLVDGERDASLEQQWAERWHDIYLGTQEDYCSLNELDLSPEAKAAKEESHFAFRYTAPQGEFQLAIARCETEMIPTDTTVELLAQYIAEQVSLQVNESSVLDVVAYEGVGKGAMASMPGRKSA

SEQ ID NO: 23951 - protein, 173 aa, Photobacterium halotolerans
  REGION 1..173: note = tr|A0A0F5V8U2|A0A0F5V8U2_9GAMM Queuosine biosynthesis protein QueD OS=Photobacterium halotolerans; OX = 265726 GN=KY46_19790 PE=4 SV=1
MQIHTIDKAQLINEVQLGNQLNRAVEQGRRSDFALMLAMLSPDYLETTPTEKPLPPATTEEQLRAYFELQEPAPLSTSEFCYPRGAEQSNAFHYGGLSATRLLSSLQPIAMTFPPQDTKGLPEELYHNLSGHERRRLPPTQPEPIKGSPQDLYLNLIRAKRSAEMYGAVAKVC

SEQ ID NO: 23952 - protein, 292 aa, Photobacterium halotolerans
  REGION 1..292: note = tr|A0A0F5VF96|A0A0F5VF96_9GAMM 6-pyruvoyl tetrahydropterin synthase OS=Photobacterium halotolerans; OX = 265726 GN=KY46_07565 PE=4 SV=1
MKLFVRDLTVIDASYLCPVRGMVGESWILDVVMSGELNEMSMVLDFSRVKKQIKQLVDQYVDHRLLVPAAHASIKMAATQPGYATVDLLRGDQSIHLHCPDEAYCLVDADAITIETVTQHLHQVLSGKLPDNVQGLELVLRHEKIDGAFYHYSHGLKKHDGNCQRIAHGHRSPIGLYVDGQRDSKLEADWAKRWTDIYLGTAEDQVRVSELNLSEHAASVSDDTHYGFRYTAPQGLFELAIAKSETEMIGTDTTIELLAHYIAAAVKPAIGEHQTLDVVAYEGVGKGAMASL

SEQ ID NO: 23953 - protein, 293 aa, Photobacterium iliopiscarium
  REGION 1..293: note = tr|A0A2T3MKY3|A0A2T3MKY3_9GAMM Uncharacterized protein OS=Photobacterium iliopiscarium OX=56192; GN = C9I88_10530 PE=4 SV=1
MKLFVRDLTVIDASYLCPQRGMVGESWILDVVMSGELNEMSMVLDFSRVKKQIKQLVDQYVDHRLLIPATSTAIHTAITKTDYMTVDLISNEHAIHLHSPEQAFCFIDTDAITIESVTQYLHKLLLGHLPSNVQGLEITLRHEKIDGAFYHYSHGLKKHDGNCQRIAHGHRSPVELVVNGQRNADLEQQWAQRWHDIYLGSQEDVISVSELNLSLAAANINDETHYGFRYTAPQGEFELAIAKSATEILATDTTVELLASYIAEQVKPQLIATDRLDVFAYEGVGKGAMVTLD

SEQ ID NO: 23954 - protein, 291 aa, Photobacterium indicum
  REGION 1..291: note = tr|A0A2T3LDR8|A0A2T3LDR8_9GAMM Uncharacterized protein OS=Photobacterium indicum OX=81447 GN=C9J47_02805; PE = 4 SV=1
MKLFVRDLTVIDASYLCDERGMVGESWILDVVMSGELNEMSMLLDFSRVKKQIKFLVDEHVDHRLIVPSNNTAIRTSTTKSGYATVDLLRGDKCIHLHSPEEAYCFIDAEKVTIESVTAYLHNVLKGNLPDNVEGLELTLRHEKIDGPFYHYSHGLKKHDGNCQRIAHGHRSPVELFVDGARRTELEQQWANRWEDIYLGTKEDMISVAELNLSEHATSITDDGYFGFRYTAPQGEFELAIAKSETEIIDTDTTVELLASYIANEVKQSLSDESLEVVAYEGVGKGAMASA

SEQ ID NO: 23955 - protein, 292 aa, Photobacterium jeanii
  REGION 1..292: note = tr|A0A178K122|A0A178K122_9GAMM 6-pyruvoyl tetrahydropterin synthase OS=Photobacterium jeanii; OX = 858640 GN=A3K86_18490 PE=4 SV=1
MKLFVRDLTVIDASYLCATRGMVGESWILDVVMSGELNEMSMVLDFGRVKKQIKHLVDEYVDHRLLVPMRDPAMKLAATKEGYSTLDLLRGEKGIHLHCPDEAFCLVDADEITIETVTEHVYQVLKGELPENVEGLEITLRHENIDGAFYHYSHGLKKHDGNCQRIAHGHRSPIELLVNGQRDSEREQAWAQRWQDIYLGSQEDQVTIDELALSAHAQAISDESHYGFRYTAPQGEFELAIARSETEILPTDTTVELLAGYIADEVKATLSADDALDVVAYEGVGKGAMASL

SEQ ID NO: 23956 - protein, 169 aa, Photobacterium jeanii
  REGION 1..169: note = tr|A0A178KM81|A0A178KM81_9GAMM Queuosine biosynthesis protein QueD OS=Photobacterium jeanii; OX = 858640 GN=A3K86_06045 PE=4 SV=1
MQIHTLDKAQLINEVQLGSQLNHAVETGRRSDFSLMLAMLSPDYLENTPTEIPPAQGKTEEELREYFELARPQPLTSTEECYQRAAAQADAFHKGGIRSSQFLHELQPAALTFPPQGTKGMPEELYHNLSGHERRLLPPKDEAKLNVSPQDLYLSLIQAKRFAEMQYTA

SEQ ID NO: 23957 - protein, 293 aa, Photobacterium kishitanii
  REGION 1..293: note = tr|A0A2T3KDD5|A0A2T3KDD5_9GAMM Uncharacterized protein OS=Photobacterium kishitanii OX=318456; GN = C9J27_19875 PE=4 SV=1
MKLFVRDLTVIDASYLCPQRGMVGESWILDVVMSGELNEMSMVLDFSRVKKQIKQLVDQYVDHRLLIPAASAAIQTATTKAEYMTVDLVSDQHTIHLHSPEQAFCFIDAEAITIESVTKHVQQVLLGNLPANVQGLEIILRHEKIDGAFYHYSHGLKKHDGNCQRIAHGHRSPVELVVNGQRNADLEQQWAQRWQDIYLGSQEDVISVRELNLSAAAVNVNDETHYGFRYTAPQGEFELAIAKSVTEILATDTTVELLACYIAEQIKPQLVATDRLDVFAYEGVGKGAMVTIG

SEQ ID NO: 23958 - protein, 293 aa, Photobacterium kishitanii
  REGION 1..293: note = tr|A0A2T3QX28|A0A2T3QX28_9GAMM Uncharacterized protein OS=Photobacterium kishitanii OX=318456; GN = C0W70_11640 PE=4 SV=1
MKLFVRDLTVIDASYLCPQRGMVGESWILDVVMSGELNEMSMVLDFSRVKKQIKQLVDQYVDHRLLIPAASAAIQTATTKAEYMTVDLVSDQHTIHLHSPEQAFCFIDAEAITIESVTKHVQQVLLGNLPANVQGLEIILRHEKIDGAFYHYSHGLKKHDGNCQRIAHGHRSPVELVVNGQRNADLEQQWAQRWQDIYLGSQEDVIGVRELNLSAAAANINDETHYGFRYTAPQGEFELAIAKSVTEILATDTTVELLACYIAEQIKPQLVATDRLDVFAYEGVGKGAMVTIG

SEQ ID NO: 23959 - protein, 292 aa, Photobacterium leiognathi
  REGION 1..292: note = tr|V5H5Z0|V5H5Z0_PHOLE Uncharacterized protein; OS = Photobacterium leiognathi lrivu.4.1 OX=1248232; GN = PLEI_4114 PE=4 SV=1
MKLFVRDLTVIDASYLCTERGMVGESWILDVVMSGELNEMSMVLDFSRVKKQIKQLVDQYVDHRLIVPAKSPAINTAATTTGYATVDLLRENKSIHLHCPEQAFCFIDAEAVTIESVTEHVYQVLKGNLPENVQGLEITLRHEMINGAFYHYSHGLKKHDGNCQRIAHGHRSPIELIVNGERNAELEKQWAKRWQDIYLGSQEDVLSVTELNLSECAKQVTNETHYGFRYTAPQGEFELAIARSETEMLDTDTTVELLAGYIAEKVKPSLSDSDTLEVVAYEGVGKGAMATL

SEQ ID NO: 23960 - protein, 292 aa, Photobacterium leiognathi
  REGION 1..292: note = tr|A0A2G4WQA1|A0A2G4WQA1_PHOLE Uncharacterized protein OS=Photobacterium leiognathi OX=553611; GN = CRG86_001125 PE=4 SV=1
MKLFVRDLTVIDASYLCTERGMVGESWILDVVMSGELNEMSMVLDFSRVKKQIKQLVDQYVDHRLIVPAKSPAINTAATTTGYATVDLMREDKSIHLHCPEQAFCFIDAETVTIESVTEHVYQVLKGNLPENVQGLEITLRHETINGAFYHYSHGLKKHDGNCQRIAHGHRSPIELFVNGERNAELEKQWAKRWQDIYLGSQEDVLSVSELNLSECAKQVTDETHYGFRYTAPQGEFELAIARSETEMLSTDTTVELLAGYIAEKVKPSLSDSDVLEVVAYEGVGKGAMATL

SEQ ID NO: 23961 - protein, 291 aa, Photobacterium lipolyticum
  REGION 1..291: note = tr|A0A2T3MWI0|A0A2T3MWI0_9GAMM Uncharacterized protein OS=Photobacterium lipolyticum OX=266810; GN = C9I89_13390 PE=4 SV=1
MKLFVRDLTVIDASYLCEERGMVGESWILDVVMSGELNEMSMVLDFSRVKKQIKQLVDQYVDHRLIVPTKNVNVKMSQSKNGYATVDLLRGDKSIHLHCPEQAYCLIDDEKVTIESVTRHLHQVLIGKLPANVQGLELTLRQEKINGAFYHYTHGLKKHDGNCQRIAHGHRSPVELFVNGVRSDTLEQQWAQRWQDIYLGTAEDQVTVSELNLSDYAAGLSDDKHFGFRYTTEQGEFELAIAKSETEVIDTDTTVELLAHYIAKEVNKSLHGESLEVVAYEGVGKGAMASA

SEQ ID NO: 23962 - protein, 298 aa, Photobacterium lutimaris
  REGION 1..298: note = tr|A0A2T3J3I4|A0A2T3J3I4_9GAMM Uncharacterized protein OS=Photobacterium lutimaris OX=388278; GN = C9I99_02270 PE=4 SV=1
MKLFVRDLTVIDASYLCQHRGMVGESWILDVVMSGELNEMSMVLDFSRVKKQIKQIVDEYVDHRLIVPSQSNAIRTATTKLGYATVDLLREDKSLHLHCPEQAYCLIEDSEVTIESVTRHIYKVLEGKLPENVQGLEITLRHEQISGPFYHYSHGLKKHDGNCQRIAHGHRSPVELLINGLRDQQLEQQWADRWEDIYLGSTEDECTLAELNLSPFAAEASEQSHYAFRYTAPQGEFELAIARSDVEMLDTDTTVELLAQYIAAQVSESVEVGSTVDVIAYEGVGKGAIASAKGRLNA

SEQ ID NO: 23963 - protein, 291 aa, unidentified
  source 1..291: note = Photobacterium marinum
  REGION 1..291: note = tr|L8JGX5|L8JGX5_9GAMM NADPH dependent preQ0 reductase OS=Photobacterium marinum OX=1056511; GN = C942_04375 PE=4 SV=1
MKLFVRDLTVIDASYLCEKRGMVGESWILDVVMSGELNEMSMVLDFGRVKKQIKKLVDEYVDHRLIVPMKNSRIHVAASKPGYAMVDLLREGKSIHLNCPEQAYCYIDDDVVTIESVTHHLYKVLEGKLPDNVQGLELTLRHEKIDGAFYHYSHGLKKHDGNCQRIAHGHRSPVELIVDGQRDAELEQKWAERWQDIYLGSSEDLISVSELTLSEKAAVATDTSHYGFRYTAPQGEFELAIARFESEVLDTDTTVELLADYIAEQVSEMVPGKALDVVAYEGVGKGAMASK

SEQ ID NO: 23964 - protein, 169 aa, unidentified
  source 1..169: note = Photobacterium marinum
  REGION 1..169: note = tr|L8JGM1|L8JGM1_9GAMM Putative queD protein; OS = Photobacterium marinum OX=1056511 GN=C942_01321 PE=4; SV = 1
MQIHTLDKAQLINEVQLGGQLNHAVEGGRRADFALMLAMLSPDHLETVPIDAPPPKGKTEAELRAYFELRDPQPLTTSEHCYENAAAQAKAFHESGLNGVRLLQELQPTALTFPPQDTKGLPEEVYHNLSGHERRMLPPKEEAKIKASPQDLYLSLIQAKRFAEMYQTA

SEQ ID NO: 23965 - protein, 293 aa, Photobacterium phosphoreum; identical to SEQ ID NO: 23957
  REGION 1..293: note = tr|A0A0B7JEU8|A0A0B7JEU8_PHOPO Uncharacterized protein OS=Photobacterium phosphoreum ANT-2200 OX=1454202; GN = PPBDW_II1061 PE=4 SV=1

SEQ ID NO: 23966 - protein, 293 aa, Photobacterium phosphoreum
  REGION 1..293: note = tr|A0A2T3Q031|A0A2T3Q031_PHOPO Uncharacterized protein OS=Photobacterium phosphoreum OX=659; GN = CTM87_02700 PE=4 SV=1
MKLFVRDLTVIDASYLCPQRGMVGESWILDVVMSGELNEMSMVLDFSRVKKQIKQLVDQYVDHRLLIPTASTAIQTATTKAEYMTVDLVSDQHAIHLHSPEQAFCFIDAEAITVESVTKHVEQVLLGNLPANVQGLEITLRHENIDGAFYHYSHGLKKHDGNCQRIAHGHRSPIELVVNGQRNAELEQQWAHRWEDIYLGSQEDVISVGELNLSAAAANINDETHYGFRYTAPQGEFELAITKSVTEILATDTTVELLASYIADQIKPQLAATDSLDVFAYEGVGKGAMVTLG

SEQ ID NO: 23967 - protein, 292 aa, unidentified
  source 1..292: note = Photobacterium piscicola
  REGION 1..292: note = tr|A0A1T5HXU4|A0A1T5HXU4_9GAMM 6-pyruvoyl tetrahydropterin synthase OS=Photobacterium piscicola; OX = 1378299 GN=CZ809_01097 PE=4 SV=1
MKLFVRDLTVIDASYLCPQRGMVGESWILDVVMSGELNEMSMVLDFSRVKKQIKQLVDQYVDHRLLIPSASAAIQAAATKADYMTVDLVSDQHAIHLHSPEQAFCFIDTDAITIESVTEYVQQLLLGHLPSNVQGLEITLRHEKIDGAFYHYSHGLKKHDGNCQRIAHGHRSPVELVVNGQRNAELEQQWAQRWHDIYLGSQEDVISVSELTLSSAVNINDDTHYGFRYTAPQGEFELAIAKSVTEILATDTTVELLASYIAEQIKPQLTATDRLDVFAYEGVGKGAMASIG

SEQ ID NO: 23968 - protein, 270 aa, Photobacterium profundum
  REGION 1..270: note = tr|Q1Z648|Q1Z648_9GAMM Uncharacterized protein; OS = Photobacterium profundum 3TCK OX=314280 GN=P3TCK_12446; PE = 4 SV=1
MVGESWILDVVMSGELNEMSMLLDFSRVKKQIKFLVDEHVDHRLIVPSNNTAIRTATTKSGYATVDLLRDDKSIHLHSPEEAYCFIEAEKVTIESVTAYLHNVLKGNLPDNVEGLELTLRHEKIDGPFYHYSHGLKKHDGNCQRIAHGHRSPVELFVDGARHTELEQQWASRWEDIYLGTKEDMISVTELNLSEHATTITDDGYFGFRYIAPQGEFELAIAKSETEIIDTDTTVELLASYIANEVKLSLSDESLEVVAYEGVGKGAMASA

SEQ ID NO: 23969 - protein, 291 aa, Photobacterium profundum
  REGION 1..291: note = tr|Q6LKJ1|Q6LKJ1_PHOPR Uncharacterized protein; OS = Photobacterium profundum (strain SS9) OX=298386; GN = SO2179 PE=4 SV=1
MKLFVRDLTVIDASYLCDERGMVGESWILDVVMSGELNEMSMLLDFSRVKKQIKFLVDEHVDHRLIVPSNNTAIRTATTKSGYATVDLLRGDKSIHLHSPEEAYCFIDAEKVTIESVTAYLHNVLKGNLPDNVEGLELTLRHEKIDGPFYHYSHGLKKHDGNCQRIAHGHRSPVELFVDGARHTELEQQWANRWEDIYLGTKEDMISVAELNLSEHATFISDDGYFGFRYTAPQGEFELAIAKSETEIIDTDTTVELLASYIANEVKQSLSDESLEVVAYEGVGKGAMASA

SEQ ID NO: 23970 - protein, 291 aa, unidentified
  source 1..291: note = Photobacterium proteolyticum
  REGION 1..291: note = tr|A0A1Q9GVA1|A0A1Q9GVA1_9GAMM Uncharacterized protein OS=Photobacterium proteolyticum OX=1903952; GN = BIT28_14715 PE=4 SV=1
MKLFVRDLTVIDASYLCEQRGMVGESWILDVVMSGELNEMSMVLDFSRVKKQIKQLVDEFVDHRLIVPTRNSRIHVAESQPGYATVDLLRDETSIHLNCPDQAYCFIDDDAVTIESVTRHLYQVLDGKLPDNVQGLELTLRHEKIQGAFYHYSHGLKKHDGNCQRIAHGHRSPVELFVDGQRDAELEQQWAQRWQDIYLGSREDEVALSELNLSKHAAGISELTHYGFRYQAPQGEFELAIARSETEMLDTDTTVELLAHYIAEQVSPMVAGKSLDVVAYEGVGKGAMASV

SEQ ID NO: 23971 - protein, 298 aa, Photobacterium rosenbergii
  REGION 1..298: note = tr|A0A2T3NJH8|A0A2T3NJH8_9GAMM Uncharacterized protein OS=Photobacterium rosenbergii OX=294936; GN = C9J01_01020 PE=4 SV=1
MKLFVRDLTVIDASYLCQQRGMVGESWILDVVMSGELNEMSMVLDFSRVKKQIKQIVDEYVDHRLIVPSQSDAIRTAATKPGYATVDLLRGDKSLHLHCPEQAYCFIDDSEVTIESVTRHIHKVLEGKLPENVQGLELTLRPEHIPGPFYHYSHGLKKHDGNCQRIAHGHRSPVELVINGQRDTALEQQWAERWQDIYLGSTEDECVLSELNLSSLAANVTEQTHHAFRYTAPQGEFELAIARSDVEMISTDTTVELLAQYIAEQVSTSVASGSTIEVIAYEGVGKGAMAATVGQLKA

SEQ ID NO: 23972 - protein, 297 aa, unidentified
  source 1..297: note = Photobacterium sanctipauli
  REGION 1..297: note = tr|A0A2T3NUF3|A0A2T3NUF3_9GAMM Uncharacterized protein OS=Photobacterium sanctipauli OX=1342794; GN = C9I98_10495 PE=4 SV=1
MKLFVRDLTVIDASYLCETRGMVGESWILDVVMSGELNEMSMVLDFSRVKKQIKHIVDEFVDHRLIVPSQSKAVRIAACKPGYSTVDLLRADKGIHLNCPDEAYCFVDAEAVTIESVTQHVYKVLEGKLPENVQGLEITLRYENIDGALYHYSHGLKKHDGNCQRIAHGHRSPVELLVDGKRDSELEAKWAERWSDIYLGSDEDVCPLSALSLSAEAKNLSDELHYGFKYTAPQGEFELAIARSDVEMLNTDTTVELLAHYIAEQVSPLVDAGKTLDVLAYEGVGKGAMATVAGSKQ

SEQ ID NO: 23973 - protein, 292 aa, unidentified
  source 1..292: note = Photobacterium sanguinicancri
  REGION 1..292: note = tr|A0A264TAW9|A0A264TAW9_9GAMM Uncharacterized protein OS=Photobacterium sanguinicancri OX=875932; GN = ASV53_10615 PE=4 SV=1
MKLFVKDLTVIDASYLCATRGMVGESWILDVVMSGELNEMSMVLDFSRVKKQIKHLVDEYVDHRLLVPMRDPAVHLATTKDGYSTLDILRGEKGIHLHCPDEAYCLVDTDAITVQTVTEHVYHVLKDQLPTNVQGLEITLRHENIDGAFYHYTHGLKKHDGNCQRIAHGHRSPIELLVNGKRDAEREQQWAQRWQDIYLGSAEDQANVNDLTLSQHAQSVSDETHYGFRYTAPQGEFELAIARTETEILDTDTTVELLAGYIAQQVKPTLKGDDILDVVAYEGVGKGAMASL

SEQ ID NO: 23974 - protein, 169 aa, unidentified
  source 1..169: note = Photobacterium sanguinicancri
  REGION 1..169: note = tr|A0A135ZNL4|A0A135ZNL4_9GAMM Queuosine biosynthesis protein QueD OS=Photobacterium sanguinicancri; OX = 875932 GN=AS132_09960 PE=4 SV=1
MQIHTLDKAQLINEVQLGSQLNHAVETGRRSDFALMLAMLSPDYLEKTPTEIPPAEGKTEEELREYFELARPQPLTSTEHCYERAASQADAFHRGGLRSSQFLHELQPAALTFPPQGTKGMPEELYHNLSGHERRRLPPAEEAKLKVSPQDLYLSLIHAKRFAEMHHAA

SEQ ID NO: 23975 - protein, 292 aa, Photobacterium sp.
  REGION 1..292: note = tr|Q2C8V3|Q2C8V3_9GAMM Uncharacterized protein; OS = Photobacterium sp. SKA34 OX=121723 GN=SKA34_09098 PE=4; SV = 1
MKLFVRDLTVIDASYLCTDRGMVGESWILDVVMSGELNEMSMVLDFSRVKKQIKQLVDQYVDHRLIVPAKSPAIHTAATKTGYATVDLLREDKNIHLHCPEEAFCFIDAETVTIESVTEHVYHVLKDNLPENVQGLEVVLRHEVIQGAFYHYSHGLKKHDGNCQRIAHGHRSPIELIVNGERNAELEKQWAKRWQDIYLGSEEDVCSVTKLNLSECAKSVSDETHYGFRYTAPQGEFELAIARSETEMLATDTTVELLASYIAEKVKPSLSADDCLDVVAYEGVGKGAMATL

SEQ ID NO: 23976 - protein, 290 aa, Photobacterium sp.
  REGION 1..290: note = tr|A0A444JTG1|A0A444JTG1_9GAMM Uncharacterized protein OS=Photobacterium sp. BEI 247 OX=2485123; GN = EDI28_08700 PE=4 SV=1
MKLFVRDLTVIDASYLCAQRGMVGESWILDVVMSGELNEMSMVLDFSRVKKQIKQLVDEYVDHRLIVPAQNARIHVAESQPGYTTVDLLRDEKSIHLNCPDQAYCFIDDDAVTIESVTQHLYQVLEGKLPANVQGLELTLRHENIDGSFYHYSHGLKKHDGNCQRIAHGHRSPIELYVNGQRDAELEQLWAQRWQDIYLGSSEDEVALSVLNLSKHAATVTESTHYGFRYHAPQGKFELAIARSETEVLSTDTTVELLAQYIAEQVSPMVAAKPLEVVAYEGVGKGAMAS

SEQ ID NO: 23977 - protein, 292 aa, Photobacterium swingsii
  REGION 1..292: note = tr|A0A0J8Y323|A0A0J8Y323_9GAMM Uncharacterized protein OS=Photobacterium swingsii OX=680026; GN = C9I94_06335 PE=4 SV=1
MKLFVKDLTVIDASYLCATRGMVGESWILDVVMSGELNEMSMVLDFSRVKKQIKQLVDEYVDHRLLVPMRDPSVHLATTKEGYSTLDMLRGEKGIHLHCPDEAYCLVDTETITVETVTEHVYQVLKDELPANVQGLEITLRHENIDGAFYHYTHGLKKHDGNCQRIAHGHRSPVELLVNGKRDAERELQWAQRWQDIYLGSIEDQISVDALALSQHAQTVTDDTHFGFRYTAPQGEFELAIARSETEILDTDTTVELLAGYIAQHVKATLNEDDTLDVVAYEGVGKGAMASL

SEQ ID NO: 23978 - protein, 293 aa, unidentified
  source 1..293: note = Photobacterium toruni
  REGION 1..293: note = tr|A0A1T4SUT1|A0A1T4SUT1_9GAMM 6-pyruvoyl tetrahydropterin synthase OS=Photobacterium toruni; OX = 1935446 GN=CZ814_01760 PE=4 SV=1
MKLFVRDLTVIDASYLCPQRGMVGESWILDVVMSGELNEMSMVLDFSRVKKQIKQLVDQYVDHRLLIPSASVAIQTAVTKENYMTVDLVSEQHAIHLHSPEQAFCFIDTDAITIESVTEYVQQLLLGHLPSNVQGLEITLRHEKIDGAFYHYSHGLKKHDGNCQRIAHGHRSPVELVVNGQRNADLEQQWAQRWHDIYLGSQEDVISVSELNLSTVAANINDETHYGFRYTAPQGEFELAIAKSVTEILATDTTVELLASYIAEQIKPQLAATDQLDVFAYEGVGKGAMVTLG

SEQ ID NO: 23979 - protein, 120 aa, Photorhabdus asymbiotica
  REGION 1..120: note = tr|C7BLC2|C7BLC2_PHOAA 6-carboxy-5,6,7,8-tetrahydropterin synthase; OS = Photorhabdus asymbiotica subsp. asymbiotica (strain ATCC 43949 / 3105-77) OX=553480 GN=ygcM PE= 3 SV=1
MSTTIFKDFQFEAAHRLPHVPEGHKCGRLHGHSFMVRLEITGEVDPHSGWIIDFADLKAIFKPVWEQLDHQYLNDIPGLENPTSEVLSAWIWAKVKPKVPQLSAVMVKETCNAGCIFRGK

SEQ ID NO: 23980 - protein, 120 aa, unidentified
  source 1..120: note = Photorhabdus australis
  REGION 1..120: note = tr|A0A1C0U9N5|A0A1C0U9N5_9GAMM 6-carboxy-5,6,7,8-tetrahydropterin synthase; OS = Photorhabdus australis OX=286156 GN=queD PE=3 SV=1
MSTTIFKDFQFEAAHRLPHVPEGHKCGRLHGHSFMVRLEITGEVDPHSGWIMDFADLKAIFKPVWEQLDHQYLNDIPGLENPTSEVLAAWIWDKVKPKVPQLSAVMVKETCNAGCIFRRK

SEQ ID NO: 23981 - protein, 105 aa, unidentified
  source 1..105: note = Photorhabdus bodei
  REGION 1..105: note = tr|A0A329XEK3|A0A329XEK3_9GAMM Uncharacterized protein OS=Photorhabdus bodei OX=2029681 GN=CKY02_05595; PE = 4 SV=1
MLIVVSTKFHIQREYDSWQEALMNIDSIGIMMQRDDIGFSASHFTIFSEFERETLHGHNFNVGVEVYSEYEENGMIFDYCIIKKNSMSFVVISMTNYYFLVNHHF

SEQ ID NO: 23982 - protein, 120 aa, unidentified
  source 1..120: note = Photorhabdus bodei
  REGION 1..120: note = tr|A0A329X2G3|A0A329X2G3_9GAMM 6-carboxy-5,6,7,8-tetrahydropterin synthase; OS = Photorhabdus bodei OX=2029681 GN=queD PE=3 SV=1
MSTTIFKDFQFEAAHRLPHVPEGHKCGRLHGHSFMVRLEITGEVDPHSGWIMDFADLKALFKPVWEQLDHHYLNDIPGLENPTSEVLATWIWHKVKPIVPQLSAVMVKETCNAGCIFRGK

SEQ ID NO: 23983 - protein, 120 aa, unidentified
  source 1..120: note = Photorhabdus heterorhabditis
  REGION 1..120: note = tr|A0A0N0CLY4|A0A0N0CLY4_9GAMM 6-carboxy-5,6,7,8-tetrahydropterin synthase; OS = Photorhabdus heterorhabditis OX=880156 GN=AM629_14715; PE = 3 SV=1
MSTTIFKDFQFEAAHRLPHVPEGHKCGRLHGHSFIVRLEITGEVDPHSGWIMDFADLKTIFKPVWEQLDHHYLNDIPGLENPTSEVLAAWIWAKVKPKVPQLSAVMVKETCNAGCIFRGK

SEQ ID NO: 23984 - protein, 120 aa, unidentified
  source 1..120: note = Photorhabdus khanii
  REGION 1..120: note = tr|W3V152|W3V152_9GAMM 6-carboxy-5,6,7,8-tetrahydropterin synthase; OS = Photorhabdus khanii NC19 OX=1004151 GN=PTE_03946 PE=3; SV = 1
MRTTIFKDFQFEAAHHLPHVPEGHKCGRLHGHSFMVRLEITGEVDPHSGWIMDFADLKTVFKPIWEQLDHHYLNDIPGLENPTSEVLAAWIWAKVKPSIPQLSAVMVKETCNAGCIFRGK

SEQ ID NO: 23985 - protein, 120 aa, unidentified
  source 1..120: note = Photorhabdus laumondii
  REGION 1..120: note = tr|A0A329VDX0|A0A329VDX0_9GAMM 6-carboxy-5,6,7,8-tetrahydropterin synthase; OS = Photorhabdus laumondii subsp. clarkei OX=2029685; GN = queD PE=3 SV=1
MSTTIFKDFQFEAAHRLPHVPEGHKCGRLHGHSFIVRLEITGEVNPHSGWIMDFADLKALFKPVWEQLDHHYLNDIPGLENPTSEVLATWIWHKVKPIVPQLSAVMVKETCTAGCIFRGK

SEQ ID NO: 23986 - protein, 194 aa, unidentified
  source 1..194: note = Photorhabdus laumondii
  REGION 1..194: note = tr|Q7N3C3|Q7N3C3_PHOLL Uncharacterized protein; OS = Photorhabdus laumondii subsp. laumondii (strain DSM 15139 / CIP 105565 / TT01) OX=243265 GN=plu2794 PE=4 SV=1
MTIQYITRKGSFDSAHRVMNERVKCFNIHGHTYLYELTFSFEQMQPIGYAIDFKEIKRIGAAWIDEFLDHASILNPKDADFISAVHATRSKFRLMSLNRHGEYCNPTVENIAKEIFLTMEVLFNEWDNLKIHHIRLYETPNCFTDCNAESIHEEERSAFLSQRFEELKAYSQAMGRFEYDSRNVVTSDSTHERL

SEQ ID NO: 23987 - protein, 120 aa, Photorhabdus luminescens
  REGION 1..120: note = tr|A0A5C4REM7|A0A5C4REM7_PHOLU 6-carboxy-5,6,7,8-tetrahydropterin synthase; OS = Photorhabdus luminescens subsp. sonorensis OX=1173677; GN = queD PE=3 SV=1
MSTTIFKDFQFEAAHRLPHVPEGHKCGRLHGHSFMVRLEITGEVDPHSGWIMDFADLKALFKPVWEQLDHHYLNDIPGLENPTSEVLATWIWDKVKPIIPQLSAVMVKETCNAGAIFRGK

SEQ ID NO: 23988 - protein, 120 aa, Photorhabdus luminescens; identical to SEQ ID NO: 23987
  REGION 1..120: note = tr|A0A1G5RIX8|A0A1G5RIX8_PHOLU 6-carboxy-5,6,7,8-tetrahydropterin synthase; OS = Photorhabdus luminescens OX=29488 GN=SAMN02982990_04518; PE = 3 SV=1

SEQ ID NO: 23989 - protein, 120 aa, unidentified
  source 1..120: note = Photorhabdus namnaonensis
  REGION 1..120: note = tr|A0A1B8YIJ5|A0A1B8YIJ5_9GAMM 6-carboxy-5,6,7,8-tetrahydropterin synthase; OS = Photorhabdus namnaonensis OX=1851568 GN=queD PE=3 SV=1
MSTTIFKDFQFEAAHRLPHVPEGHKCGRLHGHSFMVRLEITGEVDPHSGWIMDFADLKALFKPIWEQLDHHYLNDIPGLENPTSEVLAAWIWDKVKPTIPQLSAVMVKETCNAGAIFRGK

SEQ ID NO: 23990 - protein, 194 aa, unidentified
  source 1..194: note = Photorhabdus namnaonensis
  REGION 1..194: note = tr|A0A1B8YDU7|A0A1B8YDU7_9GAMM 6-pyruvoyl tetrahydropterin synthase OS=Photorhabdus namnaonensis; OX = 1851568 GN=Phpb_03385 PE=4 SV=1
MTIQYITRKGSFDSAHRVMNERVKCFNIHGHTYLYELTFSFEQMQSIGYAIDFKEIKRIGAAWIDEFLDHASILNPKDADFISAVHATRSKFRLMSLNPSGEYCNPTVENIAKEIFLTMEVLFSEWDSLKIHHVRLYETPNCFTDCNADSIHEEERNAFLSQRFEELKAYSQAMGRFEYDSRNIVTPDSTSENL

SEQ ID NO: 23991 - protein, 193 aa, Photorhabdus sp.
  REGION 1..193: note = tr|A0A4R4JS22|A0A4R4JS22_9GAMM 6-carboxytetrahydropterin synthase OS=Photorhabdus sp. MEX47-22 OX=2100167 GN=C5468_00715 PE=4 SV=1
MTIQYITRKGSFDSAHRVMNERVKCFNIHGHTYLYELTFSFEQMQPIGYAIDFKEIKRIGAAWIDEHLDHASILNPKDADFISAVHATRSKFRLMSLNPSGEYCNPTVENIAKEIFLTMEVLFSEWNSLKIHHVRLYETPNCFTDCNADSIHEEERSAFLSQRFEELKAYSQAMGQFEYDSRNVVTSDSTSEH

SEQ ID NO: 23992 - protein, 120 aa, Photorhabdus sp.
  REGION 1..120: note = tr|A0A4R4J2H7|A0A4R4J2H7_9GAMM 6-carboxy-5,6,7,8-tetrahydropterin synthase; OS = Photorhabdus sp. MEX20-17 OX=2100166 GN=queD PE=3 SV=1
MSTTIFKDFQFEAAHHLPHVPEGHKCGRLHGHSFMVRLEITGEVDPHSGWIMDFADLKTVFKPIWEQLDHHYLNDIPGLENPTSEVLAAWIWAKVKPSIPQLSAVMVKETCNAGCIFRGK

SEQ ID NO: 23993 - protein, 120 aa, Photorhabdus temperata
  REGION 1..120: note = tr|A0A4R7Q2M6|A0A4R7Q2M6_PHOTE 6-carboxy-5,6,7,8-tetrahydropterin synthase; OS = Photorhabdus temperata OX=574560 GN=EDD23_1175 PE=3 SV=1
MSTTIFKDFQFEAAHHLPHVPDGHKCGRLHGHSFMVRLEITGEVDPHSGWIMDFADLKAVFKPIWEQLDHHYLNDIPGLENPTSEVLAAWIWAKVKPSVPQLSAVMVKETCNAGCIFRGK

SEQ ID NO: 23994 - protein, 120 aa, Photorhabdus temperata
  REGION 1..120: note = tr|T0PFP7|T0PFP7_PHOTE 6-carboxy-5,6,7,8-tetrahydropterin synthase; OS = Photorhabdus temperata subsp. temperata M1021; OX = 1221520 GN=B738_02865 PE=3 SV=1
MSTTIFKDFQFEAAHHLPHVPEGHKCGRLHGHSFMVRLEITGEVDPHSGWIMDFADLKTVFKPVWEQLDHHYLNDIPGLENPTSEVLAAWIWAKVKPSIPQLSAVMVKETCNAGCIFRGK

SEQ ID NO: 23995 - protein, 120 aa, unidentified
  source 1..120: note = Photorhabdus thracensis
  REGION 1..120: note = tr|A0A0F7LHR8|A0A0F7LHR8_9GAMM 6-carboxy-5,6,7,8-tetrahydropterin synthase; OS = Photorhabdus thracensis OX=230089 GN=VY86_04190 PE=3; SV = 1
MNTTIFKDFQFEAAHHLPHVPEGHKCGRLHGHSFMVRLEITGEVDPHSGWIMDFADLKTVFKPVWEQLDHHYLNDIPGLENPTSEVLAAWIWAKVEPSIPQLSAVMVKETCNAGCIFRGK

SEQ ID NO: 23996 - protein, 136 aa, unidentified
  source 1..136: note = Phreatobacter cathodiphilus
  REGION 1..136: note = tr|A0A2S0NDD7|A0A2S0NDD7_9PROT Uncharacterized protein OS=Phreatobacter cathodiphilus OX=1868589; GN = C6569_13805 PE=4 SV=1
MYSVEVRDRIMIAHSLPDPFFGPAQGKHGASFVVDVAFFRETLTAQNVVVDIGAALDVLGKTLKRLAYQDLDTLPEFAGQLTTTEFLCKYVFDRMAEAAASGALGADAAGLAKIRVTLHEHDLARATFEAPLARRA

SEQ ID NO: 23997 - protein, 136 aa, unidentified
  source 1..136: note = Phreatobacter oligotrophus
  REGION 1..136: note = tr|A0A2T4Z348|A0A2T4Z348_9PROT 6-pyruvoyl-tetrahydropterin synthase OS=Phreatobacter oligotrophus OX=1122261 GN=C8P69_105355 PE=4 SV=1
MYSVEVRDRIMIAHSLPDPFFGPAQGKHGASFVIDVAFFRETLTAQNVVVDIGAALDVLGKTLKRLAYQDLDTLPEFAGKLTTTEFLCKYVFDRMAEAARSGALGADAGGLAKIRVTLHEHDLARATFEAPLPQAA

SEQ ID NO: 23998 - protein, 133 aa, unidentified
  source 1..133: note = Phreatobacter sp.
  REGION 1..133: note = tr|A0A4D7QK34|A0A4D7QK34_9PROT 6-carboxytetrahydropterin synthase OS=Phreatobacter sp. NMCR1094 OX=2570229 GN=E8L99_02225 PE=4 SV=1
MFSVEVRDRIMIAHSLPDPFFGPAQGKHGASFVVDVAFYRETLTPQNVVVDIGAALDVLSKTLKPLAYQDLDTLPQFKGQLTTTEFLCKYVFDAVAAAAKSGALGVDGQGLAKIRVTLHEHDLARATYEGSVA

SEQ ID NO: 23999 - protein, 171 aa, unidentified
  source 1..171: note = Phreatobacter stygius
  REGION 1..171: note = tr|A0A4D7BGL6|A0A4D7BGL6_9PROT 6-pyruvoyl tetrahydrobiopterin synthase OS=Phreatobacter stygius; OX = 1940610 GN=E8M01_23800 PE=4 SV=1
MADSAVSIIPDVQRLKPSQRETYRSTKSYDHNEGLSCCFRQWRASHSHCRFVHGYALAFKFVFATHELDERNWCYDFGGMKPVKAWLHEMFDHTMVVAEDDPELATFRKMAADGLVDLRILPAVGCEATAKFVFDHVAPSIKAETHGRVWLESVEVREHAGNSAVYERLGG

SEQ ID NO: 24000 - protein, 133 aa, unidentified
  source 1..133: note = Phreatobacter stygius
  REGION 1..133: note = tr|A0A4D7ATM8|A0A4D7ATM8_9PROT 6-carboxytetrahydropterin synthase OS=Phreatobacter stygius OX=1940610 GN=E8M01_08450 PE=4 SV=1
MYSVEVRDRMMIAHSLPDPFFGPAQGKHGASFVIDVAFFRETLNRQNVVVDIGAALDVLGKTLKELAYQDLDGLPQFKGQLTTTEFLCRYVYDACVAAAKSGGLGTDGATLAKIRVTLHEHDLARASFEGPVA

SEQ ID NO: 24001 - protein, 132 aa, Phycicoccus bigeumensis
  REGION 1..132: note = tr|A0A502D0P5|A0A502D0P5_9MICO 6-carboxytetrahydropterin synthase OS=Phycicoccus bigeumensis OX=433644 GN=EAH86_02405 PE=4 SV=1
MFRVTVRDHMMIAHSFSGAVFGPAQSLHGATYVVDATFHREDLDDDGIVVDIGRAGEQLHAALADLNYRNLDDDPSLAGTNTTTEVLARVVADRLADRIHAGELGDGARGVAAITVTLGESPVAWASYERTL

SEQ ID NO: 24002 - protein, 132 aa, Phycicoccus cremeus
  REGION 1..132: note = tr|A0A1H9TEJ7|A0A1H9TEJ7_9MICO 6-pyruvoyl-tetrahydropterin synthase OS=Phycicoccus cremeus OX=587636 GN=SAMN05216199_1559 PE=4 SV=1
MFSVTVRDHMMVAHSLRGEVFGPAQRLHGATFIVDATFRSASLDADGVVVDIGRATEQLRAVIGELTYRNLDDDPVFAGVNTTTEALAKVVADALATRASEGELGPAAEHLAGIAVTLRESHVAWASYERDL

SEQ ID NO: 24003 - protein, 131 aa, Phycicoccus sp.
  REGION 1..131: note = tr|A0A542IKA9|A0A542IKA9_9MICC 6-pyruvoyltetrahydropterin/6-carboxytetrahydropterin synthase OS=Phycicoccus sp. SLBN-51 OX=1456756; GN = FBY27_2618 PE=4 SV=1
MFSLTVRRHFMIAHSLPREAFGPAQGLHGATFVAEVAFRRRALNEDAIVLDIGAAGTIIEDVLGGLNYRNLDEHPDFDGKLTTTEALAEYIAQKVAARIKDTADGPELAGLDVTLRENPDAWATYSLDLTT

SEQ ID NO: 24004 - protein, 132 aa, Phycicoccus sp.
  REGION 1..132: note = tr|A0A0Q9SKA0|A0A0Q9SKA0_9MICO 6-pyruvoyl tetrahydropterin synthase OS=Phycicoccus sp. Soil802; OX = 1736414 GN=ASG91_16700 PE=4 SV=1
MFRVTVRDHIMIAHSFRGEVFGPAQSLHGATYVVDATFHRPDLDDDGIVVDIGRAGEQLRAVLADLNYRNLDDDPTLTGGNTTTEALAKLVADRLVDRIHAGDLGATAAGITAVTVTLAESPVASASYEREL

SEQ ID NO: 24005 - protein, 150 aa, Phycisphaera mikurensis
  REGION 1..150: note = tr|I0IEL7|I0IEL7_PHYMF 6-pyruvoyl tetrahydropterin synthase family protein OS=Phycisphaera mikurensis (strain NBRC 102666 / KCTC 22515 / FYK2301M01) OX=1142394 GN=PS MK_15460 PE=4 SV=1
MHEITVTTAFSAAHALRLPDGSLEPVHGHDWKLTLRVASEGLDAMGAVMDFHELQRLVDAAVARWRNADLNTLPPFAAGVAAGDDGCGIGSLDPPPGRAWNPTAERVAQEVAVRVAPGLPAGVRMRSVSVTEAVGCTARFTPAYASDAAP

SEQ ID NO: 24006 - protein, 255 aa, Phycisphaera mikurensis
  REGION 1..255: note = tr|I0IIJ5|I0IIJ5_PHYMF Putative 6-pyruvoyl tetrahydrobiopterin synthase OS=Phycisphaera mikurensis (strain NBRC 102666 / KCTC 22515 / FYK2301M01) OX=1142394; GN = PSMK_ 29240 PE=4 SV=1
MFELTRTLRFCPSGDPGAPRDNAHAAWPPPRGLAGVLSLDLTIAGRPDPGTGVLLNVKDLDAAFAAAALPRFRAAAGAEPAGLLRGVAQALAPTLPFPLLRLRLSASASASTELRPADMSRVILRQRFSFSAAHRLQADALSEEENRTLFGKCNRPSFHGHNYELEVAAAAAIAPDGRSLEPAALDAAVRTRVIDTLDHRNLNTDVAAFATRNPTVEHIAQTCWDLLAGGLPEGAELQEVVVWETDRTSCAYRGG

SEQ ID NO: 24007 - protein, 288 aa, Phycisphaera sp.
  REGION 1..288: note = tr|A0A424JV08|A0A424JV08_9BACT 6-carboxytetrahydropterin synthase OS=Phycisphaera sp. TMED24 OX=1986832 GN=CBB84_005170 PE=4 SV=1
MGSARRAGDWQPIRKRKETLRNMRDFTAKRPYRISVVELTRIVRFHLDGSPSPLGSNGYAGRPALSQIASMVEVHITLRGEPDPTTHYVLDIKRFDRWANKHIFPAVSMLPQSSSLDKILRNAFQNTHDLPHELISLKLQLSPYATLNLEQPMPHEPPTLTFSQTYDFAAAHYLWAHNADDAQNRDLYGKCSGIHGHNYQVEVVVEPQSNDPIPADKLDLLVAEHLLEAWDHRVLNDLDDFQDVPPSVERIAEKAAGRLVAPLAASNLRLREVSVSETDRTRARVRLG

SEQ ID NO: 24008 - protein, 120 aa, Phycisphaera sp.
  REGION 1..120: note = tr|A0A424KQC2|A0A424KQC2_9BACT 6-carboxy-5,6,7,8-tetrahydropterin synthase; OS = Phycisphaera sp. TMED9 OX=1986611 GN=queD PE=3 SV=1
MRVSLSKSFGFEAAHWLPTFPEDHKCRRLHGHSFHVDIVVEGDVPEESGYLMDFGTIKAAIKPVEEALDHRCLNEIEGLENPTSEMLARWIWQRIAPELPLLSEVRIRETCSSSCVYRGD

SEQ ID NO: 24009 - protein, 133 aa, unidentified
  source 1..133: note = Phycisphaeraceae bacterium
  REGION 1..133: note = tr|A0A1Z9QAA6|A0A1Z9QAA6_9BACT Uncharacterized protein OS=Phycisphaeraceae bacterium TMED231 OX=1986831; GN = CBD91_04895 PE=4 SV=1
MDDPLSYTRNMFELEVSHRFSAAHAVTVGGVREELHGHDWRVTVTVRGPRLDEEDLLVDFHVVETSLKDVVAPFSGRTINGVPPFDRLHPTAERIAEHVATRLAPSIPEGCAIASVAVEEAPGCIARWLPASK

SEQ ID NO: 24010 - protein, 124 aa, unidentified
  source 1..124: note = Phycisphaeraceae bacterium
  REGION 1..124: note = tr|A0A520QD73|A0A520QD73_9BACT 6-carboxytetrahydropterin synthase OS=Phycisphaeraceae bacterium OX=2026777 GN=EVA77_04025 PE=4 SV=1
MPFELRIERTFSAAHAIVIQGEREPLHGHDWRVLVAVRGPQLDQEELLCDFHAIEQQVDGVIAPFHNANLNETAPFNQRNPTAEAIADYVYQTLVDRMPQGASLHRVEIGEAPGCTAVYGVRLD

SEQ ID NO: 24011 - protein, 120 aa, unidentified
  source 1..120: note = Phycisphaerae bacterium
  REGION 1..120: note = tr|A0A5C5W789|A0A5C5W789_9BACT 6-carboxy-5,6,7,8-tetrahydropterin synthase; OS = Phycisphaerae bacterium RAS1 OX=2528034 GN=queD_1 PE=3; SV = 1
MTVRLSKSFTFEAAHSLPGFPDGHKCRRLHGHSFRVDVHVEGPLDPKRGYLIDYGEIKAAFEPLRARLDHYHLNEIEGLENPTSEMIARWIWERLRPALPLLAEVVVHETCDSRCEFRGG

SEQ ID NO: 24012 - protein, 269 aa, unidentified
  source 1..269: note = Phycisphaerae bacterium
  REGION 1..269: note = tr|A0A1Q2MDW6|A0A1Q2MDW6_9BACT 6-pyruvoyl tetrahydropterin synthase/QueD family protein; OS = Phycisphaerae bacterium SM-Chi-D1 OX=1851148; GN = SMSP2_01247 PE=4 SV=1
MPSLSREIRFTVNPFSSNRLKGANSYCSSPSGEGLGLFFGLWVEVGGDVDADTGFVVNLVDIDRLVRLNVVPVFVEKICEKYRNGREVSFCDIVELLKYSAQILKDKFSPQKLLSLKLFLNPYRTLRYLTESEKVIYYSEKFEFAAMHRLWNSSFSDEKNFRIFGKCANPNGHGHNYIAEVTAAVECGTEFEFGSFQKVVDENFISILDHKNLNADVEYFRTANPTLENITRFGWKVLKDRIVPARLHRIKVWENNRAFCSYEGEAESQ

SEQ ID NO: 24013 - protein, 127 aa, unidentified
  source 1..127: note = Phycisphaerales bacterium
  REGION 1..127: note = tr|A0A3C0EHH4|A0A3C0EHH4_9BACT 6-carboxytetrahydropterin synthase QueD OS=Phycisphaerales bacterium OX=2052180 GN=DCM28_01750 PE=4 SV=1
MYQIQIKKTFSASHAIYLPDGSLEPLHGHNWPVVVTVESKELDAIETVMDFHVLEGWINDLLATVHNRHLNEVAPFAGEDGKLAVNPTAERVAWWIGTQIASRLPDHVQLVRVSVGEADGCTAIYLP

SEQ ID NO: 24014 - protein, 268 aa, unidentified
  source 1..268: note = Phycisphaerales bacterium
  REGION 1..268: note = tr|A0A3C0ETQ2|A0A3C0ETQ2_9BACT Uncharacterized protein OS=Phycisphaerales bacterium OX=2052180; GN = DCM28_21920 PE=4 SV=1
MVELTRCVRFCLNRIPAPQAGKFNTFSAWPAMTGLGRYYELLVTCKGEPDAQTGYFLNIKTIDTAVREHVLPYMQTLVAPGQDPSQVGMGQLMQQIIALLQPQLKGSVIRVRLALTPFYQLQIRSTGMQHVILRQQYEFAAAHRLHVPTLSDEENRQIFGKCNNPSGHGHNYQVEVAVKCPIDGDGHIATVNMIDALVDREIMERLDHKHLNEDVDAFADLNPSVENIAKVIYDWLVVAMRNENLELEVISVWETGKTRCTYPAGVLS

SEQ ID NO: 24015 - protein, 128 aa, Phyllobacterium bourgognense
  REGION 1..128: note = tr|A0A368YVU3|A0A368YVU3_9RHIZ 6-carboxy-5,6,7,8-tetrahydropterin synthase; OS = Phyllobacterium bourgognense OX=314236 GN=C7476_10482; PE = 3 SV=1
MRIFNEFTFEAAHHLPHIFPDGHINTRLHGHSFRVRVTLEGKPDTRTGLISDLGAVKSAFDSAHGKLDHRYLNEIEGLETPTLENIAMWLWRHFALSLPGLAEVGVYRDTCGEGCEYQGEFEMERKAA

SEQ ID NO: 24016 - protein, 161 aa, Phyllobacterium brassicacearum
  REGION 1..161: note = tr|A0A2P7BV91|A0A2P7BV91_9RHIZ Uncharacterized protein OS=Phyllobacterium brassicacearum OX=314235; GN = CU102_04780 PE=4 SV=1
MPSPKSDQTISRPIFKSVKKYDHSEGLSCCFRQWRADHSHCQFLHGYALAVKFVFATHDLDDTNWCFDFGGLKDVRAWLHSYFDHTTIVAEDDPHMATFEGLAANRLIDLRVLPAVGCEAVAQFIHKHVSAVVKEKTNNRVWLESVEISEHSGNSACYQLT

SEQ ID NO: 24017 - protein, 128 aa, Phyllobacterium brassicacearum
  REGION 1..128: note = tr|A0A2P7BJF9|A0A2P7BJF9_9RHIZ 6-carboxy-5,6,7,8-tetrahydropterin synthase; OS = Phyllobacterium brassicacearum OX=314235 GN=CU102_19015; PE = 3 SV=1
MRIFNEFTFEAAHHLPHIFPDGHVNTRLHGHSFRVRVTLEGKPDARTGLISDLGVVKDAFDSALELLDHRYLNEIRGLETPTLENIAIWLWRHFAAVLPGLAQVGVYRDTCGEGCEYQGEYEKREVTA

SEQ ID NO: 24018 - protein, 128 aa, unidentified
  source 1..128: note = Phyllobacterium endophyticum
  REGION 1..128: note = tr|A0A2P7B2C0|A0A2P7B2C0_9RHIZ 6-carboxy-5,6,7,8-tetrahydropterin synthase; OS = Phyllobacterium endophyticum OX=1149773 GN=CU100_01175; PE = 3 SV=1
MRIFNEFTFEAAHHLPHIFPDGHINTRLHGHSFRVRVTLEGKPDGKTGLISDLGTVKAAFDSAHEKLDHRYLNEVDGLETPTLENISMWLWRHFARSLSGLAQVGVYRDTCGEGCEYAGEYEIERKAA

SEQ ID NO: 24019 - protein, 118 aa, unidentified
  source 1..118: note = Phyllobacterium endophyticum
  REGION 1..118: note = tr|A0A2P7ASF7|A0A2P7ASF7_9RHIZ 6-carboxy-5,6,7,8-tetrahydropterin synthase; OS = Phyllobacterium endophyticum OX=1149773 GN=queD PE=3; SV = 1
MKITQAFTFEAAHRLPNVPTTHKCHRMHGHSYRVELQLKGVVGPRTGFVIDFFDVEKVFGPVLEGLDHHTLNDIDGLENPTAENIAVWIWQKVKPLLDELNSVKVFETPSCWAEFEGN

SEQ ID NO: 24020 - protein, 123 aa, Phyllobacterium leguminum
  REGION 1..123: note = tr|A0A318T642|A0A318T642_9RHIZ 6-carboxy-5,6,7,8-tetrahydropterin synthase; OS = Phyllobacterium leguminum OX=314237 GN=C7477_10664 PE=3; SV = 1
MYRITKEFHFSASHQLSHLPPEHQCARLHGHNYIVVVELAAETLGEDGFVRDYHDLSALKRYIDETLDHRHLNEVFGHEKVTSEFLAKHFFDWCKARLPETSAVRISETPKTWAEYRPTASQP

SEQ ID NO: 24021 - protein, 128 aa, Phyllobacterium myrsinacearum
  REGION 1..128: note = tr|A0A2S9JJG0|A0A2S9JJG0_9RHIZ 6-carboxy-5,6,7,8-tetrahydropterin synthase; OS = Phyllobacterium myrsinacearum OX=28101 GN=C5750_12535; PE = 3 SV=1
MRIFIDFNFEAAHHLPHSFPDGHVNQRLHGHSFRVRVSLQGRPDPKTGLIADLGAVKTTVDSAKDALDHRYLNEIAGLELPTLETIAIWLWRRIAPDLPALAEIGIYRDSCGEGCEYQGEFETLEEAA

SEQ ID NO: 24022 - protein, 118 aa, unidentified
  source 1..118: note = Phyllobacterium salinisoli
  REGION 1..118: note = tr|A0A368K043|A0A368K043_9RHIZ 6-carboxy-5,6,7,8-tetrahydropterin synthase; OS = Phyllobacterium salinisoli OX=1899321 GN=queD PE=3 SV=1
MFRITKEFHFSASHQLAHLPAEHQCARLHGHNYVVEVELSAATLNSDGFVRDYHELAPLKHYIDEAFDHRHLNDVLGHDGVTAEYLAKHFYDWCKERLPETSAVRVSETPKTWAEYRP

SEQ ID NO: 24023 - protein, 128 aa, unidentified
  source 1..128: note = Phyllobacterium sophorae
  REGION 1..128: note = tr|A0A2P7BKS8|A0A2P7BKS8_9RHIZ 6-carboxy-5,6,7,8-tetrahydropterin synthase; OS = Phyllobacterium sophorae OX=1520277 GN=CU103_01295 PE=3; SV = 1
MRIFNEFTFEAAHHLPHIFPDGHVNTRLHGHSFRVRVTLEGKPDGRTGLISDLGVVKSAFDSAVDLLDHRYLNEIQGLETPTLENIAMWLWRHFAPALPGLAEVGVYRDTCGEGCEYRGEFEIERTAA

SEQ ID NO: 24024 - protein, 128 aa, Phyllobacterium sp.
  REGION 1..128: note = tr|A0A1H0LBR8|A0A1H0LBR8_9RHIZ 6-carboxy-5,6,7,8-tetrahydropterin synthase; OS = Phyllobacterium sp. OV277 OX=1882772; GN = SAMN05443582_102721 PE=3 SV=1
MRIFTDFTFEAAHHLPHSFPDGHVNQRLHGHSFRVRVTLQGRPDPKTGLIADLGTVKTAIKSARHALDHRYLNEIDGLELPTLESIAIWLWRRIASDIPALAEIGIYRDSCGEGCEYQGEFETLEEAA

SEQ ID NO: 24025 - protein, 132 aa, Phyllobacterium sp.
  REGION 1..132: note = tr|J2V8P8|J2V8P8_9RHIZ 6-pyruvoyl-tetrahydropterin synthase OS=Phyllobacterium sp. YR531 OX=1144343; GN = PMI41_02983 PE=4 SV=1
MFAIEVRDHVMIAHSLQRPVFGPAQAMHGATFVVDAAFFTKELDEDGLAVDIGLATTVLSKVLQPLNYQNLDVMKEFAGKITTTEVLAKYIFDQLAAAVLSGDFGKGSQRICKIRVLLNESHIARGWYEADL

SEQ ID NO: 24026 - protein, 128 aa, unidentified
  source 1..128: note = Phyllobacterium zundukense
  REGION 1..128: note = tr|A0A2N9VWS0|A0A2N9VWS0_9RHIZ 6-carboxy-5,6,7,8-tetrahydropterin synthase; OS = Phyllobacterium zundukense OX=1867719 GN=B5P45_15285; PE = 3 SV=1
MRIFNEFTFEAAHHLPHIFPDGHINTRLHGHSFRVRVTLEGKPDSRTGLISDLGAVKSAFDSAVEQLDHRYLNEIKGLETPTLENIAMWLWRHFAPALPGLAQVGVYRDTCGEGCEYQGEFEMERTAA

SEQ ID NO: 24027 - protein, 120 aa, unidentified; identical to SEQ ID NO: 20906
  source 1..120: note = Phytobacter diazotrophicus
  REGION 1..120: note = tr|A0A4R4BBJ3|A0A4R4BBJ3_9GAMM 6-carboxy-5,6,7,8-tetrahydropterin synthase OS=Phytobacter diazotrophicus OX=395631 GN=EDC53_101435 PE=3 SV=1

SEQ ID NO: 24028 - protein, 120 aa, unidentified
  source 1..120: note = Phytobacter ursingii
  REGION 1..120: note = tr|A0A0G3Q7F7|A0A0G3Q7F7_9GAMM 6-carboxy-5,6,7,8-tetrahydropterin synthase OS=Phytobacter ursingii OX=1972431 GN=AB182_04540 PE=3 SV=1
MSTTLFKDFMFEAAHRLPHVPAGHKCGRLHGHSFMVRLEITGEVDPHTGWIMDFAELKAAFKPTYDRLDHYYLNDIPGLENPTSEVLAKWIWDQIKPIVPLLSAVMIKETCTAGCIYRGE

SEQ ID NO: 24029 - protein, 120 aa, unidentified; identical to SEQ ID NO: 21458
  source 1..120: note = Phytobacter ursingii
  REGION 1..120: note = tr|A0A508UM07|A0A508UM07_9GAMM 6-carboxy-5,6,7,8-tetrahydropterin synthase OS=Phytobacter ursingii OX=1972431 GN=queD PE=3 SV=1

SEQ ID NO: 24030 - protein, 124 aa, unidentified
  source 1..124: note = Pigmentiphaga aceris
  REGION 1..124: note = tr|A0A5C0B3Q6|A0A5C0B3Q6_9BURK 6-carboxy-5,6,7,8-tetrahydropterin synthase; OS = Pigmentiphaga aceris OX=1940612 GN=FXN63_24030 PE=3 SV=1
MMYEVSQRFYFDAAHTLNREIETAGSRRIHGHTYWAEVAVRGIPEPVTGMVVDSGLLKARLHEVRDRLDHHLLDEVPDLGPATLENLCAFIARGLDGFHPGLATVKVWREANGDSCTLHLLPKL

SEQ ID NO: 24031 - protein, 170 aa, Pirellula sp.
  REGION 1..170: note = tr|A0A142XW92|A0A142XW92_9PLAN 6-pyruvoyl tetrahydropterin synthase OS=Pirellula sp. SH-Sr6A; OX = 1632865 GN=VN12_03850 PE=4 SV=1
MSSGHSGTFRVLLQKEQLVFSSAHFITFAGDICECLHGHNYGLRGEVQGKLDENRYVIDFIAFRDTLAKIVKRLDHHMLLPTRHSMISVQEDGDEVVVRFRAKRWVFPAEDCILLPIVNTTAEEIAEWIGRELLSELYSKIGDRLDWLEIGVDENNGQWGYCRLPWSRVS

SEQ ID NO: 24032 - protein, 159 aa, Pirellula sp.
  REGION 1..159: note = tr|A0A142Y744|A0A142Y744_9PLAN 6-carboxy-5,6,7,8-tetrahydropterin synthase OS=Pirellula sp. SH-Sr6A OX=1632865 GN=queD PE=4 SV=1
MSLTIMRRIKFCAGHRLFKHGGKCEHFHGHNYVADFFVTGESQDSVGRVMDFSHLKSKCKGWLDEHWDHSFLVYEKDQNAIEALQMVKPSRLFLMPYNPTAENMARYLLEEVCPQLLADVGAIATRVRIWETDESFAEAAIDTRGDLVISSFDADSTDR

SEQ ID NO: 24033 - protein, 182 aa, Pirellula staleyi
  REGION 1..182: note = tr|D2R465|D2R465_PIRSD 6-pyruvoyl tetrahydrobiopterin synthase K01737 6-pyruvoyl tetrahydrobiopterin synthase OS=Pirellula staleyi (strain ATCC 27377 / DSM 6068 / IC PB 4128) OX=530564 GN=Psta_4266; PE = 4 SV=1
MTEPIKIEPAANLTERYRIRLEKEAHVFAAAHFITFAGNICEPLHGHNYGVAVEIEAPLDENQYVIDFIAVRDELTAITQTLDHRMLLPTSHPLIQVTADEREVTARFGDKRWVFPRTDCVLLPLTNTTSELLARYIGLALRERLAARLPAQVVGSITRFSVEVDENHGQRGIWSLAADAVH

SEQ ID NO: 24034 - protein, 169 aa, Pirellula staleyi
  REGION 1..169: note = tr|D2R401|D2R401_PIRSD Uncharacterized protein; OS = Pirellula staleyi (strain ATCC 27377 / DSM 6068 / ICPB 4128) OX=530564 GN=Psta_4202 PE=4 SV=1
MIKEQPPRPATLSPAETAVEVQSSSTSVFRVSREIDFCYGHRLLNYDGKCRHLHGHNGRAVITIESSSLDNRGMVMDFSDIKRVVSSWIDENLDHRMLLCKRDPYVQILKDLGEPLFLLDENPTAENICKLIHEFTASRGFPIVETQLWETPHCFATYRAARYVPGEAN

SEQ ID NO: 24035 - protein, 161 aa, Piscirickettsia salmonis
  REGION 1..161: note = tr|A0A0B8UMU5|A0A0B8UMU5_PISSA 6-pyruvoyl tetrahydropterin synthase family protein; OS = Piscirickettsia salmonis OX=1238 GN=KW89_268 PE=4 SV=1
MYTLKIFKERFHFCSAHFCIFSNRDKENLHGHNYYIDVEFSGEKIENGFLYPVADLKEIIQSTCDNLDEKILIQGSSPYLTNEQNSEYITIYFNNKMLYKFPRDEVIILPIKNTTMECLAEYLLTNIKNNISRTINTNFSKISLGIAETQGQKLIIEQQFS

SEQ ID NO: 24036 - protein, 161 aa, Piscirickettsia salmonis
  REGION 1..161: note = tr|A0A0B8V7D9|A0A0B8V7D9_PISSA 6-pyruvoyl tetrahydropterin synthase QueD OS=Piscirickettsia salmonis; OX = 1238 GN=queD PE=4 SV=1
MYTLKIFKERFHFCSAHFCILSNRNKENLHGHNYYIDVEFSGKKIENGFLYPVADLKEIIQSTCDNLDEKILIQGNSPYLTNQQDNEYITIYFNGKMLYKFPRDEVIILPIKNTTMECLAEYLLTNIKSNISRTINTNFSKISLGIAETQGQKLIIEHQLS

SEQ ID NO: 24037 - protein, 125 aa, unidentified
  source 1..125: note = Piscirickettsiaceae bacterium
  REGION 1..125: note = tr|A0A2M7M711|A0A2M7M711_9GAMM 6-carboxy-5,6,7,8-tetrahydropterin synthase; OS = Piscirickettsiaceae bacterium CG_4_10_14_3_um_filter_44_349 OX=1974075 GN=queD PE=3 SV= 1
MAQQFVLKTLLDFASAHSLRGYPGDCAKLHGHNWKIEVEVIGETLNEIGMLIDFKDIKRHAKAVIEELDHSFLNDHPYFSDRNPTAENIAQYIFRALQSRITSDNLKMHRLTVWENDRNCVIYSE

SEQ ID NO: 24038 - protein, 134 aa, unidentified
  source 1..134: note = Piscirickettsiaceae bacterium
  REGION 1..134: note = tr|A0A2A4PIC4|A0A2A4PIC4_9GAMM 6-carboxy-5,6,7,8-tetrahydropterin synthase; OS = Piscirickettsiaceae bacterium OX=2030828 GN=queD PE=3; SV = 1
MYRITKKFTFCYGHRLMNHPGKCKHLHGHSAQVAITLESEQLNEQGMVCDFSDIKHFAEKWLDDTFDHNMLLHKDDPVLPLLQQAGERVMVVDEHPTAEFLAKMIFDYVATGGFPVTNVSVWETDSANASYAIR

SEQ ID NO: 24039 - protein, 137 aa, unidentified
  source 1..137: note = Pistricoccus aurantiacus
  REGION 1..137: note = tr|A0A5B8SWR7|A0A5B8SWR7_9GAMM 6-carboxytetrahydropterin synthase OS=Pistricoccus aurantiacus OX=1883414 GN=FGL86_09920 PE=4 SV=1
MFRLTVRDHMMIAHSFHSEVFGPAQRLHGATYVVDVTFVRPELDENDLVVDIGLAGDTLKRILSEFNLSNLDDIEAFRGRNTTTEFMAKVVFDRLAKAIEDGQLGEGARALSALTVTLHESHLAWASYEGTLGEDVA

SEQ ID NO: 24040 - protein, 516 aa, unidentified
  source 1..516: note = Planctomicrobium piriforme
  REGION 1..516: note = tr|A0A1I3FHC1|A0A1I3FHC1_9PLAN 6-pyruvoyl tetrahydropterin synthase/QueD family protein; OS = Planctomicrobium piriforme OX=1576369; GN = SAMN05421753_105249 PE=4 SV=1
MPCDTISLATDTLADQVRTACILECAARKPGNVHPQAAFHDVTFHDFVRSAEVIAPVIAQASTIGVGRSILLAVQATRQAVGTNTNLGMILLLAPLAAVPVGVKCESGIQDVLRSLNERDATDVYAAIRETQPGGLGEVNEHDVSQAPQLSLIEAMTLAAERDLVARQYANGFQDVLTWGRQTFLQWIERLSSDSPLPCTQGRGARGEGPNCHSTSQRLSQPGESQFALKSVSKRMQDWETAVIGTQLDIMAREPDSLIARKCGQDDAKQSQQLAKEVLNAGWPSQPGQELIVRFDNWLRANGHRRNPGTTADLIAAILFAVIRDHLWTPPKIVPDAPSVRDNESHSTLDSPMNRTFSVDVTKDHLVFSAGHFITIGNFCERLHGHNFRLAAQVEGTLDANGYVFDFIALRDELQRVCDQLDHRMLLPLQHPEIIVDMQEREIEVRYTDRRWVFPREECILLPIKQTTVELIAEWIGTEALKRFDTSNLTSLTIKVEENFGQWANCRFEISQNEGL

SEQ ID NO: 24041 - protein, 143 aa, unidentified
  source 1..143: note = Planctomicrobium piriforme
  REGION 1..143: note = tr|A0A1I3DM63|A0A1I3DM63_9PLAN 6-pyruvoyltetrahydropterin/6-carboxytetrahydropterin synthase OS=Planctomicrobium piriforme OX=1576369; GN = SAMN05421753_103310 PE=4 SV= 1
MYRVTQEIDFCYGHRLLNYAGKCKHLHGHNGRAVIVLEGEQLDDRGMLIDFGDIKREIRRWIDDTLDHRMILCQGDPALTALRELGEPLFVIDCNPTAENIARLIFEHAREKRLPVIEVSLWETPRAFATYSQNDCPPGTARG

SEQ ID NO: 24042 - protein, 157 aa, Planctomyces bekefii
  REGION 1..157: note = tr|A0A5C6MAE1|A0A5C6MAE1_9PLAN 6-carboxytetrahydropterin synthase QueD OS=Planctomyces bekefii OX=1653850 GN=E3A20_04110 PE=4 SV=1
MIIQKEYKFYAAHRNETLKDKCSNLHGHRYGVRCFFEVERDGEISTLFGEFDSRMEPWIKEYYDHGMLINVNDPLYESLQEHCRRTGEQLKMKLFNGPTSVENLAWMLFTEVTDMGFRLAQLEIRETDTSVISYTREDWIRDNRLFASLRSPGAATP

SEQ ID NO: 24043 - protein, 163 aa, Planctomyces sp.
  REGION 1..163: note = tr|A0A142YDD5|A0A142YDD5_9PLAN 6-pyruvoyl tetrahydropterin synthase OS=Planctomyces sp. SH-PL62; OX = 1636152 GN=VT85_05480 PE=4 SV=1
MPVSRFKVRVTKDYLVFSSGHFITFDGDHCERIHGHNYRAAVEVDGDLDANAYVVDFIALRDMTRVITDELDHRMLLPAKSPLIALEVVGPNTVARYRDRYWSFPSDECVVLPIANTTAELIAEYIAGRLLEAMKARGWPSPRTLRVEVEECFGQSAEIELTP

SEQ ID NO: 24044 - protein, 139 aa, Planctomyces sp.
  REGION 1..139: note = tr|A0A2E8F068|A0A2E8F068_9PLAN 6-pyruvoyl tetrahydrobiopterin synthase OS=Planctomyces sp. OX=37635; GN = CMJ45_07185 PE=4 SV=1
MYLVRIETTFDSGHRLLDYDGKCAFPHGHTYRAEVFLESDTLDSQGLVFDFTELKRRVKSWIDDNWDHSFLLNSRDTELINGLAPASKGRIYRFDEENPSCEVLSRVLYTKIVELCGVSPVKVRLWESLDQYAEYSGGQ

SEQ ID NO: 24045 - protein, 306 aa, unidentified
  source 1..306: note = Planctomycetaceae bacterium
  REGION 1..306: note = tr|A0A424JS20|A0A424JS20_9PLAN 6-carboxytetrahydropterin synthase OS=Planctomycetaceae bacterium TMED241 OX=1986836 GN=CBE01_006565 PE=4 SV=1
MTETKSPARHGQGRGCVITRRACFSASHRYWLPELSADDNAARFGPCAIPPGHGHNYELIVSMAGGLDADGMVLNLSEVKHAIRSVVTGQLDFRFLNEAWPEFDLSTPAGCLPTTEALVRGIWQRLSSHLPITALRLYEQPGLWADYLGHPMDAFLTIRTHFAAAHRLARPELSQEENERIYGKCARPHGHGHNYLVDVTVRGAIDPRTGMVCDLSALQRLVDDLVVEPFDHTFLNKDVPFFADCVPTAENIALHIADRLSTPVKAIGAHLHKIRLQESPNNAAEVYAESPQLEMTPATLESVATV

SEQ ID NO: 24046 - protein, 133 aa, unidentified
  source 1..133: note = Planctomycetaceae bacterium
  REGION 1..133: note = tr|A0A177Q002|A0A177Q002_9PLAN 6-pyruvoyl tetrahydrobiopterin synthase OS=Planctomycetaceae bacterium SCGC AG-212-D15 OX=1799653 GN=AYO40_04240 PE=4; SV = 1
MFRVTREIRFCYGHRLLNYRGKCRHLHGHNGRAVIALEAPELDRLGMVVDFTQIKEAVSTWIDETLDHRMLLHRDDPVLAYLREQGEPVYVMDVNPTAENIARLIFDYTASRGFPVVEVQLWETDHCFATYKK

SEQ ID NO: 24047 - protein, 121 aa, unidentified
  source 1..121: note = Planctomycetales bacterium
  REGION 1..121: note = tr|A0A1W9T336|A0A1W9T336_9BACT Uncharacterized protein OS=Planctomycetales bacterium 4572_13 OX=1971638; GN = B6I25_08015 PE=4 SV=1
MYTLFVETNFKAQHQLSFEDATQEPLHEHDWKVCVAVSSEQLDKDEWVMDFEELKCITESMLQDFQGQKLELLPIFENRNVSAEIVAHTLYDQLAPELPHPVRLDFVEITEAPGCRARYAP

SEQ ID NO: 24048 - protein, 137 aa, unidentified
  source 1..137: note = Planctomycetales bacterium
  REGION 1..137: note = tr|A0A354GY97|A0A354GY97_9BACT 6-pyruvoyl tetrahydrobiopterin synthase OS=Planctomycetales bacterium; OX = 2053591 GN=DDY78_24480 PE=4 SV=1
MFSVTREIHFCYGHRLLNYDGKCRHLHGHNGRAVITLAGAALDDLGMVMDFSRLKRVVGGWIDETLDHKMILHKDDPVLPSLRRLGEPVHVINVNPTAENIARIIFDYTAAQGFPVTEVKLWETESCFAAYTGERPA

SEQ ID NO: 24049 - protein, 132 aa, unidentified
  source 1..132: note = Planctomycetes bacterium
  REGION 1..132: note = tr|A0A1G2YGT4|A0A1G2YGT4_9BACT Uncharacterized protein OS=Planctomycetes bacterium GWF2_42_9 OX=1801958; GN = A2Y12_14665 PE=4 SV=1
MLYFSEKFEFAASHTLWNTKFTDEENFKVFGKCANKCGHGHNYIIEVAIQKSTTDKQLFAADYEKIVDKNFISVVDHKNLNADVDYFKKANPTVENIAEFAFQSLDGKFESAKLDCVTVWENDRTFCSFRRD

SEQ ID NO: 24050 - protein, 135 aa, unidentified
  source 1..135: note = Planctomycetes bacterium
  REGION 1..135: note = tr|A0A1G3AC63|A0A1G3AC63_9BACT 6-pyruvoyl tetrahydrobiopterin synthase OS=Planctomycetes bacterium RBG_16_64_10 OX=1801970 GN=A2W31_17265 PE=4 SV=1
MFRVTREIDFCYGHRLLNYEGKCKHLHGHNGRAVITIETPALDQRAMVLDFVKIKRAIQHWIDENLDHRMILHRDDPAVGVLRELGEPLYLVETNPTAENIAKLIFDVCVQHGLPVVETRLWETPHCCASYQRGQ

SEQ ID NO: 24051 - protein, 133 aa, unidentified
  source 1..133: note = Planctomycetia bacterium
  REGION 1..133: note = tr|A0A4P5XQG5|A0A4P5XQG5_9BACT 6-pyruvoyl tetrahydrobiopterin synthase OS=Planctomycetia bacterium; OX = 2052181 GN=LBMAG52_06570 PE=4 SV=1
MFQVSQHIDFCYGHRLLNYAGKCRNLHGHNGRAVIVLASEHLDSRGMLMDFSDIKKVVRTWIDEQLDHRMILHENDPALPSLQQLGEPLFILPVNPTAENIAKTIFEFTHSQGFPVIEVSLWETPNAFATYRG

SEQ ID NO: 24052 - protein, 121 aa, unidentified
  source 1..121: note = Planctomycetia bacterium
  REGION 1..121: note = tr|A0A3D3KQF7|A0A3D3KQF7_9BACT 6-carboxy-5,6,7,8-tetrahydropterin synthase; OS = Planctomycetia bacterium OX=2052181 GN=queD PE=3 SV=1
MYELVVETDFAAAHSLRGYHGKCENLHGHNWKIQVVLSAGRLDSLGMVLDFKDVKSIADEILEDFDHKNLNDLEYFKKDNPTTENVSRALYAEFSKKLPKGVSVRKVTVWESDRCGASYFE

SEQ ID NO: 24053 - protein, 136 aa, unidentified
  source 1..136: note = Planctopirus ephydatiae
  REGION 1..136: note = tr|A0A518GJM9|A0A518GJM9_9PLAN 6-carboxy-5,6,7,8-tetrahydropterin synthase; OS = Planctopirus ephydatiae OX=2528019 GN=queD_1 PE=3 SV=1
MFEVSSEIQFCYGHRLLNYSGKCRHLHGHNGKAIITLAGESLDERGMLVDFGDLKRTVSQWIDDHLDHRMVLCERDPMVKILRDAGEPLYLIPENPTAENIAKLIYEKTVEVGLPVIQVGLWETAKNYAVYRERKV

SEQ ID NO: 24054 - protein, 161 aa, unidentified
  source 1..161: note = Planctopirus ephydatiae
  REGION 1..161: note = tr|A0A518GRM8|A0A518GRM8_9PLAN 6-carboxy-5,6,7,8-tetrahydropterin synthase; OS = Planctopirus ephydatiae OX=2528019 GN=queD_2 PE=4 SV=1
MPEFRVRVTKDHLVFSAAHFITFNGNICERLHGHNWRVAVELTGPLDENSYVFDFIALRDATQKLVHELDHKVLLPLQHPTIKVEVGTKEVEAKFEDRRWVFPLEDCALLPIANTTAELLADWFAKHLCEVVRAWPGQQVKFVQAEVEENFGQWGICKVEV

SEQ ID NO: 24055 - protein, 161 aa, unidentified
  source 1..161: note = Planctopirus hydrillae
  REGION 1..161: note = tr|A0A1C3ESZ9|A0A1C3ESZ9_9PLAN 6-pyruvoyl tetrahydrobiopterin synthase OS=Planctopirus hydrillae; OX = 1841610 GN=A6X21_16420 PE=4 SV=1
MPEFRVRVTKDHLVFSAAHFITFNGNICERLHGHNWRVAVELTGPLDENSYVFDFIALRDATQKLVHELDHKVLLPLQHPTIKVEVGPKEVEAKFEDRRWVFPLEDCALLPIANTTAELLADWFAKHLCEVVRAWPGQQVKYVQAEVEENFGQWGICKLEV

SEQ ID NO: 24056 - protein, 136 aa, unidentified
  source 1..136: note = Planctopirus hydrillae
  REGION 1..136: note = tr|A0A1C3ERX8|A0A1C3ERX8_9PLAN 6-carboxy-5,6,7,8-tetrahydropterin synthase; OS = Planctopirus hydrillae OX=1841610 GN=A6X21_02360 PE=3; SV = 1
MFEVSSEIQFCYGHRLLNYSGKCRHLHGHNGKAIITLAGESLDERGMLVDFGDLKRTVSQWIDDHLDHRMVLCERDPMVKILRDAGEPLYLISENPTAENIAKLIYEKTVEVGLPVIQVGLWETAKNYAVYRERKV

SEQ ID NO: 24057 - protein, 136 aa, unidentified; identical to SEQ ID NO: 24053
  source 1..136: note = Planctopirus limnophila
  REGION 1..136: note = tr|D5SZ35|D5SZ35_PLAL2 6-carboxy-5,6,7,8-tetrahydropterin synthase; OS = Planctopirus limnophila (strain ATCC 43296 / DSM 3776 / IFAM 1008 / 290) OX=521674 GN=Plim_4125PE=3 SV=1

SEQ ID NO: 24058 - protein, 161 aa, unidentified
  source 1..161: note = Planctopirus limnophila
  REGION 1..161: note = tr|D5SP90|D5SP90_PLAL2 Uncharacterized protein; OS = Planctopirus limnophila (strain ATCC 43296 / DSM 3776 / IFAM 1008 / 290) OX=521674 GN=Plim_2408 PE=4 SV=1
MPEFRVRVTKDHLVFSAAHFITFNGNICERLHGHNWRVAVELTGPLDENSYVFDFIALRDATQKLVHELDHKVLLPLQHPTIKVEVGPKEVEAKFEDRRWVFPLEDCALLPIANTTAELLADWFAKHLCEVVRAWPGQQVKYVQAEVEENFGQWGICKVEV

SEQ ID NO: 24059 - protein, 174 aa, Planifilum fimeticola
  REGION 1..174: note = tr|A0A2T0LII3|A0A2T0LII3_9BACL PreQ(0) biosynthesis protein QueD OS=Planifilum fimeticola OX=201975; GN = CLV97_10251 PE=4 SV=1
MNPKEWNQAGPSRKEEGAFPFPPKLQVFGRDIQKEQLKYHQRRVAVEKTFTFDSSHHLHLYEGKCKALHGHTYRLTVQVSGFVNDIGLVVDFKDLKAMVKEKILVPLDHQYLNGVLPPMNTSVENMIVWIWERLEEGLKELGSPEQALRLESLRLEETPTSAATLRREWMGEDR

SEQ ID NO: 24060 - protein, 174 aa, Planifilum fulgidum
  REGION 1..174: note = tr|A0A1I2MBA5|A0A1I2MBA5_9BACL 6-pyruvoyltetrahydropterin/6-carboxytetrahydropterin synthase OS=Planifilum fulgidum OX=201973; GN = SAMN04488025_10725 PE=4 SV=1
MNAKEWNQAGPSRKEEGTFPFPPKLQIFGRDIQREQLRYHQRRVAVEKTFTFDSSHHLHLYEGKCKALHGHTYRLTVQVSGFVNEIGLVVDFKDLKAMVKEKILLPLDHQYLNGVLPPMNTSVENMIVWIWEKLEEGLKELGSPEQALRLEALRLEETPTSAAILRREWMEDRR

SEQ ID NO: 24061 - protein, 129 aa, unidentified
  source 1..129: note = Planktothricoides sp.
  REGION 1..129: note = tr|A0A0M1JW40|A0A0M1JW40_9CYAN 6-carboxy-5,6,7,8-tetrahydropterin synthase; OS = Planktothricoides sp. SR001 OX=1705388 GN=AM228_07415; PE = 3 SV=1
MPKWKLVTEYTFDSAHFIRDYDGPCGRMHGHTYKVRIEASSQKLHSSEYCPHEVMVADFKTLRWAKKDVTKGGLDHCFLNDVMPPDYDTTAEMIAKYIYEETKRRVPPGVDLKVAVSETPNSWVEYEDD

SEQ ID NO: 24062 - protein, 290 aa, Planktothrix agardhii
  REGION 1..290: note = tr|A0A2Z6CHL9|A0A2Z6CHL9_PLAAG Putative 6-pyruvoyl tetrahydropterin synthase OS=Planktothrix agardhii NIES-204 OX=282423 GN=NIES204_31420 PE=4 SV=1
MECVITRRAQFSASHRYWLPELSATENLKRFGPTSRAPGHGHNYVLYVSMVGELNEYGMVLNLSDVKHTLKREVTDHLDFSYLNDVWPEFQQTLPTTEALAQAIWHRLAPHLPLTKIQLFEHPELWAEYQGNSMEAYLTISTHFSAAHRLAHPDLSFEDNFEIYGKCARPNGHGHNYHLEVTVKGEVDPQTGMIVDLEGLQRVINNYVVEPFDHTFLNKDIPYFSKVVPTAENIAVHIQNLLQKPIHNLGAQLHKIKLIESPNNSCEVYCTNTKSESTVSQIQHPVLAQV

SEQ ID NO: 24063 - protein, 290 aa, Planktothrix agardhii
  REGION 1..290: note = tr|A0A073CWH1|A0A073CWH1_PLAAG 6-pyruvoyl tetrahydropterin synthase OS=Planktothrix agardhii NIVA-CYA 126/8 OX=388467 GN=A19Y_3550 PE=4 SV=1
MECVITRRAQFSASHRYWLPELSATENLKRFGPTSRAPGHGHNYVLYVSMVGELNEYGMVLNLSDVKHTLKREVTDHLDFSYLNDVWPEFQQTLPTTEALAQAIWHRLAPHLPLTKIQLFEHPELWAEYQGNSMEAYLTISTHFSAAHRLAHPDLSFEDNFEIYGKCARPNGHGHNYHLEVTVKGEVDPQTGMIVDLEGLQRVINDYVVEPFDHTFLNKDIPYFSKVVPTAENIAVHIQNLLQKPIHNLGAQLHKIKLIESPNNSCEVYCTNTKSESTVSQIQHPVLAQV

SEQ ID NO: 24064 - protein, 290 aa, unidentified
  source 1..290: note = Planktothrix rubescens
  REGION 1..290: note = tr|A0A1J1L2B2|A0A1J1L2B2_PLARU Uncharacterized protein OS=Planktothrix rubescens OX=59512 GN=PLAN40427; PE = 4 SV=1
MECVITRRAQFSASHRYWLPELSATENLKRFGPTSRAPGHGHNYVLYVSMVGELDEYGMVLNLSDVKHTLKREVTDHLDFSYLNDVWPEFQQTLPTTEALAQAIWHRLAPHLPLTKIQLFEHPELWAEYQGNSMEAYLTISTHFSAAHRLAHPDLSFEDNCEIYGKCARPNGHGHNYHLEVTVKGEVDPQTGMIVDLEGLQRVINDYVVEPFDHTFLNKDIPYFSKVVPTAENIAVHIQNLLQKPIHNLGAQLHKIKLIESPNNSCEVYCTNTKSESTVSQIQHPVLAQV

SEQ ID NO: 24065 - protein, 290 aa, Planktothrix sp.
  REGION 1..290: note = tr|A0A3C1PCD3|A0A3C1PCD3_9CYAN 6-pyruvoyl tetrahydropterin synthase OS=Planktothrix sp. UBA8402; OX = 2055759 GN=DCQ63_12045 PE=4 SV=1
MECVITRRAQFSASHRYWLAELSAAENLERFGPTSRAPGHGHNYVLYVSMVGELDEYGMVLNLSDVKHTLKREVTDHLDFSYLNDVWPEFQQTLPTTEALAQAIWHRLAPHLPLTNIQLFEHPELWADYQGNDMEAYLTISTHFSAAHRLAHPDLSFEDNCEIYGKCARPNGHGHNYHLEVTVKGKVDSRTGMIVDLEGLQKAIDDHVVEPFDHTFLNKDIPYFSKVVPTAENIAVHIRDLLQKPIQDLGAQLHKVKLIESPNNSCEVYCTNTESESTISQIKQPVLARV

SEQ ID NO: 24066 - protein, 290 aa, Planktothrix sp.
  REGION 1..290: note = tr|A0A1T4ZMA2|A0A1T4ZMA2_9CYAN Uncharacterized protein OS=Planktothrix sp. PCC 11201 OX=1729650; GN = PL11201_700142 PE=4 SV=1
MECVITRRAQFSASHRYWLPELSATENLKRFGPTSRAPGHGHNYILYVSMVGELDEYGMVLNLSDVKHTLKREVTNHLDFSYLNDVWPEFQQTLPTTEALAQAIWHRLAPHLPLTNIQLFEHPELWADYQGNDMEAYLTISTHFSAAHRLAHPDLSFEDNCEIYGKCARPNGHGHNYHLEVTVKGEVDPRTGMIVDLEGLQRVIDDYVVEPFDHTFLNKDIPYFSKVVPTAENIAVHIRDLLQKPIQDLGAQLHKIKLIESPNNSCEVYCTNTESESSLAQIQQPVLAQV

SEQ ID NO: 24067 - protein, 290 aa, unidentified
  source 1..290: note = Planktothrix tepida
  REGION 1..290: note = tr|A0A1J1LTR4|A0A1J1LTR4_9CYAN Uncharacterized protein OS=Planktothrix tepida PCC 9214 OX=671072; GN = PL9214650667 PE=4 SV=1
MECVITRRAQFSASHRYWLPELSAAENIERFGLTSRAPGHGHNYVLYVSMVGELDEYGMVLNLSDVKHTLKQEVTDHLDFAHLNDVWPEFQQTLPTTEALARAIWHRLAPHLPLTNIQLFEHPELWADYQGNGMEAYLTLSTHFSAAHRLAHPDLSFEDNCEIYGKCARPNGHGHNYHLEVTVKGEIDPRTGMIVKLESLQKVIDDYVVEPFDHTFLNKDIPHFAKVVPTAENIAVHIRDLLQNPIQELRAKLHKVKLIESPNNSCEVYCTNTESEPKTLQVKQPVLAKV

SEQ ID NO: 24068 - protein, 179 aa, unidentified
  source 1..179: note = Planktothrix tepida
  REGION 1..179: note = tr|A0A1J1LKA3|A0A1J1LKA3_9CYAN 6-carboxy-5,6,7,8-tetrahydropterin synthase (Modular protein) OS=Planktothrix tepida PCC 9214 OX=671072; GN = PL9214490153 PE=4 SV=1
MLSIRTQLGIVKSELICLIYVSKFLNGWKVHGGVKIRSDVELKPVPMPKWKLTTEFTFDSAHYIKDYDGPCGRMHGHSYRVQVEATSNQLHSSEYCPHPVMVADFRSLRWAKKDVTKGGLDHGVLNEILPPEYETTAEMIAKYIYDVTKKRVPEGVRLKVRVSETSNSWVEYEDDESES

SEQ ID NO: 24069 - protein, 141 aa, Planococcus antarcticus
  REGION 1..141: note = tr|A0A1C7DJ12|A0A1C7DJ12_9BACL 6-carboxy-5,6,7,8-tetrahydropterin synthase OS=Planococcus antarcticus DSM 14505 OX=1185653 GN=BBH88_14435 PE=3 SV=1
MMQQFYPTAAHDFQFELNKDLHFSAAHFIPSEDAGKCQVMHGHTYHLNITIGGNELDATGFLIDFKLLKELIHKKYDHSVLNDHPEFKNKFPTTELLAQQVWQSIQQVLEMRSNRPHCLQVIVRETPTSYVVFRPRKGELS

SEQ ID NO: 24070 - protein, 139 aa, Planococcus citreus
  REGION 1..139: note = tr|A0A497YMG3|A0A497YMG3_9BACL 6-carboxy-5,6,7,8-tetrahydropterin synthase OS=Planococcus citreus OX=1373 GN=DFR62_3104 PE=3 SV=1
MQQFYPSVQHPYSFELNKDMHFSAAHYIPADDAGKCAKMHGHTYHLNITIAGDHLNSTGFLIDFKQLKDLIHKRYDHSVLNDHPEFTETFPTTEQLAQQIHKLTQDTLDRSDNQPKCIQVIVRETPTSYVIYRPKEVSS

SEQ ID NO: 24071 - protein, 141 aa, Planococcus donghaensis
  REGION 1..141: note = tr|A0A1C7EK22|A0A1C7EK22_9BACL 6-carboxy-5,6,7,8-tetrahydropterin synthase OS=Planococcus donghaensis OX=414778 GN=BCM40_10005 PE=3 SV=1
MMQQFYPTVSHNYQFELNKDMHFSAAHFIPSEEAGKCKVMHGHTYHLNITIGGNELDSIGFLIDFKLLKELIHKKYDHSVLNDHPEFTNKFPTTELLAQQVWQSIQTMLQATINRPNCLQVIVRETPTSYVVYRPRQEDLS

SEQ ID NO: 24072 - protein, 141 aa, Planococcus donghaensis
  REGION 1..141: note = tr|E7RE92|E7RE92_9BACL 6-carboxy-5,6,7,8-tetrahydropterin synthase OS=Planococcus donghaensis MPA1U2 OX=933115 GN=GPDM_03880 PE=3 SV=1
MMQQFYPPVSHNYQFELNKDMHFSAAHFIPSEDAGKCKVMHGHTYHLNITIGGNELDSIGFLIDFKLLKELIHKKYDHSVLNDHPEFTNKFPTTELLAQQVWQSIQTMLQATTNRPNCLQVIVRETPTSYVVYRPRQEDLS

SEQ ID NO: 24073 - protein, 141 aa, unidentified
  source 1..141: note = Planococcus halocryophilus
  REGION 1..141: note = tr|A0A1C7DML8|A0A1C7DML8_9BACL 6-carboxy-5,6,7,8-tetrahydropterin synthase OS=Planococcus halocryophilus OX=1215089 GN=BBI08_02185 PE=3 SV=1
MMQQFYPTVSHNYQFELNKDMHFSAAHFIPSEDAGKCKVMHGHTYHLNITIGGNQLDSIGFLIDFKLLKELIHKKYDHSVLNDHPEFANKFPTTELLAQQVWQSIQTMLQATINRPNCLQVIVRETPTSYVVYRPRQEDLL

SEQ ID NO: 24074 - protein, 141 aa, unidentified
  source 1..141: note = Planococcus halotolerans
  REGION 1..141: note = tr|A0A365L6S4|A0A365L6S4_9BACL 6-carboxy-5,6,7,8-tetrahydropterin synthase OS=Planococcus halotolerans OX=2233542 GN=queD PE=3 SV=1
MMQQFYPSVPHAYRFELNKDMNFSAAHFIPHAEAGKCQTVHGHTYFVNVTVAGNELDASDFLIDFKLLKDAIHKKYDHSVLNDHPEFNGKFPTTERLAEQIWQSIEAILKTRDNKPSCLQVIVRETPTSYVVYRPEQGWLR

SEQ ID NO: 24075 - protein, 140 aa, Planococcus maitriensis
  REGION 1..140: note = tr|A0A365K0Z9|A0A365K0Z9_9BACL 6-carboxy-5,6,7,8-tetrahydropterin synthase OS=Planococcus maitriensis OX=221799 GN=queD PE=3 SV=1
MMQQFYPSVPHSYSFELNKDMHFSAAHYIPADEAGKCAEMHGHTYHLNITIAGDQLNGIGFLIDFKQLKDLIHKRYDHSVLNDHPEFTETFPTTEQLAQQVHKLIQDALDRSENQPKCIQVIVRETPTSYVIYRPKGVSS

SEQ ID NO: 24076 - protein, 140 aa, Planococcus maritimus
  REGION 1..140: note = tr|A0A150W5H5|A0A150W5H5_PLAMR 6-carboxy-5,6,7,8-tetrahydropterin synthase OS=Planococcus maritimus OX=192421 GN=AY633_11250 PE=3 SV=1
MMQQFYPTVSHSYCFELNKDMHFSAAHYIPADEAGKCAKMHGHTYHLNLTIAGDQLNDTGFLIDFKHLKDLVHKRYDHSVLNDHPEFSDTFPTTELLARQIHTLIQEMLDQTDNQPECLQVIVRETPTSYVIYRPKKVSS

SEQ ID NO: 24077 - protein, 140 aa, Planococcus maritimus
  REGION 1..140: note = tr|A0A1C7DZU7|A0A1C7DZU7_PLAMR 6-carboxy-5,6,7,8-tetrahydropterin synthase OS=Planococcus maritimus OX=192421 GN=BBI11_07345 PE=3 SV=1
MMQQFYPTVSHPYCFELNKDMHFSAAHYIPADEAGKCAKMHGHTYHLNLTIAGDQLNDTGFLIDFKHLKDLVHKRYDHSVLNDHPEFSHTFPTTELLAKQIHTLIQEKLNQTDNQPECLQVIVRETPTSYVIYRPKKVSS

SEQ ID NO: 24078 - protein, 140 aa, Planococcus plakortidis
  REGION 1..140: note = tr|A0A1C7E5Y1|A0A1C7E5Y1_9BACL 6-carboxy-5,6,7,8-tetrahydropterin synthase OS=Planococcus plakortidis OX=1038856 GN=BBI15_02195 PE=3 SV=1
MMQQFYPSVPHPYSFELNKDMHFSAAHYIPADEAGKCAKMHGHTYHLNITIAGDRLNGTGFLIDFKQLKDLIHKRYDHSVLNDHPEFGDTFPTTEQLAQQIHELVQETLDRSDNRPRCIQVIVRETPTSYVIYRPKEVSS

SEQ ID NO: 24079 - protein, 140 aa, Planococcus rifietoensis
  REGION 1..140: note = tr|A0A0U2XPA7|A0A0U2XPA7_9BACL 6-carboxy-5,6,7,8-tetrahydropterin synthase OS=Planococcus rifietoensis OX=200991 GN=AUC31_03555 PE=3 SV=1
MMQQFYPSVSHPYSFELNKDMHFSAAHYIPADEAGKCAKMHGHTYHLNITIAGDQLNGTGFLIDFKQLKDLIHKRYDHSVLNDHPEFTETFPTTEQLAQQIHKLTQDTLDRSDNQPKCIQVIVRETPTSYVIYRPKEVSS

SEQ ID NO: 24080 - protein, 141 aa, unidentified
  source 1..141: note = Planococcus salinus
  REGION 1..141: note = tr|A0A3M8PAV0|A0A3M8PAV0_9BACL 6-carboxy-5,6,7,8-tetrahydropterin synthase OS=Planococcus salinus OX=1848460 GN=queD PE=3 SV=1
MMQQFYPQVPHTFRFELNKDMHFSAAHFIPSKDAGKCQQMHGHTYFVNVTIAGNGLDPTGFLIDFKEIKNLVHKKYDHTVLNDHPEFKDMFPTTELLAQQIWQSVQELLNNRTNHPSCLQIIVRETPTSYVVFRPTEEDFR

SEQ ID NO: 24081 - protein, 141 aa, Planococcus sp.
  REGION 1..141: note = tr|A0A5C5T3E7|A0A5C5T3E7_9BACL 6-carboxy-5,6,7,8-tetrahydropterin synthase OS=Planococcus sp. CPCC 101016 OX=2599617 GN=queD PE=3 SV=1
MMQQFYPTVAHDFQFELNKDLHFSAAHFIPSEDAGKCQVMHGHTYHLNITIGGNELDATGFLIDFKLLKDLIHKKYDHSVLNDHPEFADKFPTTELLAQQVWLSIQNVLSTRSNRPHCLQVIVRETPTSYVVYRPRKEDVL

SEQ ID NO: 24082 - protein, 141 aa, Planococcus sp.
  REGION 1..141: note = tr|A0A5B0CUI7|A0A5B0CUI7_9BACL 6-carboxy-5,6,7,8-tetrahydropterin synthase OS=Planococcus sp. ANT_H30 OX=2597347 GN=queD PE=3 SV=1
MMQQFYPTIPHDFQFELNKDFHFSAAHFIPSEEAGKCQVMHGHTYHLNITIAGNELDAIGFLIDFKLLKELIHKKYDHSVLNDHPEFATKFPTTELLAKQVWQSIQTMLQATSNRPNCLQVIVRETPTSYVVFRPKQEDLL

SEQ ID NO: 24083 - protein, 362 aa, Planomicrobium glaciei
  REGION 1..362: note = tr|A0A518XPQ4|A0A518XPQ4_9BACL 7-cyano-7-deazaguanine synthase OS=Planomicrobium glaciei; OX = 459472 GN=queC PE=3 SV=1
MKNEKAVVVFSGGQDSTTCLFWALKNFKEVATVTFDYGQRHSAEIECARKIAEELGVSFKVLDMTLINQLSANALTRDDIEVTATEGELPSTFVPGRNHLFLSFAAVYADAIGARHLITGVSETDFSGYPDCRDTFIKSLNVTLNLAMDKQFVIHTPLMWLNKSEVWELSDQLDALDFVQEKTLTCYNGIPSSGCGECPSCILRNEGLSAYKAKKSCRCSFMMQQFYPSVPHAFRFELNKDMHFSAAHFIPSEDAGKCQEMHGHTYFINLTICGNELDTTGFLIDFKLLKNLIHKKYDHSVLNHHPEFESKFPTTELLAQQIWQMVENLLQTSANQPHCLQVIVRETPTSYVVYRPSKEDFQ

SEQ ID NO: 24084 - protein, 141 aa, Planomicrobium glaciei
  REGION 1..141: note = tr|A0A1G8GVW5|A0A1G8GVW5_9BACL 6-carboxy-5,6,7,8-tetrahydropterin synthase; OS = Planomicrobium glaciei OX=459472 GN=SAMN04487975_110137; PE = 3 SV=1
MMQQFYPSVPHAFRFELNKDMHFSAAHFIPSEDAGKCQEMHGHTYFINLTICGNELDATGFLIDFKLLKNLIHKKYDHSVLNHHPEFESKFPTTELLAQQIWQMVENLLQSTANQPHCLQVIVRETPTSYVVYRPSKEDFQ

SEQ ID NO: 24085 - protein, 141 aa, unidentified
  source 1..141: note = Planomicrobium soli
  REGION 1..141: note = tr|A0A2P8GAQ8|A0A2P8GAQ8_9BACL 6-carboxy-5,6,7,8-tetrahydropterin synthase; OS = Planomicrobium soli OX=1176648 GN=B0H99_1127 PE=3 SV=1
MMQQFYPSPLHSYRFELNKDMNFSAAHFIPSEEAGKCQAVHGHTYFVNVTIGGNELDSIGFLIDFKIIKDVVHKKYDHSVLNDHPEFKDKFPTTELLAEQIWNSIQEVLDTRSNRPQCLQVIVRETPTSYVVYRPRQEELA

SEQ ID NO: 24086 - protein, 141 aa, Planomicrobium sp.
  REGION 1..141: note = tr|A0A3L7JHL8|A0A3L7JHL8_9BACL 6-carboxy-5,6,7,8-tetrahydropterin synthase; OS = Planomicrobium sp. Y74 OX=2478977 GN=queD PE=3 SV=1
MMQQFYPSVPHAYRFELNKDMNFSAAHFIPHAEAGKCQTVHGHTYFVNVTVAGNELDASNFLIDFKLLKDAVHKKYDHSVLNDHPEFNGKFPTTERLAEQIWQSIDAILQTRDNKPSCLQVIVRETPTSYVIYRPEREGLR

SEQ ID NO: 24087 - protein, 141 aa, Planomicrobium sp.
  REGION 1..141: note = tr|A0A5C5T709|A0A5C5T709_9BACL 6-carboxy-5,6,7,8-tetrahydropterin synthase; OS = Planomicrobium sp. CPCC 101079 OX=2599618 GN=queD PE=3; SV = 1
MMQQFYPSIPHPYRFELNKDMNFSAAHFIPSEEAGKCQAVHGHTYHVNVTIGGNELDPIGFLIDFKLLKDIVHKKYDHSVLNDHPEFKDKFPTTELLAEQIWISIQDVLNTRGNKPKCLQVIVRETPTSYVVYRPRQEDLA

SEQ ID NO: 24088 - protein, 158 aa, Planomonospora sphaerica
  REGION 1..158: note = tr|A0A171DJ21|A0A171DJ21_9ACTN Queuosine biosynthesis QueD OS=Planomonospora sphaerica OX=161355; GN = PS9374_04523 PE=4 SV=1
MLDTSTDQPTGPRSSGPQPLLGPERPDQATSGFQLEISKWFGFEAGHRLNGLPDGHKCGRAHGHSYQVEVRLTAQALTGPGFVTDFGELEPFATYIADHLDHRDLNAVLAVEPTSELLAVHLARWFLEHVEPAVPGRLVAVTVKETTKTSATCTVIRP

SEQ ID NO: 24089 - protein, 118 aa, Planomonospora sphaerica
  REGION 1..118: note = tr|A0A171DIQ0|A0A171DIQ0_9ACTN 6-carboxy-5,6,7,8-tetrahydropterin synthase; OS = Planomonospora sphaerica OX=161355 GN=PS9374_04432 PE=3; SV = 1
MELIKEYRFEAAHRLPHVPPGHQCGRPHGHSYRVGIHVEGEVNEAAGWVIDYAEINAVVKPIIDELDHRTLEEIPGLENPTSENLARWLWQHIAPRILLLSAVTVHETATSSCVYRGA

SEQ ID NO: 24090 - protein, 132 aa, Plantactinospora sp.
  REGION 1..132: note = tr|A0A2R4FTQ3|A0A2R4FTQ3_9ACTN Uncharacterized protein OS=Plantactinospora sp. BB1 OX=2071627; GN = C6W10_35715 PE=4 SV=1
MFSITVRDHIMIAHSFRGEVFGPAQKLHGATFVVDATFRRPELDADNIVVDIGLASGALAEVLGELNYRNLDDEPSLAGINTSTEALAQIIADRLAERVQAGQLGAGARGLTGITVTLHESHIAWASYERTL

SEQ ID NO: 24091 - protein, 132 aa, Plantactinospora sp.
  REGION 1..132: note = tr|A0A4Q7W9K6|A0A4Q7W9K6_9ACTN 6-pyruvoyl-tetrahydropterin synthase OS=Plantactinospora sp. CNZ321 OX=2512141 GN=EV371_2802 PE=4 SV=1
MFSITVRDHIMIAHSFRGEVFGPAQKLHGATYVVDATFRRPELDADNLVVDIGLASGQLAEVLGELNYRNLDDEPSLAGINTSTEALARIIADRLAERVHAGSLGAGARGLTGLTVTLHESHIAWASYERTL

SEQ ID NO: 24092 - protein, 124 aa, Plantibacter flavus
  REGION 1..124: note = tr|A0A4U3FQA6|A0A4U3FQA6_9MICO 6-carboxy-5,6,7,8-tetrahydropterin synthase; OS = Plantibacter flavus OX=150123 GN=queD PE=3 SV=1
MSNLDGLRVSVSQEFEFHAAHFLSWHPGKCANLHGHSYRVQVNVEGPLDHNGIVIDFDQLAEIVWKRVIEPLDHSLLNDHIENPTAERLAVHIMQKLEDVAIRLSEVRVWETAQSCATVRRSPE

SEQ ID NO: 24093 - protein, 365 aa, Plasticicumulans acidivorans
  REGION 1..365: note = tr|A0A317MYN5|A0A317MYN5_9GAMM 6-pyruvoyltetrahydropterin/6-carboxytetrahydropterin synthase OS=Plasticicumulans acidivorans OX=886464; GN = C7443_102452 PE=4 SV=1
MSERVYTVARAPFEAACRIPTLPATHPASRLHGHSYAARVRARLPEDWAGFAGAGVENLAAHLAAAVAPLDYAYLNELIAVPTDENLARWIGGRLLDVPGIESLGLRSTPDAGVDLDADGSAHVWRRFRFEAAHFLPNVPAGHQCGRMHGHGFEVVLHANQDLGGADMGVDQDRLAEVWAPLAAELDHACLNELPGLACPTSEVLARWIWRRLRDELPELSWVTVFETASAGCQYDGEYFRIWKEQRFEAALRLPAAPEDDPRGRLHGHSYGIRLHVAAPLDEVMGWTVDFGDVKRLFTPVYARLDHHRLDGLDGLPSADAANLARWIRAQCAESLPMLDRIDLFETPGNGVALCWGRLAPALPG

SEQ ID NO: 24094 - protein, 361 aa, unidentified
  source 1..361: note = Plasticicumulans lactativorans
  REGION 1..361: note = tr|A0A4R2L7K8|A0A4R2L7K8_9GAMM 6-pyruvoyltetrahydropterin/6-carboxytetrahydropterin synthase OS=Plasticicumulans lactativorans OX=1133106; GN = EV699_10418 PE=4 SV=1
MSATLYRLASAPFEAACHVGALPEGHRARRLHGHSYLARVRVRHAAADGPCDCAGLAGRLAATVAPLDYAYLNDIVAEPTDENLARWIGARLDLPGVAALGIQSTPLAGVDLDAGGGAHVWRRFRFEAAHRLPHVPPGHPCGRMHGHGFEVILHAQTALGTRDLALDHDHLAALWAPLHAELHHACLNDLPGLANPTSELLAAWIWARLKGVLPELSWVTVYETVSAGCHYDGHHYRIWKEQRFEAALQLTRAAAGDPRRGLHGHSYVVRLHLAAPLDTVMGWTVDYGEVKALFAPLYQQIDHHRLDALPGLDQADPASLAQWLRERLHAALPALDRIDLFETPACGVALCWGGLGPALPG

SEQ ID NO: 24095 - protein, 119 aa, Plautia stali
  REGION 1..119: note = tr|U3U371|U3U371_9ENTR 6-carboxy-5,6,7,8-tetrahydropterin synthase OS=Plautia stali symbiont OX=891974 GN=E05_44980 PE=3 SV=1
MSTTLFKEFQFEAAHRLPHVPEGHKCGRLHGHSFLVRLEITGEVDAHTGWVMDFAELKAAFRPIYDRLDHHYLNDIPGLESPTSEVLAKWIWDEMKPILPELSAVMIKETCTTGCVYRG

SEQ ID NO: 24096 - protein, 283 aa, unidentified
  source 1..283: note = Pleionea mediterranea
  REGION 1..283: note = tr|A0A316FX23|A0A316FX23_9GAMM 6-pyruvoyl tetrahydropterin synthase-like protein OS=Pleionea mediterranea OX=523701 GN=C8D97_10374 PE=4 SV=1
MTTLFVEQLTVIDFSYFDPDRGIVGESWILDVELDGSLDDNGMVFDFTHVKKQIKQYVDQLIDHKFVVANHYKNLKTQLESDQLTLELHTNNKDYYCHKSPVQAVTFVPAETISIETVLPFLQDSIKSILPANVHDLRIRLKEESIEGAFYHYSHGLKKHFGDCQRIAHGHRSKIIVHRNNKRDESLEQKIAEEWRDIYLITEGDITSRQNLNEKPYVTLGYLANQGSFELTLPEDVCDTLETDSTVELIAEHLAQKLKQENPTDTFSVRAFEGVKKGAIAKA

SEQ ID NO: 24097 - protein, 166 aa, Plesiocystis pacifica
  REGION 1..166: note = tr|A6GII1|A6GII1_9DELT Uncharacterized protein; OS = Plesiocystis pacifica SIR-1 OX=391625 GN=PPSIR1_11973; PE = 4 SV=1
MDGRLTTIELFKEDMKFSAGHFTIFSATERENLHGHNFTVSAALTGRVGREGLMADYGAFKRELKAMCDAWNETFMLPNCSPHLQVERTDSEVLAHYDGTTLRFLPRDVTVVECANVTIEELARLFGERLTAEPERLRERGVVGVTIKCASGPGQWASWVWTEKQA

SEQ ID NO: 24098 - protein, 129 aa, Plesiocystis pacifica
  REGION 1..129: note = tr|A6GHT7|A6GHT7_9DELT 6-carboxy-5,6,7,8-tetrahydropterin synthase; OS = Plesiocystis pacifica SIR-1 OX=391625 GN=PPSIR1_28706; PE = 3 SV=1
MARQYRLKTNVHFAAAHVLRGYGGDCEQLHGHNYKVEIEVACEQLDELGMGVDFRAVRAAAREVVGVIDHRFLNEIPPFTEVNPTAEHIAAYIYEGLARRLAELAGERVQLAAITVWETERDSVTYTEG

SEQ ID NO: 24099 - protein, 120 aa, Plesiomonas shigelloides
  REGION 1..120: note = tr|A0A1A9AXA7|A0A1A9AXA7_PLESH 6-carboxy-5,6,7,8-tetrahydropterin synthase OS=Plesiomonas shigelloides OX=703 GN=queD PE=3 SV=1
MTTTLFKDFMFEAAHRLPHVPEGHKCGRLHGHSFTVRIEISGEVDPHTGWIMDFGDIKQVFKPIYDQLDHYYLNDIEGLENPTSEVLSRWIWDKLKPQLPLLSAVMIKETCTSGCTYRGE

SEQ ID NO: 24100 - protein, 120 aa, Plesiomonas shigelloides; identical to SEQ ID NO: 24099
  REGION 1..120: note = tr|R8AUN6|R8AUN6_PLESH 6-carboxy-5,6,7,8-tetrahydropterin synthase OS=Plesiomonas shigelloides 302-73 OX=1315976 GN=PLESHI_00842 PE=3 SV=1

SEQ ID NO: 24101 - protein, 289 aa, Pleurocapsa sp.
  REGION 1..289: note = tr|A0A2T1CE28|A0A2T1CE28_9CYAN 6-pyruvoyl tetrahydropterin synthase OS=Pleurocapsa sp. CCALA 161; OX = 2107688 GN=C7B62_22650 PE=4 SV=1
MKCTINRRAQFSASHRYWLPELDEAENKRLFGACSRFPGHGHNYVLYASLEGDLDEYGMVENLSVVKQVIKREVTSQLNYSYLNDTWPEFQTTLPTTENISRIIWQRLAPHLPLVNVRLFEHPELWTDYQGNNMEATLTVKTHFSAAHRLAIPSLSFEENQEIYGKCARPNGHGHNYHLEVTVAGEIDARTGMLVDLAALQNVIDEYVVEPFDHTFLNKDIAYFAEVVPTAENIAVRIADLLRSPIKEIGAELDKIKLIESPNNSCEINCRNTQATIETAANQAAVMAS

SEQ ID NO: 24102 - protein, 290 aa, Pleurocapsa sp.
  REGION 1..290: note = tr|K9T5T3|K9T5T3_9CYAN 6-pyruvoyl-tetrahydropterin synthase OS=Pleurocapsa sp. PCC 7327 OX=118163; GN = Ple7327_2183 PE=4 SV=1
MQCVIHRRAQFSASHRYWLPELDEAENWERFGAGSRFPGHGHNYVLYVSLAGEIDEYGMVQNLSKVKRLIKQEVTSQLDYAYLNDVWSEFQQTLPTTENIARVIWQRLAPHLPLVNIQLFEHPDLWADYKGNGMEATLTVKTHFSAAHQLALPELSQEENNEIYGKCARPNGHGHNYHLEVSVVGEIDPRTGMIVDLGALQKAIDDYVVEPFDHTFLNKDIPHFAKVVPTAENIALYIAQLLQQPIRELGAELEKVKLIESPNNSCEIYCRQLAGETTNLQMKEPALAAG

SEQ ID NO: 24103 - protein, 120 aa, unidentified
  source 1..120: note = Pluralibacter gergoviae
  REGION 1..120: note = tr|A0A089PMM0|A0A089PMM0_PLUGE 6-carboxy-5,6,7,8-tetrahydropterin synthase; OS = Pluralibacter gergoviae OX=61647 GN=queD PE=3 SV=1
MSTTLFKDFTFEAAHRLPHVPEGHKCGRLHGHSFMVRLEITGEVDPHTGWIMDFAELKAAFKPTYDRLDHYYLNDIPGLENPTSEVLAKWIWDQMKPRVPLLSAVMIKETCTAGCVYRGE

SEQ ID NO: 24104 - protein, 120 aa, unidentified
  source 1..120: note = Pluralibacter gergoviae
  REGION 1..120: note = tr|A0A1S2BL43|A0A1S2BL43_PLUGE 6-carboxy-5,6,7,8-tetrahydropterin synthase; OS = Pluralibacter gergoviae OX=61647 GN=B5M10_25335 PE=3; SV = 1
MSTTLFKDFTFEAAHRLPHVPEGHKCGRLHGHSFMVRLEITGEVDPHTGWIMDFAELKAAFKPTYDRLDHYYLNDIPGLENPTSEVLAKWIWDQMKPQVPLLSAVMIKETCTAGCVYRGE

SEQ ID NO: 24105 - protein, 283 aa, unidentified
  source 1..283: note = Pokkaliibacter plantistimulans
  REGION 1..283: note = tr|A0A318C1U4|A0A318C1U4_9GAMM Uncharacterized protein OS=Pokkaliibacter plantistimulans OX=1635171; GN = WH50_20500 PE=4 SV=1
MALTLFVENLTVLDCSLLSADQGIQGESWRVDIELDGELDQQSMLLDFGEVKKQIKRHIDETLDHTLLLPGRLPGLLIEKEAEQTRVVFDHCRFGFESSGPAQAYSLLDCEAITAESVALHLQQLIQPLLPDNLQQVRFTLVNEQVDGVMYQYSHGLKKHGGNCQRIVHGHRSTIRIFRNGERDRQAESAWATRWQNIYLGTAEDVTGHTEHQIDFAYSSNQGHFTLRMPAARCEILDRDTTVEELARYITEQLHDQHPDAEWRVQAFEGIGKGAIYRIPPRR

SEQ ID NO: 24106 - protein, 137 aa, unidentified
  source 1..137: note = Polaribacter atrinae
  REGION 1..137: note = tr|A0A176TB03|A0A176TB03_9FLAO 6-pyruvoyl tetrahydrobiopterin synthase OS=Polaribacter atrinae; OX = 1333662 GN=LPB303_10275 PE=4 SV=1
MPKVKVYRRAHFNAAHRLFNSDWSDEKNAAVFGKCSNPNYHGHNYEMIVALFGEVDPVTGFVYDLGLLRELIKEEIEDPFDHKNLNIEVAEFKNLNPTAENISIIIYNKLRPHIPAHLEIEVTLYETRRNFVRYSGE

SEQ ID NO: 24107 - protein, 149 aa, unidentified
  source 1..149: note = Polaribacter atrinae
  REGION 1..149: note = tr|A0A176TDF6|A0A176TDF6_9FLAO 6-carboxy-5,6,7,8-tetrahydropterin synthase; OS = Polaribacter atrinae OX=1333662 GN=LPB303_06750 PE=3; SV = 1
MSTIRITKQFSFETGHALYGYDGKCKNVHGHSYKLSVTVSGTPIKDSTNVKFGMVIDFGDLKKIVNEEIVDIFDHATVFNKNTPHVDLAKELIDRGHHVLLVDYQPTSEMMVIDFAKKIKNRLPENIKLHAIKLQETDSSFAEWYASEN

SEQ ID NO: 24108 - protein, 150 aa, Polaribacter butkevichii
  REGION 1..150: note = tr|A0A2P6C6T5|A0A2P6C6T5_9FLAO 6-carboxytetrahydropterin synthase QueD OS=Polaribacter butkevichii OX=218490 GN=BTO14_11310 PE=4 SV=1
MSTIRITKQFNFETGHALYGYDGKCKNVHGHSYKLSVTVSGKPIKDNTNVKFGMVIDFGDLKKIVNEEIVDIFDHATVFNKNTPHVELAKELQARDHHVILVDYQPTSEMMVIDFAEKIKNRLPENIKLYSIKLQETDSSFAEWFASENK

SEQ ID NO: 24109 - protein, 137 aa, Polaribacter butkevichii
  REGION 1..137: note = tr|A0A2P6CF01|A0A2P6CF01_9FLAO 6-pyruvoyl tetrahydrobiopterin synthase OS=Polaribacter butkevichii; OX = 218490 GN=BTO14_09515 PE=4 SV=1
MPKVKVYRRAHFNAAHRLFNAAWSDAKNAEVFGKCSNPNYHGHNYEMIVALFGEIDPVTGFVYDLGLLRELIKKEVEDPFDHKNLNIEVAEFKNLNPTAENISIVIYNKLRPHIPAHLEIEVTLYETRRNFVRYAGE

SEQ ID NO: 24110 - protein, 149 aa, Polaribacter dokdonensis
  REGION 1..149: note = tr|A0A0M9CFP2|A0A0M9CFP2_9FLAO 6-carboxy-5,6,7,8-tetrahydropterin synthase; OS = Polaribacter dokdonensis DSW-5 OX=1300348 GN=I602_1093; PE = 3 SV=1
MSTIRITKQFKFETGHALYGYDGKCKNVHGHSYKLSVTVSGKPITDNTHVKFGMVIDFGDLKKIVNEEIVDIFDHATVFNKNTPHVELAKELMDRDHHVILVDYQPTSEMMVIDFAEKIKKRLPENIKLHSIKLQETASSFAEWFASEN

SEQ ID NO: 24111 - protein, 137 aa, Polaribacter dokdonensis
  REGION 1..137: note = tr|A0A0M9CI17|A0A0M9CI17_9FLAO 6-carboxy-5,6,7,8-tetrahydropterin synthase; OS = Polaribacter dokdonensis DSW-5 OX=1300348 GN=I602_2512; PE = 4 SV=1
MPKVTVHRKAHFNAAHRLYRKDWSDDKNFEVFNKCSNPNFHGHNYELIVSLTGEIDKDTGYVYDLGILKNLIKSEIEECFDHKNLNVEVAEFQELNPTAENICVVTYDKLRKHLPNHLDLKITLYETPRNFVSYSGD

SEQ ID NO: 24112 - protein, 136 aa, Polaribacter filamentus
  REGION 1..136: note = tr|A0A2S7KXI9|A0A2S7KXI9_9FLAO 6-pyruvoyl tetrahydrobiopterin synthase OS=Polaribacter filamentus; OX = 53483 GN=BST83_08715 PE=4 SV=1
MPKVTVHRKAHFNSAHRLYRKDWSDEKNFEVFNKCSNPNFHGHNYELIVSLTGDIDKETGYVYDLGVLSNLIKLQIENSFDHKNLNIEVEEFKNLNPTAENISVVIYNKLIEHLPDHLELEITLYETPRNFVTYSG

SEQ ID NO: 24113 - protein, 149 aa, Polaribacter filamentus
  REGION 1..149: note = tr|A0A2S7L0L7|A0A2S7L0L7_9FLAO 6-carboxy-5,6,7,8-tetrahydropterin synthase; OS = Polaribacter filamentus OX=53483 GN=BST83_16015 PE=3; SV = 1
MSTIRITKQFKFETGHALYGYDGKCKNVHGHSYKLSVTVSGKPITDSNNVKFGMVIDFGDLKKIVKEEIVDLFDHATVFNQNTPHIELAKELKDRDHHVILVDYQPTSEMMVIDFAQKIKSRLPSNIKLHSIKLSETDTSFAEWFASEN

SEQ ID NO: 24114 - protein, 136 aa, Polaribacter gangjinensis
  REGION 1..136: note = tr|A0A2S7WBN1|A0A2S7WBN1_9FLAO 6-pyruvoyl tetrahydrobiopterin synthase OS=Polaribacter gangjinensis; OX = 574710 GN=BTO13_05050 PE=4 SV=1
MPKVTVHRKAHFNAAHRLYRKDWSDEKNFEIFSKCSNPNFHGHNYELIVSLTGEINPETGYVYDLGILKNLIKTEIEDCFDHKNLNIEVPEFKELNPTAENICVVTYDKLRKHLPKTLDLKITLYETPRNFVSYSG

SEQ ID NO: 24115 - protein, 149 aa, Polaribacter gangjinensis
  REGION 1..149: note = tr|A0A2S7WCP8|A0A2S7WCP8_9FLAO 6-carboxy-5,6,7,8-tetrahydropterin synthase; OS = Polaribacter gangjinensis OX=574710 GN=BTO13_09175 PE=3; SV = 1
MSTIRITKQFSFETGHALYGYDGKCKNVHGHSYKLSVTVSGKPISDNTNVKFGMVIDFGDLKKIVKEEIVDIFDHATVFNKNTPHVELAAELKNRGHHIILVDYQPTSEMMVIDFAKKIKDRLPQNIHLHSIKLQETDTSFAEWFASEN

SEQ ID NO: 24116 - protein, 149 aa, Polaribacter glomeratus
  REGION 1..149: note = tr|A0A2S7WI72|A0A2S7WI72_9FLAO 6-carboxy-5,6,7,8-tetrahydropterin synthase; OS = Polaribacter glomeratus OX=102 GN=BTO16_14030 PE=3 SV=1
MSTIRITKQFNFETGHALYGYDGKCKNVHGHSYKLSVTVSGKPIADSNNVKFGMVIDFGDLKKIVKEEIVDLFDHATVFNQNTPHIELAKELIDRDHHVILVDYQPTSEMMVIDFAQKIKSRLPSNIKLHSIKLSETDTSFAEWFASEN

SEQ ID NO: 24117 - protein, 136 aa, Polaribacter glomeratus
  REGION 1..136: note = tr|A0A2S7WXF7|A0A2S7WXF7_9FLAO 6-pyruvoyl tetrahydrobiopterin synthase OS=Polaribacter glomeratus; OX = 102 GN=BTO16_06480 PE=4 SV=1
MPKVTVHRKAHFNSAHRLYRKDWSDEKNFEVFNKCSNPNFHGHNYELIVSLTGAIDKETGYVYDLGILSSLIKLHIEENFDHKNLNIEVEEFKNLNPTAENISVVIYDKLRKHIPNHLELEITLYETPRNFVTYSG

SEQ ID NO: 24118 - protein, 149 aa, Polaribacter irgensii
  REGION 1..149: note = tr|A4BXT3|A4BXT3_9FLAO 6-carboxy-5,6,7,8-tetrahydropterin synthase; OS = Polaribacter irgensii 23-P OX=313594 GN=PI23P_04732; PE = 3 SV=1
MSTIRITKKFNFETGHALYGYDGKCKNVHGHSYKLSVTVSGKPITDNTNPKFGMVIDFTDLKKIVNEEIVDVFDHATVFNQNTPHVELAKELMARDHHVLLVDYQPTSEMMVIDFAQKIRSRLPENIKLHAIKLQETESSFAEWFASEN

SEQ ID NO: 24119 - protein, 137 aa, Polaribacter irgensii
  REGION 1..137: note = tr|A4C0Y2|A4C0Y2_9FLAO Putative 6-pyruvoyl tetrahydropterin synthase OS=Polaribacter irgensii 23-P; OX = 313594 GN=PI23P_10615 PE=4 SV=1
MPKVTVHRKAHFNAAHRLYRKDWSDEKNFEVFNKCSNPHFHGHNYELIVSLTGEIDQETGYVFDLGILKNHIKVEIEDAFDHKNLNIEVPEFKDLNPTAENICVVTYKKLRNLLPENLDLEVTLYETPRNFVSYSGE

SEQ ID NO: 24120 - protein, 149 aa, unidentified
  source 1..149: note = Polaribacter porphyrae
  REGION 1..149: note = tr|A0A2S7WQN8|A0A2S7WQN8_9FLAO 6-carboxy-5,6,7,8-tetrahydropterin synthase; OS = Polaribacter porphyrae OX=1137780 GN=BTO18_12480 PE=3; SV = 1
MSTIRITKQFTFEAGHALYGYDGKCKNLHGHSYKLFVTVSGVPISDEKNVKYGMVIDFGDLKKIVNEEIVDIFDHATVFNKNTPHLELAQELIDREHHVLLVDYQPTTEMMVIDFAKKIKTRLPENIKLQAIKLQETETSFAEWYASEN

SEQ ID NO: 24121 - protein, 137 aa, unidentified
  source 1..137: note = Polaribacter porphyrae
  REGION 1..137: note = tr|A0A2S7WMH5|A0A2S7WMH5_9FLAO 6-pyruvoyl tetrahydrobiopterin synthase OS=Polaribacter porphyrae; OX = 1137780 GN=BTO18_06290 PE=4 SV=1
MPKVTVHRKAHFNAAHRLYRKDWSNEKNFEVFNKCSNEYYHGHNYELIVSLTGEINKETGYVYDLGILRNLIKSEIEECFDHKNLNIEVPEFKNLNPTAENICVVTFDKLRKHLPETLDLKITLYETPRNFVSYSGE

SEQ ID NO: 24122 - protein, 137 aa, unidentified
  source 1..137: note = Polaribacter reichenbachii
  REGION 1..137: note = tr|A0A1B8TPM3|A0A1B8TPM3_9FLAO 6-carboxy-5,6,7,8-tetrahydropterin synthase; OS = Polaribacter reichenbachii OX=996801 GN=LPB301_16050; PE = 3 SV=1
MPRVTVHRKAHFNAAHRLYCKDWSSEKNFEVFSKCSNPNFHGHNYELIVSLTGEVNPITGYVYDLGVLKNIIKEEIEEAFDHKNLNIEVPEFKNLNPTAENICVVIYDKLRTHIPNHLDLKITLYETPRNFVSYSGD

SEQ ID NO: 24123 - protein, 149 aa, unidentified
  source 1..149: note = Polaribacter reichenbachii
  REGION 1..149: note = tr|A0A1B8TYG0|A0A1B8TYG0_9FLAO 6-carboxy-5,6,7,8-tetrahydropterin synthase; OS = Polaribacter reichenbachii OX=996801 GN=LPB301_09520; PE = 3 SV=1
MSTIRITKQFNFETGHALYGYDGKCKNVHGHSYKLSVTVSGKPIKDSTNVKFGMVIDFGDLKKIVNEEVVDLFDHATVFNKNTPHVELAKELSDRGHHVILVDYQPTSEMMVIDFAQKIKKRLPDNIKLHSIKLQETDTSFAEWFSSEN

SEQ ID NO: 24124 - protein, 137 aa, unidentified
  source 1..137: note = Polaribacter sejongensis
  REGION 1..137: note = tr|A0A2K8VNH3|A0A2K8VNH3_9FLAO 6-pyruvoyl tetrahydrobiopterin synthase OS=Polaribacter sejongensis; OX = 985043 GN=BTO15_11450 PE=4 SV=1
MPKVKVYRRAHFNAAHRLFNSEWSDEKNAEVFGKCSNPNYHGHNYEMIVALFGEVDPITGFVYDLGLLRELIKEEIEEPFDHKNLNIEVPEFKNLNPTAENISIIIYNKLRAHIPANLEIEVTLYETRRNFVRYSGE

SEQ ID NO: 24125 - protein, 149 aa, unidentified
  source 1..149: note = Polaribacter sejongensis
  REGION 1..149: note = tr|A0A2K8VK42|A0A2K8VK42_9FLAO 6-carboxy-5,6,7,8-tetrahydropterin synthase; OS = Polaribacter sejongensis OX=985043 GN=BTO15_04885 PE=3; SV = 1
MSTIRITKQFSFETGHALYGYDGKCKNVHGHSYKLSVTVSGKPIADNTNVKFGMVIDFGDLKKIVNEEIVDIFDHATVFNKNTPHVDLAKELMDRGHHVLLVDYQPTSEMMVIDFAEKIKGRLPENIKLHAIKLQETDSSFAEWYASEN

SEQ ID NO: 24126 - protein, 149 aa, Polaribacter sp.
  REGION 1..149: note = tr|A0A395JWV0|A0A395JWV0_9FLAO 6-carboxy-5,6,7,8-tetrahydropterin synthase; OS = Polaribacter sp. WD7 OX=2269061 GN=DUT90_10350 PE=3 SV=1
MSTIRITKQFSFETGHALYGYDGKCKNVHGHSYKLSVTVSGKPIKDNTNVKFGMVIDFGDLKKIVNEEVVDLFDHATVFNKNTPHVDLAKELQVRGHHVLLVDYQPTSEMMVIDFAKKIKKRLPKNIKLHAIKLQETDTSFAEWFASDN

SEQ ID NO: 24127 - protein, 137 aa, Polaribacter sp.
  REGION 1..137: note = tr|A0A1Y0M508|A0A1Y0M508_9FLAO 6-carboxy-5,6,7,8-tetrahydropterin synthase; OS = Polaribacter sp. SA4-10 OX=754397 GN=BTO04_01155 PE=3; SV = 1
MSRVTVNRKAHFNAAHRLFRKEWSDDKNLEVFGKCSNPNYHGHNYELTVSLTGEIDGETGFVFDLGVLRKIINTEIEEYLDHKNLNVEVPEFKDLNPTAENISVVIYNKLRVRIPEKLDLKVILYETPRNFVSYCGE

SEQ ID NO: 24128 - protein, 137 aa, unidentified
  source 1..137: note = Polaribacter vadi
  REGION 1..137: note = tr|A0A1B8TXW0|A0A1B8TXW0_9FLAO 6-pyruvoyl tetrahydrobiopterin synthase OS=Polaribacter vadi; OX = 1774273 GN=LPB3_08385 PE=4 SV=1
MPKVTVHRKAHFNAAHRLYRKDWSEEKNLEVFSKCSNPNFHGHNYELIVSLTGEIDKETGYVYDLGVLSSLIKAEIENSFDHKNLNVEVKEFKNLNPTAENIAVVIYDKLRPHIPTHLDLKITLYETPRNFVSYAGE

SEQ ID NO: 24129 - protein, 149 aa, unidentified
  source 1..149: note = Polaribacter vadi
  REGION 1..149: note = tr|A0A1B8TTQ3|A0A1B8TTQ3_9FLAO 6-carboxy-5,6,7,8-tetrahydropterin synthase; OS = Polaribacter vadi OX=1774273 GN=LPB3_12225 PE=3 SV=1
MSTIRITKQFNFETGHALYGYDGKCKNVHGHSYKLSVTVSGKPISDNTNVKFGMVIDFSDLKKIVNEEIVDIFDHATVFNKNTPHVELAKELMDRGHDVLLVDYQPTSEMMVIDFAKKIKKRLPNNIKLHSIKLQETDSSFAEWFAKDN

SEQ ID NO: 24130 - protein, 126 aa, Polaromonas naphthalenivorans
  REGION 1..126: note = tr|A1VL35|A1VL35_POLNA 6-carboxy-5,6,7,8-tetrahydropterin synthase OS=Polaromonas naphthalenivorans (strain CJ2) OX=365044 GN=Pnap_1046 PE=3; SV = 1
MNGVSMMMCELSQTFFFDAAHTLDRAIETASSKRIHGHTYNAEVFLTGQPDPTTGMVIDLGLVRREVALLREQLDHHLLDEVEGLGPPTLENLCQFIFRKLLPALPALTSVRVWRTSIGDGCRVSR

SEQ ID NO: 24131 - protein, 120 aa, Polaromonas sp.
  REGION 1..120: note = tr|A0A1S8FCB3|A0A1S8FCB3_9BURK 6-carboxy-5,6,7,8-tetrahydropterin synthase OS=Polaromonas sp. A23 OX=1944133 GN=B0B52_20770 PE=3 SV=1
MSYTISQKFFFDAAHTLKREIEVDSSRRVHGHTYNAEVFLSGQPDPDSGMVMDLALVRLEIEQLRQLLDHHLLDDVPGLGPATMENLCRFIAGKLQPRLPALSSVRVWRESVGDSCMWSL

SEQ ID NO: 24132 - protein, 120 aa, Polaromonas sp.
  REGION 1..120: note = tr|A0A258TT93|A0A258TT93_9BURK 6-carboxy-5,6,7,8-tetrahydropterin synthase OS=Polaromonas sp. 28-63-22 OX=1970416 GN=B7Y42_11065 PE=3 SV=1
MNYEISQTFFFDAAHTLRREIEADSSRRVHGHTYHAEVMLSGQPDVATGMVVDLGLVRRAIEQLRPMLDHRMLDDIAGLGPATLENLCAFIWRELLPALPALAAVRVWRTGVGDSCTLRR

SEQ ID NO: 24133 - protein, 124 aa, unidentified
  source 1..124: note = [Polyangium] brachysporum
  REGION 1..124: note = tr|A0A0G3BFI8|A0A0G3BFI8_9BURK 6-carboxy-5,6,7,8-tetrahydropterin synthase; OS = [Polyangium] brachysporum OX=413882 GN=queD PE=3 SV=1
MQYELTQRFFFEAAHTLERKVDAEPSRRIHGHTYFAEVAVRGAPQADTGMVMDLGHLRRAIDPVRDALDHRLLDEVEGLTRPTLEGLCSYIASALSDSVPQLAWVRVWREASGDTCTLTLRAPA

SEQ ID NO: 24134 - protein, 139 aa, Polyangium fumosum
  REGION 1..139: note = tr|A0A4U1JCM1|A0A4U1JCM1_9DELT 6-carboxytetrahydropterin synthase OS=Polyangium fumosum; OX = 889272 GN=E8A74_15830 PE=4 SV=1
MYTVGVRDHIMVAHRLDGDFFGPAQRMHGATYVVSIEVEQEELDEHCVVCDIGMLRAKLRGVLEQLDYRNLDDHPGFSPGRSTTEVIARYIHRELGHVLPLRAGTMLTVVLDESPNAWAKYRGPIRPASTMPGVEPGVA

SEQ ID NO: 24135 - protein, 134 aa, Polyangium fumosum
  REGION 1..134: note = tr|A0A4U1JEN4|A0A4U1JEN4_9DELT 6-carboxytetrahydropterin synthase OS=Polyangium fumosum; OX = 889272 GN=E8A74_16700 PE=4 SV=1
MFRVTEEVRFCYGHRLLDYEGPCARIHGHNARVEIELSSPTLDRKGFVADFFDIEKAGKDWILAQFDHRLILREDDPVIPFLKQAGEAFVTLPVNPSAENFAKLIFDHLRGHGVPVTAVSFYETDTAVATYDER

SEQ ID NO: 24136 - protein, 134 aa, Polyangium sp.
  REGION 1..134: note = tr|A0A4U1H4F0|A0A4U1H4F0_9DELT 6-carboxytetrahydropterin synthase OS=Polyangium sp. SDU3-1 OX=2567896 GN=E8A73_36935 PE=4 SV=1
MFRVSEEVRFCYGHRLMEYQGKCARIHGHNARVEIVLAGSGLNRLGFVADFADIEAAAHEWIEQFDHKLVLRQDDPVIPYLEQAGEAYVTLPVNPSAENFARLIYEHLRGKGHPVAAVRFWETETANATYEGEG

SEQ ID NO: 24137 - protein, 139 aa, Polyangium sp.
  REGION 1..139: note = tr|A0A4V5PFN3|A0A4V5PFN3_9DELT 6-carboxytetrahydropterin synthase OS=Polyangium sp. SDU3-1 OX=2567896 GN=E8A73_42730 PE=4 SV=1
MYTVGVRDHFHVAHRLEGDVFGPAQRMHGATYTVSVEIDHEELDEHGIVCDANMLRARLRQVLSEIDYRNLDEHPAFEPGKSTSEHIARFIHRELGRTLPVAAGTLLTISLEQSPACWVKYRAAVRGGSMVPREELGQA

SEQ ID NO: 24138 - protein, 283 aa, unidentified
  source 1..283: note = Polycyclovorans sp.
  REGION 1..283: note = tr|A0A2E2JCS6|A0A2E2JCS6_9GAMM Uncharacterized protein OS=Polycyclovorans sp. OX=2024852 GN=CMK02_12535; PE = 4 SV=1
MATLFVDHLTVIDCAYLDLQRGLVGESWIVDLMLEGALDAQSMVLDFGEVKRRIKRAIDRGPDHTLLVPCSAKGVRLDHPAPNRTRLQADTALGPITLDAPAVSITPLAVSAIDGDAVTRHCADLVRDLVPASVTRISLQLRVEAIDGAYYQYVHGLKKHDGACQRIAHGHRSRLMITVDGARDTALEAQLADALRDTYFVSADDVVGLTDSHLHTAYDAPEGRFDLRLPRSAVTHIDRDSTVECLADWLLAQARRHHPQAAIVVRAFEGVQKGAIATAERSG

SEQ ID NO: 24139 - protein, 133 aa, unidentified
  source 1..133: note = Polymorphum gilvum
  REGION 1..133: note = tr|F2J5H7|F2J5H7_POLGS Uncharacterized protein; OS = Polymorphum gilvum (strain LMG 25793 / CGMCC 1.9160 / SL003B-26A1) OX=991905 GN=SL003B_3927 PE=4 SV=1
MFAVEVRDHVMIAHSFRGELFGPAQALHGATFVIDAAFLSRTLDANGVVIDIGRAHEVLKEVLGPLNYRNLDELPQFAGVNTTTEYLTRYIHDHLSAAARSGSLGRPAAEIDAIRVTISESHVARAWYEAPVD

SEQ ID NO: 24140 - protein, 154 aa, unidentified
  source 1..154: note = Polynucleobacter aenigmaticus
  REGION 1..154: note = tr|A0A254PZ53|A0A254PZ53_9BURK 6-carboxytetrahydropterin synthase QueD; OS = Polynucleobacter aenigmaticus OX=1743164 GN=CBI30_08705; PE = 4 SV=1
MTTKQEAISITRRLEFDSGHRIPNHDGQCRHLHGHRYAIEVTLTGVIADHPGKADDGMVLDFGDIKRLTNQYVVEPWDHAFLVAKEDAGLVEYLNTIPDHKTVVMEHVPTVENLASAAFNLLQPVFEKAFEGRLKLSSIRLYETPNCWADVSHS

SEQ ID NO: 24141 - protein, 154 aa, unidentified
  source 1..154: note = Polynucleobacter asymbioticus
  REGION 1..154: note = tr|A0A1J0D6P1|A0A1J0D6P1_9BURK 6-carboxy-5,6,7,8-tetrahydropterin synthase; OS = Polynucleobacter asymbioticus OX=576611 GN=A4F89_08130; PE = 4 SV=1
MTSKQPILSITRRLEFDSGHRIPNHDGQCKHLHGHRYAIEITLTGEVADHPGKADDGMVLDFGDIKRLANQYVVEPWDHAFLVAKEDAGLVAFLGTLPNHKTVIMEHVPTVENLAHAAFTILKPIFSKAFGGRLELSVIRLYETPNCWADVNHA

SEQ ID NO: 24142 - protein, 154 aa, unidentified
  source 1..154: note = Polynucleobacter asymbioticus
  REGION 1..154: note = tr|A4SYR7|A4SYR7_POLAQ Uncharacterized protein; OS = Polynucleobacter asymbioticus (strain DSM 18221 / CIP 109841 / QLW-P1DMWA-1) OX=312153 GN=Pnuc_1417 PE=4 SV=1
MTSKQPILSITRRLEFDSGHRIPNHDGQCKHLHGHRYAIEITLTGEVADHPGKADDGMVLDFGDIKRLANQYIVEPWDHAFLVAKEDAGLVAFLGTLPNHKTVIMEHVPTVENLAHAAFTILKPVFSKAFSGRLELSMIRLYETPNCWADVNHA

SEQ ID NO: 24143 - protein, 154 aa, unidentified
  source 1..154: note = Polynucleobacter campilacus
  REGION 1..154: note = tr|A0A254PWJ0|A0A254PWJ0_9BURK 6-carboxytetrahydropterin synthase QueD; OS = Polynucleobacter campilacus OX=1743163 GN=CBI31_01220; PE = 4 SV=1
MTSKQAAISITRRLEFDSGHRIPNHDGQCKHLHGHRYAIEVTLTGEVADHPGKADDGMVLDFGDIKRLTNQYIVDLWDHAFLVAKEDEGLVAFLATLPNHKTVVMEHVPTVENLANTAFAILQPVFSKAFGGRLELSALRLYETPNCWADVHHP

SEQ ID NO: 24144 - protein, 150 aa, Polynucleobacter cosmopolitanus
  REGION 1..150: note = tr|A0A229FSR9|A0A229FSR9_9BURK 6-carboxytetrahydropterin synthase QueD; OS = Polynucleobacter cosmopolitanus OX=351345 GN=queD PE=4; SV = 1
MNKKIEITRKLEFDAGHRIPHHDGHCRHIHGHRYVIEVTLMGNVLNHQGHGDDGMVLDFGDIKKITNEAIVQQWDHAFLVAKEDVTLVNFLATIPGHKTIVLNSIPTVENLAQEAFATLDPIFKDKFGGRLNLSRLRLYETPNCWADVHA

SEQ ID NO: 24145 - protein, 154 aa, unidentified
  source 1..154: note = Polynucleobacter duraquae
  REGION 1..154: note = tr|A0A0E3ZMN4|A0A0E3ZMN4_9BURK Queuosine biosynthesis protein QueD OS=Polynucleobacter duraquae; OX = 1835254 GN=CL55_00013730 PE=4 SV=1
MTAKQEAISITRRLEFDSGHRIPNHDGQCRHLHGHRYAIEVTLTGVIADHPGKADDGMVLDFGDIKRLTNQYVVEPWDHAFLVAKEDAGLVDYLNSIPNHKTVVMEHVPTVENLASAAFRVLQPVFEKAFDGRLKLASIRLYETPNCWADVSHS

SEQ ID NO: 24146 - protein, 154 aa, unidentified
  source 1..154: note = Polynucleobacter hirudinilacicola
  REGION 1..154: note = tr|A0A210RWN4|A0A210RWN4_9BURK 6-carboxytetrahydropterin synthase QueD; OS = Polynucleobacter hirudinilacicola OX=1743166; GN = B6A14_06360 PE=4 SV=1
MTSKQPAISITRRLEFDSGHRIPNHDGQCKHLHGHRYAIEVTLTGEVADHPGKADDGMVLDFGDIKRLTNQYIVDLWDHAFLVAKEDESVVAFLATLPNHKTVVMEHVPTVENLANAAFAILQPVFSKNFGGRLELSALRLYETPNCWADVHHP

SEQ ID NO: 24147 - protein, 154 aa, unidentified
  source 1..154: note = Polynucleobacter meluiroseus
  REGION 1..154: note = tr|A0A240E1W6|A0A240E1W6_9BURK 6-pyruvoyltetrahydropterin/6-carboxytetrahydropterin synthase OS=Polynucleobacter meluiroseus OX=1938814; GN = SAMN06295945_1802 PE=4 SV= 1
MSNKSKAISITRRLEFDAGHRIPNHDGQCKHLHGHRYAIEVTLTGVIANHPGQADDGMLLDFGDIKRLTNQYVVEPWDHAFLVAKEDVALVAFLNSLPDHKTVVMDSVPTVENLGNAAFAILEPIFAKAFAGSLQLTSLRLYETPNCWVDITQS

SEQ ID NO: 24148 - protein, 87 aa, Polynucleobacter necessarius
  REGION 1..87: note = tr|B1XTX6|B1XTX6_POLNS Uncharacterized protein; OS = Polynucleobacter necessarius subsp. necessarius (strain STIR1) OX=452638 GN=Pnec_0541 PE=4 SV=1
MADHPGKADDGMVLDFGDIKRLTNQYIVDLWDHAFLVAKEDEGLVAFLSTLPNHKTVIMEHVPTVENLANAAFSILKPVFSKALVAA

SEQ ID NO: 24149 - protein, 152 aa, unidentified
  source 1..152: note = Polynucleobacter paneuropaeus
  REGION 1..152: note = tr|A0A2Z4JSY8|A0A2Z4JSY8_9BURK 6-carboxytetrahydropterin synthase QueD; OS = Polynucleobacter paneuropaeus OX=2527775 GN=queD PE=4; SV = 1
MKPAPISITRRLEFDAGHRIPNHDGQCKHLHGHRYAIELTLSGEIANHPGQADDGMVLDFADIKRLSNQYVVEPWDHAFLVAKEDQGLVDFLNSLPNHKTVVMEHVPTVENLAQAAFNILSPLFDKAFAGRLQLTAIRLYETPNCWADVHRP

SEQ ID NO: 24150 - protein, 152 aa, unidentified
  source 1..152: note = Polynucleobacter paneuropaeus
  REGION 1..152: note = tr|A0A2Z4JMN3|A0A2Z4JMN3_9BURK 6-carboxytetrahydropterin synthase QueD; OS = Polynucleobacter paneuropaeus OX=2527775 GN=queD PE=4; SV = 1
MKPAPISITRRLEFDAGHRIPNHDGQCKHLHGHRYAIEITLSGEIANHPGQADDGMVLDFADIKRLSNQYVVEPWDHAFLVAKEDQGLVDFLNSLPNHKTVVMEHVPTVENLAQAAFNILSPLFDKAFAGRLHLTAIRLYETPNCWADVHRP

SEQ ID NO: 24151 - protein, 154 aa, Polynucleobacter sp.
  REGION 1..154: note = tr|A0A258X8V2|A0A258X8V2_9BURK 6-carboxytetrahydropterin synthase QueD; OS = Polynucleobacter sp. 16-46-70 OX=1970421 GN=B7Y22_04335; PE = 4 SV=1
MTTNSEAISITRRLEFDSGHRIPNHDGQCRHLHGHRYAIEVTLTGVIADHPGKADDGMVLDFGDIKRLTNQFVVEPWDHAFLVAKEDSGLVQYLNSIPNHKTVVMDHVPTVENLASAAFKILQPVFEKAFDGRLKLSSIRLYETPNCWADVSHP

SEQ ID NO: 24152 - protein, 154 aa, Polynucleobacter sp.
  REGION 1..154: note = tr|A0A258B852|A0A258B852_9BURK 6-carboxytetrahydropterin synthase QueD; OS = Polynucleobacter sp. 32-46-5 OX=1970424 GN=B7Z19_05360; PE = 4 SV=1
MTTNSEAISITRRLEFDSGHRIPNHDGQCRHLHGHRYAIEVTLTGVIADHPGKADDGMVLDFGDIKRLTNQFVVEPWDHAFLVAKEDSGLVQYLNSIPNHKTVVMEHVPTVENLASAAFKILQPVFEKAFDGRLKLSSIRLYETPNCWADVSHP

SEQ ID NO: 24153 - protein, 152 aa, unidentified
  source 1..152: note = Polynucleobacter sphagniphilus
  REGION 1..152: note = tr|A0A1R0HG95|A0A1R0HG95_9BURK 6-carboxytetrahydropterin synthase QueD; OS = Polynucleobacter sphagniphilus OX=1743169; GN = BOQ04_01270 PE=4 SV=1
MKSSPISITRRLEFDSGHRIPNHDGQCRHLHGHRYAIEVTLTGDVANHPGKADDGMVLDFGDIKRLTNQYLVDLWDHAFLVAQEDQGLVNFLATMPNHKTVIMEHVPTVENLAAAAFAILQPIFEKAFSGSLRLTNIRLFETPNCWADVSHP

SEQ ID NO: 24154 - protein, 150 aa, unidentified
  source 1..150: note = Polynucleobacter victoriensis
  REGION 1..150: note = tr|A0A212SZF9|A0A212SZF9_9BURK 6-pyruvoyltetrahydropterin/6-carboxytetrahydropterin synthase OS=Polynucleobacter victoriensis OX=2049319; GN = SAMN06295916_0011 PE=4 SV =1
MNKKIEITRRLEFDAGHRIPHHDGHCKHVHGHRYVIEVTLMGNVLSHQGHGDDGMVLDFGDIKKITNEEIVQKWDHAFLVAKEDHALVNFLASIPNHKTVVMDSIPTVENLAQTAFSTLEPIFKERFGGRLNLSRLRLYETPNCWADVHA

SEQ ID NO: 24155 - protein, 154 aa, unidentified
  source 1..154: note = Polynucleobacter wuianus
  REGION 1..154: note = tr|A0A191UDX7|A0A191UDX7_9BURK 6-carboxytetrahydropterin synthase QueD; OS = Polynucleobacter wuianus OX=1743168 GN=A8O14_03025 PE=4; SV = 1
MTSTQPTISITRRLEFDSGHRIPNHDGQCKHLHGHRYAIEVTLTGEVADHPGKADDGMVLDFGDIKKLTNQYIVEQWDHAFLVAKEDKGLVNFLATLPNHKTVIMEHVPTVENLANVAFAIMQPVFAKAFGGRLQLSAIRLYETPNCWADVHPA

SEQ ID NO: 24156 - protein, 159 aa, Pontibacillus chungwhensis
  REGION 1..159: note = tr|A0A0A2UW72|A0A0A2UW72_9BACI 6-pyruvoyl tetrahydrobiopterin synthase OS=Pontibacillus chungwhensis BH030062 OX=1385513 GN=N780_17075 PE=4 SV=1
MAMDQYGFRIVEDLQKIDQDIKRSDLQYHKKRVMVSKEFTFDAAHHLHCYEGKCKNLHGHTYRVVFGISGYTDEIGIVMDFGDIKQIWKEQIEVHLDHRYINETLPLMNTTAENMVVWIYEKMAGALPQNDQSLRVEFVKLYETPTSFAEARREWMELE

SEQ ID NO: 24157 - protein, 158 aa, Pontibacillus halophilus
  REGION 1..158: note = tr|A0A0A5GL24|A0A0A5GL24_9BACI 6-pyruvoyl tetrahydrobiopterin synthase OS=Pontibacillus halophilus JSM 076056 = DSM 19796 OX=1385510 GN=N781_01950 PE=4 SV=1
MFNDFGFRIVEQLQKIDEDIRRSELKYHHKRVMVSKEFTFDAAHHLHCYEGKCKNLHGHTYKVIFGVSGYVDEIGIVIDFGDLKNIWKNEIEIYLDHRYLNETLPLMNTTAENMVVWIYEKMDEALQAQFEGARVEFVKLYETPTSYAEARREWMIDE

SEQ ID NO: 24158 - protein, 273 aa, Pontibacillus marinus
  REGION 1..273: note = tr|A0A0A5GIE3|A0A0A5GIE3_9BACI 6-pyruvoyl tetrahydropterin synthase OS=Pontibacillus marinus BH030004 = DSM 16465 OX=1385511 GN=N783_00685 PE=4 SV=1
MLYLSRRVDFSSMHSYRNPKWSDERNQEVFGLCSNPSGHGHDYQLEVMVKGALNEASGVVVNTVDIKKIVGGFVDQELDGKFLNKEHPHFMTKIPTTENLVTYLWDAISPKLQNCELHRLRLHENPFLYAEKEEEKMVRLTRKYHFSAAHRLHSDQLSDEENIRLFGKCNNPYGHGHNYYLEVTVEGIPDPVTGMITDLSYLDEIVDSVVLNKFDHKHLNLDTSEFEGLNPTSEVAAKVMYDMLSPYLPNLYKIGLWETEKNYFEYMGPGVSA

SEQ ID NO: 24159 - protein, 158 aa, Pontibacillus marinus
  REGION 1..158: note = tr|A0A0A5GEB1|A0A0A5GEB1_9BACI 6-pyruvoyl tetrahydrobiopterin synthase OS=Pontibacillus marinus BH030004 = DSM 16465 OX=1385511 GN=N783_05380 PE=4 SV=1
MFGFRIVEDLEKIDQDIQRSELKYHNKRVMVSKEFTFDAAHHLHCYEGKCKNLHGHTYKVVFGISGFVNDIGLVIDFGDIKEIWKNEIEIYLDHRYLNETLPKMNTSAENMVVWIYEKMSESLKNREDQYDGARVEFVRLFETPTSYAEVKREWMEVE

SEQ ID NO: 24160 - protein, 158 aa, Pontibacillus yanchengensis
  REGION 1..158: note = tr|A0A0A2TD48|A0A0A2TD48_9BACI 6-pyruvoyl tetrahydrobiopterin synthase OS=Pontibacillus yanchengensis Y32 OX=1385514 GN=N782_14565 PE=4 SV=1
MDQYGFRIVEDLQKIDKDIDRSQLKYHNKRVMVSKEFTFDAAHHLHLYDGKCKNLHGHTYTVVFGISGYVNDIGIVMDFGDIKQIWKEQIEIHLDHKYVNETLPPMNTTAENMVVWIYEKMAEALSHEDYQGTRVEFVKLYETPTSFAEVRREWMESE

SEQ ID NO: 24161 - protein, 149 aa, Pontibacter actiniarum
  REGION 1..149: note = tr|A0A1X9YQS6|A0A1X9YQS6_9BACT 6-carboxy-5,6,7,8-tetrahydropterin synthase OS=Pontibacter actiniarum OX=323450 GN=CA264_07125 PE=3 SV=1
MANIRLTRLFTFETAHALLHYNGPCRRIHGHSYKLEVTVLGTPLVAEQHPKNGMVMDFGDLKRLVQEHVVSLFDHALVLQADSPRDLIEALEKHEHRLVLTPYQPTCENMLLDFQHRLQRALPANVTLHHLKLWETQNSFAEWYAEDNQ

SEQ ID NO: 24162 - protein, 135 aa, Pontibacter actiniarum
  REGION 1..135: note = tr|A0A1X9YXF8|A0A1X9YXF8_9BACT 6-carboxy-5,6,7,8-tetrahydropterin synthase OS=Pontibacter actiniarum OX=323450 GN=CA264_20555 PE=3 SV=1
MKVTVCRKEHFNAAHRLHNPAWTDEQNNAVFGLCNNPNYHGHNYELIVKLTGTVNPDTGYVYDMKKLSDLVKEQVVNKFDHKNLNLDTEEFSNLNPTAENIAVVIWNKLREQISSDYELAITLYETERNFVEYNG

SEQ ID NO: 24163 - protein, 135 aa, Pontibacter akesuensis
  REGION 1..135: note = tr|A0A1I7JAP5|A0A1I7JAP5_9BACT 6-carboxy-5,6,7,8-tetrahydropterin synthase OS=Pontibacter akesuensis OX=388950 GN=SAMN04487941_2650 PE=3 SV=1
MRITICRKEHFNAAHRLHNPVWTEEQNKAVFGLCNNPNYHGHNYELIVKLTGTVDPDTGYVYDMKKLSDLVKQEVTNKFDHRNLNLDTEEFSNLNPTAENIAMVVWEKLRAKISTDYELAVTLYETERNFVEYNG

SEQ ID NO: 24164 - protein, 140 aa, Pontibacter akesuensis
  REGION 1..140: note = tr|A0A1I7J036|A0A1I7J036_9BACT 6-pyruvoyltetrahydropterin/6-carboxytetrahydropterin synthase OS=Pontibacter akesuensis OX=388950; GN = SAMN04487941_2365 PE=4 SV=1
MIYVSRLEHFNAAHKLFNPNWSLAKNKEVFGPCANTNWHGHNYELIVTVKGKPDPDTGFVIDLKKLSTLIRTHIIDKVDHKNLNLDVAFMEDKLASTENLVVEFWKILEPRVREISNNIATLHSLKLYETPRNYVEYFGE

SEQ ID NO: 24165 - protein, 135 aa, unidentified
  source 1..135: note = Pontibacter chinhatensis
  REGION 1..135: note = tr|A0A1I2VDP7|A0A1I2VDP7_9BACT 6-carboxy-5,6,7,8-tetrahydropterin synthase OS=Pontibacter chinhatensis OX=1436961 GN=SAMN05421739_10475 PE=3 SV=1
MRVTVCRKEHFNAAHRLHNPAWTEEQNDAVFGLCSNPNYHGHNYELIVRLTGPVNPETGYVYDMKKLSDLVKEEVVNKFDHKNLNLDTEEFRQLNPTAENIAAVIWNKLRGRISPDYDLAVTLYETERNFVEYNG

SEQ ID NO: 24166 - protein, 149 aa, unidentified
  source 1..149: note = Pontibacter chinhatensis
  REGION 1..149: note = tr|A0A1I2NBB6|A0A1I2NBB6_9BACT 6-carboxy-5,6,7,8-tetrahydropterin synthase OS=Pontibacter chinhatensis OX=1436961 GN=SAMN05421739_101665 PE=3 SV=1
MTKIRLTRLFTFETAHALLHYDGPCRRIHGHSYKLEVTVIGTPLVEEEHPKNGMVMDFGDLKQLVQEHIVQPFDHALVLAQESPQDLLEQLRKYDHKLVLTPYQPTCENMLIDFQHRLQQRLPGHVQLHHLKLWETQNSFAEWYAEDNR

SEQ ID NO: 24167 - protein, 140 aa, unidentified
  source 1..140: note = Pontibacter diazotrophicus
  REGION 1..140: note = tr|A0A3D8L6W9|A0A3D8L6W9_9BACT 6-carboxytetrahydropterin synthase OS=Pontibacter diazotrophicus OX=1400979 GN=DXT99_21280 PE=4 SV=1
MIYVSRLEHFNAAHKLHNPNWSLAKNKEVFGPCANTNWHGHNYELIVTVKGKPDPDTGFVIDLKKLSTLIRTHIIEKVDHKNLNLDVAFMEDKLASTENLIVEFWKILEPRILDISNKNAQLHSLKLYETPRNYVEYFGE

SEQ ID NO: 24168 - protein, 135 aa, unidentified
  source 1..135: note = Pontibacter diazotrophicus
  REGION 1..135: note = tr|A0A3D8LHT1|A0A3D8LHT1_9BACT 6-carboxy-5,6,7,8-tetrahydropterin synthase OS=Pontibacter diazotrophicus OX=1400979 GN=DXT99_00375 PE=3 SV=1
MKVTICRKEHFNAAHRLHNPAWTDEKNAKVFGLCNNPNYHGHNYELYVKLTGAVNPETGYVYDLKKLSDLVKQEVVDKFDHKNLNLDTEEFRDLNPTAENIAVVIWEKLRTNISTEYELAVTLYETERNFVEYNG

SEQ ID NO: 24169 - protein, 138 aa, unidentified
  source 1..138: note = Pontibacter indicus
  REGION 1..138: note = tr|A0A1R3XQ42|A0A1R3XQ42_9BACT 6-pyruvoyltetrahydropterin/6-carboxytetrahydropterin synthase OS=Pontibacter indicus OX=1317125; GN = SAMN05444128_2965 PE=4 SV=1
MIYVSRLEHFNAAHKLHNPNWSLAKNKEVFGPCANTNWHGHNYELIVTVKGKPDPDTGFVIDLKKLSTLIRKNIIEKVDHKNLNLDVAFMEDKLASTENLVVEFWKILEPKIAEISQARLHSLKLYETPRNYVEYFGE

SEQ ID NO: 24170 - protein, 149 aa, unidentified
  source 1..149: note = Pontibacter indicus
  REGION 1..149: note = tr|A0A1R3WAC4|A0A1R3WAC4_9BACT 6-carboxy-5,6,7,8-tetrahydropterin synthase OS=Pontibacter indicus OX=1317125 GN=SAMN05444128_0163 PE=3 SV=1
MSKIRLTRLFTFEAAHALQNYKGGCRNIHGHSYRLEVTIIGTPIVNEMHPNDGMVMDFKDLKKIVQETIIDPIDHALLLREDAPSELVEALRHLNHKLVLTPFQPTCENMLLDFKQRLHPLLPQQAELHSLKLWETEKSFAEWYAADNV

SEQ ID NO: 24171 - protein, 135 aa, Pontibacter korlensis
  REGION 1..135: note = tr|A0A0E3ZIV4|A0A0E3ZIV4_9BACT 6-carboxy-5,6,7,8-tetrahydropterin synthase OS=Pontibacter korlensis OX=400092 GN=PKOR_09705 PE=3 SV=1
MKLTICRKEHFNAAHRLHNPAWTDEQNSDVFGLCNNPNYHGHNYELIVKLTGTVDPETGYVYDMKKLSDLVKEEVINKYDHRNLNLDTEDFKQLNPTAENIAVVIWNKLRDRISPDYDLAVILYETERNFVEYNG

SEQ ID NO: 24172 - protein, 140 aa, Pontibacter korlensis
  REGION 1..140: note = tr|A0A0E3UXH5|A0A0E3UXH5_9BACT 6-pyruvoyl tetrahydrobiopterin synthase OS=Pontibacter korlensis; OX = 400092 GN=PKOR_11110 PE=4 SV=1
MIYVSRLEHFNAAHKLFNPNWSLAKNKEVFGPCANTNWHGHNYELIVTVKGMPDPDTGFVIDLKKLSTLIRTHIIAKVDHKNLNLDVAFMEDKLASTENLIVEFWKILEPRVKEISNNNASLHSLKLYETPRNYVEYFGE

SEQ ID NO: 24173 - protein, 149 aa, unidentified
  source 1..149: note = Pontibacter lucknowensis
  REGION 1..149: note = tr|A0A1N7B202|A0A1N7B202_9BACT 6-carboxy-5,6,7,8-tetrahydropterin synthase OS=Pontibacter lucknowensis OX=1077936 GN=SAMN05421545_3739 PE=3 SV=1
MSSIRLTRLFTFEAAHALQNYKGGCRNIHGHSYKLEVTIIGTPIVSETHPNDGMVMDFKELKKIVQETIIEPIDHALLLRQDAPLELVEALRHLSHKLVLTPFQPTCENMLIDFKQKLRHLLPPQVRLHSLKLWETEKSFAEWYASDNL

SEQ ID NO: 24174 - protein, 138 aa, unidentified
  source 1..138: note = Pontibacter lucknowensis
  REGION 1..138: note = tr|A0A1N6SXE1|A0A1N6SXE1_9BACT 6-pyruvoyltetrahydropterin/6-carboxytetrahydropterin synthase OS=Pontibacter lucknowensis OX=1077936; GN = SAMN05421545_0011 PE=4 SV=1
MIYVSRLEHFNAAHKLHNPNWSLAKNKEVFGPCANTNWHGHNYELIVTVKGKPDPDTGFVIDLKKLSTLIRKHIIEKVDHKNLNLDVAFMEDKLASTENLVVEFWKILEPKIAEISQARLHSLKLYETPRNYVEYFGE

SEQ ID NO: 24175 - protein, 135 aa, unidentified
  source 1..135: note = Pontibacter mucosus
  REGION 1..135: note = tr|A0A2T5YJR6|A0A2T5YJR6_9BACT 6-carboxy-5,6,7,8-tetrahydropterin synthase OS=Pontibacter mucosus OX=1649266 GN=C8N40_104282 PE=3 SV=1
MRVTVCRKEHFNAAHRLHNPAWTEEQNDAVFGLCSNPNYHGHNYELIVRLTGPVNPETGYVYDMKKLSDLVKEEVVNRFDHKNLNLDTEEFRQLNPTAENIAVVIWNKLRDRISPDYDLAVTLYETERNFVEYNG

SEQ ID NO: 24176 - protein, 149 aa, unidentified
  source 1..149: note = Pontibacter mucosus
  REGION 1..149: note = tr|A0A2T5YG99|A0A2T5YG99_9BACT 6-carboxy-5,6,7,8-tetrahydropterin synthase OS=Pontibacter mucosus OX=1649266 GN=C8N40_106113 PE=3 SV=1
MTKIRLTRLFTFETAHALLHYDGPCRRIHGHSYKLEVTVIGTPLVEEEHPKNGMVMDFGDLKQLVQEHIVQPFDHALVLAQESPQDLLEQLRKYDHKLVLTPYQPTCENMLIDFQHRLRQRLPGHVQLHHLKLWETQNSFAEWYAEDNR

SEQ ID NO: 24177 - protein, 138 aa, unidentified
  source 1..138: note = Pontibacter ramchanderi
  REGION 1..138: note = tr|A0A2N3UA87|A0A2N3UA87_9BACT 6-pyruvoyltetrahydropterin/6-carboxytetrahydropterin synthase OS=Pontibacter ramchanderi OX=1179743; GN = BD749_1402 PE=4 SV=1
MIYVSRLEHFNAAHKLHNPNWSLAKNKEVFGPCANTNWHGHNYELIVTVKGKPDPDTGFVIDLKKLSSLIRKNIIEKVDHKNLNLDVAFMEDKLASTENLVVEFWKILEPKIAEISSAKLHSLKLYETPRNYVEYFGE

SEQ ID NO: 24178 - protein, 135 aa, unidentified
  source 1..135: note = Pontibacter ramchanderi
  REGION 1..135: note = tr|A0A2N3UAX0|A0A2N3UAX0_9BACT 6-carboxy-5,6,7,8-tetrahydropterin synthase OS=Pontibacter ramchanderi OX=1179743 GN=BD749_1679 PE=3 SV=1
MKITICRKEHFNAAHRLHNPAWSDEQNAEVFGLCNNPNFHGHNYELIVKLTGAVNEETGYVYDMKKLSTLVKEEVIDRFDHKNLNLDTEEFRQLNPTAEHIAMVIWNRLREKISQEYELAVTLYETERNFVEYNG

SEQ ID NO: 24179 - protein, 138 aa, Pontibacter sp.
  REGION 1..138: note = tr|A0A364RH50|A0A364RH50_9BACT 6-carboxytetrahydropterin synthase OS=Pontibacter sp. 2b14; OX = 2080288 GN=DP923_00060 PE=4 SV=1
MIYVSRLEHFNAAHKLHNPNWSLSKNQEIFGPCANANWHGHNYELVVTVKGKPDPDTGFVIDLKKLSTLIRTHIIEKVDHKNLNLDVPFMEDKLASTENLVIEFWKILAPQIEAISKAKLHSLKLYETPRNYVEYFGE

SEQ ID NO: 24180 - protein, 153 aa, Pontibacter sp.
  REGION 1..153: note = tr|A0A5C8J4C9|A0A5C8J4C9_9BACT 6-carboxytetrahydropterin synthase OS=Pontibacter sp. GY10130 OX=2603253 GN=FVR03_19510 PE=4 SV=1
MSLTRSKIRLTRLFTFEAAHVLQNYDGACRNIHGHSYKLEVTIMGTPITDKQHAKYGMVMDFDDLKKIVHESLLQPVDHALLLREDSPKELVQTLQKLHHKLVLTPYQPTCERILIDFKAKLRNQLPVYVELHSLKLWETQNSFAEWYSSDEL

SEQ ID NO: 24181 - protein, 140 aa, unidentified
  source 1..140: note = Pontibacter ummariensis
  REGION 1..140: note = tr|A0A239KXI7|A0A239KXI7_9BACT 6-pyruvoyltetrahydropterin/6-carboxytetrahydropterin synthase OS=Pontibacter ummariensis OX=1610492; GN = SAMN06296052_13236 PE=4 SV=1
MIYVSRLEHFNAAHKLHNPNWSLAKNKEVFGPCANTNWHGHNYELIVTVKGKPDSDTGFVIDLKKLSTLIRTHIIAKVDHKNLNLDVPFMEDKLASTENLVVEFWKILEPRILEISNKNAQLHSLKLYETPRNYVEYFGE

SEQ ID NO: 24182 - protein, 148 aa, unidentified
  source 1..148: note = Pontibacter ummariensis
  REGION 1..148: note = tr|A0A239F7D0|A0A239F7D0_9BACT 6-carboxy-5,6,7,8-tetrahydropterin synthase OS=Pontibacter ummariensis OX=1610492 GN=SAMN06296052_10846 PE=3 SV=1
MTKIRLTRRFTFEAAHALLRYDGPCRHIHGHSYKLEVTVIGTPLVDEEHPKNGMVMDFGDLKQIVQEHIIARVDHALLLRADSSKDLKEALRKTDQKLLLTPYQPTCENMLIDFKTRLLDILPAHVTLHSLKLWETENAFAEWYASDN

SEQ ID NO: 24183 - protein, 149 aa, unidentified
  source 1..149: note = Pontibacter virosus
  REGION 1..149: note = tr|A0A2U1ASU5|A0A2U1ASU5_9BACT 6-carboxy-5,6,7,8-tetrahydropterin synthase OS=Pontibacter virosus OX=1765052 GN=C8E01_11187 PE=3 SV=1
MSRIRLTRLFTFEAAHALQNYKGGCRNIHGHSYRLEVTITGTPIVSETHPNDGMVMDFKDLKKIVQETLIDPIDHALLLRQDAPQELVEALRHLDHKLVLTPFQPTCENMLIDFKQRLRHLLPSHVELHSLKLWETEKSFAEWYATDNV

SEQ ID NO: 24184 - protein, 135 aa, unidentified
  source 1..135: note = Pontibacter virosus
  REGION 1..135: note = tr|A0A2U1AZU7|A0A2U1AZU7_9BACT 6-carboxy-5,6,7,8-tetrahydropterin synthase OS=Pontibacter virosus OX=1765052 GN=C8E01_104310 PE=3 SV=1
MKITICRKEHFNAAHRLHNPAWSDEQNAEVFGLCNNPNFHGHNYELIVKLTGAVDEETGYVYDMKKLSTLVKEEVIDRFDHKNLNLDTEEFRQLNPTAENIAMVIWKRLREKISREYELAVTLYETERNFVEYNG

SEQ ID NO: 24185 - protein, 145 aa, Ponticaulis sp.
  REGION 1..145: note = tr|A0A2E7EWI3|A0A2E7EWI3_9RHOB 6-carboxy-5,6,7,8-tetrahydropterin synthase OS=Ponticaulis sp. OX=2020902 GN=CMK08_05300 PE=3 SV=1
MTSNPTKPATDTGAAKPSLAGRTFEVTRAGNFEAAHHLAPKDPDHPYGKLHGHSFRVEIGVSGVVKQGEDWVADFAQLGNVLAKVTGELDHSYLNEIPGLELPTLERLCVWIAERVAEDLPRLTRVSVSRPSLSETCTLRLDGES

SEQ ID NO: 24186 - protein, 144 aa, Ponticaulis sp.
  REGION 1..144: note = tr|A0A2D7IX75|A0A2D7IX75_9RHOB 6-carboxy-5,6,7,8-tetrahydropterin synthase OS=Ponticaulis sp. OX=2020902 GN=CMK05_07345 PE=3 SV=1
MTSQTTRPEPASGSTAPSLSGRTFEVSRAGHFEAAHHLAPKDPNHPYGQLHGHSFRVEIAVSGVVKEGEDWVADFAILGDVLANVTGILDHSYLNEIPGLELPTLERICVWIADRVLPDLPRLTRVSVSRPSLSETCTLRLGES

SEQ ID NO: 24187 - protein, 131 aa, unidentified
  source 1..131: note = Pontimonas salivibrio
  REGION 1..131: note = tr|A0A2L2BPV2|A0A2L2BPV2_9MICO Queuosine biosynthesis protein OS=Pontimonas salivibrio OX=1159327; GN = C3B54_11696 PE=4 SV=1
MFALEVRDHIMIGHSLPSPVFGPAQGLHGATFTVDAAFFTEDIDQHGLVVDIGLASQALSEVLEPLRYKNLDDVPGFEGKFTTTEFLCKHIFDGLAERIRTGQLGDGGRVQRLKIMLHESHIARAWFESEL

SEQ ID NO: 24188 - protein, 130 aa, unidentified
  source 1..130: note = Pontivivens insulae
  REGION 1..130: note = tr|A0A2R8AFA4|A0A2R8AFA4_9RHOB Uncharacterized protein OS=Pontivivens insulae OX=1639689 GN=POI8812_03210; PE = 4 SV=1
MFAVEVRDHIMIAHSLKGEVFGPAQKMHGATFVVDVCFLRETLSADNIVVDMGRAHDVLKDVLGPLNYANLDEVFPGEVTTTEFLCRHIHGAIASAAREGALGPGSEGLSALRITLNESHVAKAWYEAPL

SEQ ID NO: 24189 - protein, 120 aa, unidentified
  source 1..120: note = Porphyromonadaceae bacterium
  REGION 1..120: note = tr|A0A354X020|A0A354X020_9PORP 6-carboxy-5,6,7,8-tetrahydropterin synthase; OS = Porphyromonadaceae bacterium OX=2049046 GN=queD PE=3; SV = 1
MYKISKEFSFSAAHQLKGLPDDHPCSRLHGHNYVVRIHLRSEKLSENGFVRDYNDLKPVKSYIDEHLDHRNLNDIMAPLNSTAENLARLLYEVFKPMFPELYAVEVSETPKTSAIYEPDR

SEQ ID NO: 24190 - protein, 121 aa, unidentified; identical to SEQ ID NO: 23889
  source 1..121: note = Porphyromonadaceae bacterium
  REGION 1..121: note = tr|A0A1I7HRK6|A0A1I7HRK6_9PORP 6-carboxy-5,6,7,8-tetrahydropterin synthase; OS = Porphyromonadaceae bacterium KHP3R9 OX=1855398; GN = SAMN05216364_104314 PE=3 SV=1

SEQ ID NO: 24191 - protein, 141 aa, Porphyromonas asaccharolytica
  REGION 1..141: note = tr|F4KJI6|F4KJI6_PORAD Uncharacterized protein; OS = Porphyromonas asaccharolytica (strain ATCC 25260 / DSM 20707 / BCRC 10618 / JCM 6326 / LMG 13178 / VPI 4198); OX = 879 243 GN=Poras_1677 PE=4 SV=1
MTTVERYHDISMGHRVVGHESKCRHLHGHNYRIHFTCSAAQLDELGRVIDFGVIKELLCMWLEEHWDHKMMIYDEDPLLPSLRELVPEDLVVVPFNPTAEAMAHYLVETVAPAQLAGTGVTLVSCRVEETARCSATYSLPI

SEQ ID NO: 24192 - protein, 139 aa, Porphyromonas catoniae
  REGION 1..139: note = tr|L1NB77|L1NB77_9PORP Uncharacterized protein; OS = Porphyromonas catoniae F0037 OX=1127696; GN = HMPREF9134_01365 PE=4 SV=1
MITAERYHDISMGHRVVGHENKCRHLHGHNYRIHFVCEADQLDALGRVIDFGLINDRLCQWLEEHWDHRLMIWQEDPLLPELQRIASEDLCIVPFNPTAEQIAQHLVHVVGPQCLAGTGIRLTSCRVDETRKCSATCRL

SEQ ID NO: 24193 - protein, 139 aa, Porphyromonas catoniae; identical to SEQ ID NO: 24192
  REGION 1..139: note = tr|Z4WTE3|Z4WTE3_9PORP 6-pyruvoyl tetrahydropterin synthase OS=Porphyromonas catoniae ATCC 51270 OX=887901; GN = HMPREF0636_1584 PE=4 SV=1

SEQ ID NO: 24194 - protein, 152 aa, Porphyromonas circumdentaria
  REGION 1..152: note = tr|A0A1T4Q320|A0A1T4Q320_9PORP 6-pyruvoyltetrahydropterin/6-carboxytetrahydropterin synthase OS=Porphyromonas circumdentaria OX=29524; GN = SAMN02745171_01680 PE=4 SV=1
MEQKNNYQPLLTVERYHDISMGHRVVGHEHKCRHLHGHNYRIHFVCSAQQVDSLGRIIDFGIIKSLLCEWLEEHWDHRMMLWNEDPLLTSLLEVVPDDIVIVPFNPTAEAIATYLVEEVAPQLLQGTEVSLIACRVEETAKCSASYHRLPQL

SEQ ID NO: 24195 - protein, 139 aa, Porphyromonas crevioricanis
  REGION 1..139: note = tr|T1CHB6|T1CHB6_9PORP Queuosine biosynthesis QueD, PTPS-I OS=Porphyromonas crevioricanis JCM 15906 OX=1305617; GN = PORCRE_956 PE=4 SV=1
MITAERYHDISMGHRVVGHQHKCKHLHGHNYRIHFCCISDEIDELGMVIDFGTIKSTLCAYLEREWDHKFMIWQEDPLLEQLQAIVPQDIVIVPFNPTAENMARYLVEDIAPSLLQGSRVTLHSCRVEETAKCSATYSL

SEQ ID NO: 24196 - protein, 139 aa, Porphyromonas crevioricanis
  REGION 1..139: note = tr|A0A2X4SRJ4|A0A2X4SRJ4_9PORP Queuosine biosynthesis protein QueD OS=Porphyromonas crevioricanis; OX = 393921 GN=NCTC12858_00324 PE=4 SV=1
MITAERYHDISMGHRVVGHQHKCKHLHGHNYRIHFCCISDETDELGMVIDFGTIKSTLCAYLEREWDHKFMIWQEDPLLEQLQAIVPQDIVIVPFNPTAENMARYLVEDIAPSLLQGSRVTLHSCRVEETAKCSATYSL

SEQ ID NO: 24197 - protein, 153 aa, Porphyromonas endodontalis
  REGION 1..153: note = tr|C3JCW3|C3JCW3_POREA 6-pyruvoyl tetrahydropterin synthase/QueD family protein OS=Porphyromonas endodontalis (strain ATCC 35406 / BCRC 14492 / JCM 8526 / NCTC 13058/ HG 370) OX=553175 GN=queD PE=4 SV=1
MKMNENKNRPSLLTAERYHDISMGHRVVGHESKCRHLHGHNYRIHFVCTAPELDALGRVIDFGVIKERLCLWVEEAWDHKMMLWQEDPLLPQLKEIAPEDLVIVPFNPTAEAMARYLVEEVAPHNLEGTGVTLVACTVEETAKCRASYRLLPC

SEQ ID NO: 24198 - protein, 139 aa, Porphyromonas gingivalis
  REGION 1..139: note = tr|A0A212GAW7|A0A212GAW7_PORGN 6-pyruvoyl tetrahydrobiopterin synthase OS=Porphyromonas gingivalis SJD12 OX=1297567 GN=SJDPG12_03840 PE=4 SV=1
MITAERYHDISMGHRVVGHDHKCRHLHGHNYRIHFICSAPALDSIGRVVDFGVIKELLCQWLEDHWDHKMMLWEQDPLLPALRATVPDDLVAVPFNPTAENMAVYLTEVVGPMQLAGTGVTLIGCRVDETRKCSASYTL

SEQ ID NO: 24199 - protein, 139 aa, Porphyromonas gingivalis; identical to SEQ ID NO: 24198
  REGION 1..139: note = tr|A0A134DM60|A0A134DM60_PORGN 6-carboxytetrahydropterin synthase OS=Porphyromonas gingivalis OX=837 GN=CBG53_06825 PE=4 SV=1

SEQ ID NO: 24200 - protein, 152 aa, Porphyromonas gingivicanis
  REGION 1..152: note = tr|A0A0A2G999|A0A0A2G999_9PORP 6-pyruvoyl tetrahydrobiopterin synthase OS=Porphyromonas gingivicanis; OX = 266762 GN=HQ36_00185 PE=4 SV=1
MEQTNNYQPLLTAERYHDISMGHRVVGHEHKCRHLHGHNYRIHFICSARQVDSLGRVIDFGVIKSLLCEWLEEHWDHKMMLWSEDPLLSSLSEIVPDDIVVVPFNPTAEAIASYLVEELGPQLLKGSEVSLIACRVEETAKCSASYHRLPQL

SEQ ID NO: 24201 - protein, 139 aa, Porphyromonas gulae
  REGION 1..139: note = tr|A0A0A2GIQ1|A0A0A2GIQ1_9PORP 6-pyruvoyl tetrahydrobiopterin synthase OS=Porphyromonas gulae; OX = 111105 GN=HR08_07115 PE=4 SV=1
MITAERYHDISMGHRVVGHDHKCRHLHGHNYRIHFICSAPALDSIGRVVDFGVIKELLCQWLEDHWDHKMMLWEQDPLLPALRETVPDDLVVVPFNPTAENMAVYLTEVIGPMQLADTGVTLIGCRVDETRKCSASYTL

SEQ ID NO: 24202 - protein, 139 aa, Porphyromonas gulae
  REGION 1..139: note = tr|A0A0A2FXR3|A0A0A2FXR3_9PORP 6-pyruvoyl tetrahydrobiopterin synthase OS=Porphyromonas gulae; OX = 111105 GN=HR15_00530 PE=4 SV=1
MITAERYHDISMGHRVVGHDHKCRHLHGHNYRIHFICSAPALDSIGRVVDFGVIKELLCQWLEEHWDHKMMLWEQDPLLPALRETVPDDLVVVPFNPTAENMAVYLTEVIGPMQLADTGVTLIGCRVDETRKCSSSYTL

SEQ ID NO: 24203 - protein, 146 aa, Porphyromonas levii
  REGION 1..146: note = tr|A0A4Y8WQH1|A0A4Y8WQH1_9PORP 6-carboxytetrahydropterin synthase OS=Porphyromonas levii; OX = 28114 GN=E4P47_02895 PE=4 SV=1
MIKKRIRAERYHDICCGHRVVNHESKCKHLHGHNYRFHFAIEAEAGLDELGRVLDFSVIKDTLCEWLEEHWDHKFLIYDRDPFLPTLKELSPESLVVVPFNPTAENIAEYMLSQIAPPLLAPYQCRLTEVRIEETRKCSVTAQLEE

SEQ ID NO: 24204 - protein, 139 aa, unidentified
  source 1..139: note = Porphyromonas loveana
  REGION 1..139: note = tr|A0A2U1F6G6|A0A2U1F6G6_9PORP 6-pyruvoyltetrahydropterin/6-carboxytetrahydropterin synthase OS=Porphyromonas loveana OX=1884669 GN=C7382_1182; PE = 4 SV=1
MITAERYHDISMGHRVVGHDHKCRHLHGHNYRIHFICSAPSLDEIGRVVDFGVIKQLLCLWLENHWDHKMMLWEQDPLLPALRETVPDDLVVVPFNPTAENMAVYLTEVIGPKQLAGTGVTLVSCKVDETRKCSATYTI

SEQ ID NO: 24205 - protein, 140 aa, Porphyromonas macacae
  REGION 1..140: note = tr|A0A379EAP4|A0A379EAP4_9PORP Queuosine biosynthesis protein QueD OS=Porphyromonas macacae; OX = 28115 GN=NCTC11632_01535 PE=4 SV=1
MIITAERYHDISMGHRVVGHEHKCRHLHGHNYRIHFSCTAAQLDDLGRIIDFSIIKEKLCIWLEDNWDHKMMIWEEDPMLPDLQKIAPDDLVIVPFNPTAEKIAQYLVEEIAPGQLKNTGVTLIECRVEETRKCAATYKL

SEQ ID NO: 24206 - protein, 139 aa, Porphyromonas macacae
  REGION 1..139: note = tr|A0A0A2G9P8|A0A0A2G9P8_9PORP 6-pyruvoyl tetrahydrobiopterin synthase OS=Porphyromonas macacae; OX = 28115 GN=HQ47_08920 PE=4 SV=1
MITAERYHDISMGHRVVGHEHKCRHLHGHNYRIHFSCTAAQLDDLGRIIDFSIIKEKLCIWLEDNWDHKMMIWEEDPMLPDLQKIAPDDLVIVPFNPTAEKIAQYLVEEIAPGQLKNTGVTLIECRVEETRKCAATYKL

SEQ ID NO: 24207 - protein, 153 aa, Porphyromonas somerae
  REGION 1..153: note = tr|A0A134BEY6|A0A134BEY6_9PORP Uncharacterized protein OS=Porphyromonas somerae OX=322095; GN = HMPREF3185_00161 PE=4 SV=1
MGKMPYLCLANRIDMITVERYHDISMGHRVVGHESKCRHLHGHNYRIHFVCTAPELDGVGRVIDFSEIKERLCQWLEENWDHKMVLWSEDPLLPELRRLVPEDLCVVPFNPTAEQIAMHLVSVVGPQQLEGTGITLVACRVEETRKCSASYQL

SEQ ID NO: 24208 - protein, 139 aa, Porphyromonas sp.
  REGION 1..139: note = tr|A0A0A2DPR1|A0A0A2DPR1_9PORP 6-pyruvoyl tetrahydrobiopterin synthase OS=Porphyromonas sp. COT-239 OH1446 OX=1515613 GN=HQ37_08145 PE=4 SV=1
MTTVQRYHDISMGHRVVGHENKCRHLHGHNYRIHFTCTAEQLDALGRVIDFGVIKERLCLWLEEHWDHRMMLWSEDPLLSELRRIAAEDLIVVPFNPTAEQMAAYLLHEVGPRQLVGTGVRLVSVSVEETRKCSAACAL

SEQ ID NO: 24209 - protein, 110 aa, Porphyromonas sp.; identical to SEQ ID NO: 23600
  REGION 1..110: note = tr|A0A073ILW9|A0A073ILW9_9PORP 6-carboxy-5,6,7,8-tetrahydropterin synthase; OS = Porphyromonas sp. 31_2 OX=658663 GN=HMPREF1002_00609; PE = 3 SV=1

SEQ ID NO: 24210 - protein, 141 aa, Porphyromonas uenonis
  REGION 1..141: note = tr|C2M9Z5|C2M9Z5_9PORP 6-pyruvoyl tetrahydropterin synthase/QueD family protein OS=Porphyromonas uenonis 60-3; OX = 596327 GN=queD PE=4 SV=1
MTTVERYHDISMGHRVVGHESKCRHLHGHNYRIHFTCSAAQLDELGRVIDFGVIKELLCMWLEEHWDHKMMIYDEDPLLPSLRELVPEDLVVVPFNPTAEAMAHYLVETIAPAQLAGTGVTLVSCRVEETARCSATYSLPI

SEQ ID NO: 24211 - protein, 57 aa, unidentified
  source 1..57: note = Porticoccaceae bacterium
  REGION 1..57: note = tr|A0A2D5R4P8|A0A2D5R4P8_9GAMM 6-carboxytetrahydropterin synthase QueD (Fragment); OS = Porticoccaceae bacterium OX=2026782 GN=CMK24_01215 PE=4; SV = 1
MQIYKEFSIEAAHRLPNVPEGHKCARLHGHSFQVTIYVEGPVGAETGWIMDFGDIKA

SEQ ID NO: 24212 - protein, 118 aa, unidentified
  source 1..118: note = Porticoccaceae bacterium
  REGION 1..118: note = tr|A0A3B9AA08|A0A3B9AA08_9GAMM 6-carboxy-5,6,7,8-tetrahydropterin synthase; OS = Porticoccaceae bacterium OX=2026782 GN=queD PE=3 SV=1
MEIFKSFTFEAAHMLPHVADNHKCKRLHGHSFHVTVYVSGPVKDRSGWVMDFGDIKQACEPIYQALDHRYLNDIPGLENPTSEHIARWIWVKLLPDLPMLNKVEVRETCTSGCVYQGE

SEQ ID NO: 24213 - protein, 118 aa, Porticoccus sp.
  REGION 1..118: note = tr|A0A2E5C8M9|A0A2E5C8M9_9GAMM 6-carboxy-5,6,7,8-tetrahydropterin synthase OS=Porticoccus sp. OX=2024853 GN=queD PE=3 SV=1
MEIFKEFTFEAAHLLPNVAEGHKCGRLHGHSYHIRLYLSGTVGDKTGWVMDFGDLKDYFKPVYDQLDHHYLNEIDGLENPTSENIARWIWARLKPTLPLLSKIEVRETCTSGCIYCGD

SEQ ID NO: 24214 - protein, 118 aa, Porticoccus sp.
  REGION 1..118: note = tr|A0A2G2QWE3|A0A2G2QWE3_9GAMM 6-carboxy-5,6,7,8-tetrahydropterin synthase OS=Porticoccus sp. OX=2024853 GN=queD PE=3 SV=1
MEIFKEFTFEAAHLLPNVAEGHKCGRLHGHSYHIRLYLDGTVGDKTGWVMDFGDLKDYFKPVYDQLDHHYLNEIDGLENPTSENIARWIWARLKPTLPLLSKIEVRETCTSGCIYCGD

SEQ ID NO: 24215 - protein, 147 aa, unidentified
  source 1..147: note = Pradoshia eiseniae
  REGION 1..147: note = tr|A0A2S7N044|A0A2S7N044_9BACI 6-carboxy-5,6,7,8-tetrahydropterin synthase OS=Pradoshia eiseniae OX=2064768 GN=CYL18_08755 PE=3 SV=1
MFILKSEIQFDTAHFLSGYTGKCANLHGHRYRVIAKVASNTLHTDGQLRGMVEDFGTIKQALKKIEKLFDHKLLIENNDEGREVARQLKEGPTDFDLYMVPYRPTAEEMSRHIYQLIKEMGVQVCEVEVFETPANSCSYSEGPVCSE

SEQ ID NO: 24216 - protein, 120 aa, Pragia fontium
  REGION 1..120: note = tr|A0A0G3CNR1|A0A0G3CNR1_9GAMM 6-carboxy-5,6,7,8-tetrahydropterin synthase OS=Pragia fontium OX=82985 GN=queD PE=3 SV=1
MVTTLFKDFTFEAAHHLPHVPTGHKCGRLHGHSFMVRVEVTGEVDPHTGWVIDFSEIKAAFKPILDRLDHYYLNDIAGLENPTSEVLAQWIWQQLKPQLPILSAIMVKETCTAGCIYRGE

SEQ ID NO: 24217 - protein, 120 aa, Pragia sp.
  REGION 1..120: note = tr|A0A411WLL1|A0A411WLL1_9GAMM 6-carboxy-5,6,7,8-tetrahydropterin synthase OS=Pragia sp. CF-458 OX=2498113 GN=queD PE=3 SV=1
MVTTLFKDFTFEAAHRLPNVPEGHKCSRLHGHSFVVRIEVTGEVNPITGWVMDFSEIKAAFKPILDRLDHYYLNDISGLENPTSEVLAHWIWQQLKPGLPLLSGVRVKETCSAGCVYKGE

SEQ ID NO: 24218 - protein, 229 aa, unidentified
  source 1..229: note = Prauserella endophytica
  REGION 1..229: note = tr|A0A4U2IUS2|A0A4U2IUS2_9PSEU Uncharacterized protein OS=Prauserella endophytica OX=1592324; GN = FCN18_37045 PE=4 SV=1
MKATEEKCVADGQVTISQSFGFSASHELRQLPASHKCRRNHGHNYTVTASALVHDDAPGDLSPLGDYLAATFDHRLLNEQVTFHPTSELLAAHLAEWFRDNMESAMPITLVEMVVSETATTSARCDGVTGEVTISKTFKTSHGDVALVLGADGLNEVGFITDFGDLKPFGTYLQASDADAGLRAAGPALVAHLAGWFVDNVEPEIRGRLVSVRVDSGTTTGLWERGDAS

SEQ ID NO: 24219 - protein, 132 aa, Prauserella muralis
  REGION 1..132: note = tr|A0A2V4AJZ6|A0A2V4AJZ6_9PSEU 6-pyruvoyl-tetrahydropterin synthase OS=Prauserella muralis OX=588067 GN=BAY60_30640 PE=4 SV=1
MFSITVRDHIMVAHSFRGEVFGPAQRLHGATFVVDATFRRAELDADNIVVDIGLATEQLRAVLAELNYRNLDDEPAFAGTNTSTEYLAKVIADRLADRVHAGSLGEGARALAGLAVTLHESPVAWASYERPL

SEQ ID NO: 24220 - protein, 122 aa, unidentified
  source 1..122: note = Prauserella shujinwangii
  REGION 1..122: note = tr|A0A2T0M300|A0A2T0M300_9PSEU 6-pyruvoyl tetrahydropterin synthase-like protein OS=Prauserella shujinwangii OX=1453103 GN=B0I33_101253 PE=4 SV=1
MVAHSFRGEVFGPAQRLHGATFVVDATFTRAELDADNIVVDIGLATEQLHDVLGEINYRNLDEVPALAGVNTTTEFLARYIADRLAERVRSGALGEGALGLASIRVTLHESHVASGSYERAL

SEQ ID NO: 24221 - protein, 169 aa, Prauserella sp.
  REGION 1..169: note = tr|A0A318LRD4|A0A318LRD4_9PSEU 6-pyruvoyl tetrahydrobiopterin synthase OS=Prauserella sp. YIM 121212; OX = 1477506 GN=BA062_07070 PE=4 SV=1
MDDRVPTAHQITVEHSFETAHRLPHLGGKCTSLHGHSWRVAVSVIAPRLSDEATVVEFSALKAGIRHWIDTHLDHGTMLGVQDALVEPLAAAECKVFRFGTGHACLAGEAEALAADLMWPTVEAVAVLVRRMSQVVLAGLPCAAGARVGRVFVRETDLNSATTGPLDGS

SEQ ID NO: 24222 - protein, 187 aa, Prauserella sp.
  REGION 1..187: note = tr|A0A365ZHM6|A0A365ZHM6_9PSEU 6-pyruvoyl tetrahydrobiopterin synthase OS=Prauserella sp. PE36; OX = 1504709 GN=DI005_18295 PE=4 SV=1
MHGSATTDHATAYLANLVTDDHAPTAHQITIEHTFETAHRLPHLGGKCTSLHGHSWRVAVPVIAPTLSDDVTVVEFGALKAGVRQWIDTYLDHGTMLGIHDPLAVHLAVAKCKVFRFGADRYTTVEDAELLAADLAWPTVEAVAVLLRRVSQAVLATLPCAPDARVGRVFVRETHLNAATYGPVDAL

SEQ ID NO: 24223 - protein, 141 aa, Prevotella bivia
  REGION 1..141: note = tr|A0A096ACV1|A0A096ACV1_9BACT 6-pyruvoyl tetrahydrobiopterin synthase OS=Prevotella bivia DNF00320; OX = 1401068 GN=HMPREF0647_06970 PE=4 SV=1
MTRIIIERYHDISCGHRVVGHENKCKHLHGHNYRFTFTLEADKLDDLGRVIDFGIVKTLLCQWLEDHYDHKFLMWQDDPFLPTLLELSQESMVVVPFNPTAENIAQHFLVNIAPTLLHGTGVRLIQCKLEETRKCSATVML

SEQ ID NO: 24224 - protein, 141 aa, Prevotella bivia
  REGION 1..141: note = tr|A0A137STH1|A0A137STH1_9BACT Putative queuosine biosynthesis protein QueD OS=Prevotella bivia OX=28125; GN = HMPREF3202_01585 PE=4 SV=1
MTRIIIERYHDISCGHRVVGHENKCKHLHGHNYRFTFTLEADKLDDLGRVIDFGVVKTLLCQWLEDHYDHKFLMWQDDPFLPTLLELSQESMVVVPFNPTAENIAQHFLVNIAPTLLHGTGVRLIQCKLEETRKCSATVML

SEQ ID NO: 24225 - protein, 110 aa, Prevotella bryantii
  REGION 1..110: note = tr|D8DYC2|D8DYC2_PREBR 6-carboxy-5,6,7,8-tetrahydropterin synthase OS=Prevotella bryantii B14 OX=752555 GN=PBR_1743 PE=3 SV=1
MYYIEKSLEVSASHHLNLSYESKCSNVHGHNWHIKVYCKSKTLNKDGMVEDFGAIKQRIHGVLDHADLNEVLPFNPTAENIARWITEQIPTCYKATVQESDNNIATYEED

SEQ ID NO: 24226 - protein, 110 aa, Prevotella bryantii; identical to SEQ ID NO: 24225
  REGION 1..110: note = tr|A0A255STY3|A0A255STY3_PREBR 6-carboxy-5,6,7,8-tetrahydropterin synthase OS=Prevotella bryantii OX=77095 GN=CIK91_03735 PE=3 SV=1

SEQ ID NO: 24227 - protein, 111 aa, Prevotella buccae
  REGION 1..111: note = tr|D3HV36|D3HV36_9BACT 6-carboxy-5,6,7,8-tetrahydropterin synthase OS=Prevotella buccae D17 OX=575611 GN=queD PE=3 SV=1
MFYVQKTLEISASHHLSLSYESKCTRIHGHNWKITVFCKARELNADGMVVDFTLIKQKIMEPLDHADLNEVLPFNPTAENIARWVTEQIPLCYKAVVQESEGNIAIYEKDE

SEQ ID NO: 24228 - protein, 111 aa, Prevotella buccae
  REGION 1..111: note = tr|E6K735|E6K735_9BACT 6-carboxy-5,6,7,8-tetrahydropterin synthase OS=Prevotella buccae ATCC 33574 OX=873513 GN=queD PE=3 SV=1
MFYVQKTLEISASHHLSLSYESKCTRIHGHNWKITVFCKARELNADGMVVDFTLIKQKIKEPLDHADLNEVLPFNPTAENIARWVTEQIPLCYKAVVQESEGNIAIYEKDE

SEQ ID NO: 24229 - protein, 141 aa, Prevotella buccalis
  REGION 1..141: note = tr|D1W7N3|D1W7N3_9BACT Putative queuosine biosynthesis protein QueD OS=Prevotella buccalis ATCC 35310 OX=679190 GN=HMPREF0650_1928 PE=4 SV=1
MKKEPMRFFQRLLVTSRNMIYCVSKRMEISAAHRLSLSYESKCQCLHGHNWIITVYLFKKDKLNADGMVFDFTHIKKAIHDQLDHAYINDVIPYNPTAENIARWVVNQFDECYKAEVQESEGNVAQAIDETKIVGIENLVM

SEQ ID NO: 24230 - protein, 123 aa, unidentified
  source 1..123: note = Prevotella colorans
  REGION 1..123: note = tr|A0A2U0UIG2|A0A2U0UIG2_9BACT 6-pyruvoyltetrahydropterin/6-carboxytetrahydropterin synthase OS=Prevotella colorans OX=1703337 GN=C7379_10444; PE = 4 SV=1
MIYCISKRMEVAAAHKLELSYESKCRRLHGHNYIITVYMVCRDQLNKDGMVYDFKHVKDRVHDYLDHGYLNELLPFNTTAENMARWIVEQFAECYKAVVQESEGNVAQAVDETKIKGIENLVM

SEQ ID NO: 24231 - protein, 188 aa, Prevotella copri
  REGION 1..188: note = tr|D1PDL9|D1PDL9_9BACT Uncharacterized protein; OS = Prevotella copri DSM 18205 OX=537011 GN=PREVCOP_05309; PE = 4 SV=1
MRSITTFDLQYAHRFYGFQGEAQYLHGHTGTLTIEVEDTVEEGVNMVYPCNEIQKVAWSLLKNFDHALVLREDDPLLPAILDVYEKQGIKNGHPQNKMKGEAFKTELATAYPDARLVVTKETMTVEGMIKIVYDLLKDKLNIAKITFTSGVNAASAEFTTKNNIDRCPLCGVALNEDGVCPKCGYRKK

SEQ ID NO: 24232 - protein, 121 aa, Prevotella copri
  REGION 1..121: note = tr|A0A229I9U3|A0A229I9U3_9BACT 6-carboxytetrahydropterin synthase QueD OS=Prevotella copri OX=165179 GN=CFT61_00080 PE=4 SV=1
MYFISKKLEISAAHSLTLSYESKCSSLHGHNWQIELFFVGRELNQDGMVIDFTHVKKAVHGKMDHANLNEVFDFNPTAENIGRWLVDLFPECYKATVQESFGNTAVVVDEEKIRGIEHLVP

SEQ ID NO: 24233 - protein, 111 aa, Prevotella maculosa
  REGION 1..111: note = tr|H1HIZ1|H1HIZ1_9BACT 6-carboxy-5,6,7,8-tetrahydropterin synthase OS=Prevotella maculosa OT 289 OX=999422 GN=HMPREF9944_00135 PE=3 SV=1
MYYIQKSFEVSASHHLKLSYKSKCTNVHGHNWHITVYCKARELNKDGMVADFSEVKRLIHGRLDHADLNKVLPFNPTAENIARWITEQIPTCYKATVQESDGNIATYEEDV

SEQ ID NO: 24234 - protein, 109 aa, Prevotella multisaccharivorax
  REGION 1..109: note = tr|F8NB12|F8NB12_9BACT Uncharacterized protein; OS = Prevotella multisaccharivorax DSM 17128 OX=688246; GN = Premu_2566 PE=4 SV=1
MYYIEKSFEISACHHLILDHGSKCENIHGHNWQVTVYCKSEELDNNGMVVDFTLIKNKIHGRLDHQDLNQKLDFNPTAENIAKWIVDEIPHCYKARVAETASNVAIYER

SEQ ID NO: 24235 - protein, 111 aa, Prevotella oris
  REGION 1..111: note = tr|D7ND71|D7ND71_9BACT 6-carboxy-5,6,7,8-tetrahydropterin synthase OS=Prevotella oris C735 OX=563008 GN=HMPREF0665_01487 PE=3 SV=1
MYYIQKSFEVSASHHLTLSYKSKCSNVHGHNWHITVFCKARELNKDGMVADFSEVKRLIHGRLDHADINKVLPFNPTAENIARWITEQIPTYYKATVQESDGNIATYEEDV

SEQ ID NO: 24236 - protein, 111 aa, Prevotella oris
  REGION 1..111: note = tr|A0A448L9Y7|A0A448L9Y7_9BACT 6-carboxy-5,6,7,8-tetrahydropterin synthase OS=Prevotella oris OX=28135 GN=queD PE=3 SV=1
MYYIQKSFEVSASHHLTLSYKSKCSNVHGHNWHITVFCKARELNKDGMVADFSEVKRLIHGRLDHADINKVLPFNPTAENIARWITEQIPTCYKATVQESDGNIATYEEDV

SEQ ID NO: 24237 - protein, 111 aa, Prevotella salivae
  REGION 1..111: note = tr|E6MSV7|E6MSV7_9BACT 6-carboxy-5,6,7,8-tetrahydropterin synthase OS=Prevotella salivae DSM 15606 OX=888832 GN=ygcM PE=3 SV=1
MYYIKKSFEISASHHLKLSYQSKCCNVHGHNWHITIYCKSRELNKDGMVADFSEVKRLIHDRLDHADLNKVLPFNPTAENIAHWITEQIPTCYKAEVQESEGNVAIYEEDL

SEQ ID NO: 24238 - protein, 111 aa, Prevotella salivae
  REGION 1..111: note = tr|U2LB67|U2LB67_9BACT 6-carboxy-5,6,7,8-tetrahydropterin synthase OS=Prevotella salivae F0493 OX=1395125 GN=queD PE=3 SV=1
MYYIKKSFEISASHHLKLSYQSKCSNVHGHNWHITIYCKSRELNKDGMVADFSEVKRLIHDRLDHADLNKVLPFNPTAENIAHWITKQIPTCYKAEVQESEGNVAIYEEDL

SEQ ID NO: 24239 - protein, 121 aa, Prevotella sp.
  REGION 1..121: note = tr|A0A414BLM8|A0A414BLM8_9BACT 6-carboxytetrahydropterin synthase OS=Prevotella sp. AM34-19LB OX=2292364 GN=DW830_09245 PE=4 SV=1
MYFISKKLEISAAHSLALSYESKCSSLHGHNWQIELFFVGRELNQDGMVIDFTHVKKAVHGKMDHANLNEVFDFNPTAENIGRWLVNLFPECYKATVQESFGNTAVVVDEEKIRGIEHLVP

SEQ ID NO: 24240 - protein, 116 aa, Prevotella sp.
  REGION 1..116: note = tr|R7HP35|R7HP35_9BACT 6-carboxy-5,6,7,8-tetrahydropterin synthase OS=Prevotella sp. CAG:279 OX=1262924 GN=BN585_01130 PE=3 SV=1
MYYVSKRIEIAGCHSLKLDYESKCSQMHGHNWIVTIHCRARSLNHNGMVCDFTHIKEKIHGYLDHGNFNELLPFNPTAENIAKWICDQIPECYKVSVQESEGNTATYTTDDDEQDL

SEQ ID NO: 24241 - protein, 70 aa, Prevotella timonensis
  REGION 1..70: note = tr|D1W1T6|D1W1T6_9BACT Uncharacterized protein (Fragment) OS=Prevotella timonensis CRIS 5C-B1 OX=679189; GN = HMPREF9019_0443 PE=4 SV=1
MIYCVSKRMEISAAHRLSLSYESKCQCLHGHNWIITVYLFKKDKLNGDGMVFDFTHIKKAIHDQLDHAYI

SEQ ID NO: 24242 - protein, 122 aa, Prevotella timonensis
  REGION 1..122: note = tr|A0A2K0XNN9|A0A2K0XNN9_9BACT 6-carboxy-5,6,7,8-tetrahydropterin synthase OS=Prevotella timonensis OX=386414 GN=BFS16_03405 PE=3 SV=1
MYCVSKRMEISAAHRLSLSYESKCQCLHGHNWIITVYLFKKDKLNGDGMVFDFTHIKKAIHDQLDHAYINDIIPYNPTAENIARWVVNQFDECYKAEVRESEGNVAQAIDETKIVGIENLVM

SEQ ID NO: 24243 - protein, 117 aa, unidentified
  source 1..117: note = Prevotellaceae bacterium
  REGION 1..117: note = tr|A0A316NLU1|A0A316NLU1_9BACT 6-carboxy-5,6,7,8-tetrahydropterin synthase; OS = Prevotellaceae bacterium OX=2049047 GN=DBY24_11245 PE=3; SV = 1
MYYVKKRLEVAMAHQLTLPYESKCTRLHGHNAIITVYCCSEKLNESGMVVDFKKIKNIVEDMLDHRVVNDIVTFNPTAENLAKYICESIDKCYKVTFQETEGNVACYIKDSAKDVEF

SEQ ID NO: 24244 - protein, 152 aa, unidentified
  source 1..152: note = Pricia antarctica
  REGION 1..152: note = tr|A0A1G7H9P0|A0A1G7H9P0_9FLAO 6-pyruvoyltetrahydropterin/6-carboxytetrahydropterin synthase OS=Pricia antarctica OX=641691; GN = SAMN05421636_10973 PE=4 SV=1
MGKIRITKQFNFETGHALYGYDGKCRNVHGHSYKLSVTVIGTPISDTSNVKLGMVIDFGDLKKIVKEEIVDQFDHATVFNKNTPHVELAKELIDRNHQVILADYQPTSENMVIDFAVKIKARLPENIQLYSLKLQETETSYAEWYAVDNTPL

SEQ ID NO: 24245 - protein, 135 aa, unidentified
  source 1..135: note = Pricia antarctica
  REGION 1..135: note = tr|A0A1G7GCB1|A0A1G7GCB1_9FLAO 6-carboxy-5,6,7,8-tetrahydropterin synthase OS=Pricia antarctica OX=641691 GN=SAMN05421636_10870 PE=3 SV=1
MKVKVSRKAHFNAAHRLYRKDWSDEKNDAVFGKCNNPNFHGHNYELIVSVYGEIDPETGFVMDMKVLKDLIKEKIEDALDHKNLNVEVPEFKDLNPTAENISVVIWNNLRPYIEERHELEVQLYETPRNFVTFNG

SEQ ID NO: 24246 - protein, 156 aa, Prochlorococcus marinus
  REGION 1..156: note = tr|A0A0A1ZH99|A0A0A1ZH99_PROMR Queuosine biosynthesis QueD OS=Prochlorococcus marinus str. GP2; OX = 59925 GN=EU91_0075 PE=4 SV=1
MNIHSIKFSCSKSYEDFPCSHRQWRHQGHCRFVHGYSRSFTFWFTAKKLDHNGFVVDFSSLKPLENRLKEQFDHTFLINKDDPLLNYWEKLHDLDALDLRIMDNVGMEFTSELIWRWANEYLQDKDKGRTCCWKTESKENKSNKASFEEIPDWFKS

SEQ ID NO: 24247 - protein, 157 aa, Prochlorococcus marinus
  REGION 1..157: note = tr|A0A318R5B0|A0A318R5B0_PROMR 6-pyruvoyl tetrahydropterin synthase OS=Prochlorococcus marinus XMU1408 OX=2213228 GN=DNJ73_03130 PE=4 SV=1
MTIKDIPFKCSKHFRDYPCSHRQWRHKGHCRYVHGYSRSFTFWFASNELDENGFVVDFSSLKALEEKLRGYFDHTFLVNFDDPLLETWKKLHSEEALDLRVMDNVGMESTAKLIWGWANDLLFSREKGRSCCFKAIAHENDINSASYNLWPDWFRPI

SEQ ID NO: 24248 - protein, 128 aa, Prochlorococcus sp.
  REGION 1..128: note = tr|A0A0A2CHW4|A0A0A2CHW4_9PROC Queuosine biosynthesis QueD OS=Prochlorococcus sp. MIT 0701; OX = 1499502 GN=EV12_2952 PE=4 SV=1
MHGYSRSFTFWFAAQELDPYGFVVDFSSLRPLEQQLNNQFDHTFLANADDPLLPQWQSLNDQGAIDLRVMDNVGMESSAALVWQWANALLLDRDAGRSCCWRVEARENEANAACYEAIPQWYATKTML

SEQ ID NO: 24249 - protein, 308 aa, Prochlorococcus sp.
  REGION 1..308: note = tr|A0A089P7Z0|A0A089P7Z0_9PROC 6-pyruvoyl tetrahydrobiopterin synthase OS=Prochlorococcus sp. MIT 0801 OX=1501269 GN=EW15_0194 PE=4 SV=1
MEAITSNFPHGEGRTCVITRRACFSASHLYRLPELSDDDNSALFGPCSIAPGHGHNYELIVTMEGDLNKYGMVLNLSDVKHAIKNEVTSQLDFRFLNDTWPEFDLSKPEGCLPTTESLVRIIWERLKSHLPLKSLRLYENPKLWADYQGNAMDAYLTVQTHFSAAHRLAREDLPQTENEKIFGKCARPNGHGHNYLVDITVKGKINPRTGMICDLSALNSLINDLVVEPFDHTFLNKDIPYFANCVPTAENIALHISDKLTNPINAIGANLYKIKLQESPNNAAEVYANVPESTSDTKDSKNQVGLLR

SEQ ID NO: 24250 - protein, 128 aa, unidentified
  source 1..128: note = Prochlorothrix hollandica
  REGION 1..128: note = tr|A0A0M2PY42|A0A0M2PY42_PROHO 6-carboxy-5,6,7,8-tetrahydropterin synthase; OS = Prochlorothrix hollandica PCC 9006 = CALU 1027; OX = 317619 GN=PROH_03020 PE=3 SV=1
MPWKVTTEFSFSAAHCIKDYDGPCGRMHGHTYTVRIEAHAHQLQGSEFCPHSVMVADFKTLRWAKRDVDKGGLDHCVLNDVMPPEYETTAEMIAKFIFDRTQAKLPPGITLKVGVSESPNSWAEYWED

SEQ ID NO: 24251 - protein, 271 aa, unidentified
  source 1..271: note = Prochlorothrix hollandica
  REGION 1..271: note = tr|A0A0M2PXY8|A0A0M2PXY8_PROHO 6-pyruvoyl tetrahydropterin synthase OS=Prochlorothrix hollandica PCC 9006 = CALU 1027 OX=317619 GN=PROH_12640 PE=4 SV=1
MKCIINRRAQFSASHRYWLPELSEAENQDRFGACARAPGHGHNYVLYVAMEGELDQYGMVLNLSDVKTVIQREIIDPLDFSHLNDTWPELQTTLPTTEHLARSMWQRLSPHLPLVNLQLFEHPQLWADYQGHDMEASLTLSTHFSAAHRLALTHLSYEENCEIYGKCARPHGHGHNYHLEVTVTGDIDPRTGMIADLSKLQHIIKSQVVEPFDHTFLNKDIPYFAEVVPTAENIAVHIRDLLQAPLAVTGARLHKVKLIESPNNSAEVYGS

SEQ ID NO: 24252 - protein, 198 aa, Prolinoborus fasciculus; identical to SEQ ID NO: 16948
  REGION 1..198: note = tr|A0A2U3MHL1|A0A2U3MHL1_9NEIS 6-pyruvoyl tetrahydropterin synthase OS=Prolinoborus fasciculus; OX = 1056810 GN=PFCIP103579_1315 PE=4 SV=1

SEQ ID NO: 24253 - protein, 190 aa, unidentified
  source 1..190: note = Prolixibacter denitrificans
  REGION 1..190: note = tr|A0A2P8CG87|A0A2P8CG87_9BACT 6-pyruvoyltetrahydropterin/6-carboxytetrahydropterin synthase OS=Prolixibacter denitrificans OX=1541063; GN = CLV93_103407 PE=4 SV=1
MIIRKKFRFEGAHIVRNCSSKLCRENIHGHSYEVEVFIKSNKLDKGFMVLDFILLSKVGEFINSFDHAYSLWQGEKPEIKDAVYQINQRVAEIPVSPSAEGYALMFLYVIDKIIRNTERKNGEGDIQLQSVRVHETQTGYAEAFTEDFALVDFTLDDIKLSEGIRTEWDDMDWWEELKQQKIFKNTHLEN

SEQ ID NO: 24254 - protein, 149 aa, unidentified
  source 1..149: note = Prolixibacteraceae bacterium
  REGION 1..149: note = tr|A0A399T1Y5|A0A399T1Y5_9BACT 6-carboxytetrahydropterin synthase OS=Prolixibacteraceae bacterium XSD2 OX=2305463 GN=D1614_03655 PE=4 SV=1
MPRIRVTKRFDFEMAHALLAYNGVCKNVHGHTYELEVTLIGDAKNEPGHPEDGMVMDFGQLKNIVNTKIIQFFDHALVINALTPAPQKEALALTTERLTVLGFQPTSENLVTYFAGILQQEIPSNVSLFSLRLYETKTSFAEWFASDNQ

SEQ ID NO: 24255 - protein, 149 aa, unidentified
  source 1..149: note = Prolixibacteraceae bacterium
  REGION 1..149: note = tr|A0A350YYR3|A0A350YYR3_9BACT 6-carboxy-5,6,7,8-tetrahydropterin synthase; OS = Prolixibacteraceae bacterium OX=2053594 GN=queD PE=3; SV = 1
MTKIRVTKRFHFEMAHALHGYDGLCRNIHGHSYNLEITIYGNVFRSPGDPKDGMVMDFHELKMLVKTHVTEKLDHALMVNRLIDHRHMEALQLTTSRILVVDFQPTTENILQYIADMLKPLLPEGVTLYSIRLYETITSFAEWVASDNP

SEQ ID NO: 24256 - protein, 306 aa, unidentified
  source 1..306: note = Propionibacteriaceae bacterium
  REGION 1..306: note = tr|A0A2E0EB30|A0A2E0EB30_9ACTN 6-pyruvoyl tetrahydropterin synthase OS=Propionibacteriaceae bacterium OX=2021380 GN=CMK50_05775 PE=4 SV=1
MTNAITTAPHGQGRGCVITRRACFSASHRYWLPELHADDNAARFGSCAMAPGHGHNYELIVSMAGGLDANGMVLNLSEVKHAIRSQVTEQLDFRFLNEAWPEFDVTSSEGCLPTTEALVRIIWSRLANQLPLVALRLYESSGLWADYLGQAMDAYLTIRTHFAAAHRLARPELSQEENEQIYGKCARPHGHGHNYLVDVTVRGTIDPRTGMVCDLAALQRLVSDLVVEPFDHTFLNKDVAHFSECVPTAENIALHIVDRLTSPVRAIGAQLHKVRLQESPNNAAEVYAEAPALNAMPEAMHCVVNG

SEQ ID NO: 24257 - protein, 126 aa, Propioniciclava tarda
  REGION 1..126: note = tr|A0A4Q9KQ87|A0A4Q9KQ87_9ACTN 6-carboxytetrahydropterin synthase OS=Propioniciclava tarda OX=433330 GN=ET996_00680 PE=4 SV=1
MYTLTVRDHVMLAHSLPDPAFGPAQGLHGVTYVVEASWSASELTEQNIVLDIGVATEALRGVLAPLAYANLDERPEFAGVLTTTEFLCRWVADQLAEAVVAGNQSGLTVTLREHPDAWASYARALP

SEQ ID NO: 24258 - protein, 126 aa, Propionispira arboris
  REGION 1..126: note = tr|A0A1H6WDW9|A0A1H6WDW9_9FIRM 6-carboxy-5,6,7,8-tetrahydropterin synthase; OS = Propionispira arboris OX=84035 GN=SAMN05660742_103248; PE = 3 SV=1
MFELTVIVEFEAAHRIVGYPGKCNRLHGHNWSIEVSVVGNKLNELGMLVDFKELKQEVNKIMDRLDHQYLNELPIFQENNNPTAENIAIYIYNELENSPLFEANSKVKTVKVWESQKSAVSYSKGE

SEQ ID NO: 24259 - protein, 127 aa, Propionispora hippei
  REGION 1..127: note = tr|A0A1M6AV12|A0A1M6AV12_9FIRM 6-carboxy-5,6,7,8-tetrahydropterin synthase; OS = Propionispora hippei DSM 15287 OX=1123003; GN = SAMN02745170_00300 PE=3 SV=1
MFELTIIVDFEAAHHIPDYPGKCCRLHGHNWKVEVSVKGKQLNTLGMLIDFKELKAEVQVIIGKLDHFYLNEIEPFCRISPTAENIARYIYDELANHAGLAETVTVASVKVWESAHSAVRYSGEEQQ

SEQ ID NO: 24260 - protein, 130 aa, Propionispora sp.
  REGION 1..130: note = tr|A0A0K8JD41|A0A0K8JD41_9FIRM 6-carboxy-5,6,7,8-tetrahydropterin synthase; OS = Propionispora sp. 2/2-37 OX=1677858 GN=P22_1303 PE=3; SV = 1
MTGFTIKATKIFTFDAAHFLVGHKGKCASTHGHTYRLEVTVSRKKQAAIAGGSSDSMVIDFTDLKKIVHEEIIDQVDHKMLNDVYDFRTTSENLAVHFFRVLTGRLDLLDIQVERIKLWESASSYVEVET

SEQ ID NO: 24261 - protein, 127 aa, Propionispora vibrioides
  REGION 1..127: note = tr|A0A1H8NK87|A0A1H8NK87_9FIRM 6-carboxy-5,6,7,8-tetrahydropterin synthase; OS = Propionispora vibrioides OX=112903; GN = SAMN04490178_101131 PE=3 SV=1
MFELTIIVDFEAAHHIPDYPGKCCRLHGHNWKVEVSVKGNQLNTLGMLIDFKELKAEVQAIIGKLDHFYLNEIEPFCRISPTAENIAKYIYDELANHAGLAETVTVASVKVWESAHSAVSYSGEEQQ

SEQ ID NO: 24262 - protein, 151 aa, Propionivibrio dicarboxylicus
  REGION 1..151: note = tr|A0A1G8EBJ5|A0A1G8EBJ5_9RHOO 6-pyruvoyltetrahydropterin/6-carboxytetrahydropterin synthase OS=Propionivibrio dicarboxylicus OX=83767; GN = SAMN05660652_02090 PE=4 SV= 1
MFITRRLEFDAGHRIPDHKSQCRHLHGHRYAIEITLGGDIIQQAGNAANGMVMDFSEVKALAKTHLVDLWDHAFLAFAGDTAIVEFLGSLPGHKTVILDCVPTAENLAEKAFAILDAVYRDSFGNHLHLERIRLYETPNCWADAVRKAPIA

SEQ ID NO: 24263 - protein, 121 aa, Prosthecobacter debontii
  REGION 1..121: note = tr|A0A1T4YRJ5|A0A1T4YRJ5_9BACT 6-carboxy-5,6,7,8-tetrahydropterin synthase; OS = Prosthecobacter debontii OX=48467 GN=SAMN02745166_04046; PE = 3 SV=1
MRCRIIKDFRFEAAQTLPNLPDSHKCTRMHGHSFKVEIAVEGEVDPHIGWVYDHAEISKAMKPLVDRMDHAYLNEIEGLENPTIENMAAWLWRKLAPQLPGLCEIVIYETPSARCVFRGEF

SEQ ID NO: 24264 - protein, 121 aa, Prosthecobacter fusiformis
  REGION 1..121: note = tr|A0A4R7S7K4|A0A4R7S7K4_9BACT 6-carboxy-5,6,7,8-tetrahydropterin synthase; OS = Prosthecobacter fusiformis OX=48464 GN=EI77_01665 PE=3; SV = 1
MRCRIIKDFRFEAAQTLPNLPGHHKCTQMHGHSFKVEIAIEGEVDPHIGWVYDHAEISKAMKPLLDRMDHAYLNEIEGLENPTIENMAAWLWRKLSPQLPGLCEIVIYETPTARCVFRGEF

SEQ ID NO: 24265 - protein, 144 aa, Prosthecochloris aestuarii
  REGION 1..144: note = tr|B4S932|B4S932_PROA2 Uncharacterized protein; OS = Prosthecochloris aestuarii (strain DSM 271 / SK 413); OX = 290512 GN=Paes_1550 PE=4 SV=1
MIISRKIELDYGHTLPNSFSFCNQLHGHRGVVEATVEGRMIDKKGDAQEGMVMDFKFLNDIMMTHIHDVLDHGFAVWKDDHEDLEFITRRNKRVVITNEPPTAECLAKWAFNQIEPHLPANVSLINLRWYETPNNWADYTGEEE

SEQ ID NO: 24266 - protein, 149 aa, Prosthecochloris aestuarii
  REGION 1..149: note = tr|B4S769|B4S769_PROA2 6-carboxy-5,6,7,8-tetrahydropterin synthase; OS = Prosthecochloris aestuarii (strain DSM 271 / SK 413); OX = 290512 GN=Paes_0860 PE=3 SV=1
MNDVLEKPRKVYVTRTVEFNAAHRLFNPSISDEENLKTYGKCSNLYGHGHNYELEITVSGTVDRKTGFLLDMKELKIILENEIMSRFDHKHLNFDVEELKNTVPSTEILAVTVWDILHDALQSYSNKEITLHEVKIHETRKNSVRYLGE

SEQ ID NO: 24267 - protein, 149 aa, unidentified
  source 1..149: note = Prosthecochloris marina
  REGION 1..149: note = tr|A0A317T593|A0A317T593_9CHLB 6-pyruvoyl tetrahydrobiopterin synthase OS=Prosthecochloris marina; OX = 2017681 GN=CR164_08165 PE=4 SV=1
MNDILQKPRKVYVTRTIEFNAAHRLYSTDLSDDENREIYGKCSNTYGHGHNYELEITVSGFVDRTTGFLLDMKELKKILEKEIMNRFDHKHLNFDVEELRDTVPSTEILAVTVWDILTTALQSYINKGITLHEVKIHETRKNSVRYLGE

SEQ ID NO: 24268 - protein, 142 aa, unidentified
  source 1..142: note = Prosthecochloris marina
  REGION 1..142: note = tr|A0A317T5Y9|A0A317T5Y9_9CHLB 6-pyruvoyl tetrahydropterin synthase OS=Prosthecochloris marina; OX = 2017681 GN=CR164_07025 PE=4 SV=1
MIISRKIELDYGHTLPNSFSFCNQLHGHRGIVVATVEGKIIDREGDPQEGMVMDFKFLNDIMMKHVHDVLDHGFAVWKNDHEDLAFITKRNKRVVITDEPPTAECLAKWAFNQIIPHLPENVILKNLRWYETPNNWADYEGE

SEQ ID NO: 24269 - protein, 149 aa, Prosthecochloris sp.
  REGION 1..149: note = tr|A0A1B1Q2U9|A0A1B1Q2U9_9CHLB 6-carboxy-5,6,7,8-tetrahydropterin synthase; OS = Prosthecochloris sp. CIB 2401 OX=1868325 GN=queD_2 PE=3; SV = 1
MNDILTKPRKVYVTRTVEFNAAHRLFNPEFSEEKNLKMYGSCSNLYGHGHNYEAEITVSGMVDRATGFLMDLKELKALLEKEVTERFDHKHLNYDVAELSNTVPSTEILAVTVWDILADALAEHPNKNLTLHEVRINETRKNSVRYLGE

SEQ ID NO: 24270 - protein, 144 aa, Prosthecochloris sp.
  REGION 1..144: note = tr|A0A369RBM0|A0A369RBM0_9CHLB 6-pyruvoyl tetrahydropterin synthase OS=Prosthecochloris sp. ZM; OX = 2283143 GN=CR161_03915 PE=4 SV=1
MIISRKIELDYGHTLPNSFSFCNQLHGHRGVVEATVEGRMIDKKGDAQEGMVMDFKFLNDIMMTHIHDVLDHGFAVWKDDHEDLEFITRRNKRVVITNEPPTAECLAKWAFNQIEPHLPANVSLINLRWYETPNNWADYTGKND

SEQ ID NO: 24271 - protein, 149 aa, Prosthecochloris vibrioformis; identical to SEQ ID NO: 24269
  REGION 1..149: note = tr|A0A5C4RZ76|A0A5C4RZ76_PROVB 6-carboxy-5,6,7,8-tetrahydropterin synthase; OS = Prosthecochloris vibrioformis OX=1098 GN=FGF68_08930; PE = 3 SV=1

SEQ ID NO: 24272 - protein, 144 aa, Prosthecochloris vibrioformis
  REGION 1..144: note = tr|A0A5C4S1D2|A0A5C4S1D2_PROVB 6-carboxytetrahydropterin synthase OS=Prosthecochloris vibrioformis OX=1098 GN=FGF68_03495 PE=4 SV=1
MIISRKIELDYGHTLPNSFSFCNQLHGHRGIVEATVEGRMIDRKGDAEEGMVMDFKFLNDIMMTHIHGILDHGFAVWKDDHEDLEFITKRNKRVVITNEPPTAECLAKWAFNQIEAHLPENVTLINLRWYETPNNWADYTGEEE

SEQ ID NO: 24273 - protein, 134 aa, Prosthecomicrobium hirschii
  REGION 1..134: note = tr|A0A0P6VUR4|A0A0P6VUR4_9RHIZ 6-pyruvoyl tetrahydropterin synthase OS=Prosthecomicrobium hirschii; OX = 665126 GN=ABB55_25880 PE=4 SV=1
MFAVEVRDHIMIAHSFRGAVFGPAQALHGATFVVDLAFFRAELDENGIVVDIGLAHDALKAVLGPLTYRNLDELPEFAGRNTTTEVLARHIFDAMAAAIARGDLGADARAIAKLRVTLHESHVARAWYEAPIGG

SEQ ID NO: 24274 - protein, 121 aa, unidentified
  source 1..121: note = Proteiniphilum saccharofermentans
  REGION 1..121: note = tr|A0A1R3T3R3|A0A1R3T3R3_9BACT 6-carboxy-5,6,7,8-tetrahydropterin synthase; OS = Proteiniphilum saccharofermentans OX=1642647; GN = PSM36_0302 PE=3 SV=1
MYKISKEFSFSAAHSLFGLPDDHPCSRLHGHNYVVTVHLRSKELNRQGFVRDYTELKIVKEYIDTRLDHRNLNDILSPLNSSAENLAKMLYDVFKPRIPELYAVEVSETPKTSAIYEPECE

SEQ ID NO: 24275 - protein, 121 aa, Proteiniphilum sp.
  REGION 1..121: note = tr|A0A3M8EG48|A0A3M8EG48_9BACT 6-carboxy-5,6,7,8-tetrahydropterin synthase; OS = Proteiniphilum sp. X52 OX=2382159 GN=queD PE=3 SV=1
MYKISKEFSFSAAHSLFGMPDDHPCSRLHGHNYVVTVHLRSKELNKQGFVRDYTELKIVKKYIDSRLDHRNLNDILSPLNSSAENLAKMLYDEFKPQIPELYAVEVSETPKTSAIYEPECE

SEQ ID NO: 24276 - protein, 187 aa, unidentified
  source 1..187: note = Proteobacteria bacterium
  REGION 1..187: note = tr|R6A239|R6A239_9PROT Uncharacterized protein; OS = Proteobacteria bacterium CAG:139 OX=1262986; GN = BN492_01144 PE=4 SV=1
MRSITSFDLQYAHRFLNFQGEAQYLHGHTGVLTIEVEDTIEPGVNMVFPCNEIRKTAWEVLKNFDHALILREDDPLLPAILAVYDAQGIRNGAPSNRMKGAPVKTDLITCYPDCRLVVTKETLTTEGMIKIAYDLLKDKLNIAKITFTSGVNAASQEYKPQGTVDRCPLCGIALDENGVCPKCGYRK

SEQ ID NO: 24277 - protein, 173 aa, unidentified
  source 1..173: note = Proteobacteria bacterium
  REGION 1..173: note = tr|A0A1W9IAK5|A0A1W9IAK5_9PROT Uncharacterized protein OS=Proteobacteria bacterium HN_bin10 OX=1827386; GN = A4S17_05100 PE=4 SV=1
MAALEFTRRYAMAHRLLATKSPKCAIPHGHNEFVTVRLDPLATFRFSDANSAAPFEQVKLRWHRWIDEHVDHALHLGEGDPLIGYFREHEPALLKQIMTFQGDPTTEALAACFFLKLSAFIANDNLPFSIREVRIEETPTNTVIVSRDVFDPGSCGLRANAWPWRADMSINDF

SEQ ID NO: 24278 - protein, 120 aa, Proteus hauseri
  REGION 1..120: note = tr|A0A410X7H9|A0A410X7H9_PROHU 6-carboxy-5,6,7,8-tetrahydropterin synthase OS=Proteus hauseri OX=183417 GN=queD PE=3 SV=1
MITTIFKDFQFEAAHHLPHVPEGHKCGRLHGHSFLVRLELTGEVDAQSGWLIDFADVKAAFKPTLDSLDHYYLNDIAGLENPTSEVLAKWIWQQVKPTLPLLSAVMVKETCTAGCIYRGE

SEQ ID NO: 24279 - protein, 120 aa, Proteus hauseri
  REGION 1..120: note = tr|V6MHR8|V6MHR8_PROHU 6-carboxy-5,6,7,8-tetrahydropterin synthase OS=Proteus hauseri ZMd44 OX=1312367 GN=K151_2198 PE=3 SV=1
MTTTIFKDFQFEAAHHLPHVPEGHKCGRLHGHSFLVRLELTGEVDAHSGWLIDFADVKAAFKPTLERLDHYYLNEIEGLENPTSEVLAKWIWQQVKPSLPLLSAVMVKETCTAGCIYRGE

SEQ ID NO: 24280 - protein, 121 aa, Proteus mirabilis
  REGION 1..121: note = tr|A0A2J9L846|A0A2J9L846_PROMI 6-carboxy-5,6,7,8-tetrahydropterin synthase OS=Proteus mirabilis OX=584 GN=queD PE=3 SV=1
MMTTTIFKDFQFEAAHHLPHVPEGHKCGRLHGHSFLVRLELTGEVDAHSGWLIDFADVKAAFKPTLERLDHYYLNEIEGLENPTSEVLAKWIWQQVKPSLPLLSAVMVKETCTAGCIYRGE

SEQ ID NO: 24281 - protein, 120 aa, Proteus mirabilis
  REGION 1..120: note = tr|A0A1Z1SS52|A0A1Z1SS52_PROMI 6-carboxy-5,6,7,8-tetrahydropterin synthase OS=Proteus mirabilis OX=584 GN=queD PE=3 SV=1
MITTIFKDFQFEAAHHLPHVPKGHKCGRLHGHSFLVRLEITGEVDAQSGWLIDFADVKAAFKPTLDRLDHYYLNDIEGLENPTSEVLAKWIWQQVKPSLPLLSAVMVKETCTAGCIYRGE

SEQ ID NO: 24282 - protein, 120 aa, Proteus penneri
  REGION 1..120: note = tr|C0AXE9|C0AXE9_9GAMM 6-carboxy-5,6,7,8-tetrahydropterin synthase OS=Proteus penneri ATCC 35198 OX=471881 GN=queD PE=3 SV=1
MTTTIFKDFQFEAAHHLPHVPEGHKCGRLHGHSFLVRLELTGEVNAHSGWLIDFADVKAAFKPTLERLDHYYLNEIEGLENPTSEVLAKWIWQQVKPSLPLLSAVMVKETCTAGCIYRGE

SEQ ID NO: 24283 - protein, 120 aa, Proteus penneri; identical to SEQ ID NO: 24282
  REGION 1..120: note = tr|A0A379EQ81|A0A379EQ81_9GAMM 6-carboxy-5,6,7,8-tetrahydropterin synthase OS=Proteus penneri OX=102862 GN=queD PE=3 SV=1

SEQ ID NO: 24284 - protein, 120 aa, Proteus sp.; identical to SEQ ID NO: 21437
  REGION 1..120: note = tr|A0A1F2H5H2|A0A1F2H5H2_9GAMM 6-carboxy-5,6,7,8-tetrahydropterin synthase OS=Proteus sp. HMSC10D02 OX=1581079 GN=HMPREF3111_25410 PE=3 SV=1

SEQ ID NO: 24285 - protein, 120 aa, Proteus sp.
  REGION 1..120: note = tr|A0A5J6RT42|A0A5J6RT42_9GAMM 6-carboxytetrahydropterin synthase QueD OS=Proteus sp. CD3; OX = 1921565 GN=BTA34_13075 PE=4 SV=1
MTTTIFKDFQFEAAHHLPHVPEGHKCGRLHGHSFLVRLELTGEVDAHSGWLIDFADVKAAFKPTLERLDHYYLNEIKGLENPTSEVLAKWIWQQVKPSLPLLSAVMVKETCTAGCIYRGE

SEQ ID NO: 24286 - protein, 120 aa, Proteus vulgaris; identical to SEQ ID NO: 24282
  REGION 1..120: note = tr|A0A0G4QI26|A0A0G4QI26_PROVU 6-carboxy-5,6,7,8-tetrahydropterin synthase OS=Proteus vulgaris OX=585 GN=queD PE=3 SV=1

SEQ ID NO: 24287 - protein, 121 aa, Proteus vulgaris; identical to SEQ ID NO: 24280
  REGION 1..121: note = tr|A0A292C8G4|A0A292C8G4_PROVU 6-carboxy-5,6,7,8-tetrahydropterin synthase OS=Proteus vulgaris OX=585 GN=queD PE=3 SV=1

SEQ ID NO: 24288 - protein, 121 aa, Providencia alcalifaciens
  REGION 1..121: note = tr|B6XG76|B6XG76_9GAMM 6-carboxy-5,6,7,8-tetrahydropterin synthase OS=Providencia alcalifaciens DSM 30120 OX=520999 GN=queD PE=3 SV=1
MSTTIYKDFHFEAAHRLPHVPEGHKCGRLHGHSFMVRLEITGEIDAHTGWIMDFADVKNAFNPIYERLDHHYLNEIEGLENPTSEVLARWIWQQTKPLLPLLSAITVKETCNAGCVYRGDE

SEQ ID NO: 24289 - protein, 121 aa, Providencia alcalifaciens
  REGION 1..121: note = tr|X6QCP9|X6QCP9_9GAMM 6-carboxy-5,6,7,8-tetrahydropterin synthase OS=Providencia alcalifaciens F90-2004 OX=1256987 GN=queD PE=3 SV=1
MSTTIYKDFHFEAAHRLPHVPEGHKCGRLHGHSFMVRLEITGEIDAHTGWIMDFADVKSAFNPIYERLDHHYLNEIEGLENPTSEVLARWIWQQTKPLLPLLSAITVKETCNAGCVYRGDE

SEQ ID NO: 24290 - protein, 124 aa, Providencia burhodogranariea
  REGION 1..124: note = tr|K8WY57|K8WY57_9GAMM 6-carboxy-5,6,7,8-tetrahydropterin synthase OS=Providencia burhodogranariea DSM 19968 OX=1141662 GN=OOA_00045 PE=3; SV = 1
MSTINKTSIYKDFHFEAAHKLPHVPEGHQCGRLHGHSFMVRLELTGDVDKKTGWIIDFSDVKEAFKPILNQLDHYYLNDIEGLENPTSEVLASWIWDKTKPLLPLLSAVTVKETCNAGCIYRGE

SEQ ID NO: 24291 - protein, 121 aa, Providencia heimbachae
  REGION 1..121: note = tr|A0A4D7IMI6|A0A4D7IMI6_9GAMM 6-carboxy-5,6,7,8-tetrahydropterin synthase OS=Providencia heimbachae OX=333962 GN=queD PE=3 SV=1
MSTTIYKDFYFEAAHKLPHVPEGHKCGRLHGHSFMVRLEITGNVDAHTGWIIDFSDVKKAFKPILEQLDHHYLNDIDGLENPTSEVLARWVWLKTKPLLPLLSAVTIKETCNAGCIYRGED

SEQ ID NO: 24292 - protein, 121 aa, Providencia heimbachae; identical to SEQ ID NO: 24291
  REGION 1..121: note = tr|A0A1B7JNM7|A0A1B7JNM7_9GAMM 6-carboxy-5,6,7,8-tetrahydropterin synthase OS=Providencia heimbachae ATCC 35613 OX=1354272 GN=M998_3030 PE=3 SV=1

SEQ ID NO: 24293 - protein, 121 aa, Providencia rettgeri
  REGION 1..121: note = tr|A0A1J0EAZ0|A0A1J0EAZ0_PRORE 6-carboxy-5,6,7,8-tetrahydropterin synthase OS=Providencia rettgeri OX=587 GN=queD PE=3 SV=1
MSTTIYKDFTFEAAHKLPHVPAGHKCGRLHGHSFMVRLEITGEVDKQSGWIIDFADVKAVFKPIWEQLDHHYLNEIKGLENPTSEVLAQWIWQQTKPHLPLLSAVTVKETCNAGCVYRGQA

SEQ ID NO: 24294 - protein, 121 aa, Providencia rettgeri
  REGION 1..121: note = tr|A0A264VW77|A0A264VW77_PRORE 6-carboxy-5,6,7,8-tetrahydropterin synthase OS=Providencia rettgeri OX=587 GN=queD PE=3 SV=1
MSTTIYKDFTFEAAHKLPHVPEGHKCGRLHGHSFMVRLEITGEVDSHSGWIIDFSDVKAAFKPIWERLDHHYLNDIEGLENPTSEVLAQWIWQQTKPLLPLLSAVTVKETCNAGCVYRGEA

SEQ ID NO: 24295 - protein, 120 aa, Providencia rustigianii
  REGION 1..120: note = tr|A0A379G6K1|A0A379G6K1_9GAMM 6-carboxy-5,6,7,8-tetrahydropterin synthase OS=Providencia rustigianii OX=158850 GN=queD PE=3 SV=1
MSTTIYKDFQFEAAHKLPHVPAGHKCGRLHGHSFMVRLEITGDVDAHTGWIIDFADVKSAFKPIYERLDHHYLNDIEGLENPTSEVLSRWIWQQVKPLLPLLSAVTVQETCNAGCVYRGE

SEQ ID NO: 24296 - protein, 126 aa, Providencia rustigianii
  REGION 1..126: note = tr|D1P4S2|D1P4S2_9GAMM 6-carboxy-5,6,7,8-tetrahydropterin synthase OS=Providencia rustigianii DSM 4541 OX=500637 GN=queD PE=3 SV=1
MSKEKLMSTTIYKDFQFEAAHKLPHVPAGHKCGRLHGHSFMVRLEITGDVDAHTGWIIDFADVKSAFKPIYERLDHHYLNDIEGLENPTSEVLSRWIWQQVKPLLPLLSAVTVQETCNAGCVYRGE

SEQ ID NO: 24297 - protein, 120 aa, Providencia sneebia
  REGION 1..120: note = tr|K8W0J3|K8W0J3_9GAMM 6-carboxy-5,6,7,8-tetrahydropterin synthase OS=Providencia sneebia DSM 19967 OX=1141660 GN=OO7_14218 PE=3 SV=1
MITSIYKDFRFEAAHKLPYVPEGHQCGRLHGHSFMVRLELTGKVNPNTGWLIDFADVKQAFKPILDQLDHYYLNDIEGLENPTSEVLASWIWHKTKPLLPLLSAVTVKETCNAGCVYRGE

SEQ ID NO: 24298 - protein, 121 aa, Providencia sp.; identical to SEQ ID NO: 24294
  REGION 1..121: note = tr|A0A345M1R3|A0A345M1R3_9GAMM 6-carboxy-5,6,7,8-tetrahydropterin synthase OS=Providencia sp. WCHPHu000369 OX=2027290 GN=queD PE=3 SV=1

SEQ ID NO: 24299 - protein, 121 aa, Providencia sp.
  REGION 1..121: note = tr|A0A356DBH9|A0A356DBH9_PROSP 6-carboxy-5,6,7,8-tetrahydropterin synthase OS=Providencia sp. OX=589 GN=queD PE=3 SV=1
MSTTIYKDFTFEAAHKLPHVPEGHKCGRLHGHSFMVRLEITGEVDAYSGWIIDFSDVKKVFKPILEQLDHHYLNDITGLENPTSEVLSRWIWLQTKPLLPQLSAVTVKETCTAGCIYRGEN

SEQ ID NO: 24300 - protein, 120 aa, Providencia stuartii
  REGION 1..120: note = tr|B2PZ86|B2PZ86_PROST 6-carboxy-5,6,7,8-tetrahydropterin synthase OS=Providencia stuartii ATCC 25827 OX=471874 GN=queD PE=3 SV=1
MRTSIYKDFHFEAAHKLPYVPEGHKCGRLHGHSFMVRLELTGEVEEKSGWLIDFSDVKKAFKPILDQLDHYYLNDIEGLENPTSEVLASWIWHKTKPLLPLLSAVTVKETCNAGCIYRGE

SEQ ID NO: 24301 - protein, 120 aa, Providencia stuartii; identical to SEQ ID NO: 24300
  REGION 1..120: note = tr|A0A379GJV3|A0A379GJV3_PROST 6-carboxy-5,6,7,8-tetrahydropterin synthase OS=Providencia stuartii OX=588 GN=queD PE=3 SV=1

SEQ ID NO: 24302 - protein, 123 aa, unidentified
  source 1..123: note = Unknown
  REGION 1..123: note = tr|A0A368DZM1|A0A368DZM1_9PROT 6-carboxy-5,6,7,8-tetrahydropterin synthase OS=PS1 clade bacterium OX=2175152 GN=DBW69_05155 PE=3 SV=1
MQLTREFCFDAAHCLESYDPGHPNRRIHGHSFRVRVTLTGMPNDKTGQIVDLAEFGTILEHLREQLDHHMLNEIDGLETPTLENICLWLWEHLMPDLPDLSAVEVFRDSLGQSCLYQGSRHVN

SEQ ID NO: 24303 - protein, 124 aa, Pseudacidovorax intermedius
  REGION 1..124: note = tr|A0A147H7N4|A0A147H7N4_9BURK 6-carboxy-5,6,7,8-tetrahydropterin synthase; OS = Pseudacidovorax intermedius OX=433924 GN=NS331_04025; PE = 3 SV=1
MDFEFELSQRFFFDAAHTLRRAHETAGSLRVHGHTYHGEVSVRGRRDATSGMVVDLAVLRAEIEAVRGTLDHHLLDEVPGLGTPTLENLCAYIATALRARQLPVSAVRVWREAGGDSCRLVLPH

SEQ ID NO: 24304 - protein, 124 aa, Pseudacidovorax intermedius
  REGION 1..124: note = tr|A0A370F5L3|A0A370F5L3_9BURK 6-carboxy-5,6,7,8-tetrahydropterin synthase; OS = Pseudacidovorax intermedius OX=433924 GN=DFR41_1134; PE = 3 SV=1
MEFEFELSQRFFFDAAHTLRRAHDTASSLRVHGHTYHAEVSVQGARDAATGMVVDLAVLRAEIETLRQTLDHHLLDEVPGLGTPTLENLCAYIATALRERQLPVSAVRVWREAGGDSCRLVLPR

SEQ ID NO: 24305 - protein, 290 aa, unidentified
  source 1..290: note = Pseudanabaena biceps
  REGION 1..290: note = tr|L8N7M5|L8N7M5_9CYAN Uncharacterized protein; OS = Pseudanabaena biceps PCC 7429 OX=927668; GN = Pse7429DRAFT_0530 PE=4 SV=1
MAKCVINRRAEFSASHRYWLPEIPPEENLAKFGACTNFPPHGHNYVMYVGMVGEIDHTGMVLNLSDVKHTIAREVTTQLNFSYLNQAWEEFQETLPTTENIARVIWQRLEAHLPLVNIRLYEHPELWADYQGNNMQAHLTISTHFSAAHRLALDTLSLEENTAIYGKCARVNGHGHNYHLEVAIAGDIDPRTGMIADLCAFQNAIDKYVLEPMDHTFLNKDIPYFSEVVPTAENIAVYIQKLLTKPIREIGAKLHSIKLIESPNNSCEVYGEYQLSDIEHSLEEALAKAS

SEQ ID NO: 24306 - protein, 290 aa, unidentified
  source 1..290: note = Pseudanabaena frigida
  REGION 1..290: note = tr|A0A2W4W8E5|A0A2W4W8E5_9CYAN 6-pyruvoyl tetrahydropterin synthase OS=Pseudanabaena frigida; OX = 945775 GN=DCF19_09450 PE=4 SV=1
MAKCVINRRAEFSASHRYWLPEIPDEENLAKFGACTNFPPHGHNYVLYVGMQGEIDNTGMVLNLSDVKHTIAREVTAQLNFSYLNQAWEEFQQTLPTTENIARIIWQRLEPYLPLVNIRLYEHPELWADYKGNDMQAYLTISTHFSAAHRLALDALSLEENTAIYGKCARVHGHGHNYHLEVAIAGEIDPRTGMIADLSDFQKALDLYVLDPMDHTFLNKDIPYFAEVVPTAENIAVYIQKVLTQPIREIGAKLHSIKLIESPNNSCEVYGEYQLSDIEYSLEEALAKSA

SEQ ID NO: 24307 - protein, 290 aa, Pseudanabaena sp.
  REGION 1..290: note = tr|A0A256BIA4|A0A256BIA4_9CYAN 6-pyruvoyl tetrahydropterin synthase OS=Pseudanabaena sp. SR411; OX = 1980935 GN=B9G53_06810 PE=4 SV=1
MAKCVINRRAEFSASHRYWLPEIPDEENQAKFGLCTNFPPHGHNYVLYVGMQGEIDNTGMVLNLSDVKHTIAREVTTQLNFSYLNQAWEEFQQTLPTTENIARVIWQRLAPHLPLVNIRLYEHPELWADYQGNDMQAHLTVSTHFSAAHRLALDTLSLEENTAIYGKCARVHGHGHNYHLEVSIAGEIDPRTGMIADLGDFQKALDQYVLDPMDHTFLNKDIPYFAEVVPTAENIAVYIQKVLTQPIREIGAKLHSIKLIESPNNSCEVYGEYQLSEIEHSLEEALAKSA

SEQ ID NO: 24308 - protein, 290 aa, Pseudanabaena sp.
  REGION 1..290: note = tr|A0A2Z5WUH4|A0A2Z5WUH4_9CYAN 6-pyruvoyl tetrahydropterin synthase OS=Pseudanabaena sp. ABRG5-3; OX = 685565 GN=ABRG53_0695 PE=4 SV=1
MAKCVINRRAEFSASHRYWLPEIPDEENLAKFGACTNFPPHGHNYVLFVGMQGEIDHTGMVLNLSDVKQIIAREITTQLNFSYLNQAWEEFQQTLPTTENIARVIWQRLAPYLPLVNIRLYEHPELWADYQGNDMQAHLTISTHFSAAHRLALDTLSLEENSAIYGKCARVHGHGHNYHLEVSISGEIDPRTGMIADLSDFQKALDQYVLDPMDHTFLNKDIPYFAEVVPTAENIAVYIQKVLTQPIREIGAKLHSIKLIESPNNSCEVYGEYQLSDIEHSLEEALAKAA

SEQ ID NO: 24309 - protein, 139 aa, unidentified
  source 1..139: note = Pseudarcicella hirudinis
  REGION 1..139: note = tr|A0A1I5MGX5|A0A1I5MGX5_9BACT 6-pyruvoyltetrahydropterin/6-carboxytetrahydropterin synthase OS=Pseudarcicella hirudinis OX=1079859; GN = SAMN04515674_101301 PE=4 SV=1
MVYVSRKEHFNAAHRLYNPNWTEEKNREVFGPCANINWHGHNFELIVTVKGKPDYDTGFVIDLKVLGDIIKTEVIEKVDHKNLNLDVDFMQGKMASCEIFVMEIWNILAPKIEAASSTARLHSIQLFETQKNFVEYFGE

SEQ ID NO: 24310 - protein, 139 aa, unidentified
  source 1..139: note = Pseudarcicella hirudinis
  REGION 1..139: note = tr|A0A1I5N407|A0A1I5N407_9BACT 6-carboxy-5,6,7,8-tetrahydropterin synthase; OS = Pseudarcicella hirudinis OX=1079859; GN = SAMN04515674_101569 PE=3 SV=1
MTLKKVAVFRKEHFNAAHRLNNPNWSEEKNERVYGKCNNYNFHGHNYDLVVQVVGPLDPETGYVMDMKLLSELIKEEILDRFDHKNLNLDTEEFKDLNPSAENIAIVIYDKLRNKLKTELELKIRLYETERNFVEYPVG

SEQ ID NO: 24311 - protein, 139 aa, unidentified
  source 1..139: note = Pseudarcicella sp.
  REGION 1..139: note = tr|A0A2S2DVF6|A0A2S2DVF6_9BACT 6-carboxy-5,6,7,8-tetrahydropterin synthase; OS = Pseudarcicella sp. HME7025 OX=2183547 GN=HME7025_01525; PE = 3 SV=1
MELPRVSVFRKEHFNAAHRLYNTNWSDEKNQEVFGLCNNPNFHGHNYELIVQITGTINPETGYVIDMKEVSQLVQKEIIQKFDHKNLNLDVPEFANLNPTAENIALVIYQKMRAVLATNFDLKIRLYETERNFVEFPAH

SEQ ID NO: 24312 - protein, 140 aa, unidentified
  source 1..140: note = Pseudarcicella sp.
  REGION 1..140: note = tr|A0A2S2DUY9|A0A2S2DUY9_9BACT 6-pyruvoyltetrahydropterin synthase OS=Pseudarcicella sp. HME7025 OX=2183547 GN=queD PE=4 SV=1
MVYVIRKEHFNAAHRLYNPNWSEEKNDEVFGPCANKNWHGHNFELIVTVKGNPDPETGFVFDLKELGKLIKKEIIDKVDHKNLNMDVDFMSGKLASCENLVMEFWKILAPKIQSASTSAQLHKIHLVETNKNSVEYYGEI

SEQ ID NO: 24313 - protein, 131 aa, unidentified
  source 1..131: note = Pseudarthrobacter chlorophenolicus
  REGION 1..131: note = tr|B8HCK8|B8HCK8_PSECP Uncharacterized protein; OS = Pseudarthrobacter chlorophenolicus (strain ATCC 700700 / DSM 12829 / CIP 107037 / JCM 12360 / KCTC 9906 / NCIMB 137 94 / A6) OX=452863 GN=Achl_0796 PE=4 SV=1
MFSLTVRRHFMIAHSLPREAFGPAQGLHGATFVAEVAFRRRALNDNAIVLDIGAAGTVIEEVLDGLNYKNLDEHPDFEGKLSTTEALAQYIAQAVAAKISNDDDGRHLDGIDVTLRENPDAWATFSLDLNA

SEQ ID NO: 24314 - protein, 131 aa, unidentified
  source 1..131: note = Pseudarthrobacter equi
  REGION 1..131: note = tr|A0A1H1VNC4|A0A1H1VNC4_9MICC 6-pyruvoyltetrahydropterin/6-carboxytetrahydropterin synthase OS=Pseudarthrobacter equi OX=728066; GN = SAMN04489743_1049 PE=4 SV=1
MFSLTVRRHFMIAHSLPREAFGPAQGLHGATFVAEVAFRRRALNDNAIVLDIGAAGTVIEEVLDGLNYKNLDEHPDFEGKLSTTEALAQYIAQAVAEKISDDDDGRHLDGIDVTLRENPDAWATFSLDLNA

SEQ ID NO: 24315 - protein, 137 aa, unidentified
  source 1..137: note = Pseudarthrobacter phenanthrenivorans
  REGION 1..137: note = tr|F0M126|F0M126_PSEPM 6-pyruvoyl-tetrahydropterin synthase OS=Pseudarthrobacter phenanthrenivorans (strain DSM 18606 / JCM 16027 / LMG 23796 / Sphe3) OX=930171 GN=A sphe3_07010 PE=4 SV=1
MFSLTVRRHFMIAHSLPREAFGPAQALHGATFVAEVAFRRRTLNDDAIVLDIGAAGTIIEEVLAGLNYRNLDEHPDFEGKLTTTEALAHYIARSVAEKLKDDDDGAQLAGIDVTLRENPDAWATFSLDLPAVDLPAS

SEQ ID NO: 24316 - protein, 131 aa, unidentified
  source 1..131: note = Pseudarthrobacter phenanthrenivorans
  REGION 1..131: note = tr|A0A0B4DEA8|A0A0B4DEA8_9MICC 6-pyruvoyl tetrahydrobiopterin synthase OS=Pseudarthrobacter phenanthrenivorans OX=361575 GN=RM50_09050 PE=4 SV=1
MFSLTVRRHFMIAHSLPREAFGPAQGLHGATFVAEVAFRRRALNDDAIVLDIGAAGTIIEEVLAGLNYRNLDEHPDFKDKLSTTEALAEYVAQQVAARIKDTNDGPELAGIEVTLRENPDAWATYSLDLTA

SEQ ID NO: 24317 - protein, 132 aa, unidentified
  source 1..132: note = Pseudarthrobacter siccitolerans
  REGION 1..132: note = tr|A0A024H6M1|A0A024H6M1_9MICC Uncharacterized protein OS=Pseudarthrobacter siccitolerans OX=861266; GN = ARTSIC4J27_3501 PE=4 SV=1
MFSLTVRRHFMIAHSLPREAFGPAQALHGATFVAEVTFRRRTLNDNAIVLDIGAAGTLIEEVLAGLNYRNLDEHPDFEGKLSTTEALAEYIAQSVAEKLKEDDDGGQLAGIDVTLRENPDAWATYSLDLPAA

SEQ ID NO: 24318 - protein, 131 aa, unidentified
  source 1..131: note = Pseudarthrobacter sp.
  REGION 1..131: note = tr|A0A5C4IVJ4|A0A5C4IVJ4_9MICC 6-carboxytetrahydropterin synthase OS=Pseudarthrobacter sp. NamE5 OX=2576839 GN=FDW84_05410 PE=4 SV=1
MFSLTVRRHFMIAHSLPREAFGPAQGLHGATLVAEVTFRRRRLNDNAIVLDIGAAGTIIEEVLARLDYRNLDEHPDFAGKLTTTEALAEYVARAVADRLKDDDDGGRLAGIDVTLRENPDAWATFALDLTA

SEQ ID NO: 24319 - protein, 131 aa, unidentified
  source 1..131: note = Pseudarthrobacter sp.
  REGION 1..131: note = tr|A0A365D4K8|A0A365D4K8_9MICC 6-carboxytetrahydropterin synthase OS=Pseudarthrobacter sp. AG30 OX=2249742 GN=DC347_05945 PE=4 SV=1
MFSLTVRRHFMIAHSLPREAFGPAQALHGATFVAEVSFRRRALNTDAIVLDIGAAGTIIEDVLGGLNYRNLDEHPDFEGKLTTTEALAEYIARKVAARIKDTADGPELAGIDVTLRENPDAWATYALDLSD

SEQ ID NO: 24320 - protein, 133 aa, unidentified
  source 1..133: note = Pseudarthrobacter sulfonivorans
  REGION 1..133: note = tr|A0A0U3GP17|A0A0U3GP17_9MICC 6-pyruvoyl tetrahydrobiopterin synthase OS=Pseudarthrobacter sulfonivorans OX=121292 GN=AU252_06895 PE=4 SV=1
MFSLTVRRHFMIAHSLPREVFGPAQALHGATFVAEVTFRRRALNQDSIVLDIGAAGGIIENVLSGLNYKNLDEHPDFEGKLSTTEALAEYIAHAVAAKLTDDGDGDGRELAGIDVTLRENPDAWATYTLDLSA

SEQ ID NO: 24321 - protein, 120 aa, unidentified
  source 1..120: note = Pseudescherichia vulneris
  REGION 1..120: note = tr|A0A090VNB7|A0A090VNB7_PSEVU 6-carboxy-5,6,7,8-tetrahydropterin synthase; OS = Pseudescherichia vulneris NBRC 102420 OX=1115515; GN = queD PE=3 SV=1
MSTTLFKDFIFEAAHRLPHVPEGHKCGRLHGHSFMVRLEITGEVDPHTGWIMDFSELKAAFKPTYDRLDHYYLNDIPGLENPTSEVLAKWIWEEMKPLVPLLSAVTIKETCTAGCVYRGE

SEQ ID NO: 24322 - protein, 293 aa, unidentified
  source 1..293: note = Pseudidiomarina sp.
  REGION 1..293: note = tr|A0A443Z5S3|A0A443Z5S3_9GAMM Uncharacterized protein OS=Pseudidiomarina sp. R04H25 OX=2487740; GN = EGC76_02870 PE=4 SV=1
MQLFVNDLTVIDFSYLCPERGMVGESWIVDIILDGSLNEQSMVLDFGRVKKQIKRIIDSAVDHKLAVPAEHEYTQVSHHEDGNSYWVDFMRPNNRSIHLFCPADAFAFIDAQQVTMASITDYLRAVIKRELPDNVQGLELQLRAEEIPGAFYHYTHGLKKHDGNCQRIAHGHRSRIYIALNDQRDTTLEQFWATTWQDIYLGSEEDIVAFDVLQLSEHSQQLSPSTHVAYSYTADQGLFELLVPTAENYTIPTDSTVECIATYLAQKIKHEQPDASVKVTGFEGVGKGAIGYA

SEQ ID NO: 24323 - protein, 175 aa, unidentified
  source 1..175: note = Pseudoalteromonadaceae bacterium
  REGION 1..175: note = tr|A0A2D7MWR1|A0A2D7MWR1_9GAMM QueD like 2; OS = Pseudoalteromonadaceae bacterium OX=2026783; GN = CMK62_03280 PE=4 SV=1
MQIDDLLITESQLKTRLNKSVHENRRGEFSLLLAMLSHDALDFSQFHLPKIETHSAYVDEKQLRERFGAGPKQLLAPEKFDMTIGQKHASVIVQQGEQAGMKAIKLSHCLNPEPLAIRDDKLHIPLTVIDNCELSVRRRLNDTHTALASPQMDAAAFYDDLTNEAIHKPLLVANA

SEQ ID NO: 24324 - protein, 285 aa, unidentified
  source 1..285: note = Pseudoalteromonadaceae bacterium
  REGION 1..285: note = tr|A0A2D6VMM9|A0A2D6VMM9_9GAMM Uncharacterized protein OS=Pseudoalteromonadaceae bacterium OX=2026783; GN = CMK61_03125 PE=4 SV=1
MILFVNSLTVIDFSYLCNKRGAVGESWIVDLTLHGQLNDESMVLDFGLVKKQIKGIIDNCIDHKLAVPATLNGSLTQHAEHSVLDCHFGDNYHLAMSAPNQAYCLIDADVIDEKSVTEFLIKTIMPELPSNIEKIEINLYPEHSQSFYYHYSHGLKKHDGNCQRIIHGHRSQIGISLDGMAMPRLQKEWADKWEDIYLATAEDEINKSDLKHVTAQENDVCFAYTSQQGYFEMAIDKSRCDILPCDTTVECIADYLSSQVKNQYPDSEVKITAYEGVGKGSISYA

SEQ ID NO: 24325 - protein, 285 aa, Pseudoalteromonas agarivorans
  REGION 1..285: note = tr|A0A290RNF1|A0A290RNF1_9GAMM Uncharacterized protein OS=Pseudoalteromonas agarivorans DSM 14585; OX = 1312369 GN=PAGA_a2016 PE=4 SV=1
MILFVNSLTVIDFSYLCNKRGAVGESWIVDLTLHGKLNEESMVLDFGLVKKQIKGIIDDCLDHKLAIAKGLNGTVQEFDSHKTLDCTFGDNHHLAMSAPHQAYCMIDAPEISVESVTEFLIDTILPKLPGNIEKIELSLKPEHSQSFYYHYSHGLKKHDGNCQRIIHGHRSQIGISLDGMSMPRLQKQWAEKWQDIYLATREDQIAASELKHISAKNDDVCFAYTAAQGYFEMAISESRCDILPVDTTVECIAQHLAEQVKAEYPDKDVKITAYEGVGKGSISYA

SEQ ID NO: 24326 - protein, 285 aa, Pseudoalteromonas agarivorans
  REGION 1..285: note = tr|N6W2Y1|N6W2Y1_9GAMM Uncharacterized protein; OS = Pseudoalteromonas agarivorans S816 OX=1307437; GN = J139_04110 PE=4 SV=1
MILFVNSLTVIDFSYLCNKRGAVGESWIVDLTLHGKLNEESMVLDFGLVKKQIKGIIDDCLDHKLAIAKGLNGTVQEFDSHKTLDCTFGDNHHLAMSAPHQAYCMIDAPEISVESVTEFLIDTILPKLPGNIEEIELSLKPEHSQSFYYHYSHGLKKHDGNCQRIIHGHRSQIGISLDGMSMPRLQKQWAEKWQDIYLATAEDQIAASELKHISAKKDDVCFAYTAAQGYFEMAISESRCDILPVDTTVECIAQHLAEQVKAEYPNKDVKITAYEGVGKGSISYA

SEQ ID NO: 24327 - protein, 175 aa, Pseudoalteromonas aliena
  REGION 1..175: note = tr|A0A1Q2H0U4|A0A1Q2H0U4_9GAMM QueD like 2; OS = Pseudoalteromonas aliena OX=247523 GN=B0W48_15065 PE=4; SV = 1
MQIDDLLITENQLSTRLNKSVHEQRRGEFSLLLAMLSHDALDFSQFHLPKTELEDAIITDDALRKQLGVGPKQLLAPDKFDMLIGQHNASLLISAGERSGMNDIKLNHCLNPEPLFIRDDVTHIPLNIIDNCELAVRRRIKNTETQLSNPAMDAAAFYDLLNNDALHEPLHLVTA

SEQ ID NO: 24328 - protein, 285 aa, Pseudoalteromonas aliena
  REGION 1..285: note = tr|A0A1Q2H1M2|A0A1Q2H1M2_9GAMM Uncharacterized protein OS=Pseudoalteromonas aliena OX=247523; GN = B0W48_16710 PE=4 SV=1
MILFVNSLTVIDFSYLCNKRGAVGESWIVDLTLHGKLNKESMVLDFGLVKKQIKGIIDECIDHRLAIPTGLNGTVSAFDEHKTLDCTFGENNHLAMSAPHQAYCMINADEVTVESVTDFLVATILPKLPDNIEKIELSLKPEHSQSFYYHYSHGLKKHDGNCQRIIHGHRSQIGISLDGISMPRLQKEWSLKWQDIYLATSEDQINAPDLKHITAKVDDVCFAYTSAQGYFEMAISESRCDILPVDTTVECIAEHVAGQIKAQYPEKAVKVTAYEGVGKGSISYV

SEQ ID NO: 24329 - protein, 173 aa, unidentified
  source 1..173: note = Pseudoalteromonas amylolytica
  REGION 1..173: note = tr|A0A1S1MS19|A0A1S1MS19_9GAMM QueD like 2; OS = Pseudoalteromonas amylolytica OX=1859457 GN=BET10_18985; PE = 4 SV=1
MQFDVVLTREDQLGNALSVSVTEHRRADFSMLLAMLSQDALEFSQFHLPESELNEADLSELALKKELQIGPQQALAPETYDMSIGQNNASRLAQSSLTTLKLQQCLSPEPLAIRNDKTHIPLEVVDNCEIAVRKRLESIKSGASIEEKPAMNAAGFYDQLASGQMQSALQLTA

SEQ ID NO: 24330 - protein, 288 aa, unidentified
  source 1..288: note = Pseudoalteromonas amylolytica
  REGION 1..288: note = tr|A0A1S1MVD1|A0A1S1MVD1_9GAMM Uncharacterized protein OS=Pseudoalteromonas amylolytica OX=1859457; GN = BET10_12040 PE=4 SV=1
MILFVDSLTVIDFSYLCNQRGAVGESWIVDLTLHGQLNDESMVLDFALVKKQIKRIIDDTIDHKLAIAKGLNGTVAMKDGRVELDCQFGQGDQSHHLAMSAPEQAVCLLDGDKVDEQSVIEFLKSVIMAQMPENVKDIGIELRPEQAESFYYHYSHGLKKHDGNCQRIIHGHRSQIGVFVDGMKHPRLQKQWASKWQDIYLGTEEDIITPQQLRNVQAHEGDVCFAYDATQGYFELAISAKRCDILPCDTTVECIAEYLAQQIKLESANREIMVKAYEGVGKGAIAYA

SEQ ID NO: 24331 - protein, 285 aa, Pseudoalteromonas arctica
  REGION 1..285: note = tr|A0A290S388|A0A290S388_9GAMM Uncharacterized protein OS=Pseudoalteromonas arctica A 37-1-2 OX=1117313; GN = PARC_a2063 PE=4 SV=1
MILFVNSLTVIDFSYLCNKRGAVGESWIVDLTLHGKLNEESMVLDFGLVKKQIKGIIDECIDHRLAIPTGLNGTVSEFDEHKTLDCTFGENNHLAMSAPHQAYCMINADEVTVESVTEFLIATILPKLPDNIEKIELSLKPEHSQSFYYHYSHGLKKHDGNCQRIIHGHRSQIGISLDGISMPRLQKEWSQKWEDIYLATSEDQINAPDLKHITAKAGDVCFAYTSAQGYFEMAISESRCDILPVDTTVECIAEHVAGQIKAQYPEKAVKVTAYEGVGKGSISYV

SEQ ID NO: 24332 - protein, 291 aa, Pseudoalteromonas atlantica
  REGION 1..291: note = tr|Q15QF5|Q15QF5_PSEA6 Uncharacterized protein; OS = Pseudoalteromonas atlantica (strain T6c / ATCC BAA-1087) OX=342610 GN=Patl_3377 PE=4 SV=1
MQLFVNDLTVMDFSYLCPKRGMVGESWIVDVVLDGDLNEESMVLDFSKVKKQLKHLIDEYVDHKLLIPVEHEYSHIWRDEKNDRVSVDFMRPEGRSIHLNCPSEAYAFVYSKHVTMSSVSQYLKQVIATHLPDNVAGLELTLRAEVINTPYYHYTHGLKKHDGNCQRIAHGHRSKITIVENQHESLEWQQYWAERWCDIYVGSNEDLVSADKVNFVKNQTDFTEHYLFGYESSQGWFELAIPKAETEMVDTDTTVECLAQYIADEQKRLVPESEFKIFAFEGVGKGAIAYA

SEQ ID NO: 24333 - protein, 285 aa, Pseudoalteromonas atlantica
  REGION 1..285: note = tr|A0A510ZGF0|A0A510ZGF0_PSEAF Uncharacterized protein OS=Pseudoalteromonas atlantica OX=288 GN=queD PE=4; SV = 1
MILFVNSLTVIDFSYLCNKRGAVGESWIVDLTLHGKLNEESMVLDFGLVKKQIKGIIDDCLDHKLAIAKGLNGTVQEFDSHKTLDCTFGDNHHLAMSAPHQAYCMIDAPEISVESVTEFLIDTILPKLPGNIEKIELSLKPEHSQSFYYHYSHGLKKHDGNCQRIIHGHRSQIGISLDGMSMPRLQKQWAEKWQDIYLATREDQIAASELKHISAKNDDVCFAYTAAQGYFEMAISESRCDILPVDTTVECIAQHLAEQVKAEYPNKDVKITAYEGVGKGSISYA

SEQ ID NO: 24334 - protein, 173 aa, Pseudoalteromonas byunsanensis
  REGION 1..173: note = tr|A0A1S1N5X3|A0A1S1N5X3_9GAMM QueD like 2; OS = Pseudoalteromonas byunsanensis OX=327939 GN=BIW53_12530; PE = 4 SV=1
MQFDVVLTREDQLGNALSVSVTEHRRADFSMLLAMLSQDALEFSQFHLPESELIEAELSESALKKELQIGPQQALAPETYDMLIGQDNAARLAQSSLTTLKLQQCLSPEPLAIRNDKAHIPLVVVDNCEIAVRKRLESVKNGASKEEKPAMNAAGFYDQLASGQMQSALQLTA

SEQ ID NO: 24335 - protein, 285 aa, Pseudoalteromonas byunsanensis
  REGION 1..285: note = tr|A0A1S1NAZ6|A0A1S1NAZ6_9GAMM Uncharacterized protein OS=Pseudoalteromonas byunsanensis OX=327939; GN = BIW53_04300 PE=4 SV=1
MILFVDSLTVIDFSYLCNQRGAVGESWIVDLTLHGQLNNESMVLDFALVKKQIKRIIDDTIDHKLAIAKGLNGTVDIKDGRVELDCQFGDGYHLAMSAPEQSVCLLDGDKVDEHSVVEFLKSVIMPKMPENVKDIGIELRAEKAESFYYHYSHGLKKHDGNCQRIIHGHRSQIGVFVDGMKHPRLQKLWASKWQDIYLGTEEDIIQPQQLRHVKALDGDVCFAYDATQGYFELAISRKRCDILPCDTTVECIAEYLAHQIKLESAEKEIMVKAYEGVGKGAIAYA

SEQ ID NO: 24336 - protein, 175 aa, Pseudoalteromonas carrageenovora
  REGION 1..175: note = tr|A0A2K4X838|A0A2K4X838_PSEVC QueD like 2; OS = Pseudoalteromonas carrageenovora IAM 12662 OX=1314868; GN = PCAR9_A20933 PE=4 SV=1
MQIDDLLITESQLNSKLNNSVHENRRGEFALLLAMLSHDALDFSQFHLPKTEIDSTATSEDSLRKKFGAGPKQSLAPGEFDMLIGQFNAALISEHGAQAGMKSIKLNQYLKPEPLTIRDDDKHIPLNVLDNCEIAVRRRIKSEYTQLANPPIDASAFYDSLNDDSIHQPLHLIAV

SEQ ID NO: 24337 - protein, 285 aa, Pseudoalteromonas carrageenovora
  REGION 1..285: note = tr|A0A2K4X970|A0A2K4X970_PSEVC 6-pyruvoyl tetrahydropterin synthase OS=Pseudoalteromonas carrageenovora IAM 12662 OX=1314868 GN=PCAR9_A30030 PE=4; SV = 1
MILFVNSLTVIDFSYLCNKRGAVGESWIVDLTLHGKLNDKSMVLDFGLVKKQIKGIIDDCIDHRLAIPSGLTGSVNEFENHKTLDCTFGDNKHLAMSAPHQAYCMIDAEQVNVESVTEFLIATILPKLPDNIEKIELELKPEHSQSFYYHYSHGLKKHDGNCQRIIHGHRSQIGISLDGISMPRLQKEWSQKWEDIYLATSEDKIDAKDLKHVSAKSDDVCFAYTSAQGYFEMAISESRCDILPVDTTVECIAEHVAGQVKAQYPDKDVKITAYEGVGKGSISYA

SEQ ID NO: 24338 - protein, 285 aa, Pseudoalteromonas citrea
  REGION 1..285: note = tr|U1JPS6|U1JPS6_9GAMM Uncharacterized protein; OS = Pseudoalteromonas citrea DSM 8771 OX=1117314; GN = PCIT_10819 PE=4 SV=1
MILFVDALTVIDFSYLCNRRGAVGESWIVDLTLHGQLNDESMVLDFALVKKQIKKIIDETIDHKLAIANGVNGEVSVANERVELDCLFGDNYHLAMSAPSEAVCLLPSEHVDESAVITFLKSVIMPAMPNNVKDIGIELRPEPSTSFYYHYSHGLKKHDGNCQRIVHGHRSLIGIALDGMSMPRLQKEWAMKWQDIYLGTLEDQVSAADLKHVTALSTDYCFAYEATQGYFELAISQARCDVLPCDTTVECIAEYLACEIKKSHPSQQVTVKAYEGVGKGAIAYA

SEQ ID NO: 24339 - protein, 285 aa, Pseudoalteromonas denitrificans
  REGION 1..285: note = tr|A0A1I1FZA6|A0A1I1FZA6_9GAMM 6-pyruvoyl tetrahydropterin synthase OS=Pseudoalteromonas denitrificans DSM 6059 OX=1123010 GN=SAMN02745724_00760; PE = 4 SV=1
MILFVNDLTVIDFSYLCEKRGAVGESWIVDLTLHGSLNEESMILDFGLVKKQIKKIIDEKLDHKLALPINSNISVKSSNTQTNINFSFADEKEINISAPHEAFCSINATNITEQTVIDYLTAQIMPLLPKNIEKIELTLRAEDTNGFYYHYSHGLKKHDGNCQRIVHGHRSTIGIFENDMKSVRLQKEWALRWEDIYLGSAEDIIVASLLKFVSPVENAWHFAYEAPQGYFELSISKSQCEILPVDTTVECIAQYIADELKSNAKSNTYKVIAYEGVGKGAIAYA

SEQ ID NO: 24340 - protein, 285 aa, Pseudoalteromonas distincta
  REGION 1..285: note = tr|F3BL45|F3BL45_9GAMM Uncharacterized protein; OS = Pseudoalteromonas distincta OX=77608 GN=PH505_bg00240; PE = 4 SV=1
MILFVNSLTVIDFSYLCNKRGAVGESWIVDLTLHGKLNEESMVLDFGLVKKQIKGIIDECIDHRLAIPTGLNGTVSEFDEHKTLDCTFGENNHLAMSAPHQAYCMINADEVTVESVTEFLIATILPKLPDNIEKIELSLKPEHSQSFYYHYSHGLKKHDGNCQRIIHGHRSQIGISLDGISMPRLQKEWSQKWEDIYLATSEDQINAADLKHIPAKAGDVCFAYTSAQGYFEMAISESRCDILPVDTTVECIAEHVAGQIKAQYPEKAVKVTAYEGVGKGSISYV

SEQ ID NO: 24341 - protein, 285 aa, Pseudoalteromonas distincta
  REGION 1..285: note = tr|A0A5B0UGZ1|A0A5B0UGZ1_9GAMM Uncharacterized protein OS=Pseudoalteromonas distincta OX=77608; GN = EU511_08160 PE=4 SV=1
MILFVNSLTVIDFSYLCNKRGAVGESWIVDLTLHGKLNEESMVLDFGLVKKQIKGIIDECIDHRLAIPTGLNGTVSEFDEHKTLDCTFGENNHLAMSAPHQAYCMINADEVTVESVTEFLIATILPKLPDNIEKIELSLKPEHSQSFYYHYSHGLKKHDGNCQRIIHGHRSQIGISLDGISMPRLQKEWSQKWEDIYLATSEDQINAADLKHIPAKAGDVCFAYTSAQGYFEMAISESRCDILPVDTTVECIAEHVAGQIKAQYPEKAVKVMAYEGVGKGSISYV

SEQ ID NO: 24342 - protein, 285 aa, Pseudoalteromonas elyakovii
  REGION 1..285: note = tr|A0A558I7E8|A0A558I7E8_9GAMM Uncharacterized protein OS=Pseudoalteromonas elyakovii OX=81037; GN = FQP81_04145 PE=4 SV=1
MILFVNSLTVIDFSYLCNKRGAVGESWIVDLTLHGKLNEESMVLDFGLVKKQIKGIIDECIDHRLAIPTGLNGTVSEFDEHKTLDCTFGENNHLAMSAPHQAYCMINANEVTVESVTEFLIATILPKLPDNIEKIELSLKPEHSQSFYYHYSHGLKKHDGNCQRIIHGHRSQIGISLDGISMPRLQKEWSQKWEDIYLATSEDQINAPDLKHLTAKADDVCFAYTSAQGYFEMAISESRCDILPVDTTVECIAEHVAGQIKAQYPEKAVKVTAYEGVGKGSISYV

SEQ ID NO: 24343 - protein, 175 aa, Pseudoalteromonas elyakovii
  REGION 1..175: note = tr|A0A558HPI1|A0A558HPI1_9GAMM QueD like 2; OS = Pseudoalteromonas elyakovii OX=81037 GN=FQP81_17640; PE = 4 SV=1
MQIDDLLITESQLNSRLNNSVHENRRGEFSLLLAMLSHDALDFSQFHLPKTEIDNLVIEEEALRKQLGAGPKQLLAPDEYNMLVGQFNASLISQEGERCGMTSIKLRQCLKPEPLAIRNDDKHIPLNIIDNCELAVRRRIKSEQTQLANPPIDAAAFYDSLNNDAIHQPLQLIAV

SEQ ID NO: 24344 - protein, 285 aa, Pseudoalteromonas espejiana
  REGION 1..285: note = tr|A0A510XU37|A0A510XU37_9GAMM Uncharacterized protein OS=Pseudoalteromonas espejiana OX=28107 GN=queD; PE = 4 SV=1
MILFVNSLTVIDFSYLCNKRGAVGESWIVDLTLHGKLNEESMVLDFGLVKKQIKGIIDECLDHKLAIAKGLNGTVEEFAEHKTLDCTFGDSHHLAMSAPHQAYCMIDAPEITVESVTEFLIATILPQLPDNIEKIELSLKPEHSQSFYYHYSHGLKKHDGNCQRIIHGHRSQIGISLDGMSMPRLQKQWAEKWQDIYLATSEDQISASDLKHINAKSDDVCFAYTAAQGYFEMAISESRCDILPVDTTVECIAQHLAEQVKIEYPDKDVKITAYEGVGKGSISYA

SEQ ID NO: 24345 - protein, 175 aa, Pseudoalteromonas espejiana
  REGION 1..175: note = tr|A0A510XXZ0|A0A510XXZ0_9GAMM QueD-like protein; OS = Pseudoalteromonas espejiana OX=28107 GN=s4P PE=4 SV=1
MQIDDLLITESQLKTRLNKSVHENRRGEFSLLLAMLSHDALDFSEFHLPKSEMHNDYTDEETLRKRFGAGPKQLLAPEQFDMLIGQTHSSTIYEQGVATGMKNIKLTQYLNPEPLAIRDDKTHIPLTIIDNCELSVRRRIAKKHTDLTNPQMDAAAFYDDLNNDAVHKPLLLASA

SEQ ID NO: 24346 - protein, 285 aa, unidentified; identical to SEQ ID NO: 24340
  source 1..285: note = Pseudoalteromonas fuliginea
  REGION 1..285: note = tr|A0A063KTE4|A0A063KTE4_9GAMM 6-pyruvoyl tetrahydropterin synthase OS=Pseudoalteromonas fuliginea; OX = 1872678 GN=DC53_09995 PE=4 SV=1

SEQ ID NO: 24347 - protein, 175 aa, unidentified
  source 1..175: note = Pseudoalteromonas fuliginea
  REGION 1..175: note = tr|A0A5B0UPH7|A0A5B0UPH7_9GAMM QueD like 2; OS = Pseudoalteromonas fuliginea OX=1872678 GN=EU509_02950; PE = 4 SV=1
MQIDDLLITESQLSTRLNKSVHEQRRGEFSLLLAMLSQDALDFSQFHFPKTDIENPIVEEETLRKQFGSGPKQPLAPDEFNMLIGQHNAALLSNVGEHAGMSDIKLRHCLNPEPLSIRNDLAHIPLNVLDNCELAVRRRIKNKETQLSHPQMDVASFYDGLNDESLHQPLHLATA

SEQ ID NO: 24348 - protein, 285 aa, Pseudoalteromonas haloplanktis
  REGION 1..285: note = tr|Q3IGG7|Q3IGG7_PSEHT Uncharacterized protein; OS = Pseudoalteromonas haloplanktis (strain TAC 125); OX = 326442 GN=PSHAa1493 PE=4 SV=1
MILFVNSLTVIDFSYLCNKRGAVGESWIVDLTLHGKLNNESMVLDFGLVKKQIKGIIDECIDHRLAVPNNLNGVVSEFSDHKTLDCTFGDNHHLAMSAPHQAYCMINADEVTIASVTDFLIATILPQLPDNIEKIELSLKPEHNQSYYYHYSHGLKKHDGNCQRIIHGHRSQIGISLDGISMPRLQKEWSQKWQDIYLATAEDQIKADELQHVSAKAGDVCFAYTSAQGYFEMAISESRCDILPSDTTVECIAEYLAGQVKAQYPEKAVKITAYEGVGKGSISHA

SEQ ID NO: 24349 - protein, 285 aa, Pseudoalteromonas issachenkonii
  REGION 1..285: note = tr|A0A290SLD4|A0A290SLD4_9GAMM Uncharacterized protein OS=Pseudoalteromonas issachenkonii OX=152297; GN = PISS_a1696 PE=4 SV=1
MTLFVNSLTVIDFSYLCNKRGAVGESWIVDLTLHGKLNEESMVLDFGLVKKQIKGIIDECIDHRLAVPNNINGSINEFADHKTLDCTFGENKHIAMSAPHQAFCLIDTDKITIESVTEYLVATILPQLPDNIEKIELVLKPEHNQSFYYHYSHGLKKHDGNCQRIIHGHRSQIGISLGGISMPRLQKQWADKWQDIYLATSEDQISASELKHIIAKEDDVCFAYTAAQGYFEMAISESRCDILPIDTTVECIAEYIAGQVKLQHPEKDVKITAYEGVGKGSISYA

SEQ ID NO: 24350 - protein, 285 aa, Pseudoalteromonas lipolytica
  REGION 1..285: note = tr|A0A0P7D2N2|A0A0P7D2N2_9GAMM 6-pyruvoyl tetrahydropterin synthase OS=Pseudoalteromonas lipolytica; OX = 570156 GN=AOG27_15005 PE=4 SV=1
MILFVNSLTVIDFSYLCNKRGAVGESWIVDLTLHGQLNDESMVLDFGLVKKQIKGIIDNCIDHKLAVPATLNGSLTQHAEHSVLDCHFGDNYHLAMSAPNQAYCLIDADVIDEKSVTEFLIKTIMPELPSNIEKIEINLYPEHSQSFYYHYSHGLKKHDGNCQRIIHGHRSQIGISLDGMAMPRLQKEWADKWEDIYLATAEDEINKSDLKHVTAQENDVCFAYTSQQGYFEMAIDKSRCDILPCDTTVECIADYLSSQVKNQYPDTEVKITAYEGVGKGSISYA

SEQ ID NO: 24351 - protein, 199 aa, Pseudoalteromonas lipolytica
  REGION 1..199: note = tr|Z5XR39|Z5XR39_9GAMM Putative QueD like protein; OS = Pseudoalteromonas lipolytica SCSIO 04301 OX=1452721; GN = AT00_09585 PE=4 SV=1
MEFALLSILVLVVVASVVASKFSDDGGNPYPFTRKQSVFTQVESAFLNLLERAVGDQYKIVSRVKLIDLIDCKQGLSVKAKRAAMTKAKGKQLDYVLIDKEKLTIVAAVDLVNNTNKDGHKAQRDWFVSGALEAAGIPHIRMKVKSGYQPREVRDAIMFKLGKPAAAPIRPTRNRVTKPAVLSPSQAKAHTSSTALAEI

SEQ ID NO: 24352 - protein, 196 aa, Pseudoalteromonas luteoviolacea
  REGION 1..196: note = tr|A0A167CEE7|A0A167CEE7_9GAMM Putative QueD like protein OS=Pseudoalteromonas luteoviolacea DSM 6061; OX = 1365250 GN=N475_06705 PE=4 SV=1
MELTLLAILALVVVASIVISKYTDAGGNPYPFNRKDSVFTTVEASFLQLLERAVGDKFKIVSRVKLVDVIECKPGLSKKARRSAITKAQNKQLDYVLVDKSTLNIVAAVDLVNNANKNGHKAQKDWFVSGALESAGIPHIRMKIKSGYKSPEVRAAILFKLGQKPEQTKPVRNRSYKPAVLSPSQAKAASTQLAEI

SEQ ID NO: 24353 - protein, 284 aa, Pseudoalteromonas luteoviolacea
  REGION 1..284: note = tr|A0A0C1QPG1|A0A0C1QPG1_9GAMM 6-pyruvoyl tetrahydropterin synthase OS=Pseudoalteromonas luteoviolacea OX=43657 GN=JF50_13760 PE=4 SV=1
MILFVDALTVIDFSYLCAKRGAVGESWIVDMTLHGQLNEESMVLDFAKVKKQIKAIIDNTIDHKLAIPSALNCQLNSDDGRTSFDYEFNGHHLAMSAPDEAVCIVEGDKIDEESVIAFLKQQILPKMPENVKDIDITLRAEETSSFYYHYSHGLKKHDGNCQRIIHGHRSLIGIFFDGVSMPRMQKEWSQKWEDIYLGTQEDLIEHAQLKYISAKDGDYSFAYESSQGYFEMCISQARCDILPCDTTVECIAEYLANEIKKENPDKEVKVRAYEGVGKGAIAYA

SEQ ID NO: 24354 - protein, 285 aa, Pseudoalteromonas marina
  REGION 1..285: note = tr|U1JLR7|U1JLR7_9GAMM Uncharacterized protein; OS = Pseudoalteromonas marina DSM 17587 OX=1117316; GN = PMAN_11991 PE=4 SV=1
MILFVNSLTVIDFSYLCNKRGAVGESWIVDLTLHGKLNDESMVLDFGLVKKQIKGIIDECIDHRLAIPNSINGSVTEFDDHKTLDCTFGDNHHLAMSAPHQAYCMIESDEINVESVTAFLVDTILPKLPSNIEKIELSLKPEHSQSFYYHYSHGLKKHDGNCQRIIHGHRSQIGISLDGISMPRLQKEWAMQWEDIYLATSEDQIEPQNLKHISARDNDVCFAYTSAQGYFEMAISETRCDILPIDTTVECIAGYIAGQVKAKHPEQNVKITAYEGVGKGAISYA

SEQ ID NO: 24355 - protein, 285 aa, unidentified
  source 1..285: note = Pseudoalteromonas neustonica
  REGION 1..285: note = tr|A0A558IXF3|A0A558IXF3_9GAMM Uncharacterized protein OS=Pseudoalteromonas neustonica OX=1840331; GN = FQP85_02970 PE=4 SV=1
MILFVNALTVIDFSYLCNKRGAVGESWIVDLTLHGKLNEESMVLDFGLVKKQIKGIIDQCIDHKLAIGNQINGQVENHADYTTLDCTFGDDHHLAMSAPNQAFCLIDADVINEQSVIEFLIATIMPQLPSNIDKIEIELKPEHSKSFYYHYSHGLKKHDGNCQRIIHGHRSQIGIALDGMAMPRLQKQWADKWQDIYLATAEDQIQAPQLQHISAKENDLCFAYTAAQGYFEMAISKERCDILPIDTTVECIAGYLAEQVKAQHPDNDVKVTAYEGVAKGSICYA

SEQ ID NO: 24356 - protein, 173 aa, unidentified
  source 1..173: note = Pseudoalteromonas neustonica
  REGION 1..173: note = tr|A0A558IGY8|A0A558IGY8_9GAMM QueD like 2; OS = Pseudoalteromonas neustonica OX=1840331 GN=FQP85_18620; PE = 4 SV=1
MQIDDLLITESQLNNRLAKSVSEHRRGEFALLLAMLSHDVLDFSQFHLPKTPFDAHASTPTEAQLREQLGAGPEQALAPDEFDMLIGQHNAQLLQQGSMADIRLRSCLAPEPLVIRDDKNHIPLMVIDNCELVVRKRHLDKETQLDHPQMDAAAFYDSLNNAELHQPLHLAQA

SEQ ID NO: 24357 - protein, 285 aa, Pseudoalteromonas nigrifaciens
  REGION 1..285: note = tr|A0A379HAS7|A0A379HAS7_9GAMM Queuosine biosynthesis protein QueD OS=Pseudoalteromonas nigrifaciens OX=28109 GN=NCTC10691_01662 PE=4 SV=1
MILFVNSLTVIDFSYLCNKRGAVGESWIVDLTLHGKLNDESMVLDFGLVKKQIKGIIDECIDHRLAVPNNLNGVVSEFSDHKTLDCTFGDNHHLAMSAPHQAYCMINADEVTIASVTDFLIATILPQLPDNIEKIELSLKPEHNQSYYYHYSHGLKKHDGNCQRIIHGHRSQIGISLDGISMPRLQKEWSQKWQDIYLATAEDQIKADDLQHVSAKAGDVCFAYTSAQGYFEMAISESRCDILPSDTTVECIAEYLAGQVKAQYPEKAVKITAYEGVGKGSISHA

SEQ ID NO: 24358 - protein, 284 aa, Pseudoalteromonas peptidolytica
  REGION 1..284: note = tr|A0A510UBE9|A0A510UBE9_9GAMM Uncharacterized protein OS=Pseudoalteromonas peptidolytica OX=61150; GN = queD PE=4 SV=1
MILFVDSLTVIDFSYLCPRRGAVGESWITDIVLHGDLNAESMVLDFAKVKKQIKQIIDEKLDHKLAIPSALSANTKHTNGRFELDLHIGDSHLAMSAPEQAVCMIEGEEVNEVNTIAYLKSVILPHLPDNVKDLDITLRPEATSGFYYHYSHGLKKHDGNCQRIIHGHRSLIGIKLNDVSMPRLQKQWADKWQDIYLGSEEDLISSAELKHIVAEEGDYAFAYTSSQGYFELAISKSRCDILPCDTTVECIAEYLAGQVKVQHPNDHVQVRAYEGVGKGAIAYA

SEQ ID NO: 24359 - protein, 285 aa, Pseudoalteromonas phenolica
  REGION 1..285: note = tr|A0A0S2K1B7|A0A0S2K1B7_9GAMM 6-pyruvoyl-tetrahydropterin synthase OS=Pseudoalteromonas phenolica OX=161398 GN=PP2015_1557 PE=4 SV=1
MILFVDALTVIDFSYFCNKRGPVGESWIADLTLHGDLNNESMVLDFALVKKQIKRIIDDTIDHKLAIPKRLNGTCSIENEQVKIDAQFGEEHHIAMYAPEQAVCLIDAETVNEQSVIEFLKQQIMPKMPENVKDIDIELRPEQTSSFYYHYSHGLKKHDGNCQRIVHGHRSLIGISLDNIVMPRLQKEWSRKWEDIYLGSEEDLINNSELKHIKALDSDYAFSYTSTQGYFELAISKARCDLLPCDTTVECIADYLATEIKKTHPDNAVKVKAFEGVGKGAIAYA

SEQ ID NO: 24360 - protein, 173 aa, Pseudoalteromonas phenolica
  REGION 1..173: note = tr|A0A4Q7INU8|A0A4Q7INU8_9GAMM QueD like 2; OS = Pseudoalteromonas phenolica OX=161398 GN=C1E23_12605; PE = 4 SV=1
MQLERILNKEHQLGDTLAKSVAQDRRADFALCLAMLSPNALDFSEFHLPESELIEPDRSEAALKKELNLGPQQQMAPTTFDMTIGQSNSRLLLEQGLTELRLRHCLSPEPLHIRDDKKHIELAIIDNCEPTVQAKIFAQRAGALEIDKPKIDAAGFYDQLASGEMQKAVQLSA

SEQ ID NO: 24361 - protein, 284 aa, unidentified
  source 1..284: note = Pseudoalteromonas piratica
  REGION 1..284: note = tr|A0A0A7EHQ3|A0A0A7EHQ3_9GAMM 6-pyruvoyl tetrahydropterin synthase OS=Pseudoalteromonas piratica; OX = 1348114 GN=OM33_10770 PE=4 SV=1
MILFVKDLTVIDFSYLCSARGPLGESWIVDLEMHGDLNEESMVLDFSLVKKQVKRIIDDVIDHKLAIATQGDAIVSTSGEQTNVNFSFGNHQLAVSSPHQAFCLIDTDKINEASVKQFLEDTILPQLPKNVSKIVLNLRPEHTNGFYYHYSHGLKKHDGNCQRIIHGHRSTIEIEENGMRSPRLNKLWCQKWQDIYLVSAEDRISAAELKFVTPIENGVHSAYTASQGYFELSISEAVVDILPVDSTVECIAQHIAQTLKLDNPDSSFRVAAYEGVGKGAIAYA

SEQ ID NO: 24362 - protein, 196 aa, unidentified
  source 1..196: note = Pseudoalteromonas piratica
  REGION 1..196: note = tr|A0A0A7EH83|A0A0A7EH83_9GAMM QueD like protein; OS = Pseudoalteromonas piratica OX=1348114 GN=OM33_13260; PE = 4 SV=1
MELVSLLILVLVVVAAFVASKFTHSGNPYPFTQKKSLFTQVETAFLNLLEKAIGSDYKIVSRVKLIDILEFQPGTDEKSRRSALAKAQNKQLDYVLLDKDSLKIVAAIDLVNNASKNGHKAKKDWFVNGALESAGIPLIRIKVKSGYKAQEVRQAILFKLGKQTNNSKPIRKSTIKNTPVLSPSQVKSASTALAQI

SEQ ID NO: 24363 - protein, 284 aa, Pseudoalteromonas piscicida
  REGION 1..284: note = tr|A0A3B6Y1W5|A0A3B6Y1W5_PSEO7 Uncharacterized protein OS=Pseudoalteromonas piscicida OX=43662; GN = D0N37_10070 PE=4 SV=1
MILFVDSLTVIDFSYLCPRRGAVGESWITDIVLHGELNEESMVLDFAKVKKQIKRIIDEKLDHKLAVPSALACNAKHSEGRFEFDMQFDGNHLAMNAPEEAVCVVGGNEINEANAIAYLKSVIMPHMPENVKDLDITLRPEAATGFYYHYSHGLKKHDGNCQRIIHGHRSLIGVKLNDISMPRLQKQWADKWQDIYLGSEEDLIDPSLLQYVTAQDKDYAFAYTSSQGYFELAISKSRCDILPCDTTVECIADYLAGQIKAQNPHDKVEVRAYEGVGKGAIAYA

SEQ ID NO: 24364 - protein, 284 aa, Pseudoalteromonas piscicida
  REGION 1..284: note = tr|A0A0F4P1Z8|A0A0F4P1Z8_PSEO7 6-pyruvoyl tetrahydropterin synthase OS=Pseudoalteromonas piscicida; OX = 43662 GN=PPIS_a1344 PE=4 SV=1
MILFVDSLTVIDFSYLCPRRGAVGESWITDIVLHGELNEESMVLDFAKVKKQIKRIIDEKLDHKLAVPSALACNAKHSEGRFEFDMQFDGNHLAMNAPEEAVCVVEGDEINEANAIAYLKSVIMPHMPENVKGLDITLRPEAATGFYYHYSHGLKKHDGNCQRIIHGHRSLIGVKLNDISMPRLQKQWADKWQDIYLGSEEDLIDPSLLQYVTAHDKDYAFAYTSSQGYFELAISKSRCDILPCDTTVECIAEYLAGQIKLQNPHDKVEVRAYEGVGKGAIAYA

SEQ ID NO: 24365 - protein, 285 aa, unidentified
  source 1..285: note = Pseudoalteromonas porphyrae
  REGION 1..285: note = tr|A0A0N0M0I7|A0A0N0M0I7_9GAMM 6-pyruvoyl tetrahydropterin synthase OS=Pseudoalteromonas porphyrae; OX = 187330 GN=ADS77_06730 PE=4 SV=1
MILFVNALTVIDFSYLCNKRGAVGESWIVDLTLHGQLNEESMVLDFGLVKKQIKGIIDDCIDHKLAIPSIIQGEVVAYDDYRTLDCTFGDGHHLAMSAPHQAFCMIDAPVINEQSVIDFLIATIMPQLPSNIDKIEIELKPEHSKSFYYHYSHGLKKHDGNCQRIIHGHRSQIGIALDGMAMPRLQKQWADKWQDIYLATAEDEIKAEQLIHITAKKDDLCFAYTAAQGYFEMVLSKVRCDILPVDTTVECIAAYLAEQVKLVHPDNDVKITAYEGVAKGSICYA

SEQ ID NO: 24366 - protein, 197 aa, unidentified
  source 1..197: note = Pseudoalteromonas porphyrae
  REGION 1..197: note = tr|A0A0N1EMI1|A0A0N1EMI1_9GAMM QueD like protein; OS = Pseudoalteromonas porphyrae OX=187330 GN=ADS77_04860; PE = 4 SV=1
MEFALLSILVLVVGASVVASKFTDDGGNPYPFTRKESVFTQVESAFLNLLERAVGDQYKIVSRVKLIDIIDCKHGLSPKAKRAAIAKAKNKQLDYVLIDKEKMTIVAAVDLVNNANKDGHKAQRDWFVNGALEAAGIPHIRMKVKSGYRPSEVRDAIMFKLGKPAAPSIRPSRNRVTKPAVLSPSQAKAHSTALAEI

SEQ ID NO: 24367 - protein, 285 aa, unidentified
  source 1..285: note = Pseudoalteromonas profundi
  REGION 1..285: note = tr|A0A3A3EKK6|A0A3A3EKK6_9GAMM Uncharacterized protein OS=Pseudoalteromonas profundi OX=1774956; GN = D4741_01910 PE=4 SV=1
MILFVNSLTVIDFSYLCNKRGAVGESWIVDLTLHGQLNDESMVLDFGLVKKQIKGIIDNCIDHKLAVPAKLNGSLTQHAEHSVLDCHFGDNYHLAMSAPNQAFCLIDADVVDEKSVTEFLIKTIMPELPSNIEKIEINLYPEHSQSFYYHYSHGLKKHDGNCQRIIHGHRSQIGISLDGMAMPRLQKEWADKWEDIYLATAEDEINKTDLKHVTAHDNDVCFAYTSQQGYFEMAIDKSRCDILPCDTTVECIADYLSSQVKIQYPESEVKITAYEGVGKGSISYA

SEQ ID NO: 24368 - protein, 171 aa, unidentified
  source 1..171: note = Pseudoalteromonas profundi
  REGION 1..171: note = tr|A0A3A3EN06|A0A3A3EN06_9GAMM QueD like 2; OS = Pseudoalteromonas profundi OX=1774956 GN=D4741_12855; PE = 4 SV=1
MQIDGLLLTESQLDNRLNKSVHEHRSGEFALLLAMLSHDALDFSQFHLPKTELTSPDVSESVLRKELGAGPSQPLAPEQFDMLIGQDNAFKLLQGGLSDIRLHHCLNPEPLNVRDDKLHVPLEVIDNCEPAVRKRFYEKNKPVERPQIDAAAFYDSLTDEAIHQPLHLATA

SEQ ID NO: 24369 - protein, 196 aa, Pseudoalteromonas rubra
  REGION 1..196: note = tr|A0A0F4QK08|A0A0F4QK08_9GAMM DUF2726 domain-containing protein OS=Pseudoalteromonas rubra; OX = 43658 GN=C3B51_09500 PE=4 SV=1
MELTLLSILALVVIASIVISKYTDTGGNPYPFNRKDSVFTTVEASFLQLLERSVGDKFKVVSRVKLIEIIECKPGLSKKARRSAITKAQNKQLDYVLVDKETLNIVAAVDLVNNANKNGHKAQKDWFVSGALESAGIPHIRMKVKSGYKSAEVRAAILFKLGKKPEPQAKPRNRNYKPAVLSPSQAKAASTQLAEI

SEQ ID NO: 24370 - protein, 196 aa, Pseudoalteromonas rubra
  REGION 1..196: note = tr|A0A0L0ERN5|A0A0L0ERN5_9GAMM QueD like protein; OS = Pseudoalteromonas rubra OX=43658 GN=AC626_13095 PE=4; SV = 1
MELTLLSILALVVIASIVISKYTDNGGNPYPFNRKESVFTTVEASFLQLLERSVGDKFKVVSRVKLIEIIECKPGLSKKARRAAITKAQNKQLDYVLVDKETLNIVAAVDLVNNANKNGHKAQKDWFVSGALESAGIPHIRMKVKSGYKSAEVRAAILFKLGKKPEPQGKPRNRNYKPAVLSPSQAKAAATQLAEI

SEQ ID NO: 24371 - protein, 287 aa, Pseudoalteromonas ruthenica
  REGION 1..287: note = tr|A0A0F4PXP4|A0A0F4PXP4_9GAMM 6-pyruvoyl tetrahydropterin synthase OS=Pseudoalteromonas ruthenica; OX = 151081 GN=TW72_09430 PE=4 SV=1
MTLFVNDLTVIDFSFFCPQRGPVGESWIVDLTLDGDLNDESMLLDFGLVKKQIKGIIDSSVDHTLAVPTKANIDILQGDDKVTLESNFGDNNEHHFAMSGPKQAVCLIDAPSINEQVVTEYLVAEITPQLPENVKGITLTLRAEQHQSFYYHYSHGLKKHDGNCQRIVHGHRSTLGVWLDGMAMPSVQKQWAQRWADIYLVSEEDVVEAAHLQDISAAPGDICSRYHANQGEFELAISAKRTEVLPCDTTVECIADYMAKQIKQAYPDKQVEVRAYEGVGKGAIGYA

SEQ ID NO: 24372 - protein, 205 aa, Pseudoalteromonas ruthenica
  REGION 1..205: note = tr|A0A0F4PNQ6|A0A0F4PNQ6_9GAMM QueD like protein; OS = Pseudoalteromonas ruthenica OX=151081 GN=TW72_15040; PE = 4 SV=1
MEFALLSILVLVVVASVVASKFTDNNENPYPFVRKKEIYTQVESAFLSLLERAVGDNYRIVSRVKLADVIDCKAGLSSKSRRIAMTKTKNKQLDYVLLDKQKMTIVAAVDLVNNANKDGHKAQRDWFVSGALETAGIPHIRMKVKSGYRVEDVRNAILFKIGKPETATKRKPTRTPTRPAVLSPSQAKAQASGSALATSTQLAEI

SEQ ID NO: 24373 - protein, 287 aa, Pseudoalteromonas sp.
  REGION 1..287: note = tr|A0A4Q6YDD6|A0A4Q6YDD6_9GAMM Uncharacterized protein OS=Pseudoalteromonas sp. CO325X OX=1777262; GN = EXT46_04110 PE=4 SV=1
MTLFVNDLTVIDFSFFCPQRGPVGESWIVDLTLDGDLNDESMLLDFGLVKKQIKGIIDNSVDHTLAVPTKANIDILQGDDKVTLESNFGDNNEHHFAMSGPKQAVCLIDAPSINEQVVTEYLVAEITPQLPENVKGITLTLRAEQHQSFYYHYSHGLKKHDGNCQRIVHGHRSTLGVWLDGMAMPSVQKQWAQRWADIYLVSEEDVVEAAHLQDISAAPGDICSRYHANQGEFELAISAKRTEVLPCDTTVECIADYMAKQIKQAYPDKQVEVRAYEGVGKGAIGYA

SEQ ID NO: 24374 - protein, 285 aa, Pseudoalteromonas sp.
  REGION 1..285: note = tr|A0A4S1F7R1|A0A4S1F7R1_9GAMM Uncharacterized protein OS=Pseudoalteromonas sp. MEBiC 03607 OX=2563601; GN = E5N72_11090 PE=4 SV=1
MILFVNSLTVIDFSYLCNKRGAVGESWIVDLTLHGQLNDESMVLDFGLVKKQIKGIIDNCIDHKLAVPAKLNGSLTQHAEHSVLDCHFGDNYHLAMSAPNQAFCLIDADVVDEKSVTEFLIKTIMPELPSNIEKIEINLYPEHSQSFYYHYSHGLKKHDGNCQRIIHGHRSQIGISLDGMAMPRLQKEWADKWEDIYLATAEDEINKADLKHVTAQDNDVCFAYTSQQGYFEMAIDKSRCDILPCDTTVECIADYLSSQVKNQYPESEVKITAYEGVGKGSISYA

SEQ ID NO: 24375 - protein, 284 aa, Pseudoalteromonas spongiae
  REGION 1..284: note = tr|A0A290T540|A0A290T540_9GAMM Uncharacterized protein OS=Pseudoalteromonas spongiae UST010723-006; OX = 1117319 GN=PSPO_a1637 PE=4 SV=1
MILFVKDLTVIDFSYLCKDRGPLGESWIVDLEMHGDLNDESMVLDFSLVKKQVKRIIDDVIDHKLAIATQGDAVISEAGEQTNVSFSFGEHQLAVSSPHQAFCLIDTDKINETSVKGFLEQTILPQLPSNVSKIILNLRPEHTNGFYYHYSHGLKKHDGNCQRIIHGHRSTIEIEENGMRSPRLNKLWCQKWQDIYLVSAEDRINANELKFVAPIENGVHSAYNASQGYFELSISEAVTDILPVDSTVECIAQHVVQTLKNDNPENSYRVAAYEGVGKGAIAYA

SEQ ID NO: 24376 - protein, 285 aa, Pseudoalteromonas tetraodonis
  REGION 1..285: note = tr|A0A1E3WWW7|A0A1E3WWW7_9GAMM Uncharacterized protein OS=Pseudoalteromonas tetraodonis OX=43659; GN = BCD66_10095 PE=4 SV=1
MTLFVNSLTVIDFSYLCNKRGAVGESWIVDLTLHGKLNEESMVLDFGLVKKQIKGIIDECIDHRLAVPNNINGSINEFADHKILDCTFGENKHLAMSAPHQAFCLIDTDKITIESVTEYLVATILPQLPDNIEKIELVLKPEHNQSFYYHYSHGLKKHDGNCQRIIHGHRSQIGISLGGISMPRLQKQWADKWQDIYLATSEDKISASELKHIIAKEDDVCFAYTAAQGYFEMAISESRCDILPMDTTVECIAEYIAGQVKLQHPEKDVKITAYEGVGKGSISYA

SEQ ID NO: 24377 - protein, 175 aa, Pseudoalteromonas tetraodonis
  REGION 1..175: note = tr|A0A1E3WXZ3|A0A1E3WXZ3_9GAMM QueD like 2; OS = Pseudoalteromonas tetraodonis OX=43659 GN=BCD66_11680; PE = 4 SV=1
MQIGDLLITESQLKTRLNESVHENRRGEFALLLAMLSHDALDFSEFHLPKSDTKHYQADEDALRKQFGAGPKQPLAPDTFNMLIGKNNTELLAKMGSAVGMSDIKLTQCLKPEPFNIRDDKNHIPLTVIDNCELAVRRRIQNTNTELSNPQMDPVAFYDDLQNEAIHQPLHLFSA

SEQ ID NO: 24378 - protein, 285 aa, Pseudoalteromonas translucida
  REGION 1..285: note = tr|A0A0U2WZH8|A0A0U2WZH8_9GAMM Uncharacterized protein OS=Pseudoalteromonas translucida KMM 520; OX = 1315283 GN=PTRA_a1887 PE=4 SV=1
MILFVNSLTVIDFSYLCNKRGAVGESWIVDLTLHGKLNDESMVLDFGLVKKQIKGIIDECIDHRLAVPNNLNGMVSEFSDHKTLDCTFGDNHHLAMSAPHQAYCMINADEVTIASVTDFLIATILPQLPDNIEKIELSLKPEHNQSYYYHYSHGLKKHDGNCQRIIHGHRSQIGISLDGISMPRLQKEWSQKWQDIYLATAEDQIKADELQHVSAKAGDVCFAYTSAQGYFEMAISESRCDILPSDTTVECIAEYLAGQVKAQYPEKAVKITAYEGVGKGSISHA

SEQ ID NO: 24379 - protein, 284 aa, Pseudoalteromonas tunicata
  REGION 1..284: note = tr|A4C9L6|A4C9L6_9GAMM Uncharacterized protein; OS = Pseudoalteromonas tunicata D2 OX=87626 GN=PTD2_19702; PE = 4 SV=1
MILFVNDLTVIDFSYLCHQRGAVGESWIVDLTLHGSLNAQSMVLDFALVKKQVKRIIDEQIDHKLAVPKHPNVTVTHQDVQTNVSFNYADAQLALSCPAQAYCFIESPEINIASVTEYLIKTIMPQLPQNIDKIEITLRPEKIDTFYYHYSHGLKKHDGNCQRIVHGHRSKIEIYENGMKSPRLQKQWAELWQDIYLVSEEDIITAGQLKFISAHENSLCCAYIAPQGYFELAINQNRTHLLPYDTTVECIAQYIAEQLKAQNPNNDFKVVAYEGVAKGSIAYA

SEQ ID NO: 24380 - protein, 285 aa, Pseudoalteromonas ulvae
  REGION 1..285: note = tr|A0A244CMF7|A0A244CMF7_9GAMM Uncharacterized protein OS=Pseudoalteromonas ulvae OX=107327; GN = B1199_15530 PE=4 SV=1
MILFVNDLTVIDFSYLCHQRGAVGESWIVDLTLHGSLNEESMVLDFALVKKQVKKIIDEHIDHKLALPMAKNVCLEQQGEQTNVTFMYADNKRLAMSCPAQAYCPIDADEINQQTVTAFLINTILPLLPNNIDKIEINLRPENIDSFYYHYSHGLKKHDGNCQRIVHGHRSKIEIFENGMKSPRLQKQWAEAFEDIYLVSQEDIIEPDALKFIDSSPSHLCCAYTAPQGYFELSIEQSVTHTLPCDTTVECIADYLAKALKQANPNSDFKVVAYEGVAKGSIAYA

SEQ ID NO: 24381 - protein, 177 aa, unidentified
  source 1..177: note = Pseudoarcobacter caeni
  REGION 1..177: note = tr|A0A363D1N0|A0A363D1N0_9PROT 6-pyruvoyl tetrahydrobiopterin synthase OS=Pseudoarcobacter caeni; OX = 1912877 GN=B0174_05735 PE=4 SV=1
MHWKISKEFEFCYGHRVWSQTLDTEFSLDSCLKCRHLHGHQGKILVYLEAQELKDGMVTDFKHLNWFKQFIDDILDHKFILDINDPLFFTLIPNVNKNELINFEEGYYLVNLTKFKDDEIHIKELYEGYIIVDFVPTSENLSAWFLKIVQKKMDKLNVKVSHVEFLETPKSRSTFYA

SEQ ID NO: 24382 - protein, 136 aa, unidentified
  source 1..136: note = Pseudobacter ginsenosidimutans
  REGION 1..136: note = tr|A0A4Q7MKU1|A0A4Q7MKU1_9BACT 6-pyruvoyltetrahydropterin/6-carboxytetrahydropterin synthase OS=Pseudobacter ginsenosidimutans OX=661488; GN = EV199_4728 PE=4 SV=1
MVYLTRVEHFNAAHKLYNPAWSKEKNEQVFGKCANEHWHGHNYELLVTIKGKPDPDTGFLYDVKQLSKLIQQHVLDKLDHKNLNMDVDFMQGQLCSTENLAIAIWQQLQPHLPQTVKLHCIKLYETPRIFVEYFGG

SEQ ID NO: 24383 - protein, 118 aa, unidentified
  source 1..118: note = Pseudobacter ginsenosidimutans
  REGION 1..118: note = tr|A0A4Q7MFD2|A0A4Q7MFD2_9BACT 6-carboxy-5,6,7,8-tetrahydropterin synthase; OS = Pseudobacter ginsenosidimutans OX=661488 GN=EV199_5854; PE = 3 SV=1
MLIYKEFTFDSAHFLPNVPDGHKCKEMHGHTYRLRVWIEGKPDPQLGWVMDFAVLKKIIKPVVSTLDHKCLNNIPGLSNPTCELIAVWIWDQLKPSIPAMKRLELHETPTSGVVYEGE

SEQ ID NO: 24384 - protein, 311 aa, unidentified
  source 1..311: note = Pseudobacteriovorax antillogorgiicola
  REGION 1..311: note = tr|A0A1Y6B328|A0A1Y6B328_9PROT 6-pyruvoyl tetrahydropterin synthase OS=Pseudobacteriovorax antillogorgiicola OX=1513793 GN=SAMN06296036_1017 PE=4 SV=1
MDNTFSQTVNREPVGTLFIKDVDRIDCATFDPSVGVTGKSWYVDVEVGGALDDNGFVYDFSLLKKLVKKILKETVDHALLIPIKSSSVEFESAGDNERWTLSAKTKLIGNNSTWTYECPKGSVYPVRSLKITRNIIEQECTKLVRHRLPNTIQKVAVKLRKEEGDAHSTFFRYTHGITGHEGLCQRLFHGHRSRVEVFVADERRTDLERYVAHDLFGSIVHIASVDQVTSGVYEPGMRMNRDESVSLAYTGSLGTYKAEIPLSRTFFVKSFTSIESITTEVAMHLKERFHIQAPVRVHCYEGIDKGAITEV

SEQ ID NO: 24385 - protein, 126 aa, unidentified
  source 1..126: note = Pseudobacteriovorax antillogorgiicola
  REGION 1..126: note = tr|A0A1Y6C5K7|A0A1Y6C5K7_9PROT 6-pyruvoyltetrahydropterin/6-carboxytetrahydropterin synthase OS=Pseudobacteriovorax antillogorgiicola; OX = 1513793 GN=SAMN06296036_1136 1 PE=4 SV=1
MYEVGIKREVICQHYLIGGDWGHENCPHSHHFVIEMILSSPNLDDHGYVADISKLNVALERLVDKYRDRLLNDLPEFDGLNPSIENFSRIIASELFEDLDRRRFSQGMIKVWEDGQSWASYRETFI

SEQ ID NO: 24386 - protein, 127 aa, unidentified
  source 1..127: note = Pseudobacteroides cellulosolvens
  REGION 1..127: note = tr|A0A0L6JPI0|A0A0L6JPI0_9FIRM 6-carboxy-5,6,7,8-tetrahydropterin synthase; OS = Pseudobacteroides cellulosolvens ATCC 35603 = DSM 2933; OX = 398512 GN=Bccel_2543 PE=3 SV= 1
MNNRLMSITKVFTFDSAHHLYEYEGKCKYIHGHTYKLEVTLKGPVNKNGFVIDFHDLKRIINDEVISVVDHRYLNEIFEFNPTCELLGFWIWDKIDASIKGEEYFLEKVVLWETPTSFITIDRKDMV

SEQ ID NO: 24387 - protein, 139 aa, Pseudobutyrivibrio ruminis
  REGION 1..139: note = tr|A0A285RDW8|A0A285RDW8_9FIRM 6-carboxy-5,6,7,8-tetrahydropterin synthase; OS = Pseudobutyrivibrio ruminis DSM 9787 OX=1123011; GN = SAMN02910411_0895 PE=3 SV=1
MYYLTAEASFDGAHFLSGYEGKCSNLHGHRWRVILKIKANELQAEGQQRGMVVDFGDVKNALKKETDFFDHTFIYEEGSLKETTVAALKDEDFLMRVVPFRPTAENFSKYFYEKFEEYGFEVAEVTVYETPNNCASYSK

SEQ ID NO: 24388 - protein, 139 aa, Pseudobutyrivibrio ruminis; identical to SEQ ID NO: 24387
  REGION 1..139: note = tr|A0A1H7G947|A0A1H7G947_9FIRM 6-carboxy-5,6,7,8-tetrahydropterin synthase; OS = Pseudobutyrivibrio ruminis OX=46206; GN = SAMN02910377_00616 PE=3 SV=1

SEQ ID NO: 24389 - protein, 139 aa, Pseudobutyrivibrio sp.
  REGION 1..139: note = tr|A0A1I5D431|A0A1I5D431_9FIRM 6-carboxy-5,6,7,8-tetrahydropterin synthase; OS = Pseudobutyrivibrio sp. JW11 OX=1855302; GN = SAMN05216351_10245 PE=3 SV=1
MYYLTAEASFDGAHFLSGYEGKCSNLHGHRWRVILKIKANELQAEGQQRGMVVDFGDVKNALKKETDFFDHSFIYEEGSLKETTVAALKDEDFLMRVVPFRPTAENFSKYFYEKFEEYGFEVAEVTVYETPNNCASYSK

SEQ ID NO: 24390 - protein, 140 aa, Pseudobutyrivibrio sp.
  REGION 1..140: note = tr|A0A1G6DYC8|A0A1G6DYC8_9FIRM 6-carboxy-5,6,7,8-tetrahydropterin synthase; OS = Pseudobutyrivibrio sp. YE44 OX=1520802; GN = SAMN02910298_02513 PE=3 SV=1
MYYLTAEASFDGAHFLAGYEGKCSNLHGHRWRVILKIKTEKLQSEGQQRGMVVDFGDVKDALKKETDFFDHSFIYELGSLKDETVAALKAENFEMHEVPFRPTAENFSRYFFYKFKEYGFTVAEVTVYETPNNCASYSED

SEQ ID NO: 24391 - protein, 140 aa, Pseudobutyrivibrio xylanivorans
  REGION 1..140: note = tr|A0A1G5S2D6|A0A1G5S2D6_PSEXY 6-carboxy-5,6,7,8-tetrahydropterin synthase; OS = Pseudobutyrivibrio xylanivorans OX=185007; GN = SAMN02910350_02349 PE=3 SV=1
MYYLTAEASFDGAHFLAGYEGKCSNLHGHRWRVILKIKTDKLQKEGQQRGMVVDFGDVKNALKKETDFFDHSFIYEEGSLKEATVAALTAEDFEMHVVPFRPTAENFAKYFFDKFKEYGFTVAEVTVYETPNNCASYSED

SEQ ID NO: 24392 - protein, 140 aa, Pseudobutyrivibrio xylanivorans
  REGION 1..140: note = tr|A0A1M6FNF8|A0A1M6FNF8_PSEXY 6-carboxy-5,6,7,8-tetrahydropterin synthase; OS = Pseudobutyrivibrio xylanivorans DSM 14809 OX=1123012; GN = SAMN02745725_01508 PE=3 SV=1
MYYLTAEASFDGAHFLAGYDGKCSNLHGHRWRVILKIKTDKLQSEGQQRGMVVDFGDVKNALKKETDFFDHSFIYEEGSLKEATVAALLAEDFEMHVVPFRPTAENFARYFFDKFKDYGFTVAEVTVYETPNNCASYSED

SEQ ID NO: 24393 - protein, 121 aa, unidentified
  source 1..121: note = Pseudocitrobacter faecalis
  REGION 1..121: note = tr|A0A366FDB1|A0A366FDB1_9ENTR 6-carboxy-5,6,7,8-tetrahydropterin synthase; OS = Pseudocitrobacter faecalis OX=1398493 GN=DFQ50_103211; PE = 3 SV=1
MMSTTLFKDFTFEAAHRLPHVPEGHKCGRLHGHSFMVRLEITGEVDPHTGWIMDFAELKAAFKPTYDRLDHYYLNDIPGLENPTSEVLSRWIWEQVKPVVPLLSAVMVKETCTAGCVYRGE

SEQ ID NO: 24394 - protein, 120 aa, unidentified
  source 1..120: note = Pseudocitrobacter sp.
  REGION 1..120: note = tr|A0A5B0K9W1|A0A5B0K9W1_9ENTR 6-carboxy-5,6,7,8-tetrahydropterin synthase; OS = Pseudocitrobacter sp. 73 OX=2605731 GN=queD PE=3 SV=1
MSTTLFKDFTFEAAHHLPHVPEGHKCGRLHGHSFMVRLEITSEVDPHTGWIMDFAELKAAFKPTYDRLDHYYLNDIPGLENPTSEVLSRWIWEQVKPVVPLLSAVMVKETCTAGCVYRGE

SEQ ID NO: 24395 - protein, 126 aa, unidentified
  source 1..126: note = Pseudodesulfovibrio aespoeensis
  REGION 1..126: note = tr|E6VYW7|E6VYW7_PSEA9 6-carboxy-5,6,7,8-tetrahydropterin synthase; OS = Pseudodesulfovibrio aespoeensis (strain ATCC 700646 / DSM 10631 / Aspo-2) OX=643562 GN=Daes_061 2 PE=3 SV=1
MAGKWRLTITQDFSAAHQLRNYGGKCENMHGHNFGVEVAVEGDRLDDKVHYLVDFKEIKRLTKAVLDRLDHKHLNEVECFTEINPSSENLAMFIYKELKDSMPENVRLAEVSVSEKDSSKATYWEE

SEQ ID NO: 24396 - protein, 126 aa, unidentified
  source 1..126: note = Pseudodesulfovibrio hydrargyri
  REGION 1..126: note = tr|A0A1J5N492|A0A1J5N492_9DELT 6-carboxy-5,6,7,8-tetrahydropterin synthase; OS = Pseudodesulfovibrio hydrargyri OX=2125990 GN=queD_2; PE = 3 SV=1
MPGKWKLTIAQEFSASHQLRNYCGKCENMHGHNFGVEVVVEGDTLDPEVQYLVDFKTLKGMTKSVLERLDHTHLNEVECFKEINPSSENLAMFIYRNLKAGMPENVSLVEVSVSENNTSKATYWEE

SEQ ID NO: 24397 - protein, 160 aa, unidentified
  source 1..160: note = Pseudodesulfovibrio hydrargyri
  REGION 1..160: note = tr|A0A1J5N7C3|A0A1J5N7C3_9DELT 6-carboxy-5,6,7,8-tetrahydropterin synthase; OS = Pseudodesulfovibrio hydrargyri OX=2125990 GN=queD_1; PE = 4 SV=1
MHSLKVDSGHLNFSAAHFITFAGKCERLHGHNYAVEVQLEGGLTGDGYVYDFVELKRTVKTLCDTLDHRFLLPTGNGQFTVTRADGEVEIRVRDRRYVFPERDVLDLPVANITAEYLAQYLAGELFKTLSGCDNISSVQVGVEEAPGQAARFRIETGRQG

SEQ ID NO: 24398 - protein, 126 aa, unidentified
  source 1..126: note = Pseudodesulfovibrio indicus
  REGION 1..126: note = tr|A0A140D8T8|A0A140D8T8_9DELT 6-carboxy-5,6,7,8-tetrahydropterin synthase; OS = Pseudodesulfovibrio indicus OX=1716143 GN=AWY79_00030; PE = 3 SV=1
MPGKWKLTITQEFSASHQLRNYCGKCENMHGHNFGVEVVVEGDTLDEKVQYLLDFKDLKARTRTVLDKLDHKHLNDVECFTEINPSSENLAMFIYRNLKGNLPGHVSLVEVSVSEKGSSKATYWEE

SEQ ID NO: 24399 - protein, 158 aa, unidentified
  source 1..158: note = Pseudodesulfovibrio piezophilus
  REGION 1..158: note = tr|M1WRX9|M1WRX9_PSEP2 6-pyruvoyl tetrahydropterin synthase (Modular protein) OS=Pseudodesulfovibrio piezophilus (strain DSM 21447 / JCM 15486 / C1TLV30); OX = 1322246GN=BN4_12594 PE=4 SV=1
MREERSQVSSGSVSGQLLSSPRIQESKEIGDPMPGKWKLTITQDFSASHQLRNYGGKCENMHGHNFGVEVVVEGDKLDKKVHYLVDFKEIKQCTKDILERLDHKHLNDVECFTEINPSSENIAMFIYKEMKDALPKQVRLSEVSVSEKDSSKATYWEE

SEQ ID NO: 24400 - protein, 126 aa, unidentified
  source 1..126: note = Pseudodesulfovibrio profundus
  REGION 1..126: note = tr|A0A2C8F8M2|A0A2C8F8M2_9DELT 6-carboxy-5,6,7,8-tetrahydropterin synthase; OS = Pseudodesulfovibrio profundus OX=57320 GN=DPRO_1493; PE = 3 SV=1
MPGKWKLTITQDFSASHQLRNYGGKCENMHGHNFGVEVVVEGDKLDEKVQYLVDFKEIKRRTKEVLEKLDHKHLNEVECFTEVNPSSENIAMFIYQELKGNMPENVRLSEVSVSEKDSSKATYWEE

SEQ ID NO: 24401 - protein, 126 aa, unidentified
  source 1..126: note = Pseudodesulfovibrio sp.
  REGION 1..126: note = tr|A0A443YEX3|A0A443YEX3_9DELT 6-carboxy-5,6,7,8-tetrahydropterin synthase; OS = Pseudodesulfovibrio sp. S3 OX=2283629 GN=queD PE=3 SV=1
MPGKWRLTITQDFSSSHQLRNYGGKCENMHGHNFGVEVAVEGDKLDDKVHYLVDFKEIKRRTKDVLDRLDHRHLNEVPPFTEINPSSENLAMFIYNELKGNMPENVRLAEVSVSEKDSSKATYWEE

SEQ ID NO: 24402 - protein, 117 aa, unidentified
  source 1..117: note = Pseudoflavitalea sp.
  REGION 1..117: note = tr|A0A3B7MJD7|A0A3B7MJD7_9BACT 6-carboxy-5,6,7,8-tetrahydropterin synthase; OS = Pseudoflavitalea sp. 5GH32-13 OX=2315862 GN=queD PE=3; SV = 1
MTIYKEFTFDAAHFLANVPEGHKCKQLHGHTYFLKVYVSGEPELPEQWVMDYSDLKAIVKPVIDQLDHKFLNDVQGLENPTAEVVTRWIWQKIKPTLPKLKRIELKETPTSGVIYEE

SEQ ID NO: 24403 - protein, 118 aa, unidentified
  source 1..118: note = Pseudoflavitalea sp.
  REGION 1..118: note = tr|A0A3B7MPL2|A0A3B7MPL2_9BACT 6-carboxy-5,6,7,8-tetrahydropterin synthase; OS = Pseudoflavitalea sp. 5GH32-13 OX=2315862 GN=queD PE=3; SV = 1
MLIYKEFTFDSAHFLPNVPDGHKCKEMHGHTYRLRIWIKGQPDPQLGWVMDFAVLKSVVKPVVAELDHKCMNYVAGLENPTCELIAVWIWDRLKPLLPAMDHLELHETPTSGVVYNGN

SEQ ID NO: 24404 - protein, 117 aa, Pseudofulvimonas gallinarii
  REGION 1..117: note = tr|A0A4S3KXH7|A0A4S3KXH7_9GAMM 6-carboxy-5,6,7,8-tetrahydropterin synthase; OS = Pseudofulvimonas gallinarii OX=634155 GN=B1808_05540; PE = 3 SV=1
MDIFKIFTIEAAHRLPNVPPGHKCARLHGHSFRVEIHVSGEPGPESGWVMDFADVKSAFQPLYDQLDHHYLNDIEGLDNPTSERLADWIWQRLQPRLPGLARVVVHETCTSGAIRSG

SEQ ID NO: 24405 - protein, 339 aa, unidentified
  source 1..339: note = Pseudogulbenkiania ferrooxidans
  REGION 1..339: note = tr|U0ZHR7|U0ZHR7_9NEIS 6-pyruvoyl tetrahydrobiopterin synthase OS=Pseudogulbenkiania ferrooxidans EGD-HP2 OX=1388764 GN=O166_11880 PE=4 SV=1
MHASYLIAGAGFEAARRLPADHGQAARPHGHSFRLSVRSDAQNTSQEALQAAVQAAVAPLDYTDLNAALAASDDLSLARHIADALPHPAAIQLRGAPDRGVMLDGARALSWINSSFEAAHYLPHVPPGHKCGRLHGHGFGVRIVADAALSGQHDLARAWATLHGRLNHRYLNDIPGLDNPTSEVLAQWLHQQLRDAVPGLAWVEVRETHSAGSQFDGKTFRIWKEQRFESAMPFDAAGNYTGHSYLVRLMLSGGIDRTMGWLLDFGDVKDRFKPIYRQLDHNPLDKLAGLRRADNAAVAEWIHAQLAPLVPELSRIDLMESDDAGVSLHFRQDMRWPLL

SEQ ID NO: 24406 - protein, 341 aa, unidentified
  source 1..341: note = Pseudogulbenkiania ferrooxidans
  REGION 1..341: note = tr|B9Z1F8|B9Z1F8_9NEIS 6-pyruvoyl tetrahydropterin synthase OS=Pseudogulbenkiania ferrooxidans 2002 OX=279714; GN = FuraDRAFT_1193 PE=4 SV=1
MHASYLLAGARFEAARQLSADWFEPQFASLHGHSFRVQLRVENIHTNQAGLAETLQRAVQPLNYASLNQRMAAVDDLAIAEHLSEQLSFPHSLTLTSAPERGVILDNGTRLVWLNAGFEAAHQLPHVPAGHKCGRLHGHGFGVRLVADAASANHVDLAAAWGRLFLRLNHRYLNDIPGLANPTSEVLAQWIYRELSADLAGLAWVEVRETHTAGSQFDGRTFRIWKEQHFESAVPFDADGNYTGHSYLIRLMLQGELDGAMGWLLDFGDVKDRFKPVYRQLDHNPLDRLAGIRNGHPASVAEWVHAELSPLVPELARVDLMERDERGVSVLFKDNMRWPLL

SEQ ID NO: 24407 - protein, 341 aa, Pseudogulbenkiania sp.
  REGION 1..341: note = tr|G2IYU6|G2IYU6_PSEUL 6-pyruvoyl tetrahydropterin synthase OS=Pseudogulbenkiania sp. (strain NH8B) OX=748280; GN = NH8B_0867 PE=4 SV=1
MHASYLLAGARFEAARQLPADWFEPQFASLHGHSFRVQLRVENIHTNQAGLAETLQRAVQPLHYASLNQRMAVVDDLAIAEHLSEQLSFPHSLTLTSAPERGVILDNGTRLVWLNAGFEAAHQLPHVPAGHKCGRLHGHGFGVRLVADAASANHVGLAAAWGRLFLRLNHRYLNDIPGLANPTSEVLAQWIYRELSADLAGLAWVEVRETHTAGSQFDGRTFRIWKEQHFESAVPFDADGNYTGHSYLIRLMLQGELDGAMGWLLDFGDVKDRFKPVYRQLDHNPLDRLAGIRNGHPASVAEWVHAELSPLVPELARVDLMERDERGVSVLFKDNMRWPLL

SEQ ID NO: 24408 - protein, 341 aa, Pseudogulbenkiania subflava
  REGION 1..341: note = tr|A0A1Y6B8X6|A0A1Y6B8X6_9NEIS 6-pyruvoyltetrahydropterin/6-carboxytetrahydropterin synthase OS=Pseudogulbenkiania subflava DSM 22618; OX = 1123014 GN=SAMN02745746_0058 1 PE=4 SV=1
MHASYLLAGARFEAARQLPADWFEPQFASLHGHSFRVQLRVENIHTNQAGLAETLQRAVQPLNYASLNQHMASVDDLAIAEHLSEQLSFPHSLTLTSAPERGVILDNGTRLVWLNAGFEAAHQLPHVPAGHKCGRLHGHGFGVRLVADAASANHIDLAAAWGRLFLRLNHRYLNDIPGLANPTSEVLAQWIYRELSADLAGLAWVEVRETHTAGSQFDGHSFRIWKEQHFESAVPFDAEGNYTGHSYLIRLMLQGELDGAMGWLLDFGDVKDRFKPVYRQLDHNPLDRLAGIRNGHPASVAEWVHAELSPLVPELARVDLMERDERGVSVLFKDNMRWPLL

SEQ ID NO: 24409 - protein, 163 aa, unidentified
  source 1..163: note = Pseudohaliea rubra
  REGION 1..163: note = tr|A0A095X331|A0A095X331_9GAMM Folate biosynthesis protein PTPS-III, catalyzes a reaction that bypasses dihydroneopterin aldolase OS=Pseudohaliea rubra DSM 19751; OX = 1265313 GN=HRUBRA_00106 PE=4 SV=1
MSNRERLTTLYIDKESHKFSVAHYTIFAAGDRERLHGHNYAVSAKIVAPMGNNGFAADYNVYKDRIKALCDELDEYLILPADSPYQRIEEHGHEYRVTFGDEVMHFLRSDTLVLPIVNATVEELSRYLLERLQHTSRGDDLRELRVCVASGPGQKGCASWRAG

SEQ ID NO: 24410 - protein, 118 aa, unidentified
  source 1..118: note = Pseudohaliea rubra
  REGION 1..118: note = tr|A0A095VUY4|A0A095VUY4_9GAMM 6-carboxy-5,6,7,8-tetrahydropterin synthase; OS = Pseudohaliea rubra DSM 19751 OX=1265313 GN=HRUBRA_00342; PE = 3 SV=1
MDIYKDFHFEAAHRLPNVPEGHKCARLHGHSYQLRVTVSGDAPEPSGWVMDFADLKAVIRPVIDRLDHYYLNDIEGLENPTSENLCRWIWARLAPTLPSLRAVEIRETCTSGCIYRGD

SEQ ID NO: 24411 - protein, 132 aa, unidentified
  source 1..132: note = Pseudohoeflea suaedae
  REGION 1..132: note = tr|A0A4R5PI68|A0A4R5PI68_9RHIZ 6-carboxytetrahydropterin synthase OS=Pseudohoeflea suaedae OX=877384 GN=E2A64_14435 PE=4 SV=1
MFAIEVRDHVMIAHSLPRPVFGPAQGMHGATFVVDAAFYTRELDKDGLAVDIGLATTVLKDVLAPLNYQNLDELEVFKGQVTTTEFLAKHVFDRIADAIREGRLGDGGGRICKLRIMLHESHTARGWYEADL

SEQ ID NO: 24412 - protein, 125 aa, unidentified
  source 1..125: note = Pseudohongiella acticola
  REGION 1..125: note = tr|A0A1E8CGI1|A0A1E8CGI1_9GAMM 6-pyruvoyl tetrahydropterin synthase OS=Pseudohongiella acticola; OX = 1524254 GN=PHACT_13625 PE=4 SV=1
MYTVAVTKDFIANHYLIGGDWGSENSPHAHHYVAEVSIEAAELDKHGYLVDIVEIEAALDSIVEDFRDSMLNDKPEFAGLNPSIEHFSRIICERLMANIKPPGSGLLNVKLWENATCWAAYRQSF

SEQ ID NO: 24413 - protein, 118 aa, unidentified
  source 1..118: note = Pseudohongiella acticola
  REGION 1..118: note = tr|A0A1E8CGG8|A0A1E8CGG8_9GAMM 6-carboxy-5,6,7,8-tetrahydropterin synthase; OS = Pseudohongiella acticola OX=1524254 GN=PHACT_13255 PE=3; SV = 1
MEIYKEFNFEAAHRLPNVPAGHKCARLHGHSFQVTLVVSGPVGEHSGWVMDFGDIKSAFKPVWEQLDHHYLNEIDGLDNPTSENIARWIWQQLKPGLPELCRIEIRETCTSGCIYTGD

SEQ ID NO: 24414 - protein, 125 aa, unidentified
  source 1..125: note = Pseudohongiella sp.
  REGION 1..125: note = tr|A0A2D9DQA0|A0A2D9DQA0_9GAMM 6-carboxy-5,6,7,8-tetrahydropterin synthase; OS = Pseudohongiella sp. OX=1979412 GN=queD PE=3 SV=1
MEIYKEFNFEAAHRLPNVPEGHKCARLHGHSFQVRLVVAGPVGERSGWVMDFGDIKSAFKPVWEQLDHHYLNDIAGLDNPTSENIARWIWQKLRPTLPQLVRVEIRETCTSGCIYDGADQQTVEA

SEQ ID NO: 24415 - protein, 126 aa, unidentified
  source 1..126: note = Pseudohongiella sp.
  REGION 1..126: note = tr|A0A2D9DV69|A0A2D9DV69_9GAMM 6-pyruvoyl tetrahydropterin synthase OS=Pseudohongiella sp.; OX = 1979412 GN=CMK70_11520 PE=4 SV=1
MYTVAVTRDFIANHYLIGGDWGSENNPHAHHYVAEVRIESDTLNQHGYLVDIVEIEAALDDIVTYFRDSMLNDKPEFAGLNPSIEHFSRILVEKLMPKITPPGEGVLTVKLWENETCWAAYRQAFA

SEQ ID NO: 24416 - protein, 118 aa, unidentified
  source 1..118: note = Pseudohongiella spirulinae
  REGION 1..118: note = tr|A0A0S2KF27|A0A0S2KF27_9GAMM 6-carboxy-5,6,7,8-tetrahydropterin synthase; OS = Pseudohongiella spirulinae OX=1249552 GN=PS2015_1899; PE = 3 SV=1
MEIYKEFSFEAAHRLPNVPEGHKCARLHGHSFQVRLVVAGPVGEHSGWVMDFGDIKKAFKPVWERLDHHYLNEIPGLENPTSENIAAWIWQELKPQLPELARIEIRETCTSGCIYSGE

SEQ ID NO: 24417 - protein, 126 aa, unidentified
  source 1..126: note = Pseudohongiella spirulinae
  REGION 1..126: note = tr|A0A0S2KBW8|A0A0S2KBW8_9GAMM 6-pyruvoyl tetrahydropterin synthase OS=Pseudohongiella spirulinae; OX = 1249552 GN=PS2015_1143 PE=4 SV=1
MYTVAVTQDFIANHYLIGGDWGAENQPHAHHYVAEVQIESDTLNEHGYLVDIVEIEAALGDIVAYFRDSMLNDKPEFAGLNPSIEHFSRILAEKLVNSISPPGRGSLTVKLWENATCWAAYRHAFA

SEQ ID NO: 24418 - protein, 134 aa, Pseudokineococcus lusitanus
  REGION 1..134: note = tr|A0A3N1HK01|A0A3N1HK01_9ACTN 6-pyruvoyl-tetrahydropterin synthase OS=Pseudokineococcus lusitanus OX=763993 GN=EDC03_2066 PE=4 SV=1
MYRVSVRDHVMVAHSLPHPFFGPAQAKHGATYDVELVLAARELDEHGVVADIGAASAALAAVLDELRYRDLDEHPAFVGRLTTTEVLARWVADRVVEAGREGGGAAGLTRGLASLEVVLRETPDAWASYRTDLP

SEQ ID NO: 24419 - protein, 118 aa, unidentified
  source 1..118: note = Pseudomonadaceae bacterium
  REGION 1..118: note = tr|A0A3T0SFT3|A0A3T0SFT3_9GAMM 6-carboxy-5,6,7,8-tetrahydropterin synthase; OS = Pseudomonadaceae bacterium SI-3 OX=2079806 GN=queD PE=3; SV = 1
MEIFKEFTFESAHRLPHVPEGHKCGRLHGHSFRVAIYLEGEVNAQTGWIRDFSEIKQIFNPIYERLDHHYLNDLPGLDNPTSENLAIWIWNELKPLLPELSRIRIHETCTSGCEYRGQ

SEQ ID NO: 24420 - protein, 118 aa, unidentified
  source 1..118: note = Pseudomonadaceae bacterium
  REGION 1..118: note = tr|A0A2D5CIT5|A0A2D5CIT5_9GAMM 6-carboxy-5,6,7,8-tetrahydropterin synthase; OS = Pseudomonadaceae bacterium OX=1914538 GN=queD PE=3 SV=1
MELFKEFIFEAAHRLPHVPEGHKCGRLHGHSFRVAVYIEGEVNPHTGWIRDFSEIKAIFKPLYEQLDHNYLNDIPGLENPTSEVLCQWIWKQLKPLLPELSRIRIHETCTSGCEYRGD

SEQ ID NO: 24421 - protein, 121 aa, unidentified
  source 1..121: note = Pseudomonadales bacterium
  REGION 1..121: note = tr|A0A1G3DIJ8|A0A1G3DIJ8_9GAMM 6-carboxy-5,6,7,8-tetrahydropterin synthase; OS = Pseudomonadales bacterium RIFCSPHIGHO2_01_FULL_64_12; OX = 1802004 GN=A2883_07200 PE=3 SV= 1
MHTVEIFKEFTFESAHRLPHVPQGHKCGRLHGHSFRVALYISGPVDPHTGWIRDFGELKSIFKPLYERLDHNYLNDIPGLENPTSENLAKWIWNELKPLLPELSRVRIHETCTSGCEYRGE

SEQ ID NO: 24422 - protein, 198 aa, unidentified
  source 1..198: note = Pseudomonadales bacterium
  REGION 1..198: note = tr|A0A1G3DX77|A0A1G3DX77_9GAMM 6-carboxytetrahydropterin synthase QueD OS=Pseudomonadales bacterium RIFCSPHIGHO2_12_FULL_40_16 OX=1802006; GN = A3F63_07915 PE=4 SV=1
MLIRKLFKFENAHIVRNCTSDRCKRSIHGHSYKVELLLKASKLDHGQMVYDFGLLKGVIKDLYDSFDHAICFWQNDDPEYILACKTFSARWVSLPVSPSAEQFSRIFFYLAQQVLASTVTQNGEGDVEVYSVIVHETDTGYAQSFIEDIENTQMGLLDLSQIEFSEQIQAEWADTEMYTKLKEGIQFHNPNVELQVKL

SEQ ID NO: 24423 - protein, 118 aa, Pseudomonas abietaniphila
  REGION 1..118: note = tr|A0A1G8J052|A0A1G8J052_9PSED 6-carboxy-5,6,7,8-tetrahydropterin synthase OS=Pseudomonas abietaniphila OX=89065 GN=SAMN05216605_111223 PE=3 SV=1
MEIFKEFTFESAHRLPHVPEGHKCGRLHGHSFRVAIYLQGEPDPHTGWIRDFSEIKTIFKPLYERLDHNYLNDIPGLENPTSEVLVKWIWNELKPLLPELSAIRIHETCTSGCVYRGD

SEQ ID NO: 24424 - protein, 148 aa, unidentified
  source 1..148: note = Pseudomonas acidophila
  REGION 1..148: note = tr|A0A2A4F0G5|A0A2A4F0G5_9PSED 6-carboxy-5,6,7,8-tetrahydropterin synthase OS=Pseudomonas acidophila OX=1912599 GN=BWP39_16185 PE=3 SV=1
MLTITRKLEFDAGHRIPDHRSQCRNLHGHRYVLEITLQGDLVETEGAPDRGMVMDFAEVKSLAIEHLVDKWDHAFLVFEGDTRVRGFLESMPDHKTVVLDRIPTVENLAAIAFDILANVYDAHYGVNLRLHHVRLYETPNCWADVVRD

SEQ ID NO: 24425 - protein, 118 aa, Pseudomonas aeruginosa
  REGION 1..118: note = tr|A6V4B2|A6V4B2_PSEA7 6-carboxy-5,6,7,8-tetrahydropterin synthase OS=Pseudomonas aeruginosa (strain PA7) OX=381754 GN=queD PE=3 SV=1
MELFKEFTFESAHRLPHVPEGHKCGRLHGHSFRVAIHIEGEVDPHTGWIRDFAEIKAIFKPIYEQLDHNYLNDIPGLENPTSENLCRWIWQQLKPLLPELSKVRVHETCTSGCEYRGD

SEQ ID NO: 24426 - protein, 118 aa, Pseudomonas aeruginosa
  REGION 1..118: note = tr|A0A2S5IHU4|A0A2S5IHU4_PSEAI 6-carboxy-5,6,7,8-tetrahydropterin synthase OS=Pseudomonas aeruginosa OX=287 GN=queD PE=3 SV=1
MEIFKEFTFESAHRLPHVPAGHKCGRLHGHSFKVGLHLTGPLDPHTGWIRDFAEVKAIFKPIYEQLDHNYLNDIPGLENPTSEVIAKWIWDQVKPLLPELSKVRIHETCTSGCEYYGD

SEQ ID NO: 24427 - protein, 119 aa, Pseudomonas agarici
  REGION 1..119: note = tr|A0A0X1T2V2|A0A0X1T2V2_PSEAA 6-carboxy-5,6,7,8-tetrahydropterin synthase OS=Pseudomonas agarici OX=46677 GN=AWM79_14170 PE=3 SV=1
MVEIFKEFTFESAHRLPHVPDGHKCGRLHGHSFKVAIHLSGEIDRHTGWIRDFSEIKAIFKPLYERLDHNYLNDIPGLENPTSENLAKWIWRELKPLLPELSAIRIHETCTSGCIYRGE

SEQ ID NO: 24428 - protein, 118 aa, Pseudomonas alcaligenes
  REGION 1..118: note = tr|A0A142ISN2|A0A142ISN2_PSEAC 6-carboxy-5,6,7,8-tetrahydropterin synthase OS=Pseudomonas alcaligenes OX=43263 GN=queD PE=3 SV=1
MELFKEFTFESAHLLPHVPAGHKCGRLHGHSFRAAIYIEGEVDPHTGWIRDFAEIKAIFKPIYERLDHNYLNDIPGLENPTSENLAKWIWQELKPLLPELSRIRVHETCTSGCEYRGD

SEQ ID NO: 24429 - protein, 46 aa, Pseudomonas alcaligenes
  REGION 1..46: note = tr|A0A1N6NEK3|A0A1N6NEK3_PSEAC 6-pyruvoyl tetrahydropterin synthase OS=Pseudomonas alcaligenes; OX = 43263 GN=SAMN05878282_101250 PE=4 SV=1
MLIRKLLKFESPHIVRGCSSRRCSRSLHGHSYRIELLLEVHALDNG

SEQ ID NO: 24430 - protein, 118 aa, Pseudomonas alcaliphila
  REGION 1..118: note = tr|A0A1G7DJX8|A0A1G7DJX8_9PSED 6-carboxy-5,6,7,8-tetrahydropterin synthase OS=Pseudomonas alcaliphila OX=101564 GN=SAMN05216575_1031 PE=3 SV=1
MELFKEFIFEAAHRLPHVPEGHKCGRLHGHSFRVAIYIEGDVDPYTGWIRDFSEIKAIFKPIYELLDHNYLNDIPGLENPTSEVLAKWIWQQVKPLLPELSRVRIHETCTSGCEYRGD

SEQ ID NO: 24431 - protein, 118 aa, Pseudomonas alcaliphila
  REGION 1..118: note = tr|A0A1L7G0Z7|A0A1L7G0Z7_9PSED 6-carboxy-5,6,7,8-tetrahydropterin synthase OS=Pseudomonas alcaliphila JAB1 OX=741155 GN=UYA_13920 PE=3 SV=1
MELFKEFIFEAAHRLPHVPEGHKCGRLHGHSFRVAIYIEGEVDPYTGWIRDFSEIKTIFKPIYEQLDHNYLNDIPGLENPTSEVLAKWIWQQVKPLLPELSRVRIHETCTSGCEYRGD

SEQ ID NO: 24432 - protein, 118 aa, unidentified
  source 1..118: note = Pseudomonas alkylphenolica
  REGION 1..118: note = tr|A0A077FBP9|A0A077FBP9_9PSED 6-carboxy-5,6,7,8-tetrahydropterin synthase OS=Pseudomonas alkylphenolica OX=237609 GN=PSAKL28_35160 PE=3 SV=1
MEIFKEFTFESAHRLPHVPEGHKCGRLHGHSFKVALHLTGPLDPHTGWIRDFSEIKAIFKPLYEQLDHNYLNDIPGLENPTSEVIAKWIWDQVKPLLPELSKVRIHETCTSGCEYYGD

SEQ ID NO: 24433 - protein, 118 aa, unidentified
  source 1..118: note = Pseudomonas alkylphenolica
  REGION 1..118: note = tr|A0A443ZHL8|A0A443ZHL8_9PSED 6-carboxy-5,6,7,8-tetrahydropterin synthase OS=Pseudomonas alkylphenolica OX=237609 GN=queD PE=3 SV=1
MEIFKEFTFESAHRLPHVPEGHKCGRLHGHSFKVALHLTGPLDPHTGWIRDFSEIKAIFKPLYEQLDHNYLNDIPGLENPTSEVIAKWIWEQVKPLLPELSKVRIHETCTSGCEYYGD

SEQ ID NO: 24434 - protein, 123 aa, Pseudomonas amygdali
  REGION 1..123: note = tr|A0A3M4CAY2|A0A3M4CAY2_PSEAV 6-carboxy-5,6,7,8-tetrahydropterin synthase (Fragment); OS = Pseudomonas amygdali pv. lachrymans OX=53707; GN = ALQ26_05273 PE=4 SV=1
MHLSRLRSPFFRGQYTVEIFKEFTFESAHRLPHVPEGHKCGRLHGHSFRVGIHLAGKVDPHTGWIRDFSEIKAIFKPLYERLDHNYLNDIPGLENPTSENLAKWIWDELKPLLPELSAVRIHE

SEQ ID NO: 24435 - protein, 195 aa, Pseudomonas amygdali
  REGION 1..195: note = tr|A0A3M2WM49|A0A3M2WM49_PSEA0 6-carboxy-5,6,7,8-tetrahydropterin synthase OS=Pseudomonas amygdali pv. morsprunorum OX=129138 GN=ALQ94_05237 PE=4; SV = 1
MSAFSLFRRVHSGRCFYDVYLNGCNLTQPESVWPSAIKNTPKRSLRPGPAWRFRSLLLDSTPAFIASAIAIFRGQYTVEIFKEFTFESAHLLPHVPEGHKCGRLHGHSFRVGIHLAGKVDPHTGWIRDFSEIKAIFKPLYERLDHNYLNDIPGLENPTSENLAKWIWNELKPLLPELSAIRIHETCTSGCEYRGD

SEQ ID NO: 24436 - protein, 118 aa, Pseudomonas anguilliseptica
  REGION 1..118: note = tr|A0A1H5GNY4|A0A1H5GNY4_PSEAG 6-carboxy-5,6,7,8-tetrahydropterin synthase OS=Pseudomonas anguilliseptica OX=53406 GN=SAMN05421553_4186 PE=3 SV=1
MELFKEFMFEAAHRLPHVPEGHKCGRLHGHSFKVAVYIEGEVDPYTGWIRDFSEIKAIFNPLYEQLDHNYLNDIPGLENPTSEVLAKWIWQQLKPLLPELSRIRIHETCTSGCEYRGD

SEQ ID NO: 24437 - protein, 118 aa, Pseudomonas antarctica
  REGION 1..118: note = tr|A0A1H0C5W4|A0A1H0C5W4_9PSED 6-carboxy-5,6,7,8-tetrahydropterin synthase OS=Pseudomonas antarctica OX=219572 GN=SAMN04490179_4671 PE=3 SV=1
MEIFKEFTFESAHRLPHVPQDHKCGRLHGHSFKVAIHLSGDLDPHTGWIRDFSQIKAIFKPLYERLDHNYLNDIPGLENPTSEVLAKWIWNELKPLLPELSAIRIHETCTSGCIYRGE

SEQ ID NO: 24438 - protein, 118 aa, Pseudomonas antarctica
  REGION 1..118: note = tr|A0A172YZB6|A0A172YZB6_9PSED 6-carboxy-5,6,7,8-tetrahydropterin synthase OS=Pseudomonas antarctica OX=219572 GN=A7J50_2116 PE=3 SV=1
MEIFKEFTFESAHRLPHVPEGHKCGRLHGHSFKVAIHLSGDLDPHTGWIRDFSEIKAIFKPLYERLDHNYLNDIPGLENPTSEVLAKWIWNELKPLLPELSAIRIHETCTSGCIYRGE

SEQ ID NO: 24439 - protein, 146 aa, Pseudomonas argentinensis
  REGION 1..146: note = tr|A0A1I3GKS5|A0A1I3GKS5_9PSED 6-carboxy-5,6,7,8-tetrahydropterin synthase OS=Pseudomonas argentinensis OX=289370 GN=SAMN05216602_0172 PE=3 SV=1
MSTPVAAPPSPSSAAETMVNSNSKTVCELSQRFFFEAAHTLNRDIETESSRRIHGHTYEAEVTVAGQPDATTGMLIDLGYLRSEIARVREMLDHRLLDEVQDLGPATIENLCAFIRKQLEDSVPSLCAVMVERRLSGDRCVLRWTR

SEQ ID NO: 24440 - protein, 118 aa, Pseudomonas argentinensis
  REGION 1..118: note = tr|A0A1I3P3I7|A0A1I3P3I7_9PSED 6-carboxy-5,6,7,8-tetrahydropterin synthase OS=Pseudomonas argentinensis OX=289370 GN=SAMN05216602_4179 PE=3 SV=1
MELFKEFIFEAAHRLPHVPEGHKCGRLHGHSFRIAVYIEGEVDPHTGWIRDFSEIKAIFKPIYEQLDHNYLNDIPGLENPTSEILAKWVWQQLKPLLPELSRIRIHETCTSGCEYRGD

SEQ ID NO: 24441 - protein, 118 aa, Pseudomonas arsenicoxydans
  REGION 1..118: note = tr|A0A1H0RFR2|A0A1H0RFR2_9PSED 6-carboxy-5,6,7,8-tetrahydropterin synthase OS=Pseudomonas arsenicoxydans OX=702115 GN=queD PE=3 SV=1
MEIFKEFTFESAHRLPHVPEGHKCGRLHGHSFKVAIHLSGDLDPHTGWIRDFSEIKAIFKPLYERLDHNYLNDIPGLENPTSEVLAKFIWNELKPLLPELSAIRIHETCTSGCIYHGE

SEQ ID NO: 24442 - protein, 118 aa, Pseudomonas arsenicoxydans
  REGION 1..118: note = tr|A0A4P6G8V1|A0A4P6G8V1_9PSED 6-carboxy-5,6,7,8-tetrahydropterin synthase OS=Pseudomonas arsenicoxydans OX=702115 GN=queD PE=3 SV=1
MEIFKEFTFESAHRLPHVPEGHKCGRLHGHSFKVAIHLSGDLDPHTGWIRDFSEIKAIFKPLYERLDHNYLNDIPGLENPTSEVLAKFIWKELKPLLPELSAIRIHETCTSGCIYHGE

SEQ ID NO: 24443 - protein, 127 aa, Pseudomonas asplenii
  REGION 1..127: note = tr|A0A1H1ZVV1|A0A1H1ZVV1_9PSED 6-carboxy-5,6,7,8-tetrahydropterin synthase OS=Pseudomonas asplenii OX=53407 GN=SAMN05216598_5351 PE=3 SV=1
MHPSELNNTVEIFKEFTFESAHRLPHVPDGHKCGRLHGHSFKVAIHLSGEIDQHTGWIRDFSEIKAIFKPLYERLDHNYLNDIPGLENPTSENLAKWIWEELKPLLPELSAIRIHETCTSGCIYRGE

SEQ ID NO: 24444 - protein, 118 aa, Pseudomonas asplenii
  REGION 1..118: note = tr|A0A3S3AQF1|A0A3S3AQF1_9PSED 6-carboxy-5,6,7,8-tetrahydropterin synthase OS=Pseudomonas asplenii OX=53407 GN=DFH15_2923 PE=3 SV=1
MEIFKEFTFESAHKLPHVPDGHKCGRLHGHSFKVAIHLSGEMDPHTGWIRDFSEIKAIFKPLYERLDHNYLNDIPGLENPTSENLAKWIWQELKPLLPELSAIRIHETCTSGCIYRGE

SEQ ID NO: 24445 - protein, 118 aa, unidentified
  source 1..118: note = Pseudomonas asturiensis
  REGION 1..118: note = tr|A0A1M7L2E5|A0A1M7L2E5_9PSED 6-carboxy-5,6,7,8-tetrahydropterin synthase OS=Pseudomonas asturiensis OX=1190415 GN=SAMN05216593_102527 PE=3 SV=1
MEIFKEFTFESAHRLPHVPEGHKCGRLHGHSFRVGIHLAGKVDPHTGWIRDFSEIKAIFKPLYERLDHNYLNDIPGLENPTSENLAKWIWGELKPLLPELSAVRIHETCTSGCEYRGE

SEQ ID NO: 24446 - protein, 118 aa, Pseudomonas avellanae
  REGION 1..118: note = tr|A0A261WED4|A0A261WED4_9PSED 6-carboxy-5,6,7,8-tetrahydropterin synthase OS=Pseudomonas avellanae OX=46257 GN=queD PE=3 SV=1
MEIFKEFTFESAHLLPHVPEGHKCGRLHGHSFRVGIHLAGKVDPHTGWIRDFSEIKAIFKPLYERLDHNYLNDIPGLENPTSENLAKWIWNELKPLLPELSAIRIHETCTSGCEYRGD

SEQ ID NO: 24447 - protein, 195 aa, Pseudomonas avellanae
  REGION 1..195: note = tr|A0A3M5TPZ4|A0A3M5TPZ4_9PSED 6-carboxy-5,6,7,8-tetrahydropterin synthase OS=Pseudomonas avellanae OX=46257 GN=ALP32_03799 PE=4 SV=1
MSACSLFRRVHSGRCVYGVYLKGCNLTQAESVWPSAIKNTPKRSLRPGPAWRFRSLLLDSTPAFIASAIAIFRGQYTVEIFKEFTFESAHLLPHVPEGHKCGRLHGHSFRVGIHLAGKVDPHTGWIRDFSEIKAIFKPLYERLDHNYLNDIPGLENPTSENLAKWIWNELKPLLPELSAIRIHETCTSGCEYRGD

SEQ ID NO: 24448 - protein, 118 aa, Pseudomonas azotoformans
  REGION 1..118: note = tr|A0A4Q0HMF3|A0A4Q0HMF3_PSEAZ 6-carboxy-5,6,7,8-tetrahydropterin synthase OS=Pseudomonas azotoformans OX=47878 GN=B4O85_26685 PE=3 SV=1
MEIFKEFTFESAHRLPHVPEGHKCGRLHGHSFKVAIHLSGDLDPHTGWIRDFSEIKAIFKPLYERLDHNYLNDIPGLENPTSEVLAKWIWNELKLLLPELSAIRIHETCTSGCIYRGE

SEQ ID NO: 24449 - protein, 118 aa, Pseudomonas azotoformans; identical to SEQ ID NO: 24438
  REGION 1..118: note = tr|A0A127HZG4|A0A127HZG4_PSEAZ 6-carboxy-5,6,7,8-tetrahydropterin synthase OS=Pseudomonas azotoformans OX=47878 GN=ALP43_03690 PE=3 SV=1

SEQ ID NO: 24450 - protein, 118 aa, Pseudomonas baetica
  REGION 1..118: note = tr|A0A2N0DK80|A0A2N0DK80_9PSED 6-carboxy-5,6,7,8-tetrahydropterin synthase OS=Pseudomonas baetica OX=674054 GN=queD PE=3 SV=1
MEIFKEFTFESAHRLPHVPDGHKCGRLHGHSFKVALHLSGDLDPHTGWIRDFSEIKAIFKPLYERLDHNYLNDIPGLENPTSEVLAKFIWNEMKPLLPELSAIRIHETCTSGCIYRGE

SEQ ID NO: 24451 - protein, 118 aa, unidentified
  source 1..118: note = Pseudomonas batumici
  REGION 1..118: note = tr|A0A0C2EVJ0|A0A0C2EVJ0_9PSED 6-carboxy-5,6,7,8-tetrahydropterin synthase OS=Pseudomonas batumici OX=226910 GN=UCMB321_3589 PE=3 SV=1
MEIFKEFTFESAHKLPHVPDGHKCGRLHGHSFKVAIHLSGEVDPYTGWIRDFSEIKAIFKPLYERLDHNYLNDIPGLENPTSEVLAKWIWQELKPLLPELSAIRIHETCTSGCIYRGE

SEQ ID NO: 24452 - protein, 118 aa, Pseudomonas bauzanensis
  REGION 1..118: note = tr|A0A4U0YJ15|A0A4U0YJ15_9PSED 6-carboxy-5,6,7,8-tetrahydropterin synthase OS=Pseudomonas bauzanensis OX=653930 GN=FA869_06480 PE=3 SV=1
MYTIKKEFHFSASHQLKQMPDWHPCARLHGHNYMVVLELQSKTLDQYGFVRDYLELKAFKEYIDAELDHRHLNDVLGDECTTAERLARHLCEWAQARWPEVTAAAVSETPKTWAEYRP

SEQ ID NO: 24453 - protein, 118 aa, Pseudomonas bauzanensis
  REGION 1..118: note = tr|A0A031MGG4|A0A031MGG4_9PSED 6-carboxy-5,6,7,8-tetrahydropterin synthase OS=Pseudomonas bauzanensis OX=653930 GN=SAMN04487855_2767 PE=3 SV=1
MYTIKKEFHFSASHQLKQMPDWHPCARLHGHNYVVVLELQSKTLDQYGFVRDYLELKAFKEYIDAELDHRHLNDVLGDECTTAERLARHLCEWAQARWPEVTAAAVSETPKTWAEYRP

SEQ ID NO: 24454 - protein, 118 aa, Pseudomonas benzenivorans
  REGION 1..118: note = tr|A0A1G8J115|A0A1G8J115_9PSED 6-carboxy-5,6,7,8-tetrahydropterin synthase OS=Pseudomonas benzenivorans OX=556533 GN=SAMN05216603_12824 PE=3 SV=1
MELFKEFIFEAAHRLPRVPEGHKCGRLHGHSFRVAVYIEGEVDPDTGWIRDFSEIKAIFKPLYEQLDHNYLNEIPGLENPTSEVIAKWIWQQLKPLLPELSRIRIHETCTSGCEYRGD

SEQ ID NO: 24455 - protein, 186 aa, Pseudomonas borbori
  REGION 1..186: note = tr|A0A1I5R7Z2|A0A1I5R7Z2_9PSED 6-pyruvoyltetrahydropterin/6-carboxytetrahydropterin synthase OS=Pseudomonas borbori OX=289003; GN = SAMN05216190_112117 PE=4 SV=1
MLIRKLFKFESAHIVRGCSSRRCSHSLHGHSYKIELLQAHALDQGQMVYDFGLLKGDVRDLIDAFDHALTFWDADDADYIASCLRFSERWISLPVSPSAEQFSRVIFRLVDALLQLTEMINGEQDVRMHSVIVHETDTGYAQCFREDAYNPRMGAFELAQIEFSTQVKREWNDPQLFDRLLTALKP

SEQ ID NO: 24456 - protein, 118 aa, Pseudomonas borbori
  REGION 1..118: note = tr|A0A1I5NXC5|A0A1I5NXC5_9PSED 6-carboxy-5,6,7,8-tetrahydropterin synthase OS=Pseudomonas borbori OX=289003 GN=SAMN05216190_107125 PE=3 SV=1
MELFKEFIFEAAHRLPHVPEGHKCGRLHGHSFRVAVYIEGEVDPYTGWIRDFSEIKAIFKPLYEQLDHNYLNEIPGLENPTSEVIAKWIWQQLKPLLPELSRIRIHETCTSGCEYRGN

SEQ ID NO: 24457 - protein, 118 aa, Pseudomonas brassicacearum
  REGION 1..118: note = tr|A0A423GR18|A0A423GR18_9PSED 6-carboxy-5,6,7,8-tetrahydropterin synthase OS=Pseudomonas brassicacearum OX=930166 GN=BK658_14440 PE=3 SV=1
MEIFKEFTFESAHRLPHVPEGHKCGRLHGHSFKVAIHLSGDLDPHTGWIRDFSEIKAIFKPLYERLDHNYLNDIPGLENPTSEVLAKWIWNELKPLLPELSAIRIHETCTSGCIYHGE

SEQ ID NO: 24458 - protein, 118 aa, Pseudomonas brassicacearum
  REGION 1..118: note = tr|A0A423H3K8|A0A423H3K8_9PSED 6-carboxy-5,6,7,8-tetrahydropterin synthase OS=Pseudomonas brassicacearum OX=930166 GN=BK659_18675 PE=3 SV=1
MEIFKEFTFESAHRLPHVPEGHKCGRLHGHSFKVAIHLSGDLDPHTGWIRDFSEIKEIFKPLYERLDHNYLNDIPGLENPTSEVLAKFIWNELKPLLPELSAIRIHETCTSGCIYHGE

SEQ ID NO: 24459 - protein, 129 aa, Pseudomonas brenneri
  REGION 1..129: note = tr|A0A176V8H3|A0A176V8H3_9PSED 6-carboxy-5,6,7,8-tetrahydropterin synthase OS=Pseudomonas brenneri OX=129817 GN=A2T76_10055 PE=3 SV=1
MVNSNSNTICELSQRFYFEAAHTLNRGIETESSRRIHGHTYEAEVTVAGQPDANSGMLIDLGYLRGEIARVREMLDHRLLDEVEDLGPATIENLCAFIRKQLEDSVTSLCAVMVERRLSGDRCVLRWTR

SEQ ID NO: 24460 - protein, 118 aa, Pseudomonas brenneri; identical to SEQ ID NO: 24438
  REGION 1..118: note = tr|A0A176V4G0|A0A176V4G0_9PSED 6-carboxy-5,6,7,8-tetrahydropterin synthase OS=Pseudomonas brenneri OX=129817 GN=A2T76_23380 PE=3 SV=1

SEQ ID NO: 24461 - protein, 118 aa, unidentified; identical to SEQ ID NO: 24438
  source 1..118: note = Pseudomonas canadensis
  REGION 1..118: note = tr|A0A423FH46|A0A423FH46_9PSED 6-carboxy-5,6,7,8-tetrahydropterin synthase OS=Pseudomonas canadensis OX=915099 GN=BK649_02340 PE=3 SV=1

SEQ ID NO: 24462 - protein, 186 aa, Pseudomonas cannabina
  REGION 1..186: note = tr|A0A0P9RAU5|A0A0P9RAU5_PSECA 6-carboxy-5,6,7,8-tetrahydropterin synthase OS=Pseudomonas cannabina OX=86840 GN=ALO81_00308 PE=4 SV=1
MAVRCFYEDYFNRNNLIQAEGFWPSAIKQPGAEVNIGEGLAWRFGALLLNSPPAFIASAIAIFRGQYTVEIFKEFTFESAHLLPNVPEGHKCGRLHGHSFRVGIHLAGKVDPHTGWIRDFSEIKAIFKPLYERLDHHYLNDIPGLENPTSENLAKWIWEELKPLLPELSAVRIHETCTSGCEYRGD

SEQ ID NO: 24463 - protein, 186 aa, Pseudomonas cannabina
  REGION 1..186: note = tr|A0A3M3QZT1|A0A3M3QZT1_PSECA 6-carboxy-5,6,7,8-tetrahydropterin synthase OS=Pseudomonas cannabina OX=86840 GN=ALQ51_03762 PE=4 SV=1
MAVRCFYEDYFNRNNLIQAEGFWPSAIKQPGAEVNIGEGLAWRFGALLLNSPPAFIASAIAIFRGQYTVEIFKEFTFESAHLLPNVPEGHKCGRLHGHSFRVGIHLAGKVDPHTGWIRDFSEIKAIFKPLYERLDHHYLNDIPGLENPTSENLAKWIWEKLKPLLPELSAVRIHETCTSGCEYRGD

SEQ ID NO: 24464 - protein, 118 aa, unidentified
  source 1..118: note = Pseudomonas capeferrum
  REGION 1..118: note = tr|A0A084CHS2|A0A084CHS2_9PSED 6-carboxy-5,6,7,8-tetrahydropterin synthase OS=Pseudomonas capeferrum OX=1495066 GN=PC358_09445 PE=3 SV=1
MEIFKEFTFESAHRLPHVPAGHKCGRLHGHSFKVGLHLTGPLDPHTGWIRDFSEIKAIFKPIYEQLDHNYLNDIPGLENPTSEVIAKWIWEQVKPLLPELSKVRIHETCTSGCEYTGD

SEQ ID NO: 24465 - protein, 81 aa, Pseudomonas caricapapayae
  REGION 1..81: note = tr|A0A3M3B7A3|A0A3M3B7A3_9PSED 6-carboxy-5,6,7,8-tetrahydropterin synthase OS=Pseudomonas caricapapayae OX=46678 GN=ALQ84_101901 PE=4 SV=1
MAGKVDPHTGWIRDFSEIKAIFKPLYERLDHNYLNDIPGLENPTSENLAKWIWNELKPLLPELSAVRIHETCTSGCEYRGD

SEQ ID NO: 24466 - protein, 118 aa, Pseudomonas caricapapayae
  REGION 1..118: note = tr|A0A0P9PVE3|A0A0P9PVE3_9PSED 6-carboxy-5,6,7,8-tetrahydropterin synthase OS=Pseudomonas caricapapayae OX=46678 GN=ALO80_01752 PE=3 SV=1
MEIFKEFTFESAHRLPHVPEGHKCGRLHGHSFRVGIHLAGKVDPHTGWIRDFSEIKAIFKPLYERLDHNYLNDIPGLENPTSENLAKWIWNELKPLLPELSAVRIHETCTSGCEYRGD

SEQ ID NO: 24467 - protein, 118 aa, unidentified; identical to SEQ ID NO: 24442
  source 1..118: note = Pseudomonas caspiana
  REGION 1..118: note = tr|A0A502IYW9|A0A502IYW9_9PSED 6-carboxy-5,6,7,8-tetrahydropterin synthase OS=Pseudomonas caspiana OX=1451454 GN=queD PE=3 SV=1

SEQ ID NO: 24468 - protein, 119 aa, unidentified
  source 1..119: note = Pseudomonas caspiana
  REGION 1..119: note = tr|A0A1Y3P961|A0A1Y3P961_9PSED 6-carboxy-5,6,7,8-tetrahydropterin synthase OS=Pseudomonas caspiana OX=1451454 GN=AUC60_06555 PE=3 SV=1
MVEIFKEFTFESAHFLPHVPEGHKCGRLHGHSFRIAIHLEGEVDPHIGWIRDFSEIKAIFKPLYERLDHHYLNDIPGLENPTSENLAKWIFAELKPLLPELSAIRIHETCTSGCIYRGE

SEQ ID NO: 24469 - protein, 118 aa, Pseudomonas cedrina; identical to SEQ ID NO: 24438
  REGION 1..118: note = tr|A0A2S9DML6|A0A2S9DML6_PSECE 6-carboxy-5,6,7,8-tetrahydropterin synthase OS=Pseudomonas cedrina OX=651740 GN=queD PE=3 SV=1

SEQ ID NO: 24470 - protein, 118 aa, Pseudomonas cedrina
  REGION 1..118: note = tr|A0A1V2JXW4|A0A1V2JXW4_PSECE 6-carboxy-5,6,7,8-tetrahydropterin synthase OS=Pseudomonas cedrina subsp. cedrina OX=76762 GN=BLL36_26575 PE=3 SV=1
MEIFKEFTFESAHRLPHVPEGHKCGRLHGHSFKVAIHLSGDLDPHTGWIRDFSEIKAIFKPLYERLDHNYLNDIPGLENPTSEVLAKWIWKELQPLLPELSAIRIHETCTSGCIYRGE

SEQ ID NO: 24471 - protein, 118 aa, unidentified; identical to SEQ ID NO: 24466
  source 1..118: note = Pseudomonas cerasi
  REGION 1..118: note = tr|A0A193SN09|A0A193SN09_9PSED 6-carboxy-5,6,7,8-tetrahydropterin synthase OS=Pseudomonas cerasi OX=1583341 GN=queD PE=3 SV=1

SEQ ID NO: 24472 - protein, 118 aa, unidentified
  source 1..118: note = Pseudomonas chengduensis
  REGION 1..118: note = tr|A0A1G6WUD5|A0A1G6WUD5_9PSED 6-carboxy-5,6,7,8-tetrahydropterin synthase OS=Pseudomonas chengduensis OX=489632 GN=SAMN05216576_1293 PE=3 SV=1
MELFKEFIFEAAHRLPHVPEGHKCGRLHGHSFRVAIYIEGEVDPYTGWIRDFSEIKAIFKPIYEQLDHNYLNDIPGLENPTSEVLAKWIWQQVKPLLPELSRVRIHETCTSGCEYRGD

SEQ ID NO: 24473 - protein, 118 aa, Pseudomonas chlororaphis; identical to SEQ ID NO: 24450
  REGION 1..118: note = tr|A0A0A6DBC0|A0A0A6DBC0_9PSED 6-carboxy-5,6,7,8-tetrahydropterin synthase OS=Pseudomonas chlororaphis OX=587753 GN=NZ35_12510 PE=3 SV=1

SEQ ID NO: 24474 - protein, 118 aa, Pseudomonas chlororaphis
  REGION 1..118: note = tr|A0A0E1ECF1|A0A0E1ECF1_9PSED 6-carboxy-5,6,7,8-tetrahydropterin synthase OS=Pseudomonas chlororaphis OX=587753 GN=C4K04_4167 PE=3 SV=1
MEIFKEFTFESAHRLPHVPAGHKCGRLHGHSFKVAIHLSGDLDPHTGWIRDFSEIKEIFKPLYERLDHNYLNDIPGLENPTSEVLAKWIWNELKPLLPELSAIRIHETCTSGCIYRGE

SEQ ID NO: 24475 - protein, 118 aa, Pseudomonas cichorii
  REGION 1..118: note = tr|A0A3M4LX35|A0A3M4LX35_PSECI 6-carboxy-5,6,7,8-tetrahydropterin synthase OS=Pseudomonas cichorii OX=36746 GN=ALQ04_01597 PE=3 SV=1
MEIFKEFTFESAHLLPHVPEGHKCGRLHGHSFRVGIHLSGKVDPHIGWIRDFSEIKAIFKPLYERLDHNYLNDIPGLENPTSENLAKWIWDELKPLLPELSAVRIHETCTSGCEYRGE

SEQ ID NO: 24476 - protein, 118 aa, Pseudomonas cichorii
  REGION 1..118: note = tr|A0A3M3SRZ5|A0A3M3SRZ5_PSECI 6-carboxy-5,6,7,8-tetrahydropterin synthase OS=Pseudomonas cichorii OX=36746 GN=ALP84_01899 PE=3 SV=1
MEIFKEFTFESAHRLPHVPEGHKCGRLHGHSFRVGIHLSGKVDPHIGWIRDFSEIKAIFKPLYERLDHNYLNDIPGLENPTSENLAKWIWDELKPLLPELSAVRIHETCTSGCEYRGE

SEQ ID NO: 24477 - protein, 118 aa, Pseudomonas citronellolis
  REGION 1..118: note = tr|A0A127MVR8|A0A127MVR8_9PSED 6-carboxy-5,6,7,8-tetrahydropterin synthase OS=Pseudomonas citronellolis OX=53408 GN=queD PE=3 SV=1
MELFKEFTFESAHRLPHVPEGHKCGRLHGHSFRVALYIEGEVDPHTGWIRDFSEIKQIFKPIYEQLDHNYLNDIPGLENPTSENLSRWIWQQVKPLLPELSRVRVHETCTSGCEYRGD

SEQ ID NO: 24478 - protein, 118 aa, unidentified
  source 1..118: note = Pseudomonas coleopterorum
  REGION 1..118: note = tr|A0A1H5IUV7|A0A1H5IUV7_9PSED 6-carboxy-5,6,7,8-tetrahydropterin synthase OS=Pseudomonas coleopterorum OX=1605838 GN=SAMN05216510_2631 PE=3 SV=1
MEIFKEFTFESAHRLPHVPEGHKCGRLHGHSFKVAIYLKGDVDPHTGWIRDFSEIKAIFKPLYERLDHNYLNDLPGLENPTSENLAKWIWHELKPLLPELSKIRIHETCTSGCEYTGD

SEQ ID NO: 24479 - protein, 147 aa, unidentified
  source 1..147: note = Pseudomonas coleopterorum
  REGION 1..147: note = tr|A0A1H5DY78|A0A1H5DY78_9PSED 6-carboxy-5,6,7,8-tetrahydropterin synthase OS=Pseudomonas coleopterorum OX=1605838 GN=SAMN05216510_0546 PE=3 SV=1
MMSTSPGAPTSPSPDAEFMLNSTRNTICELSQRFFFEAAHTLSRGIETESSRRIHGHTYEAEVTVAGQPDATSGMLIDLGYLRSEIARVREMLDHRLLDEVQDLGPATIENLCAFIRKQLEDSVPSLCAVMVERRLSGDRCVLRWTR

SEQ ID NO: 24480 - protein, 118 aa, Pseudomonas composti; identical to SEQ ID NO: 24472
  REGION 1..118: note = tr|A0A1I5QQF4|A0A1I5QQF4_9PSED 6-carboxy-5,6,7,8-tetrahydropterin synthase OS=Pseudomonas composti OX=658457 GN=SAMN05216601_112158 PE=3 SV=1

SEQ ID NO: 24481 - protein, 118 aa, Pseudomonas congelans; identical to SEQ ID NO: 24466
  REGION 1..118: note = tr|A0A0N8R1C0|A0A0N8R1C0_9PSED 6-carboxy-5,6,7,8-tetrahydropterin synthase OS=Pseudomonas congelans OX=200452 GN=ALO92_01833 PE=3 SV=1

SEQ ID NO: 24482 - protein, 140 aa, unidentified
  source 1..140: note = Pseudomonas coronafaciens
  REGION 1..140: note = tr|A0A3M4C7L8|A0A3M4C7L8_9PSED 6-carboxy-5,6,7,8-tetrahydropterin synthase OS=Pseudomonas coronafaciens pv. atropurpurea OX=129135 GN=ALQ25_00237; PE = 3 SV=1
MLLNLPPAFIASAIAIFRGQYTVEIFKEFTFESAHLLPHVPEGHKCGRLHGHSFRVGIHLAGKVDPHTGWIRDFSEIKAIFKPLYERLDHHYLNDIPGLENPTSENLAKWIWDELKPLLPELSAIRIHETCTSGCEYRGD

SEQ ID NO: 24483 - protein, 140 aa, unidentified; identical to SEQ ID NO: 24482
  source 1..140: note = Pseudomonas coronafaciens
  REGION 1..140: note = tr|A0A0Q0FPC8|A0A0Q0FPC8_9PSED 6-carboxy-5,6,7,8-tetrahydropterin synthase OS=Pseudomonas coronafaciens pv. zizaniae OX=251700 GN=ALO38_02537 PE=3; SV = 1

SEQ ID NO: 24484 - protein, 118 aa, Pseudomonas corrugata
  REGION 1..118: note = tr|A0A3M3EM98|A0A3M3EM98_9PSED 6-carboxy-5,6,7,8-tetrahydropterin synthase OS=Pseudomonas corrugata OX=47879 GN=ALQ77_02564 PE=3 SV=1
MEIFKEFTFESAHRLPHVPDGHKCGRLHGHSFKVAIHLSGEIDSHTGWIRDFSEIKAIFKPLYERLDHNYLNDIPGLENPTSEVLAKWIWNELKPLLPELSAIRIHETCTSGCIYRGE

SEQ ID NO: 24485 - protein, 118 aa, Pseudomonas costantinii; identical to SEQ ID NO: 24438
  REGION 1..118: note = tr|A0A1S2V547|A0A1S2V547_9PSED 6-carboxy-5,6,7,8-tetrahydropterin synthase OS=Pseudomonas costantinii OX=168469 GN=BFL40_08150 PE=3 SV=1

SEQ ID NO: 24486 - protein, 124 aa, Pseudomonas cremoricolorata
  REGION 1..124: note = tr|A0A089YI61|A0A089YI61_9PSED 6-carboxy-5,6,7,8-tetrahydropterin synthase OS=Pseudomonas cremoricolorata OX=157783 GN=LK03_19880 PE=3 SV=1
MQECLRVEIFKEFTFESAHRLPNVPAGHKCGRLHGHSFKVALHLTGPLDPHTGWIRDFSEIKAVFKPIYDQLDHNYLNDIPGLENPTSEVIAKWIWDQVKPLLPELSKVRIHETCTSGCEYTGD

SEQ ID NO: 24487 - protein, 118 aa, Pseudomonas cuatrocienegasensis
  REGION 1..118: note = tr|A0A1H9MRT7|A0A1H9MRT7_9PSED 6-carboxy-5,6,7,8-tetrahydropterin synthase OS=Pseudomonas cuatrocienegasensis OX=543360 GN=SAMN05216600_1203 PE=3; SV = 1
MELFKEFMFEAAHRLPHVPAGHKCGRLHGHSFRVAIYIEGEVDPHTGWIRDFSEIKAIFKPLYEQLDHNYLNDLPGLENPTSEVLAKWIWKELKPLLPELSRIRIHETCTSGCEYRGD

SEQ ID NO: 24488 - protein, 118 aa, unidentified
  source 1..118: note = Pseudomonas daroniae
  REGION 1..118: note = tr|A0A4Q9QEZ3|A0A4Q9QEZ3_9PSED 6-carboxy-5,6,7,8-tetrahydropterin synthase OS=Pseudomonas daroniae OX=2487519 GN=queD PE=3 SV=1
MELFKEFIFEAAHHLPHVPEGHKCGRLHGHSFRIAVYIEGEVDPHTGWIRDFAELKAIFKPIYEQLDHNYLNDIPGLENPTSEVIAKWVWQQLKPLLPELSRIRIHETCSSGCEYRGD

SEQ ID NO: 24489 - protein, 118 aa, Pseudomonas deceptionensis
  REGION 1..118: note = tr|A0A1H5NYY0|A0A1H5NYY0_PSEDM 6-carboxy-5,6,7,8-tetrahydropterin synthase OS=Pseudomonas deceptionensis OX=882211 GN=SAMN04489800_4131 PE=3 SV=1
MEIFKEFTFESAHRLPYVPEGHKCGRLHGHSFKVAIHLSGDIDPATGWIRDFSEIKAIFKPLYERLDHNYLNDIPGLENPTSEVLAKWIWQQLKPLLPELSAIRIHETCTSGCIYYGD

SEQ ID NO: 24490 - protein, 118 aa, Pseudomonas delhiensis
  REGION 1..118: note = tr|A0A239JS42|A0A239JS42_9PSED 6-carboxy-5,6,7,8-tetrahydropterin synthase OS=Pseudomonas delhiensis OX=366289 GN=SAMN05216189_10283 PE=3 SV=1
MELFKEFTFESAHRLPHVPEGHKCGRLHGHSFRVALYIEGEVDPYTGWIRDFSEIKQIFKPIYEQLDHNYLNDIPGLENPTSENLSRWIWQQVKPLLPELSRVRVHETCTSGCEYRGD

SEQ ID NO: 24491 - protein, 118 aa, unidentified
  source 1..118: note = Pseudomonas denitrificans
  REGION 1..118: note = tr|A0A5J6R0Q3|A0A5J6R0Q3_PSEDE 6-carboxytetrahydropterin synthase QueD OS=Pseudomonas denitrificans OX=43306 GN=queD PE=4 SV=1
MELFKEFTFESAHRLPHVPAGHQCGRLHGHSFRAAIYIEGEVDPHTGWIRDFAEIKQIFKPIYDQLDHNYLNDIPGLENPTSENLCRWIWQQLKPLLPELSKVRVHETCTSGCEYRGD

SEQ ID NO: 24492 - protein, 118 aa, unidentified; identical to SEQ ID NO: 24432
  source 1..118: note = Pseudomonas donghuensis
  REGION 1..118: note = tr|A0A2M9VJ87|A0A2M9VJ87_9PSED 6-carboxy-5,6,7,8-tetrahydropterin synthase OS=Pseudomonas donghuensis OX=1163398 GN=queD PE=3 SV=1

SEQ ID NO: 24493 - protein, 118 aa, unidentified
  source 1..118: note = Pseudomonas dryadis
  REGION 1..118: note = tr|A0A4V2KD82|A0A4V2KD82_9PSED 6-carboxy-5,6,7,8-tetrahydropterin synthase OS=Pseudomonas dryadis OX=2487520 GN=queD PE=3 SV=1
MELFKEFIFEAAHRLPHVPAGHKCGRLHGHSFRIAVYIEGEVDPHTGWIRDFSEIKAIFKPIYEQLDHNYLNDIPGLENPTSEVIVKWVWQQLKPLLPELSRIRIHETCSSGCEYRGD

SEQ ID NO: 24494 - protein, 118 aa, Pseudomonas duriflava
  REGION 1..118: note = tr|A0A562Q7W1|A0A562Q7W1_9PSED 6-carboxy-5,6,7,8-tetrahydropterin synthase OS=Pseudomonas duriflava OX=459528 GN=IQ22_03219 PE=3 SV=1
MEIFKEFIFEAAHFLPNVPPGHKCGRLHGHSFKVALHIAGPVDPHTGWVRDFADIKAIFKPLYERLDHHYLNEIPGLENPTSENLSIWIWNELKPLLPELSRVRVHETCTSGCEYRGT

SEQ ID NO: 24495 - protein, 135 aa, Pseudomonas duriflava
  REGION 1..135: note = tr|A0A562PZ07|A0A562PZ07_9PSED 6-carboxy-5,6,7,8-tetrahydropterin synthase OS=Pseudomonas duriflava OX=459528 GN=IQ22_03956 PE=3 SV=1
MSTSTDNALDNCRSVYELSQRFFFEAAHTLNRTIETEGSLRIHGHTYEAEVTVAGQPDPTSGMLIDLGYLRSEIARVKEMLDHRFLDEVQGLGSATIENLCAFIRAQMADSVPGLCAVMIERRASGDRCVLRWTR

SEQ ID NO: 24496 - protein, 121 aa, unidentified
  source 1..121: note = Pseudomonas endophytica
  REGION 1..121: note = tr|A0A0Q1CCJ7|A0A0Q1CCJ7_9PSED 6-carboxy-5,6,7,8-tetrahydropterin synthase OS=Pseudomonas endophytica OX=1563157 GN=AQS70_04020 PE=3 SV=1
MNIVEIFKEFTFESAHRLPYVPEGHKCGRLHGHSFKVAIHLSGDIDPATGWIRDFSEIKAIFKPLYEQLDHNYLNDIPGLENPTSEVLAKWIWQQLKPLLPELSAIRIHETCTSGCIYYGD

SEQ ID NO: 24497 - protein, 118 aa, unidentified
  source 1..118: note = Pseudomonas entomophila
  REGION 1..118: note = tr|A0A3Q8TTU4|A0A3Q8TTU4_9PSED 6-carboxy-5,6,7,8-tetrahydropterin synthase OS=Pseudomonas entomophila OX=312306 GN=queD PE=3 SV=1
MEIFKEFTFESAHRLPNVPAGHKCGRLHGHSFKVGLHLTGPLDPHTGWIRDFSEIKAIFKPIYEQLDHNYLNDIPGLENPTSEVLAKWIWEQVKPLLPELSKVRIHETCTSGCEYTGD

SEQ ID NO: 24498 - protein, 118 aa, unidentified
  source 1..118: note = Pseudomonas entomophila
  REGION 1..118: note = tr|Q1IC67|Q1IC67_PSEE4 6-carboxy-5,6,7,8-tetrahydropterin synthase OS=Pseudomonas entomophila (strain L48) OX=384676 GN=PSEEN1910 PE=3 SV=1
MEIFKEFTFESAHRLPNVPAGHKCGRLHGHSFKVALHLTGPLDPHTGWIRDFSEIKAIFKPIYEQLDHNYLNDIPGLENPTSEVIAKWIWEQVKPLLPELSKVRIHETCTSGCEYTGD

SEQ ID NO: 24499 - protein, 118 aa, Pseudomonas extremaustralis
  REGION 1..118: note = tr|A0A5C5Q8L5|A0A5C5Q8L5_9PSED 6-carboxy-5,6,7,8-tetrahydropterin synthase OS=Pseudomonas extremaustralis OX=359110 GN=queD PE=3 SV=1
MEIFKEFTFESAHRLPHVPEGHKCGRLHGHSFKVAIHLSGDLDPHTGWIRDFSEIKAIFKPLYERLDHNYLNDIPGLENPTSEVLAKWIWTELKPLLPELSAIRIHETCTSGCIYRGE

SEQ ID NO: 24500 - protein, 118 aa, Pseudomonas extremorientalis; identical to SEQ ID NO: 24438
  REGION 1..118: note = tr|A0A1H0WC51|A0A1H0WC51_9PSED 6-carboxy-5,6,7,8-tetrahydropterin synthase OS=Pseudomonas extremorientalis OX=169669 GN=BFN10_10875 PE=3 SV=1

SEQ ID NO: 24501 - protein, 118 aa, Pseudomonas ficuserectae
  REGION 1..118: note = tr|A0A0P9QPF2|A0A0P9QPF2_9PSED 6-carboxy-5,6,7,8-tetrahydropterin synthase OS=Pseudomonas ficuserectae OX=53410 GN=ALO69_00954 PE=3 SV=1
MEIFKEFTFESAHRLPHVPEGHKCGRLHGHSFRVGIHLAGKVDPHTGWIRDFSEIKAIFKPLYERLDHNYLNDIPGLENPTSENLAKWIWDELKPLLPELSAVRIHETCTSGCEYRGD

SEQ ID NO: 24502 - protein, 118 aa, Pseudomonas flavescens
  REGION 1..118: note = tr|A0A1G7YLX9|A0A1G7YLX9_9PSED 6-carboxy-5,6,7,8-tetrahydropterin synthase OS=Pseudomonas flavescens OX=29435 GN=SAMN05216588_1022 PE=3 SV=1
MELFKEFIFEAAHRLPHVPEGHKCGRLHGHSFRIAVYIEGEVDPYTGWIRDFSEIKAIFKPIYEQLDHNYLNDIPGLENPTSEILAKWVWQQLKPLLPELSRIRIHETCTSGCEYRGD

SEQ ID NO: 24503 - protein, 118 aa, unidentified
  source 1..118: note = Pseudomonas flexibilis
  REGION 1..118: note = tr|A0A1N6RB06|A0A1N6RB06_9PSED 6-carboxy-5,6,7,8-tetrahydropterin synthase OS=Pseudomonas flexibilis OX=706570 GN=SAMN05421672_104192 PE=3 SV=1
MYTIKKEFHFSASHQLKQMPAGHPCARLHGHNYVVVLELRGEQLNPYGFVRDYLELKPFKDYIDDTLDHRHLNEVLGDERTTAERLARHLYDWARARWPEVSAVSVSETPKTWAEYRP

SEQ ID NO: 24504 - protein, 118 aa, unidentified
  source 1..118: note = Pseudomonas flexibilis
  REGION 1..118: note = tr|A0A0B3BMU7|A0A0B3BMU7_9PSED 6-carboxy-5,6,7,8-tetrahydropterin synthase OS=Pseudomonas flexibilis OX=706570 GN=PT85_07025 PE=3 SV=1
MYTIKKEFHFSASHQLKQMPDGHPCARLHGHNYVVVLELKGEQLNPYGFVRDYLELQAFKDYIDDTLDHRHLNEVLGDECTTAERLARHLYDWARARWPEVSAVAVSETPKTWAEYRP

SEQ ID NO: 24505 - protein, 118 aa, unidentified
  source 1..118: note = Pseudomonas floridensis
  REGION 1..118: note = tr|A0A1X0MZ96|A0A1X0MZ96_9PSED 6-carboxy-5,6,7,8-tetrahydropterin synthase OS=Pseudomonas floridensis OX=1958950 GN=BZK31_25400 PE=3 SV=1
MEIFKEFTFESAHRLPHVPEGHKCGRLHGHSFRVGIHLAGKVDPHTGWIRDFSEIKAIFKPLYERLDHNYLNDIPGLENPTSENLAKWIWNELKPLLPELSAVRIHETCTSGCEYRGE

SEQ ID NO: 24506 - protein, 118 aa, Pseudomonas fluorescens
  REGION 1..118: note = tr|Q4K9G7|Q4K9G7_PSEF5 6-carboxy-5,6,7,8-tetrahydropterin synthase OS=Pseudomonas fluorescens (strain ATCC BAA-477 / NRRL B-23932 / Pf-5); OX = 220664 GN=queD PE=3 SV=1
MEIFKEFTFESAHRLPFVPEGHKCGRLHGHSFKVAIHLSGEVDAHTGWIRDFSEIKAIFKPLYERLDHNYLNDIPGLENPTSEVLAKWIWNELKPLLPELSAIRIHETCTSGCIYRGE

SEQ ID NO: 24507 - protein, 118 aa, Pseudomonas fluorescens
  REGION 1..118: note = tr|A0A2A5R4H0|A0A2A5R4H0_PSEFL 6-carboxy-5,6,7,8-tetrahydropterin synthase OS=Pseudomonas fluorescens OX=294 GN=queD PE=3 SV=1
MEIFKEFTFESAHRLPHVPDGHKCGRLHGHSFKVAIHLSGDLDPHTGWIRDFSEIKAIFKPLYERLDHNYLNDIPGLENPTSEVLAKFIWNELKPLLPELSAIRIHETCTSGCIYRGE

SEQ ID NO: 24508 - protein, 118 aa, Pseudomonas fragi
  REGION 1..118: note = tr|A0A267A5T2|A0A267A5T2_PSEFR 6-carboxy-5,6,7,8-tetrahydropterin synthase OS=Pseudomonas fragi OX=296 GN=queD PE=3 SV=1
MEIFKEFTFESAHRLPYVPEGHKCGRLHGHSFKVAIHLSGDIDPATGWIRDFSEIKAIFKPLYELLDHNYLNDIPGLENPTSEVLAKWIWQQLKPLLAELSAIRIHETCTSGCIYYGD

SEQ ID NO: 24509 - protein, 118 aa, Pseudomonas fragi
  REGION 1..118: note = tr|A0A267B6M7|A0A267B6M7_PSEFR 6-carboxy-5,6,7,8-tetrahydropterin synthase OS=Pseudomonas fragi OX=296 GN=queD PE=3 SV=1
MEIFKEFTFESAHRLPYVPEGHKCGRLHGHSFKVAIHLSGDIDPATGWIRDFSEIKAIFKPLYELLDHNYLNDIPGLENPTSEVLAKWIWQQLKPLLPELSAIRIHETCTSGCIYYGD

SEQ ID NO: 24510 - protein, 118 aa, Pseudomonas frederiksbergensis
  REGION 1..118: note = tr|A0A0B1YXT4|A0A0B1YXT4_9PSED 6-carboxy-5,6,7,8-tetrahydropterin synthase OS=Pseudomonas frederiksbergensis OX=104087 GN=JZ00_25640 PE=3 SV=1
MEIFKEFTFESAHRLPHVPEGHKCGRLHGHSFKVAIHLSGDIDPHTGWIRDFSEIKAIFKPLYERLDHNYLNDIPGLENPTSEVLAKWIWNELKPLLPELSAIRIHETCTSGCIYHGE

SEQ ID NO: 24511 - protein, 118 aa, Pseudomonas frederiksbergensis; identical to SEQ ID NO: 24442
  REGION 1..118: note = tr|A0A1H5GNH3|A0A1H5GNH3_9PSED 6-carboxy-5,6,7,8-tetrahydropterin synthase OS=Pseudomonas frederiksbergensis OX=104087 GN=SAMN04490185_5100 PE=3 SV=1

SEQ ID NO: 24512 - protein, 118 aa, Pseudomonas fulva
  REGION 1..118: note = tr|F6AFL3|F6AFL3_PSEF1 6-carboxy-5,6,7,8-tetrahydropterin synthase OS=Pseudomonas fulva (strain 12-X) OX=743720 GN=Psefu_2604 PE=3 SV=1
MELFKEFIFEAAHRLPHVPEGHKCGRLHGHSFRIAVYIEGDVDPYTGWIRDFSEIKAIFKPIYEQLDHNYLNDIPGLENPTSEILAKWVWQQLKPLLPELSRIRIHETCTSGCEYRGD

SEQ ID NO: 24513 - protein, 118 aa, Pseudomonas fulva
  REGION 1..118: note = tr|A0A2V4JT33|A0A2V4JT33_9PSED 6-carboxy-5,6,7,8-tetrahydropterin synthase OS=Pseudomonas fulva OX=47880 GN=queD PE=3 SV=1
MEIFKEFMFESAHRLPHVPEGHKCGRLHGHSFKVGLHLTGPLDPHTGWIRDFAEIKAVFKPIYEQLDHNYLNDIPGLENPTSEVIAKWIWDQVKPLLPELSKVRIHETCTSGCEYSGD

SEQ ID NO: 24514 - protein, 118 aa, unidentified
  source 1..118: note = Pseudomonas furukawaii
  REGION 1..118: note = tr|L8MQA6|L8MQA6_PSEFK 6-carboxy-5,6,7,8-tetrahydropterin synthase OS=Pseudomonas furukawaii OX=1149133 GN=ppKF707_1468 PE=3 SV=1
MEIFKEFVFEAAHRLPHVPAGHKCGRLHGHSFRVAIYIEGEPDPHTGWIRDFSELKAIFKPLYEQLDHNYLNEIPGLENPTSEVLAKWIWKSLKPLLPELSRIRIHETCTSGCEYRGD

SEQ ID NO: 24515 - protein, 118 aa, Pseudomonas fuscovaginae
  REGION 1..118: note = tr|A0A0N0E4C7|A0A0N0E4C7_9PSED 6-carboxy-5,6,7,8-tetrahydropterin synthase OS=Pseudomonas fuscovaginae OX=50340 GN=PF66_02450 PE=3 SV=1
MEIFKEFTFESAHRLPNVPAGHKCGRLHGHSFKVAIHLSGDIDQHTGWIRDFSEIKAIFKPLYERLDHNYLNEIPGLENPTSENLAKWIWKELKPLLPELSAIRIHETCTSGCIYRGE

SEQ ID NO: 24516 - protein, 127 aa, Pseudomonas fuscovaginae; identical to SEQ ID NO: 24443
  REGION 1..127: note = tr|A0A1H6NYU4|A0A1H6NYU4_9PSED 6-carboxy-5,6,7,8-tetrahydropterin synthase OS=Pseudomonas fuscovaginae OX=50340 GN=SAMN05216581_3138 PE=3 SV=1

SEQ ID NO: 24517 - protein, 120 aa, unidentified
  source 1..120: note = [Pseudomonas] geniculata
  REGION 1..120: note = tr|A0A0L8AB11|A0A0L8AB11_9GAMM 6-carboxy-5,6,7,8-tetrahydropterin synthase; OS = [Pseudomonas] geniculata N1 OX=1167641 GN=W7K_09860; PE = 3 SV=1
MEIFKVFMLEAAHRLPNVPPGHKCARLHGHSFRVELKVEGEPGAQTGWIMDFGDVKAAFQPIYDRLDHHYLNDIPGLENPTSENLAVWIWNELKPSLPALSEITVHETCTSGCRYRGPEI

SEQ ID NO: 24518 - protein, 118 aa, Pseudomonas gessardii
  REGION 1..118: note = tr|A0A1V2J2R6|A0A1V2J2R6_9PSED 6-carboxy-5,6,7,8-tetrahydropterin synthase OS=Pseudomonas gessardii OX=78544 GN=BLL38_21655 PE=3 SV=1
MEIFKEFTFESAHRLPHVPDGHKCGRLHGHSFKVAIHLSGDLDPHTGWIRDFSEIKAIFKPLYERLDHNYLNDIPGLENPTSEVLAKWIWNELKPLLPELSAIRIHETCTSGCIYRGE

SEQ ID NO: 24519 - protein, 118 aa, unidentified
  source 1..118: note = Pseudomonas gingeri
  REGION 1..118: note = tr|A0A2K1FP47|A0A2K1FP47_9PSED 6-carboxy-5,6,7,8-tetrahydropterin synthase OS=Pseudomonas gingeri NCPPB 3146 = LMG 5327 OX=707248 GN=queD PE=3 SV=1
MEIFKEFTFESAHRLPHVPDGHKCGRLHGHSFKVAIHLSGEIDQHTGWIRDFSEIKAIFKPLYERLDHNYLNDIPGLENPTSENLAKWIWQELKPLLPELSAIRIHETCTSGCIYRGE

SEQ ID NO: 24520 - protein, 118 aa, Pseudomonas graminis
  REGION 1..118: note = tr|A0A1I0JRY0|A0A1I0JRY0_9PSED 6-carboxy-5,6,7,8-tetrahydropterin synthase OS=Pseudomonas graminis OX=158627 GN=EC919_1192 PE=3 SV=1
MEIFKEFTFESAHRLPHVPDGHKCGRLHGHSFRVAIYLQGEPDPHTGWIRDFSEIKTIFKPLYERLDHNYLNDIPGLENPTSEVLVKWIWKELKPLLPELSAIRIHETCTSGCVYRGD

SEQ ID NO: 24521 - protein, 118 aa, Pseudomonas graminis
  REGION 1..118: note = tr|A0A1X0VKQ7|A0A1X0VKQ7_9PSED 6-carboxy-5,6,7,8-tetrahydropterin synthase OS=Pseudomonas graminis OX=158627 GN=BW687_18935 PE=3 SV=1
MEIFKEFTFESAHLLPNVPEGHKCGRLHGHSFRVGIHLAGKVDPHTGWIRDFSEIKAIFKPLYERLDHHYLNDIPGLENPTSENLAKWIWDELKPLLPELSAIRIHETCTSGCEYRGD

SEQ ID NO: 24522 - protein, 118 aa, Pseudomonas grimontii; identical to SEQ ID NO: 24438
  REGION 1..118: note = tr|A0A1H1FKH7|A0A1H1FKH7_9PSED 6-carboxy-5,6,7,8-tetrahydropterin synthase OS=Pseudomonas grimontii OX=129847 GN=queD PE=3 SV=1

SEQ ID NO: 24523 - protein, 118 aa, unidentified
  source 1..118: note = Pseudomonas guangdongensis
  REGION 1..118: note = tr|A0A1H2HY36|A0A1H2HY36_9PSED 6-carboxy-5,6,7,8-tetrahydropterin synthase OS=Pseudomonas guangdongensis OX=1245526 GN=SAMN05216580_2581 PE=3 SV=1
MELFKEFTFEAAHLLPHVPEGHKCGRLHGHSFRVAIYIEGEVDPYTGWIRDFGEIKAIFKPIYDRLDHYYLNDIPGLENPTSENLAKWVWQQLKPLLPELSRVRIHETCTSGCEYRGD

SEQ ID NO: 24524 - protein, 118 aa, unidentified
  source 1..118: note = Pseudomonas guariconensis
  REGION 1..118: note = tr|A0A1G7AES0|A0A1G7AES0_9PSED 6-carboxy-5,6,7,8-tetrahydropterin synthase OS=Pseudomonas guariconensis OX=1288410 GN=queD PE=3 SV=1
MEIFKEFTFESAHRLPNVPAGHKCGRLHGHSFKVGLHLTGPLDPHTGWIRDFAEIKAIFKPIYEQLDHNYLNDIPGLENPTSEVIAKWIWDQVKPLLPELSKVRIHETCTSGCEYSGD

SEQ ID NO: 24525 - protein, 118 aa, unidentified; identical to SEQ ID NO: 24472
  source 1..118: note = Pseudomonas guguanensis
  REGION 1..118: note = tr|A0A1H0XDF6|A0A1H0XDF6_9PSED 6-carboxy-5,6,7,8-tetrahydropterin synthase OS=Pseudomonas guguanensis OX=1198456 GN=SAMN05216213_1133 PE=3 SV=1

SEQ ID NO: 24526 - protein, 118 aa, Pseudomonas guineae
  REGION 1..118: note = tr|A0A1I3I3T4|A0A1I3I3T4_9PSED 6-carboxy-5,6,7,8-tetrahydropterin synthase OS=Pseudomonas guineae OX=425504 GN=SAMN05216206_2218 PE=3 SV=1
MELFKEFMFEAAHRLPHVPEGHKCGRLHGHSFKVAVYIEGEVDPYTGWIRDFSEIKAIFKPLYEQLDHNYLNDIPGLENPTSEVLAKWIWQQLKPLLPELSRIRIHETCTSGCEYRGD

SEQ ID NO: 24527 - protein, 121 aa, unidentified
  source 1..121: note = Pseudomonas helleri
  REGION 1..121: note = tr|A0A0J6I8Z3|A0A0J6I8Z3_9PSED 6-carboxy-5,6,7,8-tetrahydropterin synthase OS=Pseudomonas helleri OX=1608996 GN=TU84_18710 PE=3 SV=1
MNTVEIFKEFTFESAHRLPYVPEGHKCGRLHGHSFKVAIHLSGDIDPATGWIRDFSEIKAIFKPLYEQLDHNYLNDIPGLENPTSEVLAKWIWQQLKPLLPELSAIRIHETCTSGCIYYGD

SEQ ID NO: 24528 - protein, 118 aa, unidentified; identical to SEQ ID NO: 24450
  source 1..118: note = Pseudomonas helmanticensis
  REGION 1..118: note = tr|A0A4R7V2Y0|A0A4R7V2Y0_9PSED 6-carboxy-5,6,7,8-tetrahydropterin synthase OS=Pseudomonas helmanticensis OX=1471381 GN=EDF87_11368 PE=3 SV=1

SEQ ID NO: 24529 - protein, 118 aa, unidentified
  source 1..118: note = Pseudomonas hunanensis
  REGION 1..118: note = tr|A0A2I0CFG3|A0A2I0CFG3_9PSED 6-carboxy-5,6,7,8-tetrahydropterin synthase OS=Pseudomonas hunanensis OX=1247546 GN=queD PE=3 SV=1
MEIFKEFTFESAHRLPHVPEGHKCGRLHGHSFKVGLHLTGPLDPHTGWIRDFAEVKAIFKPIYDQLDHNYLNDIPGLENPTSEVIAKWIWDQVKPLMPELSKVRIHETCTSGCEYTGD

SEQ ID NO: 24530 - protein, 118 aa, unidentified
  source 1..118: note = Pseudomonas hussainii
  REGION 1..118: note = tr|A0A1H7KDC7|A0A1H7KDC7_9PSED 6-carboxy-5,6,7,8-tetrahydropterin synthase OS=Pseudomonas hussainii OX=1429083 GN=SAMN05216214_105216 PE=3 SV=1
MELFKEFTFEAAHLLPHVPAGHKCGRLHGHSFKVALYIEGDVDPHTGWIRDFAEIKAIFKPIYERLDHNYLNEIPGLENPTSEVLAKWIWQQVKPLLPELSRVRIHETCTSGCEYRGD

SEQ ID NO: 24531 - protein, 158 aa, Pseudomonas indica
  REGION 1..158: note = tr|A0A1G8XFE3|A0A1G8XFE3_9PSED 6-pyruvoyltetrahydropterin/6-carboxytetrahydropterin synthase OS=Pseudomonas indica OX=137658; GN = SAMN05216186_103166 PE=4 SV=1
MTVMARNDDTPAMSMVRSPDARNLLKYRLCPSSGPSERCPLELFKEFIFEAAHRLPHVPEGHKCGRLHGHSFRVAIYIEGEVDPYTGWIRDFSEIKQIFKPLYEQLDHNYLNDIPGLENPTSEVLAKWIWQKLKPLLPELSRVRIHETCTSGCEYRGD

SEQ ID NO: 24532 - protein, 118 aa, unidentified; identical to SEQ ID NO: 24431
  source 1..118: note = Pseudomonas indoloxydans
  REGION 1..118: note = tr|A0A2T5PSC7|A0A2T5PSC7_9PSED 6-carboxy-5,6,7,8-tetrahydropterin synthase OS=Pseudomonas indoloxydans OX=404407 GN=queD PE=3 SV=1

SEQ ID NO: 24533 - protein, 118 aa, Pseudomonas japonica
  REGION 1..118: note = tr|A0A239F8Y8|A0A239F8Y8_9PSED 6-carboxy-5,6,7,8-tetrahydropterin synthase OS=Pseudomonas japonica OX=256466 GN=SAMN05444352_109196 PE=3 SV=1
MEIFKEFTFESAHRLPNVPAGHKCGRLHGHSFKVALHLSGPLDPHTGWIRDFAEIKAVFKPLYEQLDHNYLNDIPGLENPTSEVIAKWIWDNVKPLLPELSKVRIHETCTSGCIYQGE

SEQ ID NO: 24534 - protein, 118 aa, Pseudomonas jessenii
  REGION 1..118: note = tr|A0A231G3B7|A0A231G3B7_9PSED 6-carboxy-5,6,7,8-tetrahydropterin synthase OS=Pseudomonas jessenii OX=77298 GN=SAMN04490187_5266 PE=3 SV=1
MEIFKEFTFESAHRLPHVPDGHKCGRLHGHSFKVAIHLSGDLDPHTGWIRDFSEIKEIFKPLYERLDHNYLNDIPGLENPTSEVLAKFIWQELKPLLPELSAIRIHETCTSGCIYRGE

SEQ ID NO: 24535 - protein, 118 aa, Pseudomonas jessenii
  REGION 1..118: note = tr|A0A2W0EPL6|A0A2W0EPL6_9PSED 6-carboxy-5,6,7,8-tetrahydropterin synthase OS=Pseudomonas jessenii OX=77298 GN=queD PE=3 SV=1
MEIFKEFTFESAHRLPHVPDGHKCGRLHGHSFKVAIHLSGDLDPHTGWIRDFSEIKAIFKPLYERLDHNYLNDIPGLENPTSEVLAKFIWNEMKPLLPELSAIRIHETCTSGCIYRGE

SEQ ID NO: 24536 - protein, 118 aa, Pseudomonas jinjuensis
  REGION 1..118: note = tr|A0A1H0JEH7|A0A1H0JEH7_9PSED 6-carboxy-5,6,7,8-tetrahydropterin synthase OS=Pseudomonas jinjuensis OX=198616 GN=SAMN05216193_11155 PE=3 SV=1
MEIFKEFTFESAHHLPNVPAGHKCGRLHGHSFRAAIYIEGDVDPHTGWIRDFSEIKEIFKPIYDQLDHNYLNEIPGLENPTSENLARWIWQQLKPVLPELSRIRVHETCTSGCEYRGD

SEQ ID NO: 24537 - protein, 118 aa, unidentified; identical to SEQ ID NO: 24518
  source 1..118: note = Pseudomonas kairouanensis
  REGION 1..118: note = tr|A0A4Z0AJH6|A0A4Z0AJH6_9PSED 6-carboxy-5,6,7,8-tetrahydropterin synthase OS=Pseudomonas kairouanensis OX=2293832 GN=queD PE=3 SV=1

SEQ ID NO: 24538 - protein, 118 aa, Pseudomonas kilonensis
  REGION 1..118: note = tr|A0A0F4XQU0|A0A0F4XQU0_9PSED 6-carboxy-5,6,7,8-tetrahydropterin synthase OS=Pseudomonas kilonensis OX=132476 GN=C7317_1370 PE=3 SV=1
MEIFKEFTFESAHRLPHVPDGHKCGRLHGHSFKVAIHLSGDIDPHTGWIRDFSEIKAIFKPLYERLDHNYLNDIPGLENPTSEVLAKWIWNELKPLLPELSAIRIHETCTSGCIYHGE

SEQ ID NO: 24539 - protein, 118 aa, Pseudomonas knackmussii
  REGION 1..118: note = tr|A0A024HI99|A0A024HI99_PSEKB 6-carboxy-5,6,7,8-tetrahydropterin synthase OS=Pseudomonas knackmussii (strain DSM 6978 / LMG 23759 / B13) OX=1301098; GN = PKB_3417 PE=3SV=1
MELFKEFVFESAHRLPHVPEGHKCGRLHGHSFRVALYIEGDVDPYTGWIRDFSEIKQIFKPIYEQLDHNYLNDIPGLENPTSENLSRWIWQQVKPLLPELSRVRVHETCTSGCEYRGD

SEQ ID NO: 24540 - protein, 118 aa, Pseudomonas koreensis; identical to SEQ ID NO: 24450
  REGION 1..118: note = tr|A0A142NC66|A0A142NC66_9PSED 6-carboxy-5,6,7,8-tetrahydropterin synthase OS=Pseudomonas koreensis OX=198620 GN=queD PE=3 SV=1

SEQ ID NO: 24541 - protein, 118 aa, Pseudomonas koreensis; identical to SEQ ID NO: 24535
  REGION 1..118: note = tr|A0A1A9JEK8|A0A1A9JEK8_9PSED 6-carboxy-5,6,7,8-tetrahydropterin synthase OS=Pseudomonas koreensis OX=198620 GN=A8L59_09380 PE=3 SV=1

SEQ ID NO: 24542 - protein, 118 aa, unidentified; identical to SEQ ID NO: 24507
  source 1..118: note = Pseudomonas kribbensis
  REGION 1..118: note = tr|A0A345RT33|A0A345RT33_9PSED 6-carboxy-5,6,7,8-tetrahydropterin synthase OS=Pseudomonas kribbensis OX=1628086 GN=queD PE=3 SV=1

SEQ ID NO: 24543 - protein, 118 aa, unidentified
  source 1..118: note = Pseudomonas kunmingensis
  REGION 1..118: note = tr|A0A2N8SKF1|A0A2N8SKF1_9PSED 6-carboxy-5,6,7,8-tetrahydropterin synthase OS=Pseudomonas kunmingensis OX=1211807 GN=queD PE=3 SV=1
MEIFKEFTFESAHRLPNVPQGHKCGRLHGHSFRVALYISGTVDPHTGWIRDFGEIKSVFKPLYELLDHNYLNDIPGLENPTSENLAKWIWTELKPLLPELSRIRIHETCTSGCEYCGD

SEQ ID NO: 24544 - protein, 118 aa, unidentified; identical to SEQ ID NO: 24448
  source 1..118: note = Pseudomonas lactis
  REGION 1..118: note = tr|A0A0R3C9B3|A0A0R3C9B3_9PSED 6-carboxy-5,6,7,8-tetrahydropterin synthase OS=Pseudomonas lactis OX=1615674 GN=TX25_17680 PE=3 SV=1

SEQ ID NO: 24545 - protein, 118 aa, unidentified; identical to SEQ ID NO: 24438
  source 1..118: note = Pseudomonas lactis
  REGION 1..118: note = tr|I4K6A6|I4K6A6_9PSED 6-carboxy-5,6,7,8-tetrahydropterin synthase OS=Pseudomonas lactis OX=1615674 GN=queD PE=3 SV=1

SEQ ID NO: 24546 - protein, 120 aa, unidentified
  source 1..120: note = Pseudomonas laurylsulfatiphila
  REGION 1..120: note = tr|A0A2S6FL28|A0A2S6FL28_9PSED 6-carboxy-5,6,7,8-tetrahydropterin synthase OS=Pseudomonas laurylsulfatiphila OX=2011015 GN=queD PE=3 SV=1
MEIFKEFVFEAAHRLPNVPDGHKCGRLHGHSFRIAIYIDGPVDRTSGWVRDFSEIKEIFAPLYERLDHNYLNEIPGLENPTSEVLAVWVWQELKPLLPELSAVRIHETCTSGCIYKGPEV

SEQ ID NO: 24547 - protein, 118 aa, unidentified; identical to SEQ ID NO: 24535
  source 1..118: note = Pseudomonas laurylsulfatiphila
  REGION 1..118: note = tr|A0A2S6FTK4|A0A2S6FTK4_9PSED 6-carboxy-5,6,7,8-tetrahydropterin synthase OS=Pseudomonas laurylsulfatiphila OX=2011015 GN=queD PE=3 SV=1

SEQ ID NO: 24548 - protein, 125 aa, unidentified
  source 1..125: note = Pseudomonas laurylsulfativorans
  REGION 1..125: note = tr|A0A2S3VMY0|A0A2S3VMY0_9PSED 6-carboxy-5,6,7,8-tetrahydropterin synthase OS=Pseudomonas laurylsulfativorans OX=1943631 GN=B0D71_13955 PE=3 SV=1
MNRAENTVEIFKEFTFESAHRLPHVPDGHKCGRLHGHSFKVAIHLSGDLDPHTGWIRDFSEIKAIFKPLYERLDHNYLNDIPGLENPTSEVLAKFIWQELKPLLPELSAIRIHETCTSGCIYRGE

SEQ ID NO: 24549 - protein, 118 aa, Pseudomonas libanensis; identical to SEQ ID NO: 24438
  REGION 1..118: note = tr|A0A0R2Y029|A0A0R2Y029_9PSED 6-carboxy-5,6,7,8-tetrahydropterin synthase OS=Pseudomonas libanensis OX=75588 GN=TU73_25315 PE=3 SV=1

SEQ ID NO: 24550 - protein, 118 aa, Pseudomonas lini; identical to SEQ ID NO: 24518
  REGION 1..118: note = tr|A0A1H1X3K9|A0A1H1X3K9_9PSED 6-carboxy-5,6,7,8-tetrahydropterin synthase OS=Pseudomonas lini OX=163011 GN=SAMN04490191_2973 PE=3 SV=1

SEQ ID NO: 24551 - protein, 120 aa, Pseudomonas lini
  REGION 1..120: note = tr|A0A423IQD0|A0A423IQD0_9PSED 6-carboxy-5,6,7,8-tetrahydropterin synthase OS=Pseudomonas lini OX=163011 GN=BK663_10555 PE=3 SV=1
MTVEIFKEFTFESAHRLPHVPDGHKCGRLHGHSFKVAIHLSGDLDPHTGWIRDFSEIKAIFKPLYERLDHNYLNDIPGLENPTSEVLAKWIWNELKPLLPELSAIRIHETCTSGCIYRGE

SEQ ID NO: 24552 - protein, 118 aa, unidentified
  source 1..118: note = Pseudomonas linyingensis
  REGION 1..118: note = tr|A0A1H7BU83|A0A1H7BU83_9PSED 6-carboxy-5,6,7,8-tetrahydropterin synthase OS=Pseudomonas linyingensis OX=915471 GN=SAMN05216201_11923 PE=3 SV=1
MELFKEFTFEAAHLLPHVPQGHKCGRLHGHSFRVAIYIEGEVDPYTGWIRDFGEIKAIFKPIYDRLDHYYLNDIPGLENPTSENLSKWIWQQLKPQLPELSRVRVHETCTSGCEYRGD

SEQ ID NO: 24553 - protein, 118 aa, Pseudomonas lundensis
  REGION 1..118: note = tr|A0A266NEE2|A0A266NEE2_9PSED 6-carboxy-5,6,7,8-tetrahydropterin synthase OS=Pseudomonas lundensis OX=86185 GN=queD PE=3 SV=1
MEIFKEFTFESAHRLPFVPQGHKCGRLHGHSFKVAIHLSGEIDASTGWIRDFSEIKAIFKPLYEQLDHNYLNDIPGLENPTSEVLAKWIWQELKPLLPELSAIRIHETCTSGCIYRGE

SEQ ID NO: 24554 - protein, 118 aa, Pseudomonas lundensis
  REGION 1..118: note = tr|A0A1D9IQC2|A0A1D9IQC2_9PSED 6-carboxy-5,6,7,8-tetrahydropterin synthase OS=Pseudomonas lundensis OX=86185 GN=ygcM PE=3 SV=1
MEIFKEFTFESAHRLPFVPQGHKCGRLHGHSFKVAIHLSGEIDASTGWIRDFSEIKAIFKPLYEVLDHNYLNDIPGLENPTSEVLATWIWQQLKPLLPELSAIRIHETCTSGCIYRGE

SEQ ID NO: 24555 - protein, 118 aa, Pseudomonas lurida
  REGION 1..118: note = tr|A0A2A9DAX7|A0A2A9DAX7_9PSED 6-carboxy-5,6,7,8-tetrahydropterin synthase OS=Pseudomonas lurida OX=244566 GN=queD PE=3 SV=1
MEIFKEFTFESAHRLPHVPEGHKCGRLHGHSFKVAIHLSGDLDPHTGWIRDFSEIKTIFKPLYERLDHNYLNDIPGLENPTSEVLAKWIWNELKPLLPELSAIRIHETCTSGCIYRGE

SEQ ID NO: 24556 - protein, 120 aa, Pseudomonas lutea
  REGION 1..120: note = tr|A0A098SXP6|A0A098SXP6_9PSED 6-carboxy-5,6,7,8-tetrahydropterin synthase OS=Pseudomonas lutea OX=243924 GN=LT42_00030 PE=3 SV=1
MTVEIFKEFTFESAHRLPHVPEGHKCGRLHGHSFRVAIYLKGEPDPHTGWIRDFSEIKTIFKPLYERLDHNYLNDIPGLENPTSEVLVKWIWNELKPLLPELSAIRIHETCTSGCVYRGD

SEQ ID NO: 24557 - protein, 118 aa, Pseudomonas luteola
  REGION 1..118: note = tr|A0A2X2CCW6|A0A2X2CCW6_PSELU 6-carboxy-5,6,7,8-tetrahydropterin synthase OS=Pseudomonas luteola OX=47886 GN=queD PE=3 SV=1
MEIFKEFTFEAAHFLPNVPEGHKCGRLHGHSFKVAIYLEGPVDPHTGWLRDFADIKAIFKPIYERLDHYYLNDIQGLENPTSENLAIWIWRELKPQLPELSRVRVHETCTSGCEYRGD

SEQ ID NO: 24558 - protein, 118 aa, Pseudomonas luteola
  REGION 1..118: note = tr|A0A3R8WGK8|A0A3R8WGK8_PSELU 6-carboxy-5,6,7,8-tetrahydropterin synthase OS=Pseudomonas luteola OX=47886 GN=queD PE=3 SV=1
MEIFKEFTFEAAHFLPNVPEGHKCGRLHGHSFKVAIYLEGPVDPHTGWLRDFADIKAIFKPIYERLDHYYLNDIQGLENPTSENLAVWIWRELKPQLPELSRVRVHETCTSGCEYRGD

SEQ ID NO: 24559 - protein, 118 aa, Pseudomonas mandelii
  REGION 1..118: note = tr|A0A255Y482|A0A255Y482_9PSED 6-carboxy-5,6,7,8-tetrahydropterin synthase OS=Pseudomonas mandelii OX=75612 GN=queD PE=3 SV=1
  VARIANT 10: note = Xaa can be any naturally occurring amino acid
MEIFKEFTFXSAHRLPHVPEGHKCGRLHGHSFKVAIHLSGDLDPHTGWIRDFSEIKAIFKPLYERLDHNYLNDIPGLENPTSEVLAKWIWNELKPLLPELSAIRIHETCTSGCIYHGE

SEQ ID NO: 24560 - protein, 118 aa, Pseudomonas mandelii; identical to SEQ ID NO: 24442
  REGION 1..118: note = tr|A0A5C5QRS4|A0A5C5QRS4_9PSED 6-carboxy-5,6,7,8-tetrahydropterin synthase OS=Pseudomonas mandelii OX=75612 GN=queD PE=3 SV=1

SEQ ID NO: 24561 - protein, 118 aa, Pseudomonas marginalis; identical to SEQ ID NO: 24438
  REGION 1..118: note = tr|A0A3M4A033|A0A3M4A033_PSEMA 6-carboxy-5,6,7,8-tetrahydropterin synthase OS=Pseudomonas marginalis pv. marginalis OX=97473 GN=ALQ29_02607 PE=3 SV=1

SEQ ID NO: 24562 - protein, 119 aa, Pseudomonas marginalis
  REGION 1..119: note = tr|A0A0W0MIN4|A0A0W0MIN4_PSEMA 6-carboxy-5,6,7,8-tetrahydropterin synthase OS=Pseudomonas marginalis ICMP 11289 OX=1198318 GN=AO390_13710 PE=3 SV=1
MLEIFKEFTFESAHRLPHVPEGHKCGRLHGHSFRVGIHLAGKVDPHTGWIRDFSEIKAIFKPLYERLDHNYLNDIPGLENPTSENLAKWIWNELKPLLPELSAVRIHETCTSGCEYRGE

SEQ ID NO: 24563 - protein, 118 aa, Pseudomonas marincola; identical to SEQ ID NO: 24420
  REGION 1..118: note = tr|A0A1I7BWS4|A0A1I7BWS4_9PSED 6-carboxy-5,6,7,8-tetrahydropterin synthase OS=Pseudomonas marincola OX=437900 GN=SAMN05216264_10664 PE=3 SV=1

SEQ ID NO: 24564 - protein, 118 aa, Pseudomonas mediterranea
  REGION 1..118: note = tr|A0A0A4GLP8|A0A0A4GLP8_9PSED 6-carboxy-5,6,7,8-tetrahydropterin synthase OS=Pseudomonas mediterranea CFBP 5447 OX=1348058 GN=N005_07145 PE=3 SV=1
MEIFKEFTFESAHRLPHVPDGHKCGRLHGHSFKVAIHLSGDIDPHTGWIRDFSEIKAIFKPLYERLDHNYLNDIPGLENPTSEVLAKWIWNELKPLLPELSAIRIHETCTSGCIYRGE

SEQ ID NO: 24565 - protein, 118 aa, unidentified
  source 1..118: note = Pseudomonas meliae
  REGION 1..118: note = tr|A0A0P9W7T3|A0A0P9W7T3_9PSED 6-carboxy-5,6,7,8-tetrahydropterin synthase OS=Pseudomonas meliae OX=86176 GN=ALO64_02515 PE=3 SV=1
MEIFKEFTFESAHRLPNVPEGHKCGRLHGHSFRVGIHLAGKVDPHTGWIRDFSEIKAIFKPLYERLDHNYLNDIPGLENPTSENLAKWIWDELKPLLPELSAVRIHETCTSGCEYRGD

SEQ ID NO: 24566 - protein, 118 aa, Pseudomonas mendocina
  REGION 1..118: note = tr|A4XTT5|A4XTT5_PSEMY 6-carboxy-5,6,7,8-tetrahydropterin synthase OS=Pseudomonas mendocina (strain ymp) OX=399739 GN=Pmen_1990 PE=3 SV=1
MELFKEFIFEAAHRLPHVPEGHKCGRLHGHSFRVALYIEGEVDPYTGWIRDFSEIKAIFKPIYEQLDHNYLNDIPGLENPTSEVLAKWIWQQVKPLLPELSRVRIHETCTSGCEYRGD

SEQ ID NO: 24567 - protein, 118 aa, Pseudomonas mendocina; identical to SEQ ID NO: 24472
  REGION 1..118: note = tr|A0A2R3QW53|A0A2R3QW53_PSEME 6-carboxy-5,6,7,8-tetrahydropterin synthase OS=Pseudomonas mendocina OX=300 GN=queD PE=3 SV=1

SEQ ID NO: 24568 - protein, 150 aa, unidentified
  source 1..150: note = [Pseudomonas] mesoacidophila
  REGION 1..150: note = tr|A0A2A4FD36|A0A2A4FD36_9BURK 6-carboxytetrahydropterin synthase QueD OS=[Pseudomonas] mesoacidophila OX=265293 GN=BZL54_16995 PE=4 SV=1
MLITRKLEFDAGHRIPDHRSQCRNLHGHRYVLEITLRGDLVDTEGAPDRGMVMDFADVKALAMEHLVSKWDHAFLVYARDEVVRSFLEQMADHKTVVIDRIPTVENLAAIAFDILANVYDAHYGINLRLERVRLYETPNCWADVERAPGR

SEQ ID NO: 24569 - protein, 118 aa, Pseudomonas migulae
  REGION 1..118: note = tr|A0A1H5LV97|A0A1H5LV97_9PSED 6-carboxy-5,6,7,8-tetrahydropterin synthase OS=Pseudomonas migulae OX=78543 GN=SAMN04490194_4191 PE=3 SV=1
MEIFKEFTFESAHRLPHVPDGHKCGRLHGHSFKVAIHLSGDLDPHTGWIRDFSEIKAIFKPLYERLDHNYLNDIPGLENPTSEVLAKWIWGELKPLLPELSAIRIHETCTSGCIYRGE

SEQ ID NO: 24570 - protein, 118 aa, Pseudomonas mohnii
  REGION 1..118: note = tr|A0A1H5AL62|A0A1H5AL62_9PSED 6-carboxy-5,6,7,8-tetrahydropterin synthase OS=Pseudomonas mohnii OX=395600 GN=SAMN05216205_5196 PE=3 SV=1
MEIFKEFTFESAHRLPHVPDGHKCGRLHGHSFKVAIHLSGDIDPHTGWIRDFSEIKAIFKPLYERLDHNYLNDIPGLENPTSEVLAKFIWAELKPLLPELSAIRIHETCTSGCIYRGE

SEQ ID NO: 24571 - protein, 118 aa, Pseudomonas monteilii
  REGION 1..118: note = tr|V9UXW9|V9UXW9_9PSED 6-carboxy-5,6,7,8-tetrahydropterin synthase OS=Pseudomonas monteilii SB3101 OX=1435058 GN=X970_07550 PE=3 SV=1
MEIFKEFTFESAHRLPHVPAGHKCGRLHGHSFKVGLHLTGPLDPHTGWIRDFAEIKAIFKPIYEQLDHNYLNDIPGLENPTSEVIAKWIWDQVKPLLPELSKVRIHETCTSGCEYTGD

SEQ ID NO: 24572 - protein, 118 aa, Pseudomonas monteilii
  REGION 1..118: note = tr|A0A136QMY6|A0A136QMY6_9PSED 6-carboxy-5,6,7,8-tetrahydropterin synthase OS=Pseudomonas monteilii OX=76759 GN=BC89_04310 PE=3 SV=1
MEIFKEFTFESAHRLPHVPAGHKCGRLHGHSFKVGLHLTGPLDPHTGWIRDFAEIKAVFKPIYEQLDHNYLNDIPGLENPTSEVIAKWIWDQVKPLLPELSKVRIHETCTSGCEYTGD

SEQ ID NO: 24573 - protein, 118 aa, Pseudomonas moorei; identical to SEQ ID NO: 24570
  REGION 1..118: note = tr|A0A1H1GWK9|A0A1H1GWK9_9PSED 6-carboxy-5,6,7,8-tetrahydropterin synthase OS=Pseudomonas moorei OX=395599 GN=SAMN04490195_3593 PE=3 SV=1

SEQ ID NO: 24574 - protein, 119 aa, Pseudomonas moorei
  REGION 1..119: note = tr|A0A4Q7H3B0|A0A4Q7H3B0_9PSED 6-carboxy-5,6,7,8-tetrahydropterin synthase OS=Pseudomonas moorei OX=395599 GN=queD PE=3 SV=1
MEIFKEFTFESAHRLPHVPDGHKCGRLHGHSFKVAIHLSGDIDPHTGWIRDFSEIKAIFKPLYERLDHNYLNDIPGLENPTSEVLAKFIWAELKPLLPELSAIRIHETCTSGCIYRGEL

SEQ ID NO: 24575 - protein, 118 aa, Pseudomonas moraviensis; identical to SEQ ID NO: 24450
  REGION 1..118: note = tr|V8R5I4|V8R5I4_9PSED 6-carboxy-5,6,7,8-tetrahydropterin synthase OS=Pseudomonas moraviensis R28-S OX=1395516 GN=PMO01_17480 PE=3 SV=1

SEQ ID NO: 24576 - protein, 118 aa, Pseudomonas moraviensis; identical to SEQ ID NO: 24450
  REGION 1..118: note = tr|A0A1Q3IC36|A0A1Q3IC36_9PSED 6-carboxy-5,6,7,8-tetrahydropterin synthase OS=Pseudomonas moraviensis OX=321662 GN=queD PE=3 SV=1

SEQ ID NO: 24577 - protein, 118 aa, Pseudomonas mosselii
  REGION 1..118: note = tr|A0A135NWT3|A0A135NWT3_9PSED 6-carboxy-5,6,7,8-tetrahydropterin synthase OS=Pseudomonas mosselii OX=78327 GN=queD PE=3 SV=1
MEIFKEFTFESAHRLPNVPAGHKCGRLHGHSFKVALHLTGPLDPHTGWIRDFSEIKAIFKPIYEQLDHNYLNDIPGLENPTSEVIAKWIWDQVKPLLPELSKVRIHETCTSGCEYTGD

SEQ ID NO: 24578 - protein, 118 aa, Pseudomonas mosselii; identical to SEQ ID NO: 24498
  REGION 1..118: note = tr|A0A2V4KET9|A0A2V4KET9_9PSED 6-carboxy-5,6,7,8-tetrahydropterin synthase OS=Pseudomonas mosselii OX=78327 GN=queD PE=3 SV=1

SEQ ID NO: 24579 - protein, 163 aa, Pseudomonas mucidolens
  REGION 1..163: note = tr|A0A1H2MA34|A0A1H2MA34_9PSED 6-pyruvoyltetrahydropterin/6-carboxytetrahydropterin synthase OS=Pseudomonas mucidolens OX=46679; GN = SAMN05216202_1305 PE=4 SV=1
MSSSNWPITAVSASAWFPSDQPLCAAANQAVKLAACQTLTELKNTVEIFKEFTFESAHRLPHVPEGHKCGRLHGHSFKVAIHLSGDLDPHTGWIRDFSEIKAIFKPLYERLDHNYLNDIPGLENPTSEVLAKWIWNELKPLLPELSAIRIHETCTSGCIYRGE

SEQ ID NO: 24580 - protein, 214 aa, unidentified
  source 1..214: note = Pseudomonas nabeulensis
  REGION 1..214: note = tr|A0A4Z0B7Z3|A0A4Z0B7Z3_9PSED 6-carboxytetrahydropterin synthase OS=Pseudomonas nabeulensis OX=2293833 GN=DYL61_04310 PE=4 SV=1
MLIRKLFKFENAHIVRGCSTQRCAYSIHGHSYKVELLLEAHALDNGQMIYDFGLLKGDIRDLIDAFDHAVALWSGDDPDYLATMRKHSERWVLIPVSPSAEQFARLFFRLVDTALSLTVMANGEDDVRLHSVIVHETETGYAQCFREDVDNPRMGQIDLDSITFSPAVIQEWRDPNLFERLKRGESQENPRPGERYMHQAHATHVDSDQGGTHA

SEQ ID NO: 24581 - protein, 118 aa, unidentified; identical to SEQ ID NO: 24438
  source 1..118: note = Pseudomonas nabeulensis
  REGION 1..118: note = tr|A0A4Z0AXH9|A0A4Z0AXH9_9PSED 6-carboxy-5,6,7,8-tetrahydropterin synthase OS=Pseudomonas nabeulensis OX=2293833 GN=queD PE=3 SV=1

SEQ ID NO: 24582 - protein, 118 aa, Pseudomonas nitroreducens
  REGION 1..118: note = tr|A0A239NC10|A0A239NC10_9PSED 6-carboxy-5,6,7,8-tetrahydropterin synthase OS=Pseudomonas nitroreducens OX=46680 GN=SAMN05216209_0191 PE=3 SV=1
MELFKEFTFESAHRLPHVPAGHQCGRLHGHSFRAAIYIEGEVDPHTGWIRDFAEIKQIFKPIYDQLDHNYLNDIPGLDNPTSENLCRWIWQQLKPLLPELSKVRVHETCTSGCEYRGD

SEQ ID NO: 24583 - protein, 118 aa, Pseudomonas nitroreducens
  REGION 1..118: note = tr|A0A2D0ABX5|A0A2D0ABX5_9PSED 6-carboxy-5,6,7,8-tetrahydropterin synthase OS=Pseudomonas nitroreducens OX=46680 GN=queD PE=3 SV=1
MELFKEFTFESAHRLPHVPAGHQCGRLHGHSFRAAIYIEGEVDPHTGWIRDFAEIKQIFKPIYDQLDHNYLNDIPGLENPTSESLCRWIWQQLKPLLPELSKVRVHETCTSGCEYRGD

SEQ ID NO: 24584 - protein, 118 aa, Pseudomonas oleovorans; identical to SEQ ID NO: 24431
  REGION 1..118: note = tr|A0A2S7FJG7|A0A2S7FJG7_PSEOL 6-carboxy-5,6,7,8-tetrahydropterin synthase OS=Pseudomonas oleovorans OX=301 GN=queD PE=3 SV=1

SEQ ID NO: 24585 - protein, 118 aa, Pseudomonas oleovorans
  REGION 1..118: note = tr|A0A397NK22|A0A397NK22_PSEOL 6-carboxy-5,6,7,8-tetrahydropterin synthase OS=Pseudomonas oleovorans OX=301 GN=DFO61_0001 PE=3 SV=1
MELFKEFIFEAAHRLPHVPEGHKCGRLHGHSFRVAIYIEGEVDPYTGWIRDFSEIKAIFKPIYEQLDHNYLNEIPGLENPTSEVLAKWIWQQVKPLLPELSRVRIHETCTSGCEYRGD

SEQ ID NO: 24586 - protein, 118 aa, Pseudomonas orientalis
  REGION 1..118: note = tr|A0A0R2ZFN6|A0A0R2ZFN6_9PSED 6-carboxy-5,6,7,8-tetrahydropterin synthase OS=Pseudomonas orientalis OX=76758 GN=C4J96_1893 PE=3 SV=1
MEIFKEFTFESAHRLPHVPDGHKCGRLHGHSFKVAIHLSGDLDPHTGWIRDFSEIKAIFKPLYERLDHNYLNDIPGLENPTSEVLAKWIWTELKPLLPELSAIRIHETCTSGCIYRGE

SEQ ID NO: 24587 - protein, 118 aa, Pseudomonas orientalis
  REGION 1..118: note = tr|A0A2L0RUG9|A0A2L0RUG9_9PSED 6-carboxy-5,6,7,8-tetrahydropterin synthase OS=Pseudomonas orientalis OX=76758 GN=queD PE=3 SV=1
MEIFKEFTFESAHRLPHVPDGHKCGRLHGHSFKVAIHLSGDLDPHTGWIRDFSEIKAIFKPLYERLDHNYLNDIPGLENPTSEVLAKWIWVELKPLLPELSAIRIHETCTSGCIYRGE

SEQ ID NO: 24588 - protein, 118 aa, unidentified
  source 1..118: note = Pseudomonas oryzae
  REGION 1..118: note = tr|A0A1H1RTZ0|A0A1H1RTZ0_9PSED 6-carboxy-5,6,7,8-tetrahydropterin synthase OS=Pseudomonas oryzae OX=1392877 GN=SAMN05216221_1716 PE=3 SV=1
MELFKEFTFEAAHLLPHVPQGHKCGRLHGHSFRVAIYIEGEVDPYTGWIRDFSEIKAIFKPIYDRLDHYYLNDIPGLENPTSENLAKWIWQQLKPLLPELSRVRVHETCTSGCEYRGD

SEQ ID NO: 24589 - protein, 121 aa, Pseudomonas oryzihabitans
  REGION 1..121: note = tr|A0A178L936|A0A178L936_9PSED 6-carboxy-5,6,7,8-tetrahydropterin synthase OS=Pseudomonas oryzihabitans OX=47885 GN=A4V15_06695 PE=3 SV=1
MVIVEIFKEFIFEAAHFLPNVPAGHKCGRLHGHSFKVGLHIEGAVDPHTGWVRDFADIKAAFKPLYERLDHHYLNDIPGLENPTSEVLARWIWQQLKPLLPELSQVRVHETCTCGCIYRGD

SEQ ID NO: 24590 - protein, 121 aa, Pseudomonas oryzihabitans
  REGION 1..121: note = tr|A0A0U4WL53|A0A0U4WL53_9PSED 6-carboxy-5,6,7,8-tetrahydropterin synthase OS=Pseudomonas oryzihabitans OX=47885 GN=APT59_13445 PE=3 SV=1
MVIVEIFKEFVFEAAHFLPNVPPGHKCGRLHGHSFKVGLHIEGAVDPHTGWVRDFADIKAAFKPLYERLDHHYLNDIPGLENPTSEVLARWIWQQLKPLLPELSQVRVHETCTCGCIYRGD

SEQ ID NO: 24591 - protein, 118 aa, Pseudomonas otitidis
  REGION 1..118: note = tr|A0A1I0SUQ6|A0A1I0SUQ6_9PSED 6-carboxy-5,6,7,8-tetrahydropterin synthase OS=Pseudomonas otitidis OX=319939 GN=SAMN05216263_1022 PE=3 SV=1
MEIFKEFIFEAAHRLPHVPAGHKCGRLHGHSFRVALYIEGDVDPHTGWIRDFSEIKALFRPIYEQLDHNYLNDIPGLENPTSEVLAKWIWQQVKPLIPELSRVRIHETCTSGCEYRGD

SEQ ID NO: 24592 - protein, 118 aa, Pseudomonas palleroniana; identical to SEQ ID NO: 24438
  REGION 1..118: note = tr|A0A1H5PC37|A0A1H5PC37_9PSED 6-carboxy-5,6,7,8-tetrahydropterin synthase OS=Pseudomonas palleroniana OX=191390 GN=queD PE=3 SV=1

SEQ ID NO: 24593 - protein, 118 aa, Pseudomonas panacis; identical to SEQ ID NO: 24586
  REGION 1..118: note = tr|A0A1H4I4W4|A0A1H4I4W4_PSEPA 6-carboxy-5,6,7,8-tetrahydropterin synthase OS=Pseudomonas panacis OX=307251 GN=SAMN04490199_0098 PE=3 SV=1

SEQ ID NO: 24594 - protein, 118 aa, Pseudomonas panipatensis; identical to SEQ ID NO: 24490
  REGION 1..118: note = tr|A0A1G8CXI7|A0A1G8CXI7_9PSED 6-carboxy-5,6,7,8-tetrahydropterin synthase OS=Pseudomonas panipatensis OX=428992 GN=SAMN05216272_101824 PE=3 SV=1

SEQ ID NO: 24595 - protein, 118 aa, Pseudomonas parafulva; identical to SEQ ID NO: 24535
  REGION 1..118: note = tr|A0A497UQR7|A0A497UQR7_9PSED 6-carboxy-5,6,7,8-tetrahydropterin synthase OS=Pseudomonas parafulva OX=157782 GN=C8F02_2493 PE=3 SV=1

SEQ ID NO: 24596 - protein, 118 aa, Pseudomonas parafulva
  REGION 1..118: note = tr|A0A0A7JIL9|A0A0A7JIL9_9PSED 6-carboxy-5,6,7,8-tetrahydropterin synthase OS=Pseudomonas parafulva OX=157782 GN=NJ69_04930 PE=3 SV=1
MEIFKEFTFESAHRLPNVPAGHKCGRLHGHSFKVALHLTGPLDPHTGWIRDFAEVKAIFKPIYERLDHNYLNDIPGLENPTSEVIAKWIWEQVKPLLPELSKVRIHETCTSGCEYTGD

SEQ ID NO: 24597 - protein, 118 aa, unidentified; identical to SEQ ID NO: 24438
  source 1..118: note = Pseudomonas paralactis
  REGION 1..118: note = tr|A0A0R3AAI2|A0A0R3AAI2_9PSED 6-carboxy-5,6,7,8-tetrahydropterin synthase OS=Pseudomonas paralactis OX=1615673 GN=TX23_24010 PE=3 SV=1

SEQ ID NO: 24598 - protein, 118 aa, Pseudomonas pelagia
  REGION 1..118: note = tr|A0A2A4AY17|A0A2A4AY17_9PSED 6-carboxy-5,6,7,8-tetrahydropterin synthase OS=Pseudomonas pelagia OX=553151 GN=queD PE=3 SV=1
MEIFKEFTFEAAHLLPHVPQGHKCGRLHGHSFMVAVHISGEPDAHTGWIRDFSELKAIFKPLYDQLDHNYLNDIPGLENPTSEVLAKWIWRELKPLLPELSQITIRETCTSGCVYRGD

SEQ ID NO: 24599 - protein, 118 aa, Pseudomonas peli
  REGION 1..118: note = tr|A0A1G4SLU8|A0A1G4SLU8_9PSED 6-carboxy-5,6,7,8-tetrahydropterin synthase OS=Pseudomonas peli OX=592361 GN=SAMN05216370_2887 PE=3 SV=1
MELFKEFMFEAAHRLPHVPEGHKCGRLHGHSFKVAVYIEGDVDPYTGWIRDFSEIKAIFKPLYEQLDHNYLNDIPGLENPTSEVLAKWIWQQLKPLLPELSRIRIHETCTSGCEYRGD

SEQ ID NO: 24600 - protein, 118 aa, Pseudomonas plecoglossicida
  REGION 1..118: note = tr|A0A2R7UNM7|A0A2R7UNM7_9PSED 6-carboxy-5,6,7,8-tetrahydropterin synthase OS=Pseudomonas plecoglossicida OX=70775 GN=queD PE=3 SV=1
MEIFKEFTFESAHRLPHVPAGHKCGRLHGHSFKVGLHLTGPLDPHTGWIRDFAEIKAIFKPIYEQLDHNYLNDIPGLENPTSEVIAKWIWDQVKPLLPELSKVRIHETCTSGCEYSGD

SEQ ID NO: 24601 - protein, 118 aa, Pseudomonas plecoglossicida; identical to SEQ ID NO: 24571
  REGION 1..118: note = tr|A0A099MWY4|A0A099MWY4_9PSED 6-carboxy-5,6,7,8-tetrahydropterin synthase OS=Pseudomonas plecoglossicida OX=70775 GN=queD PE=3 SV=1

SEQ ID NO: 24602 - protein, 118 aa, Pseudomonas poae; identical to SEQ ID NO: 24499
  REGION 1..118: note = tr|A0A1H0DSG2|A0A1H0DSG2_9PSED 6-carboxy-5,6,7,8-tetrahydropterin synthase OS=Pseudomonas poae OX=200451 GN=DM05_3063 PE=3 SV=1

SEQ ID NO: 24603 - protein, 118 aa, Pseudomonas poae; identical to SEQ ID NO: 24438
  REGION 1..118: note = tr|A0A2S9EHK3|A0A2S9EHK3_9PSED 6-carboxy-5,6,7,8-tetrahydropterin synthase OS=Pseudomonas poae OX=200451 GN=queD PE=3 SV=1

SEQ ID NO: 24604 - protein, 118 aa, Pseudomonas pohangensis
  REGION 1..118: note = tr|A0A1H2EZ26|A0A1H2EZ26_9PSED 6-carboxy-5,6,7,8-tetrahydropterin synthase OS=Pseudomonas pohangensis OX=364197 GN=SAMN05216296_1191 PE=3 SV=1
MELFKEFIFEAAHRLPHVPQGHKCGRLHGHSFRVAIFIEGEVDPHTGWIRDFSEIKAIFKPIYERLDHNYLNEIPGLENPTSEVLAKWIWQELKPLLPDLSRIRIMETCTSGCEYRGN

SEQ ID NO: 24605 - protein, 118 aa, unidentified
  source 1..118: note = Pseudomonas prosekii
  REGION 1..118: note = tr|A0A3L8CGI2|A0A3L8CGI2_9PSED 6-carboxy-5,6,7,8-tetrahydropterin synthase OS=Pseudomonas prosekii OX=1148509 GN=queD PE=3 SV=1
MEIFKEFTFESAHRLPHVPEGHKCGRLHGHSFKVAIHLSGDLDPHTGWIRDFSEIKTIFKPLYERLDHNYLNDIPGLENPTSEVLAKWIWNELKPLLPELSAIRIHETCTSGCIYHGE

SEQ ID NO: 24606 - protein, 118 aa, unidentified
  source 1..118: note = Pseudomonas prosekii
  REGION 1..118: note = tr|A0A1H2AVM8|A0A1H2AVM8_9PSED 6-carboxy-5,6,7,8-tetrahydropterin synthase OS=Pseudomonas prosekii OX=1148509 GN=queD PE=3 SV=1
MEIFKEFTFESAHRLPHVPDGHKCGRLHGHSFKVAIHLSGDLDPHTGWIRDFSEIKAIFKPLYERLDHNYLNDIPGLENPTSEVLAKWIWNELKPLLPELSAIRIHETCTSGCIYHGE

SEQ ID NO: 24607 - protein, 118 aa, unidentified; identical to SEQ ID NO: 24506
  source 1..118: note = Pseudomonas protegens
  REGION 1..118: note = tr|A0A2C9EQ96|A0A2C9EQ96_PSEPH 6-carboxy-5,6,7,8-tetrahydropterin synthase OS=Pseudomonas protegens (strain DSM 19095 / LMG 27888 / CHA0) OX=1124983; GN = queD PE=3 SV= 1

SEQ ID NO: 24608 - protein, 118 aa, unidentified; identical to SEQ ID NO: 24506
  source 1..118: note = Pseudomonas protegens
  REGION 1..118: note = tr|A0A2J7TQR5|A0A2J7TQR5_9PSED 6-carboxy-5,6,7,8-tetrahydropterin synthase OS=Pseudomonas protegens OX=380021 GN=queD PE=3 SV=1

SEQ ID NO: 24609 - protein, 118 aa, Pseudomonas pseudoalcaligenes; identical to SEQ ID NO: 24472
  REGION 1..118: note = tr|W6QVF9|W6QVF9_PSEP5 6-carboxy-5,6,7,8-tetrahydropterin synthase OS=Pseudomonas pseudoalcaligenes (strain CECT 5344) OX=1182590 GN=ptpS; PE = 3 SV=1

SEQ ID NO: 24610 - protein, 121 aa, Pseudomonas psychrophila
  REGION 1..121: note = tr|A0A0J6KTK2|A0A0J6KTK2_9PSED 6-carboxy-5,6,7,8-tetrahydropterin synthase OS=Pseudomonas psychrophila OX=122355 GN=TU76_09080 PE=3 SV=1
MNIVEIFKEFTFESAHRLPYVPEGHKCGRLHGHSFKVAIHLSGDIDPATGWIRDFSEIKAIFKPLYELLDHNYLNDIPGLENPTSEVLAKWIWQQLKPLLPELSAIRIHETCTSGCIYYGD

SEQ ID NO: 24611 - protein, 118 aa, Pseudomonas psychrophila
  REGION 1..118: note = tr|A0A3N1Z9J6|A0A3N1Z9J6_9PSED 6-carboxy-5,6,7,8-tetrahydropterin synthase OS=Pseudomonas psychrophila OX=122355 GN=EDF86_4940 PE=3 SV=1
MEIFKEFTFESAHRLPYVPEGHKCGRLHGHSFKVAIHLSGDIDPATGWIRDFSEIKAIFKPLYEQLDHNYLNDIPGLENPTSEVLAKWIWQQLKPLLPELSAIRIHETCTSGCIYYGD

SEQ ID NO: 24612 - protein, 118 aa, Pseudomonas psychrotolerans
  REGION 1..118: note = tr|A0A1G5M9Y9|A0A1G5M9Y9_9PSED 6-carboxy-5,6,7,8-tetrahydropterin synthase OS=Pseudomonas psychrotolerans OX=237610 GN=SAMN05216279_101475 PE=3 SV=1
MEIFKEFIFEAAHFLPNVPAGHKCGRLHGHSFKVGLHIEGAVDPHTGWVRDFADIKAVFKPLYERLDHHYLNDIPGLENPTSEVLARWIWQQLKPQLPELSQVRVHETCTCGCIYRGD

SEQ ID NO: 24613 - protein, 118 aa, Pseudomonas psychrotolerans
  REGION 1..118: note = tr|A0A4Y5W2V5|A0A4Y5W2V5_9PSED 6-carboxy-5,6,7,8-tetrahydropterin synthase OS=Pseudomonas psychrotolerans OX=237610 GN=queD PE=3 SV=1
MEIFKEFIFEAAHFLPNVPAGHKCGRLHGHSFKVALHIEGTIDPHTGWVRDFADIKAVFKPLYERLDHHYLNDIPGLENPTSEVLARWIWQQLKPLLPELSQVRIHETCTSGCIYRGD

SEQ ID NO: 24614 - protein, 118 aa, unidentified
  source 1..118: note = Pseudomonas punonensis
  REGION 1..118: note = tr|A0A1M7LYQ3|A0A1M7LYQ3_9PSED 6-carboxy-5,6,7,8-tetrahydropterin synthase OS=Pseudomonas punonensis OX=1220495 GN=SAMN05216288_4431 PE=3 SV=1
MELFKEFIFEAAHRLPHVPEGHKCARLHGHSFRIAVYIEGEVNPHTGWIRDFSEIKAIFKPIYEQLDHNYLNDIPGLENPTSEVLAKWVWQQLKPLLPELSRIRIHETCSSGCEYRGD

SEQ ID NO: 24615 - protein, 118 aa, Pseudomonas putida; identical to SEQ ID NO: 24529
  REGION 1..118: note = tr|Q88KE9|Q88KE9_PSEPK 6-carboxy-5,6,7,8-tetrahydropterin synthase OS=Pseudomonas putida (strain ATCC 47054 / DSM 6125 / NCIMB 11950 / KT2440) OX=160488 GN=queD PE=3SV=1

SEQ ID NO: 24616 - protein, 118 aa, Pseudomonas putida
  REGION 1..118: note = tr|A0A083UHQ7|A0A083UHQ7_PSEPU 6-carboxy-5,6,7,8-tetrahydropterin synthase OS=Pseudomonas putida OX=303 GN=HA62_24955 PE=3 SV=1
MEIFKEFTFESAHRLPHVPDGHKCGRLHGHSFKVAIHLSGDLDPHTGWIRDFSEIKAIFKPLYERLDHNYLNDIPGLENPTSEVLAKFIWAELKPLLPELSAIRIHETCTSGCIYRGE

SEQ ID NO: 24617 - protein, 118 aa, unidentified
  source 1..118: note = Pseudomonas reidholzensis
  REGION 1..118: note = tr|A0A383RTM3|A0A383RTM3_9PSED 6-carboxy-5,6,7,8-tetrahydropterin synthase OS=Pseudomonas reidholzensis OX=1785162 GN=queD PE=3 SV=1
MEIFKEFTFESAHRLPHVPEGHKCGRLHGHSFKVALHLTGPLDPHTGWIRDFSEIKAIFKPLYEQLDHNYLNDIPGLENPTSEVIAKWIWEQVKPLLPELSKVRIHETCTSGCEYTGD

SEQ ID NO: 24618 - protein, 118 aa, Pseudomonas reinekei; identical to SEQ ID NO: 24616
  REGION 1..118: note = tr|A0A1H0T952|A0A1H0T952_9PSED 6-carboxy-5,6,7,8-tetrahydropterin synthase OS=Pseudomonas reinekei OX=395598 GN=SAMN04490202_4558 PE=3 SV=1

SEQ ID NO: 24619 - protein, 125 aa, Pseudomonas reinekei
  REGION 1..125: note = tr|A0A1Q9WPH7|A0A1Q9WPH7_9PSED 6-carboxy-5,6,7,8-tetrahydropterin synthase OS=Pseudomonas reinekei OX=395598 GN=BVK86_21115 PE=3 SV=1
MNRAENTVEIFKEFTFESAHRLPHVPDGHKCGRLHGHSFKVAIHLSGDLDPHTGWIRDFSEIKAIFKPLYERLDHNYLNDIPGLENPTSEVLAKFIWAELKPLLPELSAIRIHETCTSGCIYRGE

SEQ ID NO: 24620 - protein, 118 aa, Pseudomonas resinovorans
  REGION 1..118: note = tr|S6AKX5|S6AKX5_PSERE 6-carboxy-5,6,7,8-tetrahydropterin synthase OS=Pseudomonas resinovorans NBRC 106553 OX=1245471 GN=queD PE=3 SV=1
MEIFKEFIFEAAHQLPHVPAGHKCGRLHGHSFRVAIYIEGEPDPHTGWIRDFSELKAIFKPLYEQLDHNYLNEIPGLENPTSEVLAKWIWQQLKPLLPELSRIRIHETCTSGCEYRGD

SEQ ID NO: 24621 - protein, 118 aa, Pseudomonas rhizosphaerae
  REGION 1..118: note = tr|A0A089YV06|A0A089YV06_9PSED 6-carboxy-5,6,7,8-tetrahydropterin synthase OS=Pseudomonas rhizosphaerae OX=216142 GN=LT40_12940 PE=3 SV=1
MEIFKEFTFESAHRLPHVPEGHKCGRLHGHSFKVAIYLKGDVDPHTGWIRDFSEIKSIFKPLYERLDHNYLNDISGLENPTSENLAKWIWQELKPLLPELSKIRIHETCTSGCEYVGD

SEQ ID NO: 24622 - protein, 118 aa, Pseudomonas rhodesiae; identical to SEQ ID NO: 24518
  REGION 1..118: note = tr|A0A5C5NDT3|A0A5C5NDT3_9PSED 6-carboxy-5,6,7,8-tetrahydropterin synthase OS=Pseudomonas rhodesiae OX=76760 GN=queD PE=3 SV=1

SEQ ID NO: 24623 - protein, 118 aa, unidentified
  source 1..118: note = Pseudomonas sagittaria
  REGION 1..118: note = tr|A0A1I5PWI1|A0A1I5PWI1_9PSED 6-carboxy-5,6,7,8-tetrahydropterin synthase OS=Pseudomonas sagittaria OX=1135990 GN=SAMN05216229_10273 PE=3 SV=1
MELFKEFTFEAAHLLPHVPQGHKCGRLHGHSFRVAIYIEGEVDPYTGWIRDFSEIKAIFKPIYDRLDHYYLNDIPGLENPTSENLSKWIWQQLKPALPELSRVRVHETCTSGCEYRGD

SEQ ID NO: 24624 - protein, 118 aa, unidentified
  source 1..118: note = Pseudomonas salegens
  REGION 1..118: note = tr|A0A1H2ETQ6|A0A1H2ETQ6_9PSED 6-carboxy-5,6,7,8-tetrahydropterin synthase OS=Pseudomonas salegens OX=1434072 GN=SAMN05216210_1030 PE=3 SV=1
MEIFKEFTFEAAHRLPNVPAGHKCGRLHGHSFQVAIHISGPVDPHTGWVRDFADIKAIFKPIYDQLDHNYLNDLPGLENPTSEVIARWIWHKLKPDLPELSQITLRETCTCGCIYRGE

SEQ ID NO: 24625 - protein, 118 aa, Pseudomonas salomonii; identical to SEQ ID NO: 24499
  REGION 1..118: note = tr|A0A1H3SAZ5|A0A1H3SAZ5_9PSED 6-carboxy-5,6,7,8-tetrahydropterin synthase OS=Pseudomonas salomonii OX=191391 GN=ALP97_00900 PE=3 SV=1

SEQ ID NO: 24626 - protein, 118 aa, Pseudomonas saponiphila
  REGION 1..118: note = tr|A0A1H4LM20|A0A1H4LM20_9PSED 6-carboxy-5,6,7,8-tetrahydropterin synthase OS=Pseudomonas saponiphila OX=556534 GN=SAMN05216178_1981 PE=3 SV=1
MEIFKEFTFESAHRLPFVPEGHKCGRLHGHSFKVAIHLSGEIDAHTGWIRDFSEIKAIFKPLYERLDHNYLNDIPGLENPTSEVLAKWIWNELKPLLPELSAIRIHETCTSGCIYRGE

SEQ ID NO: 24627 - protein, 118 aa, unidentified
  source 1..118: note = Pseudomonas saudiphocaensis
  REGION 1..118: note = tr|A0A078LS01|A0A078LS01_9PSED 6-carboxy-5,6,7,8-tetrahydropterin synthase OS=Pseudomonas saudiphocaensis OX=1499686 GN=BN1079_00423 PE=3 SV=1
MEIFKEFTFESAHRLPHVPEGHKCGRLHGHSFRVALYIEGQVDPHTGWIRDFGEIKSIFKPLLEQLDHNYLNDLPGLENPTSENLAKWIWGELKPLLPELSRIRIHETCTSGCEYRGD

SEQ ID NO: 24628 - protein, 118 aa, unidentified
  source 1..118: note = Pseudomonas saudiphocaensis
  REGION 1..118: note = tr|A0A3R8VFQ9|A0A3R8VFQ9_9PSED 6-carboxy-5,6,7,8-tetrahydropterin synthase OS=Pseudomonas saudiphocaensis OX=1499686 GN=queD PE=3 SV=1
MEIFKEFTFESAHRLPHVPEGHKCGRLHGHSFRVALYIEGQVDPHTGWIRDFGEIKSIFKPLLERLDHNYLNDLPGLENPTSENLAKWIWVELKPLLPELSRIRIHETCTSGCEYRGD

SEQ ID NO: 24629 - protein, 118 aa, Pseudomonas savastanoi
  REGION 1..118: note = tr|A0A3M4S0M9|A0A3M4S0M9_PSESG 6-carboxy-5,6,7,8-tetrahydropterin synthase OS=Pseudomonas savastanoi pv. glycinea OX=318 GN=ALP94_00715 PE=3 SV=1
MEIFKEFTFESAHFLPHVPEGHKCGRLHGHSFRIAIHLEGEVDPHIGWIRDFSEIKAIFKPLYERLDHHYLNDIPGLENPTSENLAKWIFAELKPLLPELSAIRIHETCTSGCIYRGE

SEQ ID NO: 24630 - protein, 118 aa, Pseudomonas savastanoi
  REGION 1..118: note = tr|A0A3M5J8J0|A0A3M5J8J0_PSESS 6-carboxy-5,6,7,8-tetrahydropterin synthase OS=Pseudomonas savastanoi OX=29438 GN=ALP51_03689 PE=3 SV=1
MEIFKEFIFESAHRLPHVPEGHKCGRLHGHSFRVGIHLAGKVDPHTGWIRDFSEIKAIFKPLYERLDHNYLNDIPGLENPTSENLAKWIWDELKPLLPELSAVRIHETCTSGCEYRGD

SEQ ID NO: 24631 - protein, 118 aa, Pseudomonas segetis
  REGION 1..118: note = tr|A0A239J7K7|A0A239J7K7_9PSED 6-carboxy-5,6,7,8-tetrahydropterin synthase OS=Pseudomonas segetis OX=298908 GN=SAMN05216255_4204 PE=3 SV=1
MELFKEFMFEAAHRLPHVPDGHKCGRLHGHSFKVAVYIEGEVDPHTGWIRDFSEIKAIFKPLYEQLDHNYLNDIPGLENPTSEVLAKWIWQQLKPLLPELSRIRIHETCTSGCEYRGD

SEQ ID NO: 24632 - protein, 118 aa, Pseudomonas seleniipraecipitans
  REGION 1..118: note = tr|A0A1G7RTH8|A0A1G7RTH8_9PSED 6-carboxy-5,6,7,8-tetrahydropterin synthase OS=Pseudomonas seleniipraecipitans OX=640205 GN=SAMN05216381_3275 PE=3; SV = 1
MELFKEFIFEAAHRLPHVPEGHKCARLHGHSFRIAVYIEGDVDPHTGWIRDFSEIKAIFKPIYEQLDHNYLNDIPGLENPTSEVLAKWVWQQLKPLLPELSRIRIHETCSSGCEYRGD

SEQ ID NO: 24633 - protein, 118 aa, unidentified; identical to SEQ ID NO: 24472
  source 1..118: note = Pseudomonas sihuiensis
  REGION 1..118: note = tr|A0A1H2LHV1|A0A1H2LHV1_9PSED 6-carboxy-5,6,7,8-tetrahydropterin synthase OS=Pseudomonas sihuiensis OX=1274359 GN=SAMN05216363_1596 PE=3 SV=1

SEQ ID NO: 24634 - protein, 118 aa, unidentified
  source 1..118: note = Pseudomonas silesiensis
  REGION 1..118: note = tr|A0A191YWP4|A0A191YWP4_9PSED 6-carboxy-5,6,7,8-tetrahydropterin synthase OS=Pseudomonas silesiensis OX=1853130 GN=PMA3_19955 PE=3 SV=1
MEIFKEFTFESAHRLPHVPDGHKCGRLHGHSFKVAIHLSGDLDPHTGWIRDFSEIKAIFKPLYERLDHNYLNDIPGLENPTSEVLAKFIWKELKPLLPELSAIRIHETCTSGCIYHGE

SEQ ID NO: 24635 - protein, 118 aa, Pseudomonas simiae; identical to SEQ ID NO: 24438
  REGION 1..118: note = tr|A0A1N7TY10|A0A1N7TY10_9PSED 6-carboxy-5,6,7,8-tetrahydropterin synthase OS=Pseudomonas simiae OX=321846 GN=queD PE=3 SV=1

SEQ ID NO: 24636 - protein, 118 aa, unidentified; identical to SEQ ID NO: 24577
  source 1..118: note = Pseudomonas soli
  REGION 1..118: note = tr|A0A1H9KSZ4|A0A1H9KSZ4_9PSED 6-carboxy-5,6,7,8-tetrahydropterin synthase OS=Pseudomonas soli OX=1306993 GN=queD PE=3 SV=1

SEQ ID NO: 24637 - protein, 118 aa, unidentified
  source 1..118: note = Pseudomonas songnenensis
  REGION 1..118: note = tr|A0A482UDZ8|A0A482UDZ8_9PSED 6-carboxy-5,6,7,8-tetrahydropterin synthase OS=Pseudomonas songnenensis OX=1176259 GN=queD PE=3 SV=1
MEIFKEFTFESAHRLPHVPQGHKCGRLHGHSFRVALYISGPVDPHTGWIRDFGEIKTIFKPLYDLLDHNYLNDIPGLENPTSENLAKWIWHELKPLLPELSCIRIHETCTSGCEYRGD

SEQ ID NO: 24638 - protein, 118 aa, Pseudomonas sp.; identical to SEQ ID NO: 24506
  REGION 1..118: note = tr|A0A0D6BLM1|A0A0D6BLM1_9PSED 6-carboxy-5,6,7,8-tetrahydropterin synthase OS=Pseudomonas sp. Os17 OX=1500686 GN=queD PE=3 SV=1

SEQ ID NO: 24639 - protein, 118 aa, Pseudomonas sp.
  REGION 1..118: note = tr|A0A2V5AT22|A0A2V5AT22_9PSED 6-carboxy-5,6,7,8-tetrahydropterin synthase OS=Pseudomonas sp. OV467 OX=2135592 GN=C7538_109114 PE=3 SV=1
MELFKEFIFEAAHRLPHVPAGHKCGRLHGHSFRVAIYIEGEVDPYTGWIRDFSEIKAIFKPLYEQLDHNYLNDIPGLENPTSEVLSKWIWQQLKPLLPELSRVRIHETCTSGCEYRGD

SEQ ID NO: 24640 - protein, 118 aa, Pseudomonas straminea; identical to SEQ ID NO: 24502
  REGION 1..118: note = tr|A0A1I1W108|A0A1I1W108_PSEOC 6-carboxy-5,6,7,8-tetrahydropterin synthase OS=Pseudomonas straminea OX=47882 GN=SAMN05216372_1051 PE=3 SV=1

SEQ ID NO: 24641 - protein, 118 aa, Pseudomonas stutzeri
  REGION 1..118: note = tr|I4JGK6|I4JGK6_PSEST 6-carboxy-5,6,7,8-tetrahydropterin synthase OS=Pseudomonas stutzeri TS44 OX=477228 GN=YO5_11075 PE=3 SV=1
MEIFKEFTFESAHRLPNVPTGHKCGRLHGHSFRVAIYIAGEVDPFTGWIRDFSELKAIFRPIYERLDHNYLNDLPGLENPTSENLAKWIWNELKPLLPELSRVRIHETCTSGCEYHGD

SEQ ID NO: 24642 - protein, 137 aa, Pseudomonas stutzeri
  REGION 1..137: note = tr|A0A2N8RGL6|A0A2N8RGL6_PSEST 6-carboxy-5,6,7,8-tetrahydropterin synthase OS=Pseudomonas stutzeri OX=316 GN=queD PE=3 SV=1
MAKRVKSRLDSASSLRVHTVEIFKEFTFESAHRLPHVPQGHKCGRLHGHSFRVALYISGPVDSHTGWIRDFGEIKSIFKPLYERLDHNYLNDIPGLENPTSENLAKWIWNELKPLLPELSRIRIHETCTSGCEYRGE

SEQ ID NO: 24643 - protein, 118 aa, Pseudomonas synxantha; identical to SEQ ID NO: 24438
  REGION 1..118: note = tr|I4KVC2|I4KVC2_9PSED 6-carboxy-5,6,7,8-tetrahydropterin synthase OS=Pseudomonas synxantha BG33R OX=96901 GN=queD PE=3 SV=1

SEQ ID NO: 24644 - protein, 118 aa, Pseudomonas synxantha; identical to SEQ ID NO: 24438
  REGION 1..118: note = tr|A0A0R2YXT7|A0A0R2YXT7_9PSED 6-carboxy-5,6,7,8-tetrahydropterin synthase OS=Pseudomonas synxantha OX=47883 GN=BFW89_09305 PE=3 SV=1

SEQ ID NO: 24645 - protein, 118 aa, Pseudomonas syringae; identical to SEQ ID NO: 24501
  REGION 1..118: note = tr|A0A0P9RZ54|A0A0P9RZ54_PSESX 6-carboxy-5,6,7,8-tetrahydropterin synthase OS=Pseudomonas syringae pv. castaneae OX=264450 GN=ALO79_03880 PE=3 SV=1

SEQ ID NO: 24646 - protein, 118 aa, Pseudomonas syringae; identical to SEQ ID NO: 24466
  REGION 1..118: note = tr|A0A3M5E742|A0A3M5E742_PSESX 6-carboxy-5,6,7,8-tetrahydropterin synthase OS=Pseudomonas syringae pv. aceris OX=199198 GN=ALP62_01252 PE=3 SV=1

SEQ ID NO: 24647 - protein, 111 aa, Pseudomonas taeanensis
  REGION 1..111: note = tr|A0A0A1YKP8|A0A0A1YKP8_9PSED 6-carboxy-5,6,7,8-tetrahydropterin synthase OS=Pseudomonas taeanensis MS-3 OX=1395571 GN=TMS3_0114020 PE=3 SV=1
MFEAAHRLPHVPEGHKCGRLHGHSFRVAVYIEGEVDPYTGWIRDFSEIKAIFKPLYEQLDHNYLNEIPGLENPTSEVIAKWIWQQLKPLLPELSRIRIHETCTSGCEYRGD

SEQ ID NO: 24648 - protein, 118 aa, Pseudomonas taetrolens
  REGION 1..118: note = tr|A0A0J6GL21|A0A0J6GL21_PSETA 6-carboxy-5,6,7,8-tetrahydropterin synthase OS=Pseudomonas taetrolens OX=47884 GN=TU78_17795 PE=3 SV=1
MEIFKEFTFESAHRLPYVPQGHKCGRLHGHSFKVAIHLSGDIDPATGWIRDFSEIKAIFKPLYEQLDHNYLNDIPGLENPTSEVLAKWIWQQLKPLLPELSAIRIHETCTSGCIYYGD

SEQ ID NO: 24649 - protein, 118 aa, Pseudomonas taiwanensis; identical to SEQ ID NO: 24571
  REGION 1..118: note = tr|V7DFH9|V7DFH9_9PSED 6-carboxy-5,6,7,8-tetrahydropterin synthase OS=Pseudomonas taiwanensis SJ9 OX=1388762 GN=O164_08365 PE=3 SV=1

SEQ ID NO: 24650 - protein, 118 aa, Pseudomonas thivervalensis
  REGION 1..118: note = tr|A0A176NUK4|A0A176NUK4_9PSED 6-carboxy-5,6,7,8-tetrahydropterin synthase OS=Pseudomonas thivervalensis OX=86265 GN=APS14_17465 PE=3 SV=1
MEIFKEFTFESAHRLPHVPEGHKCGRLHGHSFKVAIHLSGDIDPHTGWIRDFSEIKAIFKPLYERLDHNYLNDIPGLENPTSEVLAKWIWNELKPLLPDLSAIRIHETCTSGCIYHGE

SEQ ID NO: 24651 - protein, 118 aa, Pseudomonas thivervalensis; identical to SEQ ID NO: 24510
  REGION 1..118: note = tr|A0A2Z4ZKE6|A0A2Z4ZKE6_9PSED 6-carboxy-5,6,7,8-tetrahydropterin synthase OS=Pseudomonas thivervalensis OX=86265 GN=queD PE=3 SV=1

SEQ ID NO: 24652 - protein, 118 aa, Pseudomonas tolaasii; identical to SEQ ID NO: 24438
  REGION 1..118: note = tr|A0A2N0EEK2|A0A2N0EEK2_PSETO 6-carboxy-5,6,7,8-tetrahydropterin synthase OS=Pseudomonas tolaasii NCPPB 2192 OX=564423 GN=ATI14_5619 PE=3 SV=1

SEQ ID NO: 24653 - protein, 118 aa, Pseudomonas toyotomiensis
  REGION 1..118: note = tr|A0A1I5YZE4|A0A1I5YZE4_9PSED 6-carboxy-5,6,7,8-tetrahydropterin synthase OS=Pseudomonas toyotomiensis OX=554344 GN=queD PE=3 SV=1
MELFKEFIFEAAHRLPHVPEGHKCGRLHGHSFRVAIYIEGDVDPYTGWIRDFSEIKAIFKPIYEQLDHNYLNDIPGLENPTSEVLAKWIWQQVKPLLPELSRVRIHETCTSGCEYRGD

SEQ ID NO: 24654 - protein, 140 aa, Pseudomonas tremae
  REGION 1..140: note = tr|A0A0Q0C514|A0A0Q0C514_9PSED 6-carboxy-5,6,7,8-tetrahydropterin synthase OS=Pseudomonas tremae OX=200454 GN=ALO43_00114 PE=3 SV=1
MLLNLPPAFIASAIAIFRGQYTVEIFKEFTFESAHLLPNVPEGHKCGRLHGHSFRVGIHLAGKVDPHTGWIRDFSEIKAIFKPLYERLDHHYLNDIPGLENPTSENLAKWIWDELKPLLPELSAIRIHETCTSGCEYRGD

SEQ ID NO: 24655 - protein, 118 aa, Pseudomonas trivialis; identical to SEQ ID NO: 24457
  REGION 1..118: note = tr|A0A0H5AMN5|A0A0H5AMN5_9PSED 6-carboxy-5,6,7,8-tetrahydropterin synthase OS=Pseudomonas trivialis OX=200450 GN=AA957_04280 PE=3 SV=1

SEQ ID NO: 24656 - protein, 118 aa, Pseudomonas trivialis; identical to SEQ ID NO: 24499
  REGION 1..118: note = tr|A0A0R2ZDF5|A0A0R2ZDF5_9PSED 6-carboxy-5,6,7,8-tetrahydropterin synthase OS=Pseudomonas trivialis OX=200450 GN=TU79_16465 PE=3 SV=1

SEQ ID NO: 24657 - protein, 118 aa, Pseudomonas umsongensis; identical to SEQ ID NO: 24616
  REGION 1..118: note = tr|A0A1H2BH19|A0A1H2BH19_9PSED 6-carboxy-5,6,7,8-tetrahydropterin synthase OS=Pseudomonas umsongensis OX=198618 GN=SAMN04490206_3773 PE=3 SV=1

SEQ ID NO: 24658 - protein, 118 aa, Pseudomonas vancouverensis; identical to SEQ ID NO: 24450
  REGION 1..118: note = tr|A0A1H2P0F9|A0A1H2P0F9_9PSED 6-carboxy-5,6,7,8-tetrahydropterin synthase OS=Pseudomonas vancouverensis OX=95300 GN=queD PE=3 SV=1

SEQ ID NO: 24659 - protein, 118 aa, Pseudomonas veronii; identical to SEQ ID NO: 24586
  REGION 1..118: note = tr|A0A1D3K0K9|A0A1D3K0K9_9PSED 6-carboxy-5,6,7,8-tetrahydropterin synthase OS=Pseudomonas veronii 1YdBTEX2 OX=1295141 GN=queD PE=3 SV=1

SEQ ID NO: 24660 - protein, 118 aa, Pseudomonas veronii; identical to SEQ ID NO: 24586
  REGION 1..118: note = tr|A0A0R3B1X5|A0A0R3B1X5_9PSED 6-carboxy-5,6,7,8-tetrahydropterin synthase OS=Pseudomonas veronii OX=76761 GN=queD PE=3 SV=1

SEQ ID NO: 24661 - protein, 121 aa, unidentified
  source 1..121: note = Pseudomonas versuta
  REGION 1..121: note = tr|A0A0M4QH03|A0A0M4QH03_9PSED 6-carboxy-5,6,7,8-tetrahydropterin synthase OS=Pseudomonas versuta OX=1788301 GN=AOC04_13290 PE=3 SV=1
MNTVEIFKEFTFESAHRLPYVPQGHKCGRLHGHSFKVAIHLSGDIDPATGWIRDFSEIKAIFKPLYEQLDHNYLNDIPGLENPTSEVLAKWIWQQLKPLLPELSAIRIHETCTSGCIYYGD

SEQ ID NO: 24662 - protein, 118 aa, Pseudomonas viridiflava; identical to SEQ ID NO: 24501
  REGION 1..118: note = tr|A0A3M4NTF7|A0A3M4NTF7_PSEVI 6-carboxy-5,6,7,8-tetrahydropterin synthase OS=Pseudomonas viridiflava OX=33069 GN=ALP98_03831 PE=3 SV=1

SEQ ID NO: 24663 - protein, 118 aa, Pseudomonas viridiflava; identical to SEQ ID NO: 24505
  REGION 1..118: note = tr|A0A0Q0FLD7|A0A0Q0FLD7_PSEVI 6-carboxy-5,6,7,8-tetrahydropterin synthase OS=Pseudomonas viridiflava OX=33069 GN=queD PE=3 SV=1

SEQ ID NO: 24664 - protein, 119 aa, Pseudomonas vranovensis
  REGION 1..119: note = tr|A0A423CZ09|A0A423CZ09_9PSED 6-carboxy-5,6,7,8-tetrahydropterin synthase OS=Pseudomonas vranovensis OX=321661 GN=BHU25_21540 PE=3 SV=1
MVEIFKEFTFESAHRLPHVPEGHKCGRLHGHSFKVALHLTGPLDPHTGWIRDFSEIKAIFKPLYEQLDHNYLNDIPGLENPTSEVIAKWIWDQVKPLLPELSKVRIHETCTSGCEYYGD

SEQ ID NO: 24665 - protein, 118 aa, unidentified; identical to SEQ ID NO: 24432
  source 1..118: note = Pseudomonas wadenswilerensis
  REGION 1..118: note = tr|A0A380T1U7|A0A380T1U7_9PSED 6-carboxy-5,6,7,8-tetrahydropterin synthase OS=Pseudomonas wadenswilerensis OX=1785161 GN=queD PE=3 SV=1

SEQ ID NO: 24666 - protein, 121 aa, unidentified
  source 1..121: note = Pseudomonas weihenstephanensis
  REGION 1..121: note = tr|A0A0J6IWQ4|A0A0J6IWQ4_9PSED 6-carboxy-5,6,7,8-tetrahydropterin synthase OS=Pseudomonas weihenstephanensis OX=1608994 GN=TU86_21745 PE=3 SV=1
MNTVEIFKEFTFESAHRLPFVPEGHKCGRLHGHSFKVAIHLSGDIDPNTGWIRDFSEIKAIFKPLYEQLDHNYLNDIPGLENPTSEVLAKWIWQQLKPLLPELSAIRIHETCTSGCIYYGD

SEQ ID NO: 24667 - protein, 118 aa, Pseudomonas xanthomarina; identical to SEQ ID NO: 24543
  REGION 1..118: note = tr|A0A098FP08|A0A098FP08_9PSED 6-carboxy-5,6,7,8-tetrahydropterin synthase OS=Pseudomonas xanthomarina OX=271420 GN=ygcM PE=3 SV=1

SEQ ID NO: 24668 - protein, 118 aa, Pseudomonas xanthomarina
  REGION 1..118: note = tr|A0A1M5N546|A0A1M5N546_9PSED 6-carboxy-5,6,7,8-tetrahydropterin synthase OS=Pseudomonas xanthomarina DSM 18231 OX=1403346 GN=SAMN02744645_1668; PE = 3 SV=1
MEIFKEFTFESAHRLPHVPEGHKCGRLHGHSFRVAIYLEGEVNAHTGWIRDFSEIKQIFKPVYERLDHNYLNDLPGLDNPTSENLAIWIWNELKPLLPELSRVRVHETCTSGCEYRGQ

SEQ ID NO: 24669 - protein, 118 aa, Pseudomonas xinjiangensis
  REGION 1..118: note = tr|A0A1H1PW63|A0A1H1PW63_9PSED 6-carboxy-5,6,7,8-tetrahydropterin synthase OS=Pseudomonas xinjiangensis OX=487184 GN=SAMN05216421_1002 PE=3 SV=1
MEIFKEFTFEAAHRLPHVPEGHKCGRLHGHSFMVAIHIAGEVDPHTGWIRDFSELKSIFKPIYDRLDHNYLNDIPGLENPTSEVMARWIWSELKPLLPELCQVTIRETCTSGCIYRGD

SEQ ID NO: 24670 - protein, 118 aa, unidentified; identical to SEQ ID NO: 24438
  source 1..118: note = Pseudomonas yamanorum
  REGION 1..118: note = tr|A0A1H2EL33|A0A1H2EL33_9PSED 6-carboxy-5,6,7,8-tetrahydropterin synthase OS=Pseudomonas yamanorum OX=515393 GN=AK972_3675 PE=3 SV=1

SEQ ID NO: 24671 - protein, 118 aa, unidentified; identical to SEQ ID NO: 24557
  source 1..118: note = Pseudomonas zeshuii
  REGION 1..118: note = tr|A0A1M6L393|A0A1M6L393_9PSED 6-carboxy-5,6,7,8-tetrahydropterin synthase OS=Pseudomonas zeshuii OX=1076620 GN=SAMN05216295_1214 PE=3 SV=1

SEQ ID NO: 24672 - protein, 118 aa, unidentified
  source 1..118: note = Pseudomonas zhaodongensis
  REGION 1..118: note = tr|A0A3M2HLU4|A0A3M2HLU4_9PSED 6-carboxy-5,6,7,8-tetrahydropterin synthase OS=Pseudomonas zhaodongensis OX=1176257 GN=queD PE=3 SV=1
MEIFKEFTFESAHRLPHVPEGHKCGRLHGHSFRVAIYLEGEVDAHTGWIRDFSEIKEIFKPIYERLDHNYLNDLPGLENPTSENLAKWVWQELKPLLPELSRVRIHETCTSGCEYRGD

SEQ ID NO: 24673 - protein, 118 aa, unidentified; identical to SEQ ID NO: 24419
  source 1..118: note = Pseudomonas zhaodongensis
  REGION 1..118: note = tr|A0A365PRA9|A0A365PRA9_9PSED 6-carboxy-5,6,7,8-tetrahydropterin synthase OS=Pseudomonas zhaodongensis OX=1176257 GN=queD PE=3 SV=1

SEQ ID NO: 24674 - protein, 132 aa, Pseudonocardia alni
  REGION 1..132: note = tr|A0A2N0IG99|A0A2N0IG99_9PSEU 6-pyruvoyl-tetrahydropterin synthase OS=Pseudonocardia alni OX=33907 GN=ATL51_4072 PE=4 SV=1
MFSITVRDHVMVAHSLRGEVFGPAQQRHGATFLVDATFRRPELDPDGIVVDIGLATAQLAETLADLNHRDLDDHPEFAGVNTTTEFLARAIADRLADRIGAGKLGGNAGGLTGVTVTLHESHVAWASYERDL

SEQ ID NO: 24675 - protein, 159 aa, Pseudonocardia ammonioxydans
  REGION 1..159: note = tr|A0A1I5E1B7|A0A1I5E1B7_9PSEU 6-pyruvoyl-tetrahydropterin synthase OS=Pseudonocardia ammonioxydans OX=260086 GN=SAMN05216207_102862 PE=4 SV=1
MNRAGSASVSGTGSSDSLHPSGPRESALFSITVRDHVMIAHSLRGEVFGPAQQRHGATYLVDATFRRRELDADGIVVDIALATAQLSATLADLNHRDLDEHPEFAGLNTTTEFLARTIADRLAERIAAGALGPGAAGLTGLAVTLHESHVAWASYEREL

SEQ ID NO: 24676 - protein, 132 aa, Pseudonocardia asaccharolytica
  REGION 1..132: note = tr|A0A511D356|A0A511D356_9PSEU Uncharacterized protein OS=Pseudonocardia asaccharolytica DSM 44247 = NBRC 16224 OX=1123024 GN=ptpS PE=4 SV=1
MFSITVRDHVMIAHSFRGEVFGPAQRLHGATYIVDATFRRADLDADGIVVDIGLATSGLGAALADLNYRNLDDEPAFAGVNTSTEFLAKVIADRLAEKVQAGALGEGARGLAGIAVTLHESHVAWASYERAL

SEQ ID NO: 24677 - protein, 84 aa, Pseudonocardia autotrophica
  REGION 1..84: note = tr|A0A1Y2MH14|A0A1Y2MH14_PSEAH 6-carboxy-5,6,7,8-tetrahydropterin synthase; OS = Pseudonocardia autotrophica OX=2074 GN=queD PE=4 SV=1
MEVEATGPVDERGVVADFAELDAQVEQHVLARLDHSYLNDLLNNPTAELTACMIGDWLSEAAVPWTMLRLWETERGSVVLRRPS

SEQ ID NO: 24678 - protein, 132 aa, Pseudonocardia autotrophica
  REGION 1..132: note = tr|A0A1Y2MR11|A0A1Y2MR11_PSEAH 6-pyruvoyl tetrahydropterin synthase OS=Pseudonocardia autotrophica; OX = 2074 GN=BG845_05031 PE=4 SV=1
MFSITVRDHFMIAHSFRGEVFGPAQRLHGATYVVDATFRRRELDADGIVVDIGRATDELKAILAELDYRNLDEEPVFDGVNTSTEFLAKVVADRLAERVHAGALGEGARGLAGLAVSLSESHVASAAYERDL

SEQ ID NO: 24679 - protein, 132 aa, unidentified
  source 1..132: note = Pseudonocardia cypriaca
  REGION 1..132: note = tr|A0A543G9V9|A0A543G9V9_9PSEU 6-pyruvoyl-tetrahydropterin synthase OS=Pseudonocardia cypriaca OX=882449 GN=FB388_0188 PE=4 SV=1
MFSITVRDHMMVAHSFRGAVFGPAQRLHGATFLVDATFRRPELDEDGIVVDIGLATQQLGEVLGELNFRNLDDEPAFEGVNTSTEFLAKVVADRLADRLHGGALGENARGISSIVVTLHESHVAWASYELSL

SEQ ID NO: 24680 - protein, 132 aa, Pseudonocardia dioxanivorans
  REGION 1..132: note = tr|F4CP86|F4CP86_PSEUX 6-pyruvoyl tetrahydropterin synthase OS=Pseudonocardia dioxanivorans (strain ATCC 55486 / DSM 44775 / JCM 13855 / CB1190) OX=675635; GN = Psed_14 05 PE=4 SV=1
MFAITVRDHFMVAHSFRGEVFGPAQALHGATYVVDAVFRRAALDDDGIVVDIGLATAQLGEVLGELNYRNLDDEPAFAGHNTSTEFLAKVVADRLADRVHAGALGEGARGLAGIGVTLHESHVASASYERAL

SEQ ID NO: 24681 - protein, 132 aa, Pseudonocardia endophytica
  REGION 1..132: note = tr|A0A4R1I724|A0A4R1I724_9PSEU 6-pyruvoyl-tetrahydropterin synthase OS=Pseudonocardia endophytica OX=401976 GN=EV378_1729 PE=4 SV=1
MYRITVRDHVMVAHSFRGEVFGPAQALHGATFVVDATFRRTDLDADGIVVDIGLATTQLGEVLADLNYRNLDEHPDFAGVNTTTEFLARVVADRLVARVHGGALGEGARGLSGVEVTLHESHVASASYERDL

SEQ ID NO: 24682 - protein, 132 aa, unidentified
  source 1..132: note = Pseudonocardia hierapolitana
  REGION 1..132: note = tr|A0A561SV59|A0A561SV59_9PSEU 6-pyruvoyl-tetrahydropterin synthase OS=Pseudonocardia hierapolitana OX=1128676 GN=FHX44_114655 PE=4 SV=1
MFSITVRDHMMVAHSFRGAVFGPAQRLHGATFVVDATFRRPVLDSDGIVVDIGLATQQLGEVLAELNYRNLDDEPAFEGANTSTEFLARVVADRLAERLDAGALGDNARGITTIVVTLHESHVAWASYERSL

SEQ ID NO: 24683 - protein, 132 aa, Pseudonocardia hydrocarbonoxydans
  REGION 1..132: note = tr|A0A4Y3WPM3|A0A4Y3WPM3_9PSEU Uncharacterized protein OS=Pseudonocardia hydrocarbonoxydans OX=76726; GN = ptpS PE=4 SV=1
MFSITVRDHVMVAHSFRGEVFGPAQRLHGATFVVDATFRRPELDADNIVVDIGLATTELKAVLADLNYRNLDDEPAFAGVNTSTEFLAKVVADRLAARVHAGALGDGARGLAGITVSLHESHVAWASYERAL

SEQ ID NO: 24684 - protein, 148 aa, Pseudonocardia kunmingensis
  REGION 1..148: note = tr|A0A543D9L4|A0A543D9L4_9PSEU 6-pyruvoyltetrahydropterin/6-carboxytetrahydropterin synthase OS=Pseudonocardia kunmingensis OX=630975; GN = FB558_6261 PE=4 SV=1
MNNAPEDIDAGAFARYRGTVTVRFSAALRIAGLEPGETAGRLHGHDFTAVFLFESATLTYPGVVVDHDMRDEITGRITDRLHHRDLDRLLDRAATCEALADYLATWYVRSARPPGHARLLAVTVTTAAGDHGEIHLPAPRHHPAGGSR

SEQ ID NO: 24685 - protein, 132 aa, Pseudonocardia kunmingensis
  REGION 1..132: note = tr|A0A543E0C1|A0A543E0C1_9PSEU 6-pyruvoyl-tetrahydropterin synthase OS=Pseudonocardia kunmingensis OX=630975 GN=FB558_1817 PE=4 SV=1
MFSITVRDHVMVAHSFRGEVFGPAQRLHGATFVVDATFRRPDLDADGIVVDIGLATQQLGAVLAGLNYRNLDDEPAFAGVNTSTEFLARHIADRLAEQVHAGALGEGARGIAAIAVTLHESHVAWASYERTL

SEQ ID NO: 24686 - protein, 132 aa, Pseudonocardia oroxyli
  REGION 1..132: note = tr|A0A1G7VTX4|A0A1G7VTX4_9PSEU 6-pyruvoyl-tetrahydropterin synthase OS=Pseudonocardia oroxyli OX=366584 GN=SAMN05216377_113184 PE=4 SV=1
MFGITVRDHMMVAHSFTGAVFGPAQRLHGATFVVDATFRRPELDADDLVVDIGLASEALKAVLAELTYRNLDDLPEFAGRNTSTEFLAQVVADRLAGRIAADELGPGASGLTALEVTLHESHVAWATYTRPL

SEQ ID NO: 24687 - protein, 132 aa, Pseudonocardia sp.
  REGION 1..132: note = tr|A0A1Q8JEH7|A0A1Q8JEH7_9PSEU PTPS-like type 4; OS = Pseudonocardia sp. Ae356_Ps1 OX=1885032; GN = Ae356Ps1_0505 PE=4 SV=1
MFSITVRDHVMIAHSLRGDVFGPAQQRHGATFLVDATFRRPELDPDGIVVDIALATTQLGEVLADLNHRDLDEHSDFAGVNTTTEFLARAIADRLAERVRAGGLGPGARGLAGLVVTLHESHVAWASYERTL

SEQ ID NO: 24688 - protein, 132 aa, Pseudonocardia sp.
  REGION 1..132: note = tr|A0A1Q4DGY6|A0A1Q4DGY6_9PSEU Uncharacterized protein OS=Pseudonocardia sp. 73-21 OX=1895809; GN = BGP03_26105 PE=4 SV=1
MFSITVRDHVMVAHSFRGEVFGPAQRLHGATFVVDATFRRAALDADNIVVDIGLATRELGAVLAEVNYRNLDDEPEFAGVNTSTEFLAQVVADRLAARVHAGALGEGARGLAGITVTLTESHVAWASYERAL

SEQ ID NO: 24689 - protein, 132 aa, Pseudonocardia sulfidoxydans
  REGION 1..132: note = tr|A0A511DBP1|A0A511DBP1_9PSEU Uncharacterized protein OS=Pseudonocardia sulfidoxydans NBRC 16205; OX = 1223511 GN=PSU4_07670 PE=4 SV=1
MFAITVRDHFMVAHSFRGEVFGPAQALHGATYVVDATFRRTDLDDDGIVVDIGLATAQLGEVLGELNYRNLDDEPAFAGRNTSTEFLAKVVADRLAERVHAGALGEGARGLAGIAVTLNESHVASASYERAL

SEQ ID NO: 24690 - protein, 130 aa, Pseudonocardia thermophila
  REGION 1..130: note = tr|A0A1M6T586|A0A1M6T586_PSETH 6-pyruvoyl-tetrahydropterin synthase OS=Pseudonocardia thermophila OX=1848 GN=SAMN05443637_107160 PE=4 SV=1
MFSITVRDHVMVAHSFRGEVFGPAQRLHGATFVVDATFQRPELDPDGVVVDIGLATEQLKAVLADLDYRNLDEVFPGVNTTTEFLAKEIADRLVSRIHAGALGESARGLTGIVVTLHESHVAWASYEREL

SEQ ID NO: 24691 - protein, 132 aa, unidentified
  source 1..132: note = Pseudonocardiaceae bacterium
  REGION 1..132: note = tr|A0A431NE51|A0A431NE51_9PSEU 6-carboxytetrahydropterin synthase OS=Pseudonocardiaceae bacterium OX=1873463 GN=EKK42_14460 PE=4 SV=1
MFAITVRDHFMVAHSFRGEVFGPAQALHGATYVVDATFRRTDLDDDGIVVDIGLATAQLGDVLGELNYRNLDDEPAFKGVNTSTEYLAKVVADRLAERVHAGALGEGARGLAGIAVTLNESHVASASYERAL

SEQ ID NO: 24692 - protein, 132 aa, unidentified
  source 1..132: note = Pseudonocardiaceae bacterium
  REGION 1..132: note = tr|A0A419HH38|A0A419HH38_9PSEU 6-carboxytetrahydropterin synthase OS=Pseudonocardiaceae bacterium YIM PH 21723 OX=2340915 GN=D5S17_24920 PE=4 SV=1
MFSVTVRDHIMVAHSFRGEVFGPAQRLHGATFVVDATFKRSELDADNIVVDIGLATTRLGAVLGELNYRNLDDVPEFAGINTSTEFLAKVIADRLADSVHRGELGEGARGLTGIQVTLHESHAAWAGYEREL

SEQ ID NO: 24693 - protein, 132 aa, unidentified
  source 1..132: note = Pseudonocardiales bacterium
  REGION 1..132: note = tr|A0A2W6DKD5|A0A2W6DKD5_9PSEU Uncharacterized protein OS=Pseudonocardiales bacterium OX=2201155; GN = DLM57_05930 PE=4 SV=1
MFTVTVRDHMMIAHSFRGEVFGPAQRLHGATYVVDATFRRDALDADNLVVDIGRAAEELHAVLGDLSYRNLDDEAAFTGMNTSTEALAQVIADRLAERVHAGALGAGAQGIAGIAITLHESHIAWASYERTL

SEQ ID NO: 24694 - protein, 132 aa, unidentified
  source 1..132: note = Pseudonocardiales bacterium
  REGION 1..132: note = tr|A0A2W6EIL4|A0A2W6EIL4_9PSEU Uncharacterized protein OS=Pseudonocardiales bacterium OX=2201155; GN = DLM58_16020 PE=4 SV=1
MFSVTVRDHMMIAHSFRGEVFGPAQRLHGATYVVDATFSRVALDADNLVVDIGRAAEELRAIVGELSYRNLDDEAAFAGMNTSTEALAQVVADRLVAQVQAGGLGEGARGLAGVKVTLHESHIAWASYEREL

SEQ ID NO: 24695 - protein, 136 aa, unidentified
  source 1..136: note = Pseudopedobacter saltans
  REGION 1..136: note = tr|A0A2W5F917|A0A2W5F917_9SPHI Uncharacterized protein OS=Pseudopedobacter saltans OX=151895; GN = DI598_00515 PE=4 SV=1
MVYLTRLEHFNAAHKLYNPKWSVEKNEDVFGPCANENFHGHNYELFVTVKGQPNPDTGFVMDVKKLSILIRENVIKKVDHRNLNMDVDFLKDQFASTENVVVAFWNILAPLMPEGVQLHRLKLYETPRIYVEYYGD

SEQ ID NO: 24696 - protein, 137 aa, unidentified
  source 1..137: note = Pseudopedobacter saltans
  REGION 1..137: note = tr|F0S8G0|F0S8G0_PSESL Uncharacterized protein; OS = Pseudopedobacter saltans (strain ATCC 51119 / DSM 12145 / JCM 21818 / LMG 10337 / NBRC 100064 / NCIMB 13643); OX = 762 903 GN=Pedsa_2885 PE=4 SV=1
MIYITRKEHFNAAHKLYREDWSKEKNEEVFGICANANWHGHNYDLYVTVKGEINEETGFVIDLKDLKDIIITHVIDKVDHRNLNLDVDFMRGKMASTEILAVEFWKQLDGPIKERGAQLHSIKLYETVNNYVEYFGE

SEQ ID NO: 24697 - protein, 132 aa, unidentified
  source 1..132: note = Pseudorhizobium pelagicum
  REGION 1..132: note = tr|A0A081MNH9|A0A081MNH9_9RHIZ 6-pyruvoyl tetrahydropterin synthase OS=Pseudorhizobium pelagicum; OX = 1509405 GN=GV67_20350 PE=4 SV=1
MFAVEVRDHIMIAHSLPRPVFGPAQGMHGATFVVDAAFFTADLDEDGLAVDIGLAMQVLGEVLKPLNYQNLDEVEEFAGKVTTTEFLAKFIFDQLAKAIAGGRLGDGSGRIRRLKVMLHESHTARGWYEADL

SEQ ID NO: 24698 - protein, 135 aa, Pseudorhodoferax soli
  REGION 1..135: note = tr|A0A368XMW6|A0A368XMW6_9BURK 6-pyruvoyl-tetrahydropterin synthase OS=Pseudorhodoferax soli OX=545864 GN=DES41_106191 PE=4 SV=1
MYSVNVRDHFMIAHSFRGEAFGPAQRLHGATYVVDATFRRRALDADGMVVDIALATSVLREVLSEFNFRNLDDESAFTGQNTTTEFMARVVFERIAARAQAGELGPHAHGLASLRVRLHESHVAWAEYEGPLAPA

SEQ ID NO: 24699 - protein, 135 aa, Pseudorhodoferax sp.
  REGION 1..135: note = tr|A0A0Q4XYG9|A0A0Q4XYG9_9BURK 6-pyruvoyl tetrahydropterin synthase OS=Pseudorhodoferax sp. Leaf267; OX = 1736316 GN=ASF43_10975 PE=4 SV=1
MYTVNVRDHFMIAHSFHGEAFGPAQRLHGATYVVDAAFSRRALDADGMVVDIARATEVLRSVLAEFNLRNLDDDAAFTGQNTTTEFMARVVFERIAARAQAGELGAHASGIESLRVQLHESHVAWASYEGVLGAG

SEQ ID NO: 24700 - protein, 135 aa, Pseudorhodoferax sp.
  REGION 1..135: note = tr|A0A0S9L0V7|A0A0S9L0V7_9BURK 6-pyruvoyl tetrahydropterin synthase OS=Pseudorhodoferax sp. Leaf265; OX = 1736315 GN=ASF45_09450 PE=4 SV=1
MYSVNVRDHFMIAHSFRGEAFGPAQRLHGATYVVDATFRRRALDADGMVVDIALATSVLREVLAEFNFRNLDDESAFAGQNTTTEFMARVVFERIAARAQAGELGPHAHGLASLRVRLHESHVAWAEYEGPLAPA

SEQ ID NO: 24701 - protein, 137 aa, Pseudosphingobacterium domesticum
  REGION 1..137: note = tr|A0A1H7S517|A0A1H7S517_9SPHI 6-pyruvoyltetrahydropterin/6-carboxytetrahydropterin synthase OS=Pseudosphingobacterium domesticum OX=407022; GN = SAMN05661044_03067 PE= 4 SV=1
MIYITRRERFSAAHKLYRDDWSLEENEAAFGKCSNPNWHGHNYELFVTVKGEIDPITGFVIDLRALKTIILNHVIDKIDHRNVNLDVDFMLGKMASTEVLAVEIFNQLKDPIQAEGAILHAIKLQETENNSVEYFGN

SEQ ID NO: 24702 - protein, 132 aa, Pseudosporangium ferrugineum
  REGION 1..132: note = tr|A0A2T0SIM3|A0A2T0SIM3_9ACTN 6-pyruvoyl-tetrahydropterin synthase OS=Pseudosporangium ferrugineum OX=439699 GN=CLV70_101438 PE=4 SV=1
MFSVTVRDHIMIAHSFSGEVFGPAQKLHGATFVVDATFKRPELDADNIVVDIGLASQELHAICGALSYRNLDDEPDFRGVNTSTEFLAKVIADRLAGKAADGGLGAGAGGLTGIAVTLHESHIAWASYERDL

SEQ ID NO: 24703 - protein, 129 aa, unidentified
  source 1..129: note = Pseudothermotoga hypogea
  REGION 1..129: note = tr|A0A0X1KP70|A0A0X1KP70_9THEM 6-carboxy-5,6,7,8-tetrahydropterin synthase; OS = Pseudothermotoga hypogea DSM 11164 = NBRC 106472; OX = 1123384 GN=AJ81_01390 PE=3 SV=1
MFFLSKEFVFDAAHRLDKYKGKCENLHGHTYRLRVTLVGLPDEEGMIMDFVELKRLVHEQVISLLDHNYLNQIIPQPTAENIARWVWNKLEPLLKNERRKLYEVTVWETADSFVTYRGSNDERCAESEG

SEQ ID NO: 24704 - protein, 118 aa, unidentified
  source 1..118: note = Pseudothermotoga lettingae
  REGION 1..118: note = tr|A8F7Q9|A8F7Q9_PSELT 6-carboxy-5,6,7,8-tetrahydropterin synthase; OS = Pseudothermotoga lettingae (strain ATCC BAA-301 / DSM 14385 / NBRC 107922 / TMO) OX=416591 GN=T let_1639 PE=3; SV = 1
MYLSRDFTFDAAHRLEKYHGKCEELHGHTYKLRVTVEGDPDEEGMVVDFLYLKKTVNELVISVLDHRYLNEIISQPTAENIAKWVWDKLKNPLSTQRYRLYEVSVWESENSFVSYRGE

SEQ ID NO: 24705 - protein, 129 aa, unidentified
  source 1..129: note = Pseudothermotoga sp.
  REGION 1..129: note = tr|A0A3D3V3S5|A0A3D3V3S5_9THEM 6-carboxy-5,6,7,8-tetrahydropterin synthase; OS = Pseudothermotoga sp. OX=2033661 GN=queD PE=3 SV=1
MFLLSKEFVFDAAHRLDKYKGKCENLHGHTYRLRVTLVGVPDEEGMVMDFVELKRLVHEQVISLLDHNYLNQIIPQPTAENIARWVWNRLEPLLKSERRKLYEVTVWETADSFVTYRGSNDERCTESEG

SEQ ID NO: 24706 - protein, 119 aa, unidentified
  source 1..119: note = Pseudothermotoga thermarum
  REGION 1..119: note = tr|F7YU56|F7YU56_9THEM 6-carboxy-5,6,7,8-tetrahydropterin synthase; OS = Pseudothermotoga thermarum DSM 5069 OX=688269; GN = Theth_0045 PE=3 SV=1
MYLISRDFKFDAAHKLEKYHGKCEALHGHTYKLRVTLIGIPNEEGMVVDFVQLKTIVQEKVLKVLDHSYLNEIIPQPTAENIAKWIWQMLEESLTFSNCKLYEVIVWETEDCFVTYRGG

SEQ ID NO: 24707 - protein, 118 aa, unidentified
  source 1..118: note = Pseudovibrio axinellae
  REGION 1..118: note = tr|A0A165UN81|A0A165UN81_9RHOB 6-carboxy-5,6,7,8-tetrahydropterin synthase; OS = Pseudovibrio axinellae OX=989403 GN=queD PE=3 SV=1
MYKITKEFHFSASHQLCEMPEDHPCARLHGHNYIVEIELSSASLNAFGFVVDFTELKPLKGFIDEELDHRHLNDVFKHDQVTSEFLSKFIFEFCKEHWSETSAVRVSETQKTWAEYRP

SEQ ID NO: 24708 - protein, 139 aa, unidentified
  source 1..139: note = Pseudovibrio axinellae
  REGION 1..139: note = tr|A0A165YUY7|A0A165YUY7_9RHOB 6-pyruvoyl tetrahydropterin synthase OS=Pseudovibrio axinellae; OX = 989403 GN=PsAD2_02009 PE=4 SV=1
MYSVEINDHIMIAHSLKGEVFGPASQLHGLTAHVHVAIFAEELDENGIVIDIGNALAVLEEILRPFNYKNLDELPQFKGRNTTVDFLCSYIYQRVSDAAYLHKLGREPSELSKVRVTIAENPDARASYEAPLTAALAHE

SEQ ID NO: 24709 - protein, 118 aa, Pseudovibrio denitrificans
  REGION 1..118: note = tr|A0A1I6XP91|A0A1I6XP91_9RHOB 6-carboxy-5,6,7,8-tetrahydropterin synthase; OS = Pseudovibrio denitrificans OX=258256; GN = SAMN05444141_101343 PE=3 SV=1
MYKITKEFHFSASHQLCEMPEGHPCARLHGHNYIVVVELASEFLNEYGFVVDFTELKPLKRFIDDELDHRHLNEVFGHDQVTSEFLAKTIYEFCKGHWTETCAVRVSETPKTWAEYRP

SEQ ID NO: 24710 - protein, 139 aa, Pseudovibrio denitrificans
  REGION 1..139: note = tr|A0A1I7BAK9|A0A1I7BAK9_9RHOB 6-pyruvoyl-tetrahydropterin synthase OS=Pseudovibrio denitrificans OX=258256 GN=SAMN05444141_103807 PE=4 SV=1
MYSVEISNHIMIAHSLKGEVFGPASQLHGLTAHVHVAIFAEELDENGIVIDIGNALDVLAEILHPFNYKNLDDLPQFKGRNTTVDFLCSYIYQRVCDAAYLHKLGREPGELSKVRVTISENPNARASYEAPLTASEAHE

SEQ ID NO: 24711 - protein, 118 aa, Pseudovibrio sp.
  REGION 1..118: note = tr|A0A1H1FAU0|A0A1H1FAU0_9RHOB 6-carboxy-5,6,7,8-tetrahydropterin synthase; OS = Pseudovibrio sp. Tun.PSC04-5.I4 OX=1798213; GN = SAMN04515695_2155 PE=3 SV=1
MYKITKEFHFSASHQLCEMPEDHPCARLHGHNYVVVVELSCETLDKYGFVVDFTALKPLKRYIDDELDHRHLNEVFDHDQVTSEFLATEIYSWCKQRWDETSAVRVSETPKTWAEYRP

SEQ ID NO: 24712 - protein, 118 aa, Pseudovibrio sp.
  REGION 1..118: note = tr|A0A165UC65|A0A165UC65_9RHOB 6-carboxy-5,6,7,8-tetrahydropterin synthase; OS = Pseudovibrio sp. Ad26 OX=989410 GN=queD_2 PE=3 SV=1
MYKITKEFHFSASHQLCEMPEGHPCARLHGHNYIVVIELASKNLDEHGFVVDFTELKPLKRFIDDELDHRHLNEVFGHDQVTSEFLAKTIYEFCKGHWVETCAVRVSETPKTWAEYRP

SEQ ID NO: 24713 - protein, 118 aa, unidentified
  source 1..118: note = Pseudoxanthomonas composti
  REGION 1..118: note = tr|A0A4Q1JTV1|A0A4Q1JTV1_9GAMM 6-carboxy-5,6,7,8-tetrahydropterin synthase; OS = Pseudoxanthomonas composti OX=2137479 GN=queD PE=3 SV=1
MDIFKVFTLEAAHRLPNVPEGHKCARLHGHSFRIELHVSGQIDPHTGWVMDFADLKAAFKPLYERLDHHYLNDIPGLENPTSERIAVWIWEQLKPDLPGLSEVVVHETCTAGSRYRGV

SEQ ID NO: 24714 - protein, 118 aa, Pseudoxanthomonas dokdonensis
  REGION 1..118: note = tr|A0A0R0D216|A0A0R0D216_9GAMM 6-carboxy-5,6,7,8-tetrahydropterin synthase; OS = Pseudoxanthomonas dokdonensis OX=344882 GN=ABB29_02340; PE = 3 SV=1
MDIFKVFTLEAAHRLPNVPAGHKCARLHGHSFRVELHLSGELDPHTGWVMDFAEVKAAFKPTYDRLDHHYLNDIPGLENPTSERLAVWIWEQVKPALPLLSEVVVHETCTAGSRYRGP

SEQ ID NO: 24715 - protein, 117 aa, Pseudoxanthomonas indica
  REGION 1..117: note = tr|A0A1T5LBJ2|A0A1T5LBJ2_9GAMM 6-carboxy-5,6,7,8-tetrahydropterin synthase; OS = Pseudoxanthomonas indica OX=428993 GN=SAMN06296058_2254; PE = 3 SV=1
MDIFKIFTLEAAHRLPNVPEGHKCARLHGHSFRVELHVSGDLDPHTGWVMDFADVKAAFKPIYDRLDHHYLNDIPGLENPTSERLSMWIWEQLKPALPNLSEVVVHETCTAGSRYRG

SEQ ID NO: 24716 - protein, 121 aa, Pseudoxanthomonas sp.
  REGION 1..121: note = tr|A0A4Q8LDF9|A0A4Q8LDF9_9GAMM 6-carboxy-5,6,7,8-tetrahydropterin synthase; OS = Pseudoxanthomonas sp. NML171200 OX=2480816 GN=queD PE=3; SV = 1
MDIFKVFTFEAAHRLPNVPEGHKCARLHGHSFRVELHLTGPLDPHTGWVMDFADVKAAFKPLYERLDHHYLNDIEGLDNPTSERIAEWIWDHLKPALPMLSQVVVHETCTAGSRYRGPRAD

SEQ ID NO: 24717 - protein, 121 aa, Pseudoxanthomonas sp.; identical to SEQ ID NO: 24716
  REGION 1..121: note = tr|A0A4Q8LLD7|A0A4Q8LLD7_9GAMM 6-carboxy-5,6,7,8-tetrahydropterin synthase; OS = Pseudoxanthomonas sp. NML171202 OX=2480817 GN=queD PE=3; SV = 1

SEQ ID NO: 24718 - protein, 121 aa, Pseudoxanthomonas spadix
  REGION 1..121: note = tr|A0A3M6Q263|A0A3M6Q263_9GAMM 6-carboxy-5,6,7,8-tetrahydropterin synthase; OS = Pseudoxanthomonas spadix OX=415229 GN=queD PE=3 SV=1
MDIFKVFSIEAAHRLPNVPDGHKCARLHGHSFRIEIHLSGPLDPHTGWVMDFADVKAAFRPIFQRLDHHYLNDIQGLDNPTSERIAEWIWDHLKPALPLLSQVVVHETCTAGSRYRGPAAG

SEQ ID NO: 24719 - protein, 121 aa, Pseudoxanthomonas spadix
  REGION 1..121: note = tr|G7UUN9|G7UUN9_PSEUP 6-carboxy-5,6,7,8-tetrahydropterin synthase; OS = Pseudoxanthomonas spadix (strain BD-a59) OX=1045855; GN = DSC_14340 PE=3 SV=1
MDIFKVFSIEAAHRLPNVPDGHKCARLHGHSFRIEIHLSGPLDPHTGWVMDFAEVKAAFRPIFQRLDHHYLNDIQGLDNPTSERIAEWIWDHLKPALPLLSQVVVHETCTAGSRYRGPAAG

SEQ ID NO: 24720 - protein, 117 aa, Pseudoxanthomonas suwonensis
  REGION 1..117: note = tr|A0A0E3Z1P2|A0A0E3Z1P2_9GAMM 6-carboxy-5,6,7,8-tetrahydropterin synthase; OS = Pseudoxanthomonas suwonensis OX=314722 GN=WQ53_11090; PE = 3 SV=1
MDIFKVFTLEAAHRLPNVPEGHKCARLHGHSFRVEIHVSGEVDPHTGWVMDFADIKAAFKPLYEQLDHHYLNEIEGLENPTSERLAGWIWDRLKPVLPLLSEVVVHETCTSGCRYRG

SEQ ID NO: 24721 - protein, 125 aa, Pseudoxanthomonas suwonensis
  REGION 1..125: note = tr|A0A2W4Y2P6|A0A2W4Y2P6_9GAMM 6-carboxy-5,6,7,8-tetrahydropterin synthase; OS = Pseudoxanthomonas suwonensis OX=314722 GN=queD PE=3 SV=1
MTASIFKVFTLEAAHRLPHVPDGHKCSRLHGHSFRVEIHASGPVGQHSGWVMDFADLKVAFQPLYEQLDHHYLNDIPGLENPTSERLAMWIWERLQPRLPGLSEVAVHETCTSGCRYHGPSQAID

SEQ ID NO: 24722 - protein, 117 aa, Pseudoxanthomonas taiwanensis
  REGION 1..117: note = tr|A0A562D3C2|A0A562D3C2_9GAMM 6-carboxy-5,6,7,8-tetrahydropterin synthase; OS = Pseudoxanthomonas taiwanensis J19 OX=935569; GN = L613_007100000160 PE=3 SV=1
MEIFKVFTLEAAHRLPNVPEGHKCARLHGHSFRVELHAEGPVDPQAGWVMDFADLKAAFKPLYEQLDHHYLNEIPGLENPTSENLAAWIWARLKPSVPLLSEVVVHETCTSGCRYRG

SEQ ID NO: 24723 - protein, 117 aa, unidentified
  source 1..117: note = Pseudoxanthomonas wuyuanensis
  REGION 1..117: note = tr|A0A286D1X2|A0A286D1X2_9GAMM 6-carboxy-5,6,7,8-tetrahydropterin synthase; OS = Pseudoxanthomonas wuyuanensis OX=1073196; GN = SAMN06296416_1028 PE=3 SV=1
MDIFKVFTIEAAHRLPNVPAGHKCARLHGHSFRIELHVSGDLDPHTGWVMDFADIKAVFKPIYERLDHHYLNDIEGLENPTSERIAVWIWEQLKPQLPLLSEVVVHETCTAGSRYRG

SEQ ID NO: 24724 - protein, 153 aa, Pseudozobellia sp.
  REGION 1..153: note = tr|A0A3B0CDK9|A0A3B0CDK9_9FLAO 6-carboxytetrahydropterin synthase OS=Pseudozobellia sp. CCMM003 OX=2419782 GN=D7Z94_03770 PE=4 SV=1
MGKIRITKQFTFETGHALYGYDGKCRNIHGHSYKLSVTVIGEPIVDTSHVKLGMVIDFGDLKKIVKEEIVDPFDHATVFNKNTPHIELAKELENRGHKVIMADYQPTSENMVIDFAEKIKSRLSKDINLHSLKLRETETAFAEWYAEDNGPLP

SEQ ID NO: 24725 - protein, 150 aa, Pseudozobellia sp.
  REGION 1..150: note = tr|A0A2E5BH81|A0A2E5BH81_9FLAO 6-carboxytetrahydropterin synthase QueD OS=Pseudozobellia sp. OX=2024854 GN=CML05_00125 PE=4 SV=1
MANIRITKQFNFETGHALFGYDGKCRNVHGHSYKLSVTVIGRPITDTSHVKLGMVIDFGDLKKIVKEEIVDKFDHATVFNKNTPHVELAQELTDRGHNVILAEYQPTSENMVIDFAKKIGDRLPENIKLHSLKLQETDTSYAEWYANDNS

SEQ ID NO: 24726 - protein, 150 aa, Pseudozobellia thermophila
  REGION 1..150: note = tr|A0A1M6B3N4|A0A1M6B3N4_9FLAO 6-pyruvoyltetrahydropterin/6-carboxytetrahydropterin synthase OS=Pseudozobellia thermophila OX=192903; GN = SAMN04488513_101275 PE=4 SV=1
MGNIRITKQFNFEAGHALYGYDGKCRNVHGHSYKLSVTVIGRPITDVGHVKLGMVIDFGDLKKIVKEEIVDKFDHATVFNKNTPHIELAKELIDRGHNVILADYQPTSENMVIDFAKKIKARLPENVKLHSLRLQETDTSYAEWFASENE

SEQ ID NO: 24727 - protein, 135 aa, Pseudozobellia thermophila
  REGION 1..135: note = tr|A0A1M6MRG1|A0A1M6MRG1_9FLAO 6-carboxy-5,6,7,8-tetrahydropterin synthase; OS = Pseudozobellia thermophila OX=192903; GN = SAMN04488513_110106 PE=3 SV=1
MKVKVSRKAHFNAAHRLYCPEWDDEKNQAVFGKCNNPNYHGHNYELIVSVTGEIDPKTGFVMDMKVLKELIADKVEDALDHKNLNLEVPEFKALNPTAENIAVVIWNKLRPHIHDDNELEVTLFETPRNFVTFSG

SEQ ID NO: 24728 - protein, 139 aa, Psychrilyobacter sp.
  REGION 1..139: note = tr|A0A369XSN0|A0A369XSN0_9FUSO 6-carboxytetrahydropterin synthase OS=Psychrilyobacter sp. S5 OX=2283384 GN=DV867_12895 PE=4 SV=1
MYILKGEHSFDSAHFLAGYQGKCSNIHGHRWRVIAEICGGELKQEGQLRGMVVDFGDIKKDIKKMVDDHDHALIIEKGTMKEMTLNCLREEGFYIIEVDFRPTAEEFSRYFYEILEGKGYSVKRVTVYETPTNSATYEK

SEQ ID NO: 24729 - protein, 157 aa, Psychrobacillus insolitus
  REGION 1..157: note = tr|A0A2W7MM90|A0A2W7MM90_9BACI 6-pyruvoyltetrahydropterin/6-carboxytetrahydropterin synthase OS=Psychrobacillus insolitus OX=1461; GN = C7437_10249 PE=4 SV=1
MTGFRIVDKLQKIDEDIQSSQLKYHSKRVLVSKEFTFDAAHHLHNYEGKCKNLHGHTYRAVLGLSGYTDERGLMIDFGDIKEIWKQKIEIYLDHHYLNETLPAMNTTAENIVVWVYEKLAEHLLDEQRYNGARVEFIRLYETPTSYAEARREWMEVE

SEQ ID NO: 24730 - protein, 157 aa, unidentified
  source 1..157: note = Psychrobacillus lasiicapitis
  REGION 1..157: note = tr|A0A544T6X8|A0A544T6X8_9BACI 6-carboxytetrahydropterin synthase QueD OS=Psychrobacillus lasiicapitis OX=1636719 GN=queD PE=4 SV=1
MSDFRIVDKLQKIEEDIQSSQLKYHAKRVLVSKEFTFDAAHHLHNYEGKCKNLHGHTYRAVLGVSGYTDERGLMIDFGDLKEIWKQKIEIYLDHRYLNETLPPMNTTAENIAVWIYEKLSEALIEGQRYNGARVEFIRLYETPTSYAEARREWMEVE

SEQ ID NO: 24731 - protein, 157 aa, Psychrobacillus psychrodurans
  REGION 1..157: note = tr|A0A1I4X9B6|A0A1I4X9B6_9BACI 6-pyruvoyltetrahydropterin/6-carboxytetrahydropterin synthase OS=Psychrobacillus psychrodurans OX=126157; GN = SAMN05421832_12223 PE=4 SV =1
MTGFRIVDKLQKIDEDIHSSQLKYHSNRVLVSKEFTFDAAHHLHNYEGKCKNLHGHTYRAVLGLSGYTDARGLMIDFGDIKEIWKQKIEIYLDHRYLNETLPPMNTTAENIVVWIYAKLAEHLLVEQRYNGARVEFIRLYETPTSYAEVRREWMEVE

SEQ ID NO: 24732 - protein, 157 aa, unidentified
  source 1..157: note = Psychrobacillus soli
  REGION 1..157: note = tr|A0A544TGC5|A0A544TGC5_9BACI 6-carboxytetrahydropterin synthase QueD OS=Psychrobacillus soli OX=1543965 GN=queD PE=4 SV=1
MTDFRIVDKLQKIEEDIQSNQLKYHTKRVLVSKEFTFDAAHHLHNYEGKCKNLHGHTYRAVLGLSGYTDDRGLMIDFGDIKEIWKQKIEIYLDHRYLNETLPPMNTTAENIVVWIYEKLTEALLDEQRYDGARVEFIRLYETPTSYAEARREWMEVE

SEQ ID NO: 24733 - protein, 157 aa, Psychrobacillus sp.
  REGION 1..157: note = tr|A0A1H9VVZ1|A0A1H9VVZ1_9BACI 6-pyruvoyltetrahydropterin/6-carboxytetrahydropterin synthase OS=Psychrobacillus sp. OK032 OX=1884358; GN = SAMN05518872_106235 PE=4 SV=1
MTDFRIVDKLQKIDVDIQSNQLKHHSKRVLVSKEFTFDAAHHLHNYEGKCKNLHGHTYRAVLGLSGYTDERGLMIDFGDIKEIWKQKIEIYLDHRYLNETLPPMNTTAENIVVWIYEKLAKALLDEQRYNGARVEFIKLYETPTSYAEARREWMEVE

SEQ ID NO: 24734 - protein, 157 aa, Psychrobacillus sp.
  REGION 1..157: note = tr|A0A544TMH9|A0A544TMH9_9BACI 6-carboxytetrahydropterin synthase QueD OS=Psychrobacillus sp. Z8 OX=2325572 GN=queD PE=4 SV=1
MSDFRIVDKLQKIDEDIQSSQLKYHSKRVLVSKEFTFDAAHHLHNYEGKCKNLHGHTYRAVLGVSGYTDERGLMIDFGDIKEIWKQEIEIYLDHRYLNETLPSMNTTAENIVVWIYEKLAEALIDEQQYNGARVEFIRLYETPTSYAEARREWMEVE

SEQ ID NO: 24735 - protein, 200 aa, Psychrobacter alimentarius
  REGION 1..200: note = tr|A0A144PDE6|A0A144PDE6_9GAMM 6-carboxy-5,6,7,8-tetrahydropterin synthase; OS = Psychrobacter alimentarius OX=261164 GN=A3K91_1507 PE=4; SV = 1
MRIRKLFKFENAHIVRNCSSERCKHSIHGHSYQIELILEAKRLDHGQMVYDFGLLKSSIKDIIDSFDHAICFWSKDDPEYIAACKKFSARWISLPVSPSAEQFSRVIFFWAQEILQQTQMQNGETDVSVYSVIAHETATGYAQCFADDVANEQMGKLVLGDFEFSDQVRAEWHDTDLYAKLIRGESFVNPSVTMQVQPDV

SEQ ID NO: 24736 - protein, 203 aa, Psychrobacter aquaticus
  REGION 1..203: note = tr|U4T6T6|U4T6T6_9GAMM Queuosine biosynthesis QueD, PTPS-I OS=Psychrobacter aquaticus CMS 56 OX=1354303; GN = M917_2612 PE=4 SV=1
MRIRKLFKFENAHIVRNCSSERCKHSIHGHSYQIELILEAKRLDQGQMVYDFGLLKSSIKDIIDSFDHAICFWNKDDPDYIAACKKFSARWISLPVSPSAEQFSRVIFFWAQEILQQTQMQNGETDVSVYSVIAHETATGYAQCFADDVANEQMGKLDLEAFEFSEQVCAEWHDPELYAKLIRGERFVNPSVTMQVQTQVKAD

SEQ ID NO: 24737 - protein, 201 aa, Psychrobacter arcticus
  REGION 1..201: note = tr|Q4FT88|Q4FT88_PSYA2 Uncharacterized protein; OS = Psychrobacter arcticus (strain DSM 17307 / 273-4); OX = 259536 GN=Psyc_0917 PE=4 SV=1
MRIRKLFKFENAHIVRNCSSERCKHSIHGHSYQIELILEAKRLDHGQMVYDFGLLKSSIKDIIDSFDHAICFWSKDDPEYIAACKKFSARWISLPVSPSAEQFSRVIFFWAQEILQKTQMQNGEADVSVYSVIAHETATGYAQCFADDVTNEQMGKLVLEDFEFSEQVCAEWHDPDLYAKLIRGESFSNPSVTMQVQAGTA

SEQ ID NO: 24738 - protein, 199 aa, Psychrobacter cryohalolentis
  REGION 1..199: note = tr|Q1QAM7|Q1QAM7_PSYCK Uncharacterized protein; OS = Psychrobacter cryohalolentis (strain K5) OX=335284; GN = Pcryo_1497 PE=4 SV=1
MRIRKLFKFENAHIVRNCSSERCKHSIHGHSYQIELILEAKRLDHGQMVYDFGLLKSSIKDIIDSFDHAICFWSKDDPEYIAACKKFSARWISLPVSPSAEQFSRVIFFWAQEILQQTQMQNGEADVSVYSVIAHETATGYAQCFADDVSNEQMGKLVLKDFEFSEQVCAEWHDPELYAKLIRGESFVNPAVTMQVQVD

SEQ ID NO: 24739 - protein, 231 aa, Psychrobacter fozii
  REGION 1..231: note = tr|A0A2V4VSG4|A0A2V4VSG4_9GAMM 6-pyruvoyltetrahydropterin/6-carboxytetrahydropterin synthase OS=Psychrobacter fozii OX=198480 GN=DFP82_10859; PE = 4 SV=1
MDLTILISSTVVLTVLVKIIMRIRKLFKFENAHIVRNCSSERCKHSIHGHSYQIELILEAKRLDHGQMVYDFGLLKSSIKDIIDSFDHAICFWNKDDPEYIDACKKFSARWISLPVSPSAEQFSRVIFFWAQEILRQTQMQNGESDVSVYSVIAHETATGYAQCFADDVANDQMGKLVLEEFAFSDQVSKEWHDPDLYAKLIRGESFINPSVTMQVQTEQVQTEQVQAGSD

SEQ ID NO: 24740 - protein, 204 aa, Psychrobacter frigidicola
  REGION 1..204: note = tr|A0A5C7A3M6|A0A5C7A3M6_9GAMM 6-carboxytetrahydropterin synthase OS=Psychrobacter frigidicola OX=45611 GN=ES754_03445 PE=4 SV=1
MRIRKLFKFENAHIVRNCSSERCKHSIHGHSYQIELILEAQRLDHGQMVYDFGLLKSSIKDIIDSFDHAICFWNQDDPEYIAACKKFSARWISLPVSPSAEQFSRVIFFWAQEILQQTKMQNGEADVSVYSVIAHETATGYAQCFAEDVANEQMGKLELDAFEFSSQVSSEWTDPELYTKLIRGERFINPTVTMQVTASDIGTV

SEQ ID NO: 24741 - protein, 207 aa, Psychrobacter immobilis
  REGION 1..207: note = tr|A0A2V2A571|A0A2V2A571_PSYIM 6-pyruvoyltetrahydropterin/6-carboxytetrahydropterin synthase OS=Psychrobacter immobilis OX=498 GN=C8D84_102246; PE = 4 SV=1
MRIRKLFKFENAHIVRNCSSERCKHSIHGHSYQIELILEAKRLDHGQMVYDFGLLKSSIKDIIDSFDHAICFWNKDDPEYVAACKKFSARWISLPVSPSAEQFSRVIFFWAQEILKQTQMQNGESDVSVYSVIAHETATGYAQCFADDVANEQMGKLHLEAFEFSDQVSAEWHDPELYAKLIRGESFINPTVTMQVQTQVQAGKPDA

SEQ ID NO: 24742 - protein, 200 aa, Psychrobacter pacificensis
  REGION 1..200: note = tr|A0A1G6XUS4|A0A1G6XUS4_9GAMM 6-pyruvoyltetrahydropterin/6-carboxytetrahydropterin synthase OS=Psychrobacter pacificensis OX=112002; GN = SAMN05660405_01452 PE=4 SV=1
MRIRKLFKFENAHIVRNCSSERCKHSIHGHSYQIELILEATRLDHGQMVYDFGLLKSSIKDIIDSFDHAICFWNKDDPEYVAACKKFSARWISLPVSPSAEQFSRVIFFWAQEILRQTQMQNGEADVRVYSVIAHETATGYAQCFADDVANEQMGKLVLEDFEFSEQVRAEWTDSDLYAKLIRGESFTNPTVTMQVQTDA

SEQ ID NO: 24743 - protein, 198 aa, unidentified
  source 1..198: note = Psychrobacter pasteurii
  REGION 1..198: note = tr|A0A1R4EG88|A0A1R4EG88_9GAMM 6-pyruvoyl tetrahydropterin synthase OS=Psychrobacter pasteurii; OX = 1945520 GN=A1019T_01468 PE=4 SV=1
MRIRKLFKFENAHIVRNCSSDRCKRSIHGHSYQIELILQADRLDNGQMVYDFGLLKSSIKDIIDSFDHAICFWNKDDPEYIEMCKKFSARWISLPVSPSAEQFSRVIFFWAQSILDQTKMANGEAGVSVYSVIAHETATGYAQCFAEDITNEHMGLLKLEDFEFSEQVMQEWTDPKMYQKLIAGETFVNPEVTLQVKA

SEQ ID NO: 24744 - protein, 198 aa, Psychrobacter phenylpyruvicus
  REGION 1..198: note = tr|A0A379LKV7|A0A379LKV7_9GAMM Queuosine biosynthesis protein QueD OS=Psychrobacter phenylpyruvicus; OX = 29432 GN=NCTC10526_01564 PE=4 SV=1
MRIRKLFKFENAHIVRNCSSDRCKRSIHGHSYQIELILQADRLDNGQMVYDFGLLKSSIKDIIDSFDHAICFWNKDEPEYIEMCKKFSARWISLPVSPSAEQFSRVIFFWAQSILDQTKMVNGEAGVSVYSVIAHETATGYAQCFAEDISNEHMGLLRLEDFEFSEQVMQEWTDPKMYQKLIAGEPFVNPEVTLQVKA

SEQ ID NO: 24745 - protein, 198 aa, unidentified
  source 1..198: note = Psychrobacter piechaudii
  REGION 1..198: note = tr|A0A1R4GY50|A0A1R4GY50_9GAMM 6-pyruvoyl tetrahydropterin synthase OS=Psychrobacter piechaudii; OX = 1945521 GN=A1232T_02297 PE=4 SV=1
MRIRKLFKFENAHIVRNCSSDRCKHSIHGHSYQIELILQADRLDNGQMVYDFGLLKSSIKDIIDSFDHAICFWNKDDPEYIEMCKKFSARWISLPVSPSAEQFSRVIFFWAQSILDQTKMANGEAGVSVYSVIAHETATGYAQCFAEDITNEHMGLLRLEDFEFSEQVMQEWTDPKMYQKLIAGEPFVNPEVTLQVKA

SEQ ID NO: 24746 - protein, 200 aa, Psychrobacter piscatorii
  REGION 1..200: note = tr|A0A0T6DU53|A0A0T6DU53_9GAMM 6-carboxy-5,6,7,8-tetrahydropterin synthase; OS = Psychrobacter piscatorii OX=554343 GN=AS194_05820 PE=4; SV = 1
MRIRKLFKFENAHIVRNCSSERCKHSIHGHSYQIELILEATRLDHGQMVYDFGLLKSSIKDIIDSFDHAICFWNKDDPEYVAACKKFSARWISLPVSPSAEQFSRVIFFWAQEILRQTQMQNGEADVSVYSVIAHETATGYAQCFADDVANEQMGKLVLEDFEFSEQVRAEWTDSDLYAKLIRGESFTNPTVTMQVQTDA

SEQ ID NO: 24747 - protein, 206 aa, Psychrobacter sp.
  REGION 1..206: note = tr|A0A1D9CWL0|A0A1D9CWL0_9GAMM Uncharacterized protein OS=Psychrobacter sp. AntiMn-1 OX=1720344; GN = AOT82_570 PE=4 SV=1
MRIRKLFKFENAHIVRNCSSERCKHSIHGHSYQIELILEATRLDHGQMVYDFGLLKSSIKDIIDSFDHAICFWNKDDPEYVAACKKFSARWISLPVSPSAEQFSRVIFFWAQEILRQTQMQNGEADVSVYSVIAHETATGYAQCFADDVANEQMGKLVLEDFEFSEQVRAEWTDSELYAKLIRGESFTNPTVTMQVQPEQAQAGSD

SEQ ID NO: 24748 - protein, 206 aa, Psychrobacter sp.
  REGION 1..206: note = tr|A0A455UU25|A0A455UU25_9GAMM 6-carboxytetrahydropterin synthase QueD OS=Psychrobacter sp. KH172YL61 OX=2517899 GN=PKHYL_17590 PE=4 SV=1
MRIRKLFKFENAHIVRNCSSERCKHSIHGHSYQIELILEATRLDHGQMVYDFGLLKSSIKDIIDSFDHAICFWNKDDPEYVAACKKFSARWISLPVSPSAEQFSRVIFFWAQEILRQTQMQNGEADVSVYSVIAHETATGYAQCFADDVANEQMGKLVLEDFEFSEQVRAEWTDSDLYAKLIRGESFTNPTVTMQVQPEQAQAGSD

SEQ ID NO: 24749 - protein, 208 aa, Psychrobacter urativorans
  REGION 1..208: note = tr|A0A0M4U2Y9|A0A0M4U2Y9_9GAMM 6-carboxy-5,6,7,8-tetrahydropterin synthase; OS = Psychrobacter urativorans OX=45610 GN=AOC03_00110 PE=4; SV = 1
MRIRKLFKFENAHIVRNCSSERCKHSIHGHSYQIELILEAQRLDHGQMVYDFGLLKSSIKDIIDSFDHAICFWNQDDPEYIAACKKFSARWISLPVSPSAEQFSRVIFFWAQEILKQTQMQNGESDVSVYSVIAHETATGYAQCFSDDVANEQMGKLELGAFEFSEQVSSEWHDPELYAKLIRGERFINPTVMMQVSSQLEPQVQPDV

SEQ ID NO: 24750 - protein, 150 aa, Psychroflexus gondwanensis
  REGION 1..150: note = tr|N1X001|N1X001_9FLAO 6-pyruvoyl tetrahydrobiopterin synthase QueD OS=Psychroflexus gondwanensis ACAM 44 OX=1189619 GN=pgond44_01065 PE=4 SV=1
MAKIRITKQFTFETAHALYGYDGKCRNIHGHSYKLDVTVIGEPITDMDNVKCGMVIDFGDLKQIVKSQVVDKMDHAIILNKETPHIELAQTLKSSGHDVILVDYQPTSENMVIDFAKSIQSRLDPKIKLHSLKLRETGTAFAEWFASDNA

SEQ ID NO: 24751 - protein, 136 aa, Psychroflexus gondwanensis
  REGION 1..136: note = tr|N1WYJ3|N1WYJ3_9FLAO 6-carboxy-5,6,7,8-tetrahydropterin synthase; OS = Psychroflexus gondwanensis ACAM 44 OX=1189619; GN = pgond44_02993 PE=3 SV=1
MKVTVHRKAHFNAAHRLYRKDWDFEKNNEVFGKCNNPQYHGHNYELIASVTGDIDPETGYVIDIKVLKDMIKAEVEDAFDHKNLNEQVPEFKDLNPTAENISVVIWNKLKAKLDKNHDLEVTLYETPRNFVTYKGE

SEQ ID NO: 24752 - protein, 150 aa, unidentified
  source 1..150: note = Psychroflexus halocasei
  REGION 1..150: note = tr|A0A1H4BGC5|A0A1H4BGC5_9FLAO 6-pyruvoyltetrahydropterin/6-carboxytetrahydropterin synthase OS=Psychroflexus halocasei OX=908615; GN = SAMN05421540_10633 PE=4 SV=1
MAKIRITKQFTFETAHALYGYDGKCKNIHGHSYKLDVCVIGEPITDTSNVKCGMVIDFGDLKKIVKKEVVDVLDHAIMLNKNTPHIELAQDLKKANHNVVLVDYQPTSENMVIDFADKIKSKLDSNLELHSLKLRETGTAFAEWYAADNA

SEQ ID NO: 24753 - protein, 136 aa, unidentified
  source 1..136: note = Psychroflexus halocasei
  REGION 1..136: note = tr|A0A1H3WR65|A0A1H3WR65_9FLAO 6-carboxy-5,6,7,8-tetrahydropterin synthase; OS = Psychroflexus halocasei OX=908615; GN = SAMN05421540_102111 PE=3 SV=1
MPKVTVHRKAHFNAAHRLHRDDWDDAKNKEIFGKCNNPNFHGHNYKLIVSVTGEIDPETGYVIDLKILKDIIKSKVEDDFDHKNLNIEVEDFKNLNPTVENISVVIYNRIKAHLDPKLKLEITLYETPRNFVTYKA

SEQ ID NO: 24754 - protein, 136 aa, unidentified
  source 1..136: note = Psychroflexus salarius
  REGION 1..136: note = tr|A0A1M4TTL8|A0A1M4TTL8_9FLAO 6-carboxy-5,6,7,8-tetrahydropterin synthase; OS = Psychroflexus salarius OX=1155689 GN=SAMN05444278_10211; PE = 3 SV=1
MAKVTVHRKAHFNAAHRLYRKDWSEDQNEAVFGKCNNPYFHGHNYELIVSVTGEIDPETGYVIDMKVLKDLIKTEVEDQFDHKNLNEQVDVFKNLNPTAENISVVIWNNLRPHLDQSLDLEVTLYETPRNFVTYKA

SEQ ID NO: 24755 - protein, 149 aa, unidentified
  source 1..149: note = Psychroflexus salarius
  REGION 1..149: note = tr|A0A1M4UWD5|A0A1M4UWD5_9FLAO 6-carboxy-5,6,7,8-tetrahydropterin synthase; OS = Psychroflexus salarius OX=1155689; GN = SAMN05444278_103130 PE=3 SV=1
MAKIRITKQFTFETAHALYGYDGKCKNIHGHSYKLDVTVIGQPIADTSNVKCGMVIDFGDLKKIVKTEVVDVMDHAIVLNQHTPHIQLADDLKKTGHNVVLVDYQPTSENMVIDFANRIQSKLSSELSLHSLKLRETETAFAEWYASDN

SEQ ID NO: 24756 - protein, 136 aa, Psychroflexus sediminis
  REGION 1..136: note = tr|A0A1G7ZAR1|A0A1G7ZAR1_9FLAO 6-carboxy-5,6,7,8-tetrahydropterin synthase; OS = Psychroflexus sediminis OX=470826 GN=SAMN04488027_1219; PE = 3 SV=1
MKVTVHRKAHFNAAHRLYRKDWDFEKNEEVFGKCNNPNYHGHNYELIASVTGEIDPETGYVMDVKLLKDLIKSEVEDAFDHKNLNEQVPEFQSLNPTAENISVVIWNKLKPKLKDGHELEITLYETPRNFVTYKGE

SEQ ID NO: 24757 - protein, 150 aa, Psychroflexus sediminis
  REGION 1..150: note = tr|A0A1G7Z974|A0A1G7Z974_9FLAO 6-pyruvoyltetrahydropterin/6-carboxytetrahydropterin synthase OS=Psychroflexus sediminis OX=470826; GN = SAMN04488027_12019 PE=4 SV=1
MAKIRITKQFTFETAHALYGYDGKCKNVHGHSYKLDVTVIGEPIKDKDNVKCGMVIDFGDLKKIVKAEVVDRMDHAILLNKETPHIELAEHLKSSGHDVILVDYQPTSENMIADFASRISSKLNTDIKLHSLKLRETGTAFAEWFASDNA

SEQ ID NO: 24758 - protein, 150 aa, Psychroflexus sp.
  REGION 1..150: note = tr|A0A2I0D7I8|A0A2I0D7I8_9FLAO 6-carboxytetrahydropterin synthase QueD OS=Psychroflexus sp. MES1-P1E OX=2058320 GN=CXF67_09975 PE=4 SV=1
MAKIRITKQFTFETAHALYGYDGKCRNIHGHSYKLDVTVIGEPITDMDNVKCGMVIDFGDLKYIVKSQVVDKMDHAIILNKETPHIELAQTLKSSDHDVILVDYQPTSENMVIDFAKSIQSKLDPKIKLHSLKLRETGTAFAEWFASDNA

SEQ ID NO: 24759 - protein, 136 aa, Psychroflexus sp.
  REGION 1..136: note = tr|A0A4U5TRM7|A0A4U5TRM7_9FLAO 6-carboxy-5,6,7,8-tetrahydropterin synthase; OS = Psychroflexus sp. WDS2C27 OX=1883405 GN=FCN74_06375; PE = 3 SV=1
MKVTVHRKAHFNAAHRLYRKDWTDEKNEAVFGKCSNPYYHGHNYELVVAVTGEIDPETGYVIDIKVLKDLIKTEVEDEFDHKNLNEQVEVFKTLNPTAENIVVVIWDKLRKHLDNNLELSVTLYETPRNFVTYNGQ

SEQ ID NO: 24760 - protein, 150 aa, Psychroflexus torquis
  REGION 1..150: note = tr|K4ICW2|K4ICW2_PSYTT 6-pyruvoyl tetrahydrobiopterin synthase QueD OS=Psychroflexus torquis (strain ATCC 700755 / ACAM 623) OX=313595; GN = P700755_001321 PE=4 SV=1
MAKIRITKQFTFETAHALYGYDGKCRNIHGHSYKLDVTVIGEPITDMDNVKCGMVIDFGDLKYIVKSQVVDKMDHAIILNKETPHIELAQTLKSSGHDVILVDYQPTSENMVIDFAKSIQSKLDPTIKLHSLKLRETGTAFAEWFASDNV

SEQ ID NO: 24761 - protein, 136 aa, Psychroflexus torquis
  REGION 1..136: note = tr|K4IQA4|K4IQA4_PSYTT 6-carboxy-5,6,7,8-tetrahydropterin synthase; OS = Psychroflexus torquis (strain ATCC 700755 / ACAM 623); OX = 313595 GN=P700755_000659 PE=3 SV=1
MKVTVHRKAHFNAAHRLYRKDWDFEKNNKVFGKCNNPHFHGHNYELIASVTGDIDPETGYVIDIKVLKDMIKTEVEDAFDHKNLNEQVPEFKDLNPTAENISVVIWNKLKTKLNKNHDLEVTLYETPRNFVTYKGE

SEQ ID NO: 24762 - protein, 289 aa, Psychromonas ingrahamii
  REGION 1..289: note = tr|A1SWZ2|A1SWZ2_PSYIN Uncharacterized protein; OS = Psychromonas ingrahamii (strain 37) OX=357804; GN = Ping_2266 PE=4 SV=1
MKLFVRDLTVIDASYLDKNRGFVGESYLVDVILTGALNEQSMVLDFSLVKKQIKTIIDAEVDHKLLLPQSADNCTVTPEGHRTQVNFELGDSDVIQLNCPNEAYCLLESKTVSIEVLETYLEQIILPQLPENVLGLDIKLRSENITTPYYHYTHGLKKHKGNCQRIAHGHRSKIDIFIDDKYSEALAEEWAKRWQDIYLVSAEDIITESDLSFLVAGKNNSAEIYTAYDAVQGYFELLIPAGRAEVLPNDTTVESLSEFICEQIKARMGDKKVTVYAYEGVGKGAISER

SEQ ID NO: 24763 - protein, 288 aa, Psychromonas sp.
  REGION 1..288: note = tr|A0A4Y7ZXC5|A0A4Y7ZXC5_9GAMM Uncharacterized protein OS=Psychromonas sp. RZ22 OX=2555643 GN=E2R68_02860; PE = 4 SV=1
MKLFVRDLTVIDATYLDPERGFVGESYQVDVVLDGQLNEQSMILDFSLVKKQIKAIIDAEVDHKLLVPHASSRCSVTLEEQRTQVDYVLEDKSVIQLKSPHEAYCLLESETITVDLLETYLEQVVLIKLPENITGLSIKLRSEVLTTPYYHYTHGLKKHNGNCQRIAHGHRSKIDIFINDEYSESWVDKWAKRWADIYLASQEDVIERSELSFITSKSTVPVHCSAYHAPQGYFELLMPASRCEVLDNDTTVEELARFICETIKQQEGDNRVTVYAYEGIGKGAIVTL

SEQ ID NO: 24764 - protein, 288 aa, Psychromonas sp.
  REGION 1..288: note = tr|A0A366WC00|A0A366WC00_9GAMM Uncharacterized protein OS=Psychromonas sp. B3M02 OX=2267226; GN = DS885_07420 PE=4 SV=1
MKLFVRDLTVIDSTYLEATRGFVGESYQVDVVLDGQLNEQSMILDFALVKKQIKAIIDAEVDHKLLVPSLSAACKVQAEDERTQVDYHLNDAELIQVKAPHEAYCLLDCEVINEAFIARYLEQVILEKLPENISGLQITLHPEVINTPFYHYTHGLKKHNGNCQRIAHGHRSKIDIFINDQYSEQWVEQWAARWTDIYLASESDLIKRSDLSFITQKPTAEVHCSAYHAPQGYFELLMPASRCEVLNNDTTVEELARFICETIKAEEGDNKVTVFAYEGIGKGAIVEL

SEQ ID NO: 24765 - protein, 149 aa, Psychroserpens burtonensis
  REGION 1..149: note = tr|A0A5C7BA56|A0A5C7BA56_9FLAO 6-carboxy-5,6,7,8-tetrahydropterin synthase; OS = Psychroserpens burtonensis OX=49278 GN=ES692_06750 PE=3; SV = 1
MSNIRITKQFSFETGHALYGYDGKCKNVHGHSYRLDVTVIGQPISDNTNVKFGMVIDFTDLKKIVKEEIVDVFDHATVFNKNTPHVELARELQKRDHNVLLVDYQPTSEMMVIDFAEKIKRRLPNNITLHSLKLQETASSYAQWFASDN

SEQ ID NO: 24766 - protein, 136 aa, Psychroserpens burtonensis
  REGION 1..136: note = tr|A0A5C7BEK5|A0A5C7BEK5_9FLAO 6-carboxy-5,6,7,8-tetrahydropterin synthase; OS = Psychroserpens burtonensis OX=49278 GN=ES692_11440 PE=3; SV = 1
MRVTVSRKAHFNSAHRLYRKDWSFEKNDEIFGKCNNPNYHGHNYDLIVSVTGEIDPETGYVMDVKILKDLIKSEVEDAFDHKNLNVDVPDFKDLNPTAENIVVVIYNKLKSKLNADLDMEVTLYETPRNFVSYSGE

SEQ ID NO: 24767 - protein, 136 aa, Psychroserpens sp.
  REGION 1..136: note = tr|A0A4P7WUE5|A0A4P7WUE5_9FLAO 6-carboxy-5,6,7,8-tetrahydropterin synthase; OS = Psychroserpens sp. NJDZ02 OX=2570561 GN=E9099_02430; PE = 3 SV=1
MRVTVSRKAHFNAAHRLYRKDWSFEKNDEIFGKCNNPNYHGHNYELIASVTGDIDQETGFVIDVKILKDIIKVEVEDAFDHKNLNLDVAEFKDLNPTAENIVVIIYNKIKAKLKPNLDLEVTLYETPRNFVSYSGK

SEQ ID NO: 24768 - protein, 150 aa, Psychroserpens sp.; identical to SEQ ID NO: 23340
  REGION 1..150: note = tr|A0A4P7WV49|A0A4P7WV49_9FLAO 6-carboxytetrahydropterin synthase OS=Psychroserpens sp. NJDZ02 OX=2570561 GN=E9099_07670 PE=4 SV=1

SEQ ID NO: 24769 - protein, 289 aa, Psychrosphaera saromensis
  REGION 1..289: note = tr|A0A2S7UZH3|A0A2S7UZH3_9GAMM Uncharacterized protein OS=Psychrosphaera saromensis OX=716813; GN = BTO11_14170 PE=4 SV=1
MQLFVNDLTVIDFSYLCLQRGMVGESWIVDLTLHGELDEQNMVLDFGKVKKQVKRIIDDTVDHKLVVPSEYAGCKITHVENSNYIKINFEDQQGKQIAISSPDDAFCFIDADTVSMNDVILHLASVIKPQLPDNVKKVELTLRPEDISGFHYHYTHGLKKHDGNCQRIAHGHRSRIQIFENGMKSPKLEKAFSREWADIYVATIEDKVNNEDLEFIQCTDSQFAFKYESSQGKFEIALEQDDVYIMPVDTTVELIAQYIADRMKAQYPDNTYKVIAYEGVAKGAIAYAE

SEQ ID NO: 24770 - protein, 117 aa, unidentified
  source 1..117: note = Puniceibacterium antarcticum
  REGION 1..117: note = tr|A0A2G8RER3|A0A2G8RER3_9RHOB 6-carboxy-5,6,7,8-tetrahydropterin synthase; OS = Puniceibacterium antarcticum OX=1206336 GN=P775_11325; PE = 3 SV=1
MYRITKEFHFSASHQLSHLPQGHQCARLHGHNYVVVVELAVVSLNAAGFVRDYGELKPLKTYIDDTFDHRHLNDVMDIPSTGENMARHFYEWCVARWPETTAVKVSETPKTWAEYRP

SEQ ID NO: 24771 - protein, 131 aa, unidentified
  source 1..131: note = Puniceibacterium antarcticum
  REGION 1..131: note = tr|A0A2G8R6X5|A0A2G8R6X5_9RHOB 6-pyruvoyl tetrahydropterin synthase OS=Puniceibacterium antarcticum; OX = 1206336 GN=P775_24205 PE=4 SV=1
MFAVEVRDHVMIAHSLPSPVFGPAQGMHGATFVVDAAFYTGDLDENGLVVDIGLATEALSAALAPLRYCNLDEVAAFKGKITTTEFLCHHIWSQLRETTQTTGLGDGGRVRRIRVMLHESHVARGWYEADI

SEQ ID NO: 24772 - protein, 143 aa, unidentified
  source 1..143: note = Puniceicoccaceae bacterium
  REGION 1..143: note = tr|A0A2E9IM94|A0A2E9IM94_9BACT 6-pyruvoyl tetrahydropterin synthase OS=Puniceicoccaceae bacterium; OX = 2026784 GN=CML13_01375 PE=4 SV=1
MLTCKKSYRDIPFAHCQHRHDGHCALIHGHNWAITLTFACRETDENGFVVDFGKVKYLKAWIDENLDHACLFNEDDPDKDALLAQFGHLFKPYVLPGTSCEAIAEHIYEIFNPLVLQQTDNRAWITEVEIEEDSKNSAAYLPA

SEQ ID NO: 24773 - protein, 146 aa, unidentified
  source 1..146: note = Puniceicoccaceae bacterium
  REGION 1..146: note = tr|A0A2E6TKY9|A0A2E6TKY9_9BACT 6-pyruvoyl tetrahydropterin synthase OS=Puniceicoccaceae bacterium; OX = 2026784 GN=CML14_03160 PE=4 SV=1
MITCSKTYRDIPLSHRQPRHSGRCSRIHGHSWAITITFVAETLDENGFVIDFGDLHFIEDWIEENLDHGIVLCSTDPQKGLLESIQEQGLLKITWVDSASCEGIAEFLYHTFQPMVDAKTKGRAKIQCLRLEEDSKNSALFNPSSI

SEQ ID NO: 24774 - protein, 132 aa, Pusillimonas sp.
  REGION 1..132: note = tr|A0A522IEA8|A0A522IEA8_9BURK 6-carboxytetrahydropterin synthase OS=Pusillimonas sp.; OX = 1979962 GN=EPN67_12355 PE=4 SV=1
MFSVTVRDHMMIAHSFRGEVFGPAQRLHGATFIVDATFRRAALDADNVVVDIGRASAELHAILDTLTFRNLDDEPSLVNINTTTEAMAKVVADKLADRIHAGALGANALGLSGIAVTLHESHIAWASFERAL

SEQ ID NO: 24775 - protein, 152 aa, Pusillimonas sp.
  REGION 1..152: note = tr|A0A2N4UBC8|A0A2N4UBC8_9BURK 6-carboxytetrahydropterin synthase QueD OS=Pusillimonas sp. JR1/69-2-13 OX=2045209 GN=queD PE=4 SV=1
MTSITRKLEFDAGHRIPDHRSQCKNLHGHRYVMEVTLDGDIVTVPGASSNGMVMDFSEVKSIAREHIVDKWDHAFLVFRGDTAVVEFLATLEDHKTVVLDSIPTAENLAHLAFDTLAPHYADRFEGTLRLSRVRLYETPNCWVDVVATTARL

SEQ ID NO: 24776 - protein, 149 aa, unidentified
  source 1..149: note = Pustulibacterium marinum
  REGION 1..149: note = tr|A0A1I7EVK4|A0A1I7EVK4_9FLAO 6-carboxy-5,6,7,8-tetrahydropterin synthase; OS = Pustulibacterium marinum OX=1224947; GN = SAMN05216480_101302 PE=3 SV=1
MSTIRITKQFSFETGHALYGYDGKCKNVHGHSYKLSVTVIGSPISDNNNVKYGMVIDFGDLKKIVKEEIVDVFDHATVFNKNTPHVELAHELSTRGHNVLLVDYQPTSEMMVIDFAKKIADRLPENIKLFALKLQETESSYAEWFASDN

SEQ ID NO: 24777 - protein, 135 aa, unidentified
  source 1..135: note = Pustulibacterium marinum
  REGION 1..135: note = tr|A0A1I7IUW2|A0A1I7IUW2_9FLAO 6-carboxy-5,6,7,8-tetrahydropterin synthase; OS = Pustulibacterium marinum OX=1224947; GN = SAMN05216480_12232 PE=3 SV=1
MRARVSRKAHFNAAHRLHNPNWSAEKNKEIYGKCNYPNYHGHNYELVVHVIGEIDQESGFVMDLGILKSLIGEHVEEALDHKNLNLDVPEFKEIIPTAENIAKVIFHKLRPHIKETLDLQVTLYETPRNFVTYPV

SEQ ID NO: 24778 - protein, 128 aa, unidentified
  source 1..128: note = Unknown
  REGION 1..128: note = tr|A0A1E4ZIN4|A0A1E4ZIN4_9BACT 6-carboxy-5,6,7,8-tetrahydropterin synthase OS=PVC group bacterium (ex Bugula neritina AB1) OX=1868283; GN = AB834_05995 PE=3 SV=1
MKKMFINILKQSFSSAHKIDGHKGKCAFLHGHNWTVEIAVASYKLDHLGMGMDFADIKRLVKPVIDELDHCYLNDLPYFQHFLPTAENVAKYIYESLVSIFSNEDVDIQEVIVWETDGCGVKYRDTKE

SEQ ID NO: 24779 - protein, 127 aa, unidentified
  source 1..127: note = Pyrinomonas methylaliphatogenes
  REGION 1..127: note = tr|A0A0B6WW58|A0A0B6WW58_9BACT 6-carboxy-5,6,7,8-tetrahydropterin synthase OS=Pyrinomonas methylaliphatogenes OX=454194 GN=PYK22_00394 PE=3 SV=1
MNGYFEVMIERNFSSAHQLRGYKGKCENLHGHNYKVEIYARGRKLNEIGLLVDFAELKAAADEVIERLDHRNLNEIPPFDRELNPSAENLARYILEQIAARISDERVQIYKVRCFETPTSVATYQID

SEQ ID NO: 24780 - protein, 134 aa, Quadrisphaera sp.
  REGION 1..134: note = tr|A0A5C8Z4E2|A0A5C8Z4E2_9ACTN 6-carboxytetrahydropterin synthase OS=Quadrisphaera sp. DD2A OX=2593304 GN=FMM08_19835 PE=4 SV=1
MYRVSVRDHVMVAHSLPRPFFGPAQGKHGATYVVELVLAATALDENGVVVDIGAASAALGSVLDELRYRDLDEHPAFAGQLTTTEVLARWVADRVAAASHCEGPAAGLVKGLDHLEVVLHETPDAWASYRLDAL

SEQ ID NO: 24781 - protein, 144 aa, unidentified
  source 1..144: note = Quasibacillus thermotolerans
  REGION 1..144: note = tr|A0A0F5I8P8|A0A0F5I8P8_9BACI 6-carboxy-5,6,7,8-tetrahydropterin synthase; OS = Quasibacillus thermotolerans OX=1221996 GN=QY95_00432; PE = 3 SV=1
MMQQIYPAPSHSYRYELNKDLQFAAAHYVPHEDAGVCRRLHGHTYFVNVTVVGNDLNESGFLVNFKDIKDLIHKRFDHTVLNEDTAFNEETADDFPTTEVVARKFWEIVQEALNKMPNRPRCLQVFLRETPTSYVVFRPRKEDF

SEQ ID NO: 24782 - protein, 369 aa, unidentified
  source 1..369: note = Quisquiliibacterium sp.
  REGION 1..369: note = tr|A0A5C8NSI2|A0A5C8NSI2_9BURK 6-pyruvoyl tetrahydropterin synthase OS=Quisquiliibacterium sp. CC-CFT501 OX=2498847 GN=FHP08_14440 PE=4 SV=1
MPDHLLHVAAAGFESACRIDVLPEGHRSRRLHGHSFLAKVRARLPQGWASFPGGEVDDLRARLSEAIAPLDYALLNERVAHPTDENLARWIRGRLAAAGRGVPGLEQVGIQSTLHSGVDLDAKDHAHVWRRYVFEAAHQLTGVPAGHKCGRMHGHGFEVILHADQDLGARDLGIDYDHLDACWAPIHAQFHHACLNDIPGLENPTSEIIGAWIWERLKPRLPELSWVTVYETATCGAHYDGRHYRIWKELSLDSSLRLRRAPEGDPRRRIHGHTYNLRLHLCAPLDEVRGWTVDFGDVKALFDPIFRDLDHQPLHELQGVEDNDPASLAKWIRDRALPALPALDRIDLYETRGSGAILSWGEEGPALPV

SEQ ID NO: 24783 - protein, 119 aa, Rahnella aquatilis
  REGION 1..119: note = tr|H2IV82|H2IV82_RAHAC 6-carboxy-5,6,7,8-tetrahydropterin synthase OS=Rahnella aquatilis (strain ATCC 33071 / DSM 4594 / JCM 1683 / NBRC 105701 / NCIMB 13365 / CIP 7 8.65) OX=745277; GN = Rahaq2_0685 PE=3 SV=1
MTTTLFKDFQFEAAHHLPHVPAGHKCGRLHGHSFTVRLEITGEVDPHTGWVMDFAELKAAFNPTLDRLDHYNLNDIPGLENPTSEVLAAWIWNEMKPKLPLLSAVRVKETCTAGCVYKG

SEQ ID NO: 24784 - protein, 119 aa, Rahnella aquatilis; identical to SEQ ID NO: 24783
  REGION 1..119: note = tr|H8NR47|H8NR47_RAHAQ 6-carboxy-5,6,7,8-tetrahydropterin synthase OS=Rahnella aquatilis HX2 OX=1151116 GN=Q7S_03075 PE=3 SV=1

SEQ ID NO: 24785 - protein, 119 aa, unidentified
  source 1..119: note = Rahnella inusitata
  REGION 1..119: note = tr|A0A419M5H0|A0A419M5H0_9GAMM 6-carboxy-5,6,7,8-tetrahydropterin synthase OS=Rahnella inusitata OX=58169 GN=queD PE=3 SV=1
MTTTLFKDFQFEAAHHLPHVPAGHKCGRLHGHSFTVRLEITGEVDPHTGWVMDFADLKAAFNPTLDRLDHYNLNDIPGLENPTSEVLAEWIWNEMKPTLPLLSAVRVKETCTAGCIYRG

SEQ ID NO: 24786 - protein, 119 aa, Rahnella sp.
  REGION 1..119: note = tr|A0A2N0VZT7|A0A2N0VZT7_9GAMM 6-carboxy-5,6,7,8-tetrahydropterin synthase OS=Rahnella sp. AA OX=2057180 GN=queD PE=3 SV=1
MTTTLFKDFQFEAAHHLPHVPAGHKCGRLHGHSFTVRLEITGEVDPHTGWVMDFADLKAAFNPTLDRLDHYYLNDIPGLENPTSEVLAEWIWNEMKPKLPLLSAVRVKETCTAGCVYKG

SEQ ID NO: 24787 - protein, 119 aa, Rahnella sp.; identical to SEQ ID NO: 24783
  REGION 1..119: note = tr|A0A4V3EDK9|A0A4V3EDK9_9GAMM 6-carboxy-5,6,7,8-tetrahydropterin synthase OS=Rahnella sp. BIGb0236 OX=2485117 GN=EDF78_10677 PE=3 SV=1

SEQ ID NO: 24788 - protein, 119 aa, unidentified
  source 1..119: note = Rahnella woolbedingensis
  REGION 1..119: note = tr|A0A419N4R5|A0A419N4R5_9GAMM 6-carboxy-5,6,7,8-tetrahydropterin synthase OS=Rahnella woolbedingensis OX=1510574 GN=queD PE=3 SV=1
MTTTLFKDFQFEAAHHLPHVPAGHKCGRLHGHSFTVRIEITGEVDPHTGWVMDFADLKAAFNPTLDRLDHYNLNDIPGLENPTSEVLAEWIWNEMKPKLPLLSAVRVKETCTAGCVYKG

SEQ ID NO: 24789 - protein, 135 aa, unidentified
  source 1..135: note = Raineya orbicola
  REGION 1..135: note = tr|A0A2N3IF19|A0A2N3IF19_9BACT 6-carboxy-5,6,7,8-tetrahydropterin synthase OS=Raineya orbicola OX=2016530 GN=Rain11_1566 PE=3 SV=1
MKIKVCRKEHFNAAHRLHNPAWDETTNQKVFGKCNNPYFHGHNYELIVEVVGEINPETGYVMDMKELSDIIKTHVTERFDHKNLNLEIDEFRNLNPTAENIAVVIWNILRKQINSQYELKIKLYETERNFVEYPA

SEQ ID NO: 24790 - protein, 142 aa, unidentified
  source 1..142: note = Raineya orbicola
  REGION 1..142: note = tr|A0A2N3IFA3|A0A2N3IFA3_9BACT 6-pyruvoyl-tetrahydropterin synthase OS=Raineya orbicola; OX = 2016530 GN=Rain11_1568 PE=4 SV=1
MVFVCRKEHFNAAHRLFNPSWSKEKNEEVFGICANEHYHGHNFELIVIVKGTPDEDTGCVIDLKKLSKLIHSEVIEKLDHKNINLEVDFMQGKIPSCENLVVAIWEILAPKIADIAYDPHARLHCIRLFETQNNFVEYYGEW

SEQ ID NO: 24791 - protein, 158 aa, Ralstonia insidiosa
  REGION 1..158: note = tr|A0A191ZWE1|A0A191ZWE1_9RALS 6-carboxytetrahydropterin synthase QueD OS=Ralstonia insidiosa OX=190721 GN=A9Y76_08395 PE=4 SV=1
MTKTVSITRRLEFDAGHRIPGHAGQCRNLHGHRYQLELTLTGEVLHNDKAADDGMILDFGDVKQLANKHLVDLWDHAFLVYRGDTKLVEFLNDMEGGHKTVVLNDVPTVENLAQVAFDILEPVFRNTFGHHLRLSKLVLYETPNCWADVKLARPHEQD

SEQ ID NO: 24792 - protein, 158 aa, Ralstonia mannitolilytica; identical to SEQ ID NO: 24791
  REGION 1..158: note = tr|A0A0D5AQK1|A0A0D5AQK1_9RALS 6-carboxy-5,6,7,8-tetrahydropterin synthase OS=Ralstonia mannitolilytica OX=105219 GN=queD PE=4 SV=1

SEQ ID NO: 24793 - protein, 158 aa, Ralstonia pickettii
  REGION 1..158: note = tr|B2UBF2|B2UBF2_RALPJ Queuosine biosynthesis protein QueD OS=Ralstonia pickettii (strain 12J) OX=402626; GN = Rpic_1330 PE=4 SV=1
MTKTVSITRRLEFDAGHRIPGHAGQCRNLHGHRYQLELTLTGEVLHNDKAADDGMILDFGDVKQLANKHLVDLWDHAFLVYRGDTKLVEFLNDMEGGHKTVVLNDVPTVENLAQVAFDILEPVFRNAFGHHLRLSKLVLYETPNCWADVKLARPHEQD

SEQ ID NO: 24794 - protein, 158 aa, Ralstonia pickettii; identical to SEQ ID NO: 24791
  REGION 1..158: note = tr|A0A1C0XNA2|A0A1C0XNA2_RALPI 6-carboxytetrahydropterin synthase QueD OS=Ralstonia pickettii OX=329 GN=queD PE=4 SV=1

SEQ ID NO: 24795 - protein, 158 aa, unidentified
  source 1..158: note = Ralstonia pseudosolanacearum
  REGION 1..158: note = tr|A0A223GLV2|A0A223GLV2_9RALS 6-carboxytetrahydropterin synthase QueD OS=Ralstonia pseudosolanacearum OX=1310165 GN=queD PE=4 SV=1
MTKTVSITRRLEFDAGHRIPGHAGQCRNLHGHRYQLELTLSGEVLHNDKATDDGMILDFGDVKTLAAKHLVELWDHAFLVYRGDTKVVEFLEGMEGGHKTVVLDDVPTVENLAQIAFDILEPVFRNVYGHHLRLSKLVLYETPNCWADVKLARPHEQD

SEQ ID NO: 24796 - protein, 399 aa, Ralstonia solanacearum
  REGION 1..399: note = tr|A0A0S4V914|A0A0S4V914_RALSL 3,4-dihydroxy-2-butanone 4-phosphate synthase OS=Ralstonia solanacearum OX=305 GN=ribB PE=3 SV=1
MGSHFCRRAAANALAGGPLQLPAMSIATVEEIIAEIRAGRMVILVDEEDRENEGDLILAADFVTPEAINFMARFGRGLICLTLTAERCRQLDLPLMVTRNGTPHGTNFTVSIEAAEGVTTGISAADRARTVQVAVARSASPDDLVQPGHIFPLMAQPGGVLMRAGHTEAGCDLASLAGLTPASVICEIMKDDGTMARLPDLVEFAREHGLKIGTIADLIQYRSRTESIVERIGERNMETQFGTFRAVAFRDHAAGRAHLALVKGTPTPATETLVRVHEPLSVLDLLECQRTTHSWSVPAALRAVQAAPTGVVVLLNCGDSPERLFTQFSALDAPQERPRSKPDPRIYGIGAQILKDVGVGKMRVLASPLKLPSMAGYDLEVTAYQSMADTPQATTAATH

SEQ ID NO: 24797 - protein, 158 aa, Ralstonia solanacearum; identical to SEQ ID NO: 24795
  REGION 1..158: note = tr|A0A0K1ZKI6|A0A0K1ZKI6_RALSL 6-carboxytetrahydropterin synthase QueD OS=Ralstonia solanacearum OX=305 GN=queD PE=4 SV=1

SEQ ID NO: 24798 - protein, 158 aa, Ralstonia sp.; identical to SEQ ID NO: 24791
  REGION 1..158: note = tr|U3GA72|U3GA72_9RALS Queuosine biosynthesis protein QueD OS=Ralstonia sp. 5_2_56FAA OX=658080; GN = HMPREF0989_03624 PE=4 SV=1

SEQ ID NO: 24799 - protein, 158 aa, Ralstonia sp.; identical to SEQ ID NO: 24791
  REGION 1..158: note = tr|A0A100HX77|A0A100HX77_9RALS Uncharacterized protein OS=Ralstonia sp. NT80 OX=1218247; GN = SAMD00023378_4476 PE=4 SV=1

SEQ ID NO: 24800 - protein, 158 aa, Ralstonia syzygii
  REGION 1..158: note = tr|G3A838|G3A838_9RALS Putative 6-pyruvoyl tetrahydrobiopterin synthase (PtpS) (PTP synthase); OS = Ralstonia syzygii R24 OX=907261 GN=RALSY_40920 PE=4 SV=1
MTKTVSITRRLEFDAGHRIPGHAGQCRNLHGHRYQLELTLTGEVLHNDKSTDDGMILDFGDVKTLATKHLVELWDHAFLVYRGDTKLVEFLDGMEGGHKTVVLDDVPTVENLAQIAFDILEPVFRNVYGHHLRLSKLVLYETPNCWADVKLARPHEQD

SEQ ID NO: 24801 - protein, 120 aa, unidentified
  source 1..120: note = Raoultella electrica
  REGION 1..120: note = tr|A0A514EME1|A0A514EME1_9ENTR 6-carboxy-5,6,7,8-tetrahydropterin synthase OS=Raoultella electrica OX=1259973 GN=queD PE=3 SV=1
MSTTLFKDFTFEAAHRLPHVPEGHKCGRLHGHSFMVRLEITGEVDPHTGWIMDFAELKAAFKPTYDRLDHYYLNDIPGLENPTSEVLAKWIWQQMKPLVPLLSAVMIKETCTAGCIYRGE

SEQ ID NO: 24802 - protein, 120 aa, Raoultella ornithinolytica
  REGION 1..120: note = tr|A0A225TTW0|A0A225TTW0_RAOOR 6-carboxy-5,6,7,8-tetrahydropterin synthase OS=Raoultella ornithinolytica OX=54291 GN=CAC00_31260 PE=3 SV=1
MEIFKVFMLEAAHRLPNVPPGHKCARLHGHSFRVELKVEGEPGAQTGWIMDFGDVKAAFQPIYDRLDHHYLNDIPGLENPTSENLAVWIWNELKPSLPALSEITVHETCTSGCRYRGPTA

SEQ ID NO: 24803 - protein, 120 aa, Raoultella ornithinolytica
  REGION 1..120: note = tr|A0A1Y6GH86|A0A1Y6GH86_RAOOR 6-carboxy-5,6,7,8-tetrahydropterin synthase OS=Raoultella ornithinolytica OX=54291 GN=queD PE=3 SV=1
MSTTLFKDFTFEAAHHLPHVPEGHKCGRLHGHSFMVRLEITGEVDPHTGWIMDFAELKAAFKPTYDRLDHYYLNDIPGLENPTSEVLAKWIWQQMKPLVPLLSAVMIKETCTAGCIYRGE

SEQ ID NO: 24804 - protein, 120 aa, Raoultella planticola; identical to SEQ ID NO: 24803
  REGION 1..120: note = tr|A0A2X2EB03|A0A2X2EB03_RAOPL 6-carboxy-5,6,7,8-tetrahydropterin synthase OS=Raoultella planticola OX=575 GN=queD PE=3 SV=1

SEQ ID NO: 24805 - protein, 61 aa, Raoultella planticola
  REGION 1..61: note = tr|A0A485BTG8|A0A485BTG8_RAOPL 6-carboxy-5,6,7,8-tetrahydropterin synthase OS=Raoultella planticola OX=575 GN=queD PE=4 SV=1
MSTTLFKDFTFEAAHHLPHVPEGHKCGRLHGHSFMVRLEITGEVDPHTGWIMDFCRAQGRV

SEQ ID NO: 24806 - protein, 120 aa, Raoultella sp.
  REGION 1..120: note = tr|A0A509BNN0|A0A509BNN0_9ENTR 6-carboxy-5,6,7,8-tetrahydropterin synthase OS=Raoultella sp. NCTC 9189 OX=2583577 GN=queD PE=3 SV=1
MSTTLFKDFIFEAAHHLPHVPEGHKCGRLHGHSFMVRLEITGEVDPHTGWIMDFSELKAAFKPTYDRLDHYYLNDIPGLENPTSEVLSRWIWQQVKPVVPLLSAVMIKETCTAGCIYRGE

SEQ ID NO: 24807 - protein, 120 aa, Raoultella sp.
  REGION 1..120: note = tr|A0A4V2W6G7|A0A4V2W6G7_9ENTR 6-carboxy-5,6,7,8-tetrahydropterin synthase OS=Raoultella sp. BIGb0138 OX=2485115 GN=EDF73_108126 PE=3 SV=1
MSTTLFKDFTFEAAHRLPHVPEGHKCGRLHGHSFMVRLEITGEVDPHTGWIMDFAELKAAFKPTYDRLDHYYLNDIPGLENPTSEVLAKWIWEQMKPLVPLLSAVMIKETCTAGCVYRGE

SEQ ID NO: 24808 - protein, 95 aa, Raoultella terrigena
  REGION 1..95: note = tr|A0A3P8LYV3|A0A3P8LYV3_RAOTE 6-carboxy-5,6,7,8-tetrahydropterin synthase OS=Raoultella terrigena OX=577 GN=queD PE=4 SV=1
MSTTLFKDFIFEAAHHLPHVPEGHKCGRLHGHSFMVRLEITGEVDPHTGWIMDFAELKAAFKPTYDRLDHYYLNDIPGLENPTSEVLAALDLATG

SEQ ID NO: 24809 - protein, 120 aa, Raoultella terrigena
  REGION 1..120: note = tr|A0A3N2DHP4|A0A3N2DHP4_RAOTE 6-carboxy-5,6,7,8-tetrahydropterin synthase OS=Raoultella terrigena OX=577 GN=EDF76_2659 PE=3 SV=1
MSTTLFKDFIFEAAHHLPHVPEGHKCGRLHGHSFMVRLEITGEVDPHTGWIMDFAELKAAFKPTYDRLDHYYLNDIPGLENPTSEVLARWIWQQVKPVVPLLSAVMIKETCTAGCIYRGE

SEQ ID NO: 24810 - protein, 129 aa, unidentified
  source 1..129: note = Raphidiopsis brookii
  REGION 1..129: note = tr|D4TQ50|D4TQ50_9CYAN 6-carboxy-5,6,7,8-tetrahydropterin synthase; OS = Raphidiopsis brookii D9 OX=533247 GN=CRD_01347 PE=3 SV=1
MPRWKLSTEFTFDSAHYIKDYKGPCGRMHGHTYKVKIEVTSSQLHSSEYCPHPVMVADFKSLRWAKKDVTQGGLDHCVLNEVLPPEYETTAEMIAKYIYDETKRRLPTEVKLKVAVSETPNSWAEYEDD

SEQ ID NO: 24811 - protein, 450 aa, unidentified
  source 1..450: note = Raphidiopsis brookii
  REGION 1..450: note = tr|D4TNQ4|D4TNQ4_9CYAN Dihydropteroate synthase; OS = Raphidiopsis brookii D9 OX=533247 GN=CRD_00431 PE=4 SV=1
MLTIEYIYEIHEKYHDALQVKVEEFTIGDKKFNFNTDSAILGVINLSNDSWYRESVCLSSEQAIRRGLVLKAQGADIIDIGAESTLEKAERVEDIRQNSQILPVLRSLSQQGVLTSIETYYPQVARECLQAGANVINLTGAFDSEKIYQAVSEFDAGVIICYVQGKNVREVGDFDFGDDPTKLMYEYFANEIEIAAKFGVRKIFVDAGLGFYYKNLQDSSLRIRYQMKTFLTTFRLRKLGFPVCHALPHAFEYFGEEVRSAESFFAVLAALGKTDLFRTHEVPKVKAVLDTLYSFLIIQLLGNLGYNDDFKPESESFLETWIIGKEFRFEAAHQLPNHDGKCARLHDHSWRGVVYVAGDKLINSGVKQGMIMDYGDISKYIKPLLENYLDHYHLNESTGLANPTSEAIAKWIYEQLEPQIPGLVAVRIDETCTSQCIYSKGKVNFFGLLN

SEQ ID NO: 24812 - protein, 129 aa, unidentified
  source 1..129: note = Raphidiopsis curvata
  REGION 1..129: note = tr|A0A1Z4VCI6|A0A1Z4VCI6_9CYAN 6-carboxy-5,6,7,8-tetrahydropterin synthase; OS = Raphidiopsis curvata NIES-932 OX=1973482; GN = NIES932_06030 PE=3 SV=1
MPRWKLSTEFTFDSAHYIKDYKGPCGRMHGHTYRVKMEVTSSQLHSSEYCPHPVMVADFKSLRWAKKDVTQGGLDHCVLNDVLPPEYETTAEMIAKYIYDETKRRLPTGVKLKVAVSETPNSWAEYEDD

SEQ ID NO: 24813 - protein, 420 aa, unidentified
  source 1..420: note = Raphidiopsis curvata
  REGION 1..420: note = tr|A0A1Z4VDU6|A0A1Z4VDU6_9CYAN Uncharacterized protein OS=Raphidiopsis curvata NIES-932 OX=1973482; GN = NIES932_12740 PE=4 SV=1
MECIINKRAQFSASRRYWLPELGEAQNVEKFGLCAKFPGHGHNYVLFISMSGELDEYGMVLNLSDVKQVIKSEVTSELDFSYLNEVWEEFQATLPTTENIARVIWNRLAPHLPLVRVQLFEHPQLWTEYEGEKSSLTVRSHFSAAHRLAPNLSAEKYGKCTRTHGHNYHLEVTVEGEMDGRTGMIVDLGCLHEIVEREILELFDHSCINEDIPYFSTSHIVPTTENIARYMSDLLQFPISQLGVKLSRVKLFESDHLWVEYEGKDSEIFFSVATGFSAAHRLADPTLSLEKNQTIYGKCSRINGHGHNYYLEVTVQGEIDSVTGMSVDLVGLNQIIQHYVIEPMDHSFLNQDLPYFTEVVPTAENIAVYITNVVRSPIEELGAKLHKVKLIESPNNSCEIYARDIEESKVDRIYRELAAV

SEQ ID NO: 24814 - protein, 118 aa, Reichenbachiella agariperforans
  REGION 1..118: note = tr|A0A1M6LPM1|A0A1M6LPM1_9BACT 6-carboxy-5,6,7,8-tetrahydropterin synthase; OS = Reichenbachiella agariperforans OX=156994; GN = SAMN04488028_1011049 PE=3 SV=1
MVIFKKFAFDSAHFLPNVPEGHKCKNIHGHTYHLTVFLEGDLDEDFQWVMDFKDLKDVVKPVIDRLDHNMINDIPGLENPTAERITVWIWDQIKPHLPLLSKLELNETPTSGVVYEGK

SEQ ID NO: 24815 - protein, 135 aa, Reichenbachiella agariperforans
  REGION 1..135: note = tr|A0A1M6TP68|A0A1M6TP68_9BACT 6-pyruvoyltetrahydropterin/6-carboxytetrahydropterin synthase OS=Reichenbachiella agariperforans OX=156994; GN = SAMN04488028_106124 PE=4SV=1
MKTAVIREEHFNAAHRLHNPAWSDQQNQEVFGKCNNPNYHGHNYELHVKLIGEIDPETGYVYDIKILSDMIKRLVVDRFDHKNLNLDVAEFKDLNPTAENIVVVIYDLLREEIDEKYDIKIQLYETKRNYVEYPA

SEQ ID NO: 24816 - protein, 135 aa, Reichenbachiella faecimaris
  REGION 1..135: note = tr|A0A1W2GE64|A0A1W2GE64_9BACT 6-pyruvoyltetrahydropterin/6-carboxytetrahydropterin synthase OS=Reichenbachiella faecimaris OX=692418; GN = SAMN04488029_2269 PE=4 SV=1
MRAAVYRVEHFNAAHRLHNPDWNDEKNQAVFGKCNNPNYHGHNYNLEVGLFGEINPETGYVFDLKVLSDLIEEKILNRFDHKNLNLDVPAFKDLNPTAENIVVVIYNLLRSEIDEKYDLKIKLYETERNYVQYPI

SEQ ID NO: 24817 - protein, 118 aa, Reichenbachiella faecimaris
  REGION 1..118: note = tr|A0A1W2G7D3|A0A1W2G7D3_9BACT 6-carboxy-5,6,7,8-tetrahydropterin synthase; OS = Reichenbachiella faecimaris OX=692418; GN = SAMN04488029_0938 PE=3 SV=1
MVIYKKFAFDSAHFLPNVPEGHKCKNMHGHTYNLTVYLEGDLDTELQWVMDFKELKDVVKPVIERIDHQLLNSIKGLENPTAERIVVWIWEQIQPKLPLLSKLELNETPTSGAIYEGK

SEQ ID NO: 24818 - protein, 135 aa, Reichenbachiella sp.
  REGION 1..135: note = tr|A0A2G5L560|A0A2G5L560_9BACT 6-pyruvoyl tetrahydrobiopterin synthase OS=Reichenbachiella sp. 5M10; OX = 1889772 GN=BFP72_16290 PE=4 SV=1
MKTAVIREEHFNAAHRLHNSAWSDQQNQEIFGKCNNPNYHGHNYELHVKLIGEIDPETGYVYDIKILSDMIKRLVVDRFDHKNLNLDVAEFKDLNPTAENIVVVIYDLLREEIDEKYDIKIQLYEIKRNYVEYPA

SEQ ID NO: 24819 - protein, 118 aa, Reichenbachiella sp.
  REGION 1..118: note = tr|A0A2G5L3Z0|A0A2G5L3Z0_9BACT 6-carboxy-5,6,7,8-tetrahydropterin synthase; OS = Reichenbachiella sp. 5M10 OX=1889772 GN=BFP72_11600; PE = 3 SV=1
MVIFKKFAFDSAHFLPNVPEGHKCKNVHGHTYHLTVFLEGDLDEDFQWVMDFKDLKDVVKPVIDRLDHNMINDIPGLENPTAERITVWIWDQIKPHLPLLSKLELNETPTSGVVYEGK

SEQ ID NO: 24820 - protein, 287 aa, Reinekea blandensis
  REGION 1..287: note = tr|A4BIB2|A4BIB2_9GAMM Uncharacterized protein; OS = Reinekea blandensis MED297 OX=314283 GN=MED297_00485; PE = 4 SV=1
MNRLFVDNLTVIDFSYFHPRRGVVGESWIVDVELDGELNDEGMVFDFGHVKKLLKQAIDEGMDHTLVVPTQLPGLTIEEDTIQERVRIDYRPDSETLAFAYESPREAVFMIDSADVSIDSARPLLETHLNNLVPDNVSHVSLNLRTERIDGDYYHYSHGLKKHQGDCQRICHGHRSRIEIYRNNKRDVEAEAQWANTFADIYLITAEDALSSDYEGLTHVGYDAEQGRFDVWLNPNQCYTMATDTTVELIATHLAEQLANEFPEDYWKVKAFEGVAKGAIAVAGPSA

SEQ ID NO: 24821 - protein, 284 aa, unidentified
  source 1..284: note = Reinekea forsetii
  REGION 1..284: note = tr|A0A2K8KSG3|A0A2K8KSG3_9GAMM 6-pyruvoyl tetrahydropterin synthase family protein OS=Reinekea forsetii OX=1336806 GN=REIFOR_02550 PE=4 SV=1
MNRLFVNNLTVIDFSYFHPQRGVVGESWIVDVELVGELNDEGMVFDFGHVKKMLKAALDSGMDHTLVVPEHLPGLTIETLADGNQIHIEYRRPDGELAFVYQSPREAVFIVDSDKVTIDSARPLLESHLNTLVPANVRQVSLQLRTEEIAGDFYHYSHGLKKHQGDCQRICHGHRSRIEIYRNHKRDIESEQEWAKRFADIYLVTAEDQMPSSHRHLQHIGYDAEQGRFDVWLNPDQCYLMATDSTVELIASHIANALQQEAPEDHWRVKAFEGVQKGAIASNH

SEQ ID NO: 24822 - protein, 283 aa, Reinekea marinisedimentorum
  REGION 1..283: note = tr|A0A4R3I687|A0A4R3I687_9GAMM 6-pyruvoyl tetrahydropterin synthase-like protein OS=Reinekea marinisedimentorum OX=230495 GN=BCF53_1059 PE=4 SV=1
MNRLFVDNLTVLDFSYFHPKRGVVGESWIVDVELMGELNEEGMVFDFGHVKKLLKQALDGGLDHTLAIPTELAGVSIEMLELNDEIKVEYRDSKGELAFAYQSPRDAVYLVDAERITIDSALPLLENHLNSLVPSNVKQVKLNLRTEDINGAFYHYSHGLKKHLGDCQRICHGHRSKIEIFKNGVRDTDTEQEWAQRFADIYLITDEDLLESEHKGLNHAGYDSEQGRFDVWLNPKQCYMMPTDTTVELIATHICSSLAAEQPDYSWRVKAFEGVQKGAIAGS

SEQ ID NO: 24823 - protein, 283 aa, Reinekea sp.
  REGION 1..283: note = tr|A0A5C8Z473|A0A5C8Z473_9GAMM 6-pyruvoyl tetrahydropterin reductase OS=Reinekea sp. SSH23; OX = 2593301 GN=FME95_11865 PE=4 SV=1
MNRLFVDNLTVLDFSYFHPKRGVVGESWIVDVELVGELNDEGMVFDFGHVKKLLKQALDNGMDHTLVVPTQLAGVEVIHHADSDMIEIRYHNSDNALAFAYQSPRDAVYLVDAEQVSIATALPLLQNHLNSLVPSNVKQVSLKLRAENIDAAFYHYSHGLKKHLGDCQRICHGHRSRVEIFRNGKRDFDVEQEWAQRFCDIYLITEDDLLPSEHQGLTHVGYDAEQGRFDVWLNPKQCYNMNSDTTVELIGSHICDQLKLESPNDHWLVRAFEGVQKGSIAER

SEQ ID NO: 24824 - protein, 136 aa, unidentified
  source 1..136: note = Reyranella soli
  REGION 1..136: note = tr|A0A512NGU8|A0A512NGU8_9PROT Uncharacterized protein OS=Reyranella soli OX=1230389 GN=ptpS PE=4 SV=1
MYAVEVRDHIMIAHSFKGAVFGPAQALHGATFVIDAAIMADTLDANAVVVDIGRAHEVLKGVLEPLNYKNLDTIPELAGKNTTTEFLTRHVYDRLAEAARDGKLGREGRDLKAIRVTISESHLARAWYEAPLWPGA

SEQ ID NO: 24825 - protein, 504 aa, unidentified
  source 1..504: note = Reyranella soli
  REGION 1..504: note = tr|A0A512NPG2|A0A512NPG2_9PROT Glyco_trans_2-like domain-containing protein OS=Reyranella soli OX=1230389; GN = RSO01_80060 PE=4 SV=1
MERRGIVDQELHGSELGTRGAEKLDDACFRADVAGHGQDAPARPGLDLMPGALQLVLSTAHDRDVGTQLGEAQGAGLADTASAARDQRNCILERGRHGVSLYNATIGVEQPFMPSTFLHLSKDSFKFSAGHMTVFPDGTKERLHGHNFQVAVTIELAADEFIAFERFKQVIRAACEAWDERVLLPRLSPHLQILPSAEAEIDFVLCGDRYVMPRRDVIWLDVDTVTTEKLAAQLCKMLAGGLLPLWLDGQILSLAVEVEETAGQAASCRMSAAEVLSLNAPQQVATIPRVSIVMSCFNKAATVADSARSVLTQTHRDLELVIIDDGSTDDSPQVLEGLKSDGRVRVERTPNAGQAAALNLGLSLARGDYVGFIDADDEYYPDHVEALVDACDSGGFDVAFAGIDIVSCGTQTHVVDYYDRSRLIPISEIDCVTGIIFGRRHVLAGLGFVGDYLDIDLYQRVTTSALKWAKIDRKTYRYYFGRCEGSNSARMVEEAGLGPEKAQA

SEQ ID NO: 24826 - protein, 133 aa, Reyranella sp.
  REGION 1..133: note = tr|A0A5C5S8I7|A0A5C5S8I7_9PROT 6-carboxytetrahydropterin synthase OS=Reyranella sp. CPCC 100927 OX=2599616 GN=FQU96_41245 PE=4 SV=1
MFAVEVRDHIMVAHSFRGEIFGPAQRMHGATFVVDAAFLTRDLDAAGLVVDIGRAITVLREVLEPLNYRNLDEMPDFAGKNTTTEFLARYIHDRIADGARAGKLGRPASEIDILRVTLSESHVARGWYEAPLG

SEQ ID NO: 24827 - protein, 176 aa, Reyranella sp.
  REGION 1..176: note = tr|A0A522Z8H3|A0A522Z8H3_9PROT 6-carboxytetrahydropterin synthase OS=Reyranella sp.; OX = 1929291 GN=EPO10_21250 PE=4 SV=1
MFSLVFTRRYSMAHRLIADASSKCAIPHGHNEQVIARIQPVAPQRLDGDANMVAPFDRAKARWHRFIDDRVDHAFQLGERDPMIDWFRAHERERLSRLLVTPGDPTTEMLAACFMAKLNAFLAADGNGLHCVELTVEETPTNAVTLTGDPADVLPALGGGGWWVRADDSINDLAPS

SEQ ID NO: 24828 - protein, 285 aa, Rheinheimera nanhaiensis
  REGION 1..285: note = tr|I1DYL6|I1DYL6_9GAMM Uncharacterized protein; OS = Rheinheimera nanhaiensis E407-8 OX=562729 GN=RNAN_2136; PE = 4 SV=1
MILFVRDLTVIDFSYLCPKRGMLGESYIVDVELHGGLDQTSMVLDFSKVKKVIKQAIDNLVDHKLALPAANPALQLSQTGDSSVLRFDSLRGVIKMAAPQQAVVAIPTEQINEHSVSAFLIEQIMPLLPANVKQLNLTLRPEATTGFYYHYSHGLKKHDGNCQRIAHGHRSTIQIYTDGMLAPRLNKYWCERWQDIYLGTAEDQVAPTELKVLMAEAGDYCFAYQAAQGWFELTMPPTHCEIVPCDTTVECLAEFIAMSLKQQDASKNYKVVAYEGVGKGAIAAC

SEQ ID NO: 24829 - protein, 285 aa, Rheinheimera pacifica
  REGION 1..285: note = tr|A0A1H6LXS6|A0A1H6LXS6_9GAMM 6-pyruvoyl tetrahydropterin synthase OS=Rheinheimera pacifica; OX = 173990 GN=SAMN05660691_02034 PE=4 SV=1
MILFVRDLTVIDFSYLCQKRGMLGESYIVDVELHGGLDQTSMVLDFGKVKKVIKHAIDQLIDHKLAVPELSAAVKLRNAKGLQQLSFESNRGHIQMAAPAEAIVAIKADAINLQTVTEFLQHSIKPLLPANIDKLIFTLRAETVSGFFYHYSHGLKKHDGNCQRIAHGHRSTIQIYADGMLTPRLNKYWCERWQDIYLGSAEDLCNADVLQHLTAGADDYSFCYQAAQGWFELTIPKAHCEIVPCDTTVECLAEYIAAELKQLDNTRQYKVVAYEGVGKGAIAVS

SEQ ID NO: 24830 - protein, 287 aa, unidentified
  source 1..287: note = Rheinheimera salexigens
  REGION 1..287: note = tr|A0A1E7Q6L8|A0A1E7Q6L8_9GAMM Uncharacterized protein OS=Rheinheimera salexigens OX=1628148; GN = BI198_09045 PE=4 SV=1
MILFVRDLTVIDFSYLCTERGMLGESYIVDVELHGKLDDVSMVLDFSIVKKRIKTAIDKLVDHKLALPTLAAGLTVTSEQTQQLVKFDSARGQINMAAPAEAIASIATDQITPASVTEFLQQHIMPLMPSNVEKLVFTLRPEPISGFYYHYSHGLKKHDGNCQRIAHGHRSMIQIYTDGMLSPRLNKYWSERWQDIYLGSVEDVCEPKQLASIKPATETDMCFRYQAQQGWFELTMPAAHCEIISTDTTVECLAQYIVSELEQLDASKAYKVVAYEGVGKGAIAQSV

SEQ ID NO: 24831 - protein, 285 aa, Rheinheimera sp.
  REGION 1..285: note = tr|A0A4P6VT98|A0A4P6VT98_9GAMM Uncharacterized protein OS=Rheinheimera sp. D18 OX=2545632 GN=E0Z06_07600; PE = 4 SV=1
MILFVRDLTVIDFSYLCEKRGMLGESYIVDVELHGGLDQTSMVLDFSHVKKLIKRTIDELVDHKLVLPEQSAALSLSVIDQTHILRFNSQRGLIQMAAPAQASVAIATTAINEHSITEFLQQVLKPLLPDNIDQVIFTLRPENSTSFYYHYSHGLKKHDGNCQRIAHGHRSTIQIYTDGMLAPRLNKYWSERWQDIYLATAEDVCDAAAMQHLRAGNDDYSFRYQAAQGWFELTMPKAHCEIVSCDTTVECLADYIATELKLLDQTKQYKVVAYEGVGKGAIAFS

SEQ ID NO: 24832 - protein, 217 aa, Rheinheimera sp.
  REGION 1..217: note = tr|A0A486XJK5|A0A486XJK5_9GAMM Potential queD like; OS = Rheinheimera sp. BAL341 OX=1708203 GN=BAL341_740 PE=4; SV = 1
MEFVLLLILLLVIVVAMVASRFIDSGNPFPVQKKNTLFTPVERSFMQLLEKAVASEYKIVNRVKLADVMELKAGISDKARASTMQKLNAKYLDFVLCNPNDFSIVAVLDLVNNTSKDGHKAVPDWFVNGALDAAGVPYLRMKIKAGYTAADIQAAIAARLGKTVVKPEPMFKGLVKKGPTRPVRSLKPATASGNTLPAPALSPSQIKAQQTALIQAS

SEQ ID NO: 24833 - protein, 285 aa, unidentified
  source 1..285: note = Rheinheimera tuosuensis
  REGION 1..285: note = tr|A0A285I4Q7|A0A285I4Q7_9GAMM 6-pyruvoyl tetrahydropterin synthase OS=Rheinheimera tuosuensis; OX = 1323745 GN=SAMN06297280_0366 PE=4 SV=1
MILFVNSLTVIDFSYLDLQRGMVGESYIVDVELHGSLDDTAMVFDFSKVKKVIKQAIDQSVDHKLALPSDCDALTLKDDSTCSMVNYKSLRGTISLASPAEAFACIPTKQINEQSVAHYLEQLIKPLLPDNVDALKIALRPEASTGFYYHYSHGLKKHDGNCQRIAHGHRSTIQIYTDGMLSPRLNKMWSERWQDSYLGSEADLCDAAALQLLNAEEDAYCFRYKATQGWFELVIPRSHCDIVPCDTTVECLADFIASELKTLDNSKTYKVVAYEGVAKGAIAQR

SEQ ID NO: 24834 - protein, 126 aa, Rhizobacter sp.
  REGION 1..126: note = tr|A0A0Q6X812|A0A0Q6X812_9BURK 6-carboxy-5,6,7,8-tetrahydropterin synthase OS=Rhizobacter sp. Root1221 OX=1736433 GN=ASC87_24540 PE=3 SV=1
MSYEVSQRFYFEAAHTLDRQVDAAGSRRIHGHTYLAEVTVAGQPDPATGMVVDLGLLRRHIQTVRDALDHAMLDDVPDLGPATLENLCAYIARGLRDVRPSVAAVRISREASGDSCLLRVDPTETM

SEQ ID NO: 24835 - protein, 368 aa, Rhizobacter sp.
  REGION 1..368: note = tr|A0A1M7NPG9|A0A1M7NPG9_9BURK 6-pyruvoyltetrahydropterin/6-carboxytetrahydropterin synthase OS=Rhizobacter sp. OV335 OX=1500264; GN = SAMN02787076_03120 PE=4 SV=1
MPIKTLHCAASGFESACEVSLLPAGHRSRRLHGHSFLATLRAELPPGWAAFEGGEVERLRADLESRTAQLDYRLLNDIVAQPTDENLARWIRSQLDAPGITQLGIQSTAHGGVDLDAAGQAHVWRRYLFQAAHQLPNVPLGHKCGRMHGHGFEVIVHANQDLGARDLSIDYDHLDDCWAPLHHELNYGCLNDLPGLQNPTSELMSSWIWERLKPTLPELSWITVYETASCGANFDGRHHRIWKEFTLDSALQLKHAPDGSPLRRIHGHTYTLRLHLAAPLDTLMGWTVDFGDVKTLFDPIFKALDHRPLHEIDGLADCDTATLAAWILQQARAVLPMVDRVDLYETRGCGAIVIADQAEAQAGLAIPI

SEQ ID NO: 24836 - protein, 118 aa, unidentified
  source 1..118: note = Rhizobiaceae bacterium
  REGION 1..118: note = tr|A0A4U5ZUF0|A0A4U5ZUF0_9RHIZ 6-carboxy-5,6,7,8-tetrahydropterin synthase; OS = Rhizobiaceae bacterium LC148 OX=1120689 GN=queD PE=3; SV = 1
MYRITKEFHFSASHQLTHLPADHQCARLHGHNYIVVVELAAAELDEDGFVRDYHELKPLKQYIDEKFDHRHLNEVFGHERVTSEFLARHFYDWCKARLPETSAVRVSETPKTWAEYRP

SEQ ID NO: 24837 - protein, 132 aa, unidentified
  source 1..132: note = Rhizobiaceae bacterium
  REGION 1..132: note = tr|A0A2D8JY50|A0A2D8JY50_9RHIZ Uncharacterized protein OS=Rhizobiaceae bacterium OX=1913961; GN = CML23_01200 PE=4 SV=1
MFAVEVRDHIMIAHSLPRPVFGPAQAMHGATFVTDAAFFTADLDEDGLAVDIGAATTVLGDALKPLNYQNLDELQAFSGKVTTTEVIAKYIFDQLAEAVAEGRLGPGSGRIRKIRVTLHESHAARGWYEADL

SEQ ID NO: 24838 - protein, 120 aa, unidentified
  source 1..120: note = Rhizobiales bacterium
  REGION 1..120: note = tr|A0A3R7UAJ0|A0A3R7UAJ0_9RHIZ 6-carboxy-5,6,7,8-tetrahydropterin synthase OS=Rhizobiales bacterium TMED83 OX=1986857 GN=CBC43_004905 PE=3 SV=1
MKLTREILFDAAHSLAQYGPDHPNARVHGHSFRARITLSGAPDGNGQIMDFESFGDVLEKLRTRLDHNMLNDIDGLGTPTLENLCLWIWSELHNELPQISAVEVFRDSLGQSCLYEGETA

SEQ ID NO: 24839 - protein, 131 aa, unidentified
  source 1..131: note = Rhizobiales bacterium
  REGION 1..131: note = tr|A0A257ZI34|A0A257ZI34_9RHIZ Uncharacterized protein OS=Rhizobiales bacterium 12-68-15 OX=1970546; GN = B7Z30_10145 PE=4 SV=1
MYAVEVRDHIMIAHSFRGDMFGPAQALHGATFVVDVAFFSADLTEEGVVVDIGKAHQVLKQVLAPLSYRNLDDLPEFAGRNTTTEVLCRHIFDAMADAARAGQLGAGQLVRLKVTLHESHVARAWFEADLS

SEQ ID NO: 24840 - protein, 118 aa, unidentified
  source 1..118: note = Rhizobium acidisoli
  REGION 1..118: note = tr|A0A0N0LAW8|A0A0N0LAW8_9RHIZ 6-carboxy-5,6,7,8-tetrahydropterin synthase OS=Rhizobium acidisoli OX=1538158 GN=AOG23_32355 PE=3 SV=1
MYRITKEFHLSASHQLDHLPADHQCARLHGHNYVVVVELSAENLNADGFVRDYHDLSPLKRYIDEALDHRHLNEVFGHSKVTSEFLAKHFYDWCKERFPETSSVRVSETPKTWAEYRP

SEQ ID NO: 24841 - protein, 118 aa, unidentified
  source 1..118: note = Rhizobium aethiopicum
  REGION 1..118: note = tr|A0A1C3YCB7|A0A1C3YCB7_9RHIZ 6-carboxy-5,6,7,8-tetrahydropterin synthase OS=Rhizobium aethiopicum OX=1138170 GN=GA0061105_13717 PE=3 SV=1
MYRITKEFHLSASHQLDHLPADHQCARLHGHNYVVVVELSAETLNDDGFVRDYHDLSPLKRYIDEALDHRHLNDVFGHSKVTSEFLAKHLYDWCKQRFPETSSVRVSETPKTWAEYRP

SEQ ID NO: 24842 - protein, 118 aa, unidentified
  source 1..118: note = Rhizobium album
  REGION 1..118: note = tr|A0A2U2DK08|A0A2U2DK08_9RHIZ 6-carboxy-5,6,7,8-tetrahydropterin synthase OS=Rhizobium album OX=2182425 GN=queD PE=3 SV=1
MKLTQAFTFEAAHRLPNVPATHKCHRMHGHSYRLELQLEGPVDPQTGFVIDFFDVEKVFGPVLERLDHHTLNDIEGLENPTAENIAVWVWDKVKPLLDNVSSVKVFETPFCWAEYEGQ

SEQ ID NO: 24843 - protein, 118 aa, unidentified
  source 1..118: note = Rhizobium altiplani
  REGION 1..118: note = tr|A0A109JB64|A0A109JB64_9RHIZ 6-carboxy-5,6,7,8-tetrahydropterin synthase OS=Rhizobium altiplani OX=1864509 GN=AS026_15750 PE=3 SV=1
MFRITKEFHFSASHQLTHLPADHQCARLHGHNYIVVVELAAAELDENGFVRDYQELSPLKCYIDERFDHRHLNEVFGHDRVTSEYLAKHFYDWCKERLPETSAVRVSETPKTWAEYRP

SEQ ID NO: 24844 - protein, 118 aa, unidentified
  source 1..118: note = Rhizobium anhuiense
  REGION 1..118: note = tr|A0A432N7L6|A0A432N7L6_9RHIZ 6-carboxy-5,6,7,8-tetrahydropterin synthase OS=Rhizobium anhuiense OX=1184720 GN=queD PE=3 SV=1
MYRITKEFHLSASHQLDHLPADHQCARLHGHNYIVVVELSAESLNDDGFVRDYHDLSSLKRYIDETFDHRHLNDVFGHSKVTSEFLARHFYDWCKQRFPETSSVRVSETPKTWAEYRP

SEQ ID NO: 24845 - protein, 118 aa, unidentified
  source 1..118: note = Rhizobium azibense
  REGION 1..118: note = tr|A0A4R7ZQ62|A0A4R7ZQ62_9RHIZ 6-carboxy-5,6,7,8-tetrahydropterin synthase OS=Rhizobium azibense OX=1136135 GN=EV128_12910 PE=3 SV=1
MFRITKEFHFSASHRLTSLPADHQCGRLHGHNYVVEVELSAATLNSHGFVRDYHELAPLKSYIDETFDHRHLNEVLGHDQVTAECLAKHFYDWCKDRLPETSAVRVSETPKTWAEYRP

SEQ ID NO: 24846 - protein, 118 aa, unidentified
  source 1..118: note = Rhizobium azibense
  REGION 1..118: note = tr|A0A4R3RI04|A0A4R3RI04_9RHIZ 6-carboxy-5,6,7,8-tetrahydropterin synthase OS=Rhizobium azibense OX=1136135 GN=EV129_101289 PE=3 SV=1
MFRITKEFHFSASHRLTSLPADHQCGRLHGHNYIVEVELSAATLNSHGFVRDYHELAPLKSYIDEHFDHRHLNEVLGHDQVTAECLAKHFYDWCKDRLPETSAVRVSETPKTWAEYRP

SEQ ID NO: 24847 - protein, 118 aa, unidentified
  source 1..118: note = Rhizobium esperanzae
  REGION 1..118: note = tr|A0A246DL25|A0A246DL25_9RHIZ 6-carboxy-5,6,7,8-tetrahydropterin synthase OS=Rhizobium esperanzae OX=1967781 GN=B5E41_29470 PE=3 SV=1
MYRITKEFHLSASHQLDHLPVDHQCARLHGHNYVVVVELSAENLNDDGFVRDYHDLAPLKRYIDEYLDHRHLNEVFGHSKVTSEFLAKHFYDWCRERFPETSSVRVSETPKTWAEYRP

SEQ ID NO: 24848 - protein, 118 aa, Rhizobium etli
  REGION 1..118: note = tr|S5SN68|S5SN68_RHIET 6-carboxy-5,6,7,8-tetrahydropterin synthase OS=Rhizobium etli bv. mimosae str. Mim1 OX=1328306 GN=queD PE=3 SV=1
MYRITKEFHLSASHQLDHLPADHQCARLHGHNYVVVVELSAENLNDDGFVRDYHDLAPLKRYIDESLDHRHLNEVFGHSKVTSEFLAKHFYDWCRERFPETSSVRVSETPKTWAEYRP

SEQ ID NO: 24849 - protein, 118 aa, Rhizobium etli
  REGION 1..118: note = tr|B3Q0Y1|B3Q0Y1_RHIE6 6-carboxy-5,6,7,8-tetrahydropterin synthase OS=Rhizobium etli (strain CIAT 652) OX=491916 GN=exsC PE=3 SV=1
MYRITKEFHLSASHQLHHLPADHQCARLHGHNYIVVVELSAESLNDDGFVRDYHDLSPLKRYIDEALDHRHLNEVFGHSKVTSEFLAKHFYDWCRERFPETSSVRVSETPKTWAEYRP

SEQ ID NO: 24850 - protein, 134 aa, unidentified
  source 1..134: note = Rhizobium favelukesii
  REGION 1..134: note = tr|W6RMQ5|W6RMQ5_9RHIZ 6-pyruvoyl-tetrahydropterin synthase OS=Rhizobium favelukesii OX=348824; GN = LPU83_pLPU83b_0214 PE=4 SV=1
MLGTKASAGICTGITTVCISAAELDNVGRVIDFSDMKSKLCMWLEENWDHKMLMWERDPVANALIDGIIKTGDGTTIGDGIVLVPFNPTAENIAQHLVLVVGPQQLKGTGIKLVRCEVEETRKCSAVYALQPQK

SEQ ID NO: 24851 - protein, 118 aa, unidentified
  source 1..118: note = Rhizobium favelukesii
  REGION 1..118: note = tr|W6RY29|W6RY29_9RHIZ 6-carboxy-5,6,7,8-tetrahydropterin synthase OS=Rhizobium favelukesii OX=348824 GN=exsC PE=3 SV=1
MFRITKEFHFSASHQLTHLPADHQCARLHGHNYIVVVELAAAELDENGFVRDYHELSPLKRYIDERFDHRHLNEVFGHDRVTSEYLAKHFYDWCKEWLPETSAVRVSETPKTWAEYRP

SEQ ID NO: 24852 - protein, 118 aa, unidentified
  source 1..118: note = Rhizobium fredii
  REGION 1..118: note = tr|A0A2L0HEL6|A0A2L0HEL6_RHIFR 6-carboxy-5,6,7,8-tetrahydropterin synthase OS=Rhizobium fredii OX=380 GN=queD PE=3 SV=1
MFRITKEFHFSASHQLTSLPPEHQCARLHGHNYVVEVELSAETLNEHGFVRDYHELAPLKHYIDEAFDHRHLNDVLGHDRVTAECLAQHFYEWCKAWLPETSAVRVSETEKTWAEYRP

SEQ ID NO: 24853 - protein, 119 aa, unidentified
  source 1..119: note = Rhizobium fredii
  REGION 1..119: note = tr|A0A0B7MT60|A0A0B7MT60_RHIFH 6-carboxy-5,6,7,8-tetrahydropterin synthase OS=Rhizobium fredii (strain HH103) OX=1117943 GN=exsC PE=3 SV=1
MMFRITKEFHFSASHQLKSLPPEHQCARLHGHNYVVEVELSAETLNEHGFVRDYHELAPLKHYIDEAFDHRHLNDVLGHDRVTAECLARHFYEWCKARLPETSAVRVSETAKTWAEYRP

SEQ ID NO: 24854 - protein, 118 aa, unidentified
  source 1..118: note = Rhizobium freirei
  REGION 1..118: note = tr|N6UXP7|N6UXP7_9RHIZ 6-carboxy-5,6,7,8-tetrahydropterin synthase OS=Rhizobium freirei PRF 81 OX=363754 GN=exsC PE=3 SV=1
MFRITKEFHFSASHQLSHLPDDHQCARLHGHNYIVVVELSAAELDENGFVRDYHELQPLKRYIDDEFDHRHLNDVLGHDRVTSEYLAKHFYDWCKAHLPETSAVRVSETPKTWAEYRP

SEQ ID NO: 24855 - protein, 118 aa, Rhizobium gallicum
  REGION 1..118: note = tr|A0A1L5NXU7|A0A1L5NXU7_9RHIZ 6-carboxy-5,6,7,8-tetrahydropterin synthase OS=Rhizobium gallicum OX=56730 GN=queD PE=3 SV=1
MFRITKEFHFSASHRLTSLPADHQCGRLHGHNYVVEVELSAATLNSHGFVRDYHELAPLKSYIDESFDHRHLNEVLGHDQVTAECLAKHFYDWCKDRLPETSAVRVSETPKTWAEYRP

SEQ ID NO: 24856 - protein, 118 aa, Rhizobium gallicum
  REGION 1..118: note = tr|A0A0B4XDX6|A0A0B4XDX6_9RHIZ 6-carboxy-5,6,7,8-tetrahydropterin synthase OS=Rhizobium gallicum bv. gallicum R602 OX=1418105 GN=queD PE=3 SV=1
MFRITKEFHFSASHRLTTLPADHQCGRLHGHNYVVEVELSAATLNSHGFVRDYHELAPLKSYIDESFDHRHLNEVLGHDQVTAECLAKHFYDWCKDRLPETSAVRVSETPKTWAEYRP

SEQ ID NO: 24857 - protein, 118 aa, unidentified
  source 1..118: note = Rhizobium grahamii
  REGION 1..118: note = tr|A0A370KL33|A0A370KL33_9RHIZ 6-carboxy-5,6,7,8-tetrahydropterin synthase OS=Rhizobium grahamii OX=1120045 GN=B5K06_20275 PE=3 SV=1
MFRITKEFHFSASHQLTHLPADHQCARLHGHNYIVVVELASAELDENGFVRDYHELSPLKSYIDERFDHRHLNEVFGHDRVTSEYLAKHFYDWCKERLPETSAVRVSETPKTWAEYRP

SEQ ID NO: 24858 - protein, 118 aa, unidentified
  source 1..118: note = Rhizobium grahamii
  REGION 1..118: note = tr|S3HAX2|S3HAX2_9RHIZ 6-carboxy-5,6,7,8-tetrahydropterin synthase OS=Rhizobium grahamii CCGE 502 OX=990285 GN=RGCCGE502_25903 PE=3 SV=1
MFRITKEFHFSASHQLTHLPADHQCARLHGHNYIVVVELAAAELDENGFVRDYHELSPLKRYIDERFDHRHLNEVFGHDRVTSEYLARHFYDWCKERLPETSAVRVSETPKTWAEYRP

SEQ ID NO: 24859 - protein, 118 aa, Rhizobium hainanense
  REGION 1..118: note = tr|A0A1C3W2F0|A0A1C3W2F0_9RHIZ 6-carboxy-5,6,7,8-tetrahydropterin synthase OS=Rhizobium hainanense OX=52131 GN=GA0061100_110119 PE=3 SV=1
MYRITKEFHFSASHQLSHLPDDHQCARMHGHNYIVVVELSAAELDENGFVRDYHELQPLKRYIDETFDHRHLNEVFGHDRVTSEYLARHFYDWCKERLPEASAVRVSETPKTWAEYRP

SEQ ID NO: 24860 - protein, 118 aa, Rhizobium hainanense
  REGION 1..118: note = tr|A0A1C3WCV4|A0A1C3WCV4_9RHIZ 6-carboxy-5,6,7,8-tetrahydropterin synthase OS=Rhizobium hainanense OX=52131 GN=GA0061100_11577 PE=3 SV=1
MKITQAFTFEAAHRLPHVPSTHKCHRMHGHSYRVELQLKGIVDAKTGFVIDFFDVEKVFGPVLESLDHHTLNDIEGLENPTAENIAVWIWKKVKPLLDELNSVKVFETPACWAEYEGE

SEQ ID NO: 24861 - protein, 118 aa, unidentified
  source 1..118: note = Rhizobium hidalgonense
  REGION 1..118: note = tr|A0A2A6K5P6|A0A2A6K5P6_9RHIZ 6-carboxy-5,6,7,8-tetrahydropterin synthase OS=Rhizobium hidalgonense OX=1538159 GN=queD PE=3 SV=1
MYRITKEFHLSASHQLDHLPADHQCARLHGHNYIVVVELAAESLNDDGFVRDYHDLSPLKRYIDEALDHRHLNEVFGHSKVTSEFLAKHFYDWCKQRFPETSSVRISETPKTWAEYRP

SEQ ID NO: 24862 - protein, 182 aa, unidentified
  source 1..182: note = Rhizobium ipomoeae
  REGION 1..182: note = tr|A0A4V4HM26|A0A4V4HM26_9RHIZ 6-carboxytetrahydropterin synthase OS=Rhizobium ipomoeae; OX = 1210932 GN=FAA97_18430 PE=4 SV=1
MADGHLITREIGIDAAHRIPFHASKCCNLHGHRYRIAATCSGPLFDAGEQEGMVLDFGFLKAEMMEQIDAACDHGMMIWIDDPWIRSFLALPESPQGVATLEQYRAEMRETGQKLIMGPFGKTLLMTTVPTAENLARHWFNLLAPRVKARSGNQATLLRIDVWETPNCVATYTAPQVNGGSV

SEQ ID NO: 24863 - protein, 132 aa, unidentified
  source 1..132: note = Rhizobium ipomoeae
  REGION 1..132: note = tr|A0A4S8NXK6|A0A4S8NXK6_9RHIZ 6-carboxytetrahydropterin synthase OS=Rhizobium ipomoeae; OX = 1210932 GN=FAA97_17790 PE=4 SV=1
MFAVEVRDHIMIAHSLQRPVFGPAQGMHGATFVVDAAFFTKDVDEDGLAVDIGAATTVLAEVLKPLNYQNLDEHAAFAGKISTTEVIAKHIFDELAAAVREKRLGAGSHRICRLRVLLHESHAARGWYEADL

SEQ ID NO: 24864 - protein, 118 aa, unidentified
  source 1..118: note = Rhizobium jaguaris
  REGION 1..118: note = tr|A0A387FWB4|A0A387FWB4_9RHIZ 6-carboxy-5,6,7,8-tetrahydropterin synthase OS=Rhizobium jaguaris OX=1312183 GN=queD PE=3 SV=1
MFRITKQFHFSASHQLSHLPADHQCARLHGHNYIVEVELSAAELDADGFVRDYHELAPLKRYIDERFDHRHLNEVLGHDRVTSEYLAKHFYDWCKQRLPETSAVRVSETPRTWAEYRP

SEQ ID NO: 24865 - protein, 119 aa, unidentified
  source 1..119: note = Rhizobium jaguaris
  REGION 1..119: note = tr|A0A387G807|A0A387G807_9RHIZ 6-carboxy-5,6,7,8-tetrahydropterin synthase OS=Rhizobium jaguaris OX=1312183 GN=queD PE=3 SV=1
MKITQAFTFEAAHRLPHVPAAHKCHRIHGHSYRIELQLEGEVDPNTGFVVDFFDVEKVFGPVIEQLDHHTLNEIPGLENPTAENIAVWIWEQIKPLVGRMRSVKVFETPFCWAEYDGKR

SEQ ID NO: 24866 - protein, 118 aa, unidentified
  source 1..118: note = Rhizobium laguerreae
  REGION 1..118: note = tr|A0A4Q9ZXD1|A0A4Q9ZXD1_9RHIZ 6-carboxy-5,6,7,8-tetrahydropterin synthase OS=Rhizobium laguerreae OX=1076926 GN=queD PE=3 SV=1
MYRITKEFHLSASHQLDHLPAEHQCARLHGHNYIVVVELAAESLNDDGFVRDYHDLSPLKRYIDEAFDHRHLNDVFGHSKVTSEFLARHFYDWCKQRFPETSSVRVSETPKTWAEYRP

SEQ ID NO: 24867 - protein, 118 aa, unidentified
  source 1..118: note = Rhizobium laguerreae
  REGION 1..118: note = tr|A0A1S9H288|A0A1S9H288_9RHIZ 6-carboxy-5,6,7,8-tetrahydropterin synthase OS=Rhizobium laguerreae OX=1076926 GN=BS630_04450 PE=3 SV=1
MYRITKEFHLSASHQLDHLPAEHQCARLHGHNYIVVVELAAESLNDDGFVRDYHDLSPLKRYIDETFDHRHLNDVFGHSKVTSEFLARHFYDWCKQRFPETSSVRVSETPKTWAEYRP

SEQ ID NO: 24868 - protein, 118 aa, Rhizobium leguminosarum
  REGION 1..118: note = tr|J0BPK1|J0BPK1_RHIL1 6-carboxy-5,6,7,8-tetrahydropterin synthase OS=Rhizobium leguminosarum bv. viciae (strain WSM1455) OX=755176; GN = Rleg5DRAFT_4000 PE=3 SV=1
MYRITKEFHLSASHQLDHLPADHQCARLHGHNYIVVVELAAESLNDDGFVRDYHDLSPLKRYIDEALDHRHLNDVFGHSKVTSEFLAKHFYDWCKQHFPETSSVRVSETPKTWAEYRP

SEQ ID NO: 24869 - protein, 118 aa, Rhizobium leguminosarum
  REGION 1..118: note = tr|A0A3E1BDG2|A0A3E1BDG2_RHILT 6-carboxy-5,6,7,8-tetrahydropterin synthase OS=Rhizobium leguminosarum bv. trifolii OX=386 GN=B5K10_20375 PE=3 SV=1
MYRITKEFHLSASHQLDHLPADHQCARLHGHNYIVVVELSAESLNDDGFVRDYHDLSPLKRYIDETLDHRHLNEVFGHSKVTSEFLAKHFYDWCRERFPETSSVRVSETPKTWAEYRP

SEQ ID NO: 24870 - protein, 118 aa, Rhizobium loessense
  REGION 1..118: note = tr|A0A1G4U8E1|A0A1G4U8E1_9RHIZ 6-carboxy-5,6,7,8-tetrahydropterin synthase OS=Rhizobium loessense OX=158890 GN=SAMN02927900_06352 PE=3 SV=1
MFRITKEFHFSASHVLTSLPAEHQCGRLHGHNYVVEVELSAATLNSHGFVRDYHELAPLKSYIDEYFDHRHLNEVLGHDQVTAECLAKHFYDWCKDRLPETSAVRVSETPKTWAEYRP

SEQ ID NO: 24871 - protein, 118 aa, unidentified
  source 1..118: note = Rhizobium loti
  REGION 1..118: note = tr|A0A117N390|A0A117N390_RHILI 6-carboxy-5,6,7,8-tetrahydropterin synthase OS=Rhizobium loti OX=381 GN=AU467_23875 PE=3 SV=1
MYTIAKRYSFSASHVIGGLPAQHPCARLHGHNYEVEVVLQSAELDPVGFVRDFRELSPLKAFIDEKLDHRHLNDVLGHDQTTSEVLAKWIYDWCSALWPEVAAVRVSETPKTWAEYRP

SEQ ID NO: 24872 - protein, 118 aa, unidentified
  source 1..118: note = Rhizobium loti
  REGION 1..118: note = tr|A0A1B4YS88|A0A1B4YS88_RHILI 6-carboxy-5,6,7,8-tetrahydropterin synthase OS=Rhizobium loti OX=381 GN=MLTONO_5139 PE=3 SV=1
MFRITKEFHFSASHQLTSLPPDHQCARLQGHNYIVVVELSGGELDEHGFVRDYQDLAAFKHYIDGTFDHRHLNDVLGHDHATAECLARHFYDWCKVRLPETSAVRVSETPKTWAEYRP

SEQ ID NO: 24873 - protein, 172 aa, Rhizobium lusitanum
  REGION 1..172: note = tr|A0A1C3XIB6|A0A1C3XIB6_9RHIZ 6-pyruvoyltetrahydropterin/6-carboxytetrahydropterin synthase OS=Rhizobium lusitanum OX=293958; GN = GA0061101_14218 PE=4 SV=1
MTSSITMPDDRVTSTRKHIETYRSTKSYDHNEGLSCCFRQWRADSHCQLIHGYALAVKFVFATHHLDERNWCFDFGALKEVKAWLHSLLDHTMIVAADDPELPRFHNLADAKLVDLRILPGVGCEALARYVHDHVATIAREKTNGRVWLESVEIREHAGNSAIYELHSHTPH

SEQ ID NO: 24874 - protein, 118 aa, Rhizobium lusitanum
  REGION 1..118: note = tr|A0A1C3WJR9|A0A1C3WJR9_9RHIZ 6-carboxy-5,6,7,8-tetrahydropterin synthase OS=Rhizobium lusitanum OX=293958 GN=GA0061101_112132 PE=3 SV=1
MFRITKEFHFSASHQLAHLPDDHQCARLHGHNYIVVVELSAAELDGNGFVRDYHELQPLKRYIDDNFDHRHLNDVLGHGRVTSECLARHFYDWCKARLPETSAMRVSETPKTWAEYRP

SEQ ID NO: 24875 - protein, 118 aa, unidentified
  source 1..118: note = Rhizobium meliloti
  REGION 1..118: note = tr|A0A3S5NA08|A0A3S5NA08_RHIML 6-carboxy-5,6,7,8-tetrahydropterin synthase OS=Rhizobium meliloti OX=382 GN=queD PE=3 SV=1
MFRITKEFHFSASHQLKSLPAEHQCARLHGHNYIVEVELSGETLNEHGFVRDYHELAPLKQYIDECFDHRHLNDVLGHDRVTAECLAKHFYEWCQARLPETTAVRVSETAKTWAEYRP

SEQ ID NO: 24876 - protein, 118 aa, unidentified
  source 1..118: note = Rhizobium meliloti
  REGION 1..118: note = tr|A0A2J0Z7Z4|A0A2J0Z7Z4_RHIML 6-carboxy-5,6,7,8-tetrahydropterin synthase OS=Rhizobium meliloti OX=382 GN=queD PE=3 SV=1
MFRITKEFHFSASHQLKSLPAEHQCARLHGHNYIVEVELSGERLNEHGFVRDYHELAPLKQYIDECFDHRHLNDVLGHDRVTAECLAQHFYEWCRARLPETTAVRVSETAKTWAEYRP

SEQ ID NO: 24877 - protein, 118 aa, unidentified
  source 1..118: note = Rhizobium mesoamericanum
  REGION 1..118: note = tr|K0Q1T8|K0Q1T8_9RHIZ 6-carboxy-5,6,7,8-tetrahydropterin synthase OS=Rhizobium mesoamericanum STM3625 OX=1211777 GN=ygcM PE=3 SV=1
MFRITKEFHFSASHQLTHLPSDHQCARLHGHNYIVVVELAAAELDENGFVRDYHELSPLKRYIDERFDHRHLNEVFGHDRVTSEYLAKHFYDWCKGRLPETSAVRVSETPKTWAEYRP

SEQ ID NO: 24878 - protein, 118 aa, Rhizobium miluonense
  REGION 1..118: note = tr|A0A1C3VN67|A0A1C3VN67_9RHIZ 6-carboxy-5,6,7,8-tetrahydropterin synthase OS=Rhizobium miluonense OX=411945 GN=GA0061102_101559 PE=3 SV=1
MFRITKEFHFSASHQLSHLPDDHQCARLHGHNYIVVVELSAAELDGNGFVRDYHELQPLKRYIDDEFDHRHLNDVLGHDRVTSECLAKHFYDWCKVRLPETSAVRVSETPKTWAEYRP

SEQ ID NO: 24879 - protein, 118 aa, Rhizobium mongolense
  REGION 1..118: note = tr|A0A559TH48|A0A559TH48_9RHIZ 6-carboxy-5,6,7,8-tetrahydropterin synthase OS=Rhizobium mongolense USDA 1844 OX=1079460 GN=BCL32_2217 PE=3 SV=1
MFRITKEFHFSASHRLTSLPADHQCGRLHGHNYVVEVELSAATLNSHGFVRDYHELAPLKSYIDEYFDHRHLNEVLGHDQVTAECLAKHFYDWCKDRLPETSAVRVSETPKTWAEYRP

SEQ ID NO: 24880 - protein, 118 aa, Rhizobium multihospitium
  REGION 1..118: note = tr|A0A1C3XA72|A0A1C3XA72_9RHIZ 6-carboxy-5,6,7,8-tetrahydropterin synthase OS=Rhizobium multihospitium OX=410764 GN=GA0061103_0539 PE=3 SV=1
MYRITKEFHFSASHQLSHLPDDHQCARMHGHNYIVVVELSATELDRNGFVRDYHELQPLKRYIDETFDHRHLNDVFGHDRVTSEYLAKHFYDWCKERLPEASAVRVSETPKTWAEYRP

SEQ ID NO: 24881 - protein, 118 aa, unidentified
  source 1..118: note = Rhizobium nepotum
  REGION 1..118: note = tr|A0A0D8KJS3|A0A0D8KJS3_9RHIZ 6-carboxy-5,6,7,8-tetrahydropterin synthase OS=Rhizobium nepotum 39/7 OX=1368418 GN=RS75_04380 PE=3 SV=1
MFRITKEFHFSASHQLKSLPADHQCARLHGHNYIVEVELSGEELNEHGFVRDYHELAPLKHYIDDHFDHRHLNDVLGHDRVTAECLAKHFYDWCKTSLPETSAVRVSETAKTWAEYRP

SEQ ID NO: 24882 - protein, 132 aa, Rhizobium oryzae
  REGION 1..132: note = tr|A0A1X7EFB6|A0A1X7EFB6_9RHIZ 6-pyruvoyl-tetrahydropterin synthase OS=Rhizobium oryzae; OX = 464029 GN=SAMN02982989_1209 PE=4 SV=1
MFAVEVRDHIMIAHSLPRPVFGPAQGLHGATFVVDAAFFTTDLDDDGLAVDIGLATEILKEVLAPLNYQNLDALDIFAGRVTTTEFLSRHIFDGIAEAIDNGRLGEGGKRIRKLRVMLHESHTARGWYEAEL

SEQ ID NO: 24883 - protein, 149 aa, unidentified
  source 1..149: note = Rhizobium oryziradicis
  REGION 1..149: note = tr|A0A1Q8ZTL3|A0A1Q8ZTL3_9RHIZ Uncharacterized protein OS=Rhizobium oryziradicis OX=1867956; GN = BJF95_16960 PE=4 SV=1
MYRSTKTYDHSEGLSCCFRQWRAEHSHCKLLHGYALAFKFVFATQQLDQHNWCYDFGGMKQVRQWLHDQFDHTMLVSEDDPELATFVELANKGLVDLRIMPAVGCEQTARFCYEYVSALVGRETDGRVWLESVEVREHGGNSALFEIPR

SEQ ID NO: 24884 - protein, 132 aa, unidentified
  source 1..132: note = Rhizobium oryziradicis
  REGION 1..132: note = tr|A0A1Q8ZWJ2|A0A1Q8ZWJ2_9RHIZ Uncharacterized protein OS=Rhizobium oryziradicis OX=1867956; GN = BJF95_04625 PE=4 SV=1
MFAVEVRDHIMIAHSLPRPVFGPAQGMHGATFVVDAAFFTRDLDEDGLGVDIGAATTVLADVLKPLNYQNLDDLAVFKDTVTTTEVIAKYIFDQLADAVAAKRLGPGSHRITRLKITLHESHAARAWYEADL

SEQ ID NO: 24885 - protein, 118 aa, Rhizobium phaseoli
  REGION 1..118: note = tr|A0A0M3GRQ9|A0A0M3GRQ9_9RHIZ 6-carboxy-5,6,7,8-tetrahydropterin synthase OS=Rhizobium phaseoli Ch24-10 OX=1128399 GN=exsC PE=3 SV=1
MYRITKEFHLSASHQLDHLPADHQCARLHGHNYIVVVELSAETLNDHGFVRDYHDLSPLKRYIDEALDHRHLNEVFGHSKVTSEFLAKHFYDWCRERFPETSSVRVSETPKTWAEYRP

SEQ ID NO: 24886 - protein, 118 aa, Rhizobium phaseoli; identical to SEQ ID NO: 24849
  REGION 1..118: note = tr|A0A192TFR3|A0A192TFR3_9RHIZ 6-carboxy-5,6,7,8-tetrahydropterin synthase OS=Rhizobium phaseoli OX=396 GN=queD PE=3 SV=1

SEQ ID NO: 24887 - protein, 118 aa, Rhizobium pisi
  REGION 1..118: note = tr|A0A3R9A768|A0A3R9A768_9RHIZ 6-carboxy-5,6,7,8-tetrahydropterin synthase OS=Rhizobium pisi OX=574561 GN=queD PE=3 SV=1
MYRITKEFHLSASHQLDHLPADHQCARLHGHNYVVVVELAAESLNDDGFVRDYHDLSPLKRYIDETLDHRHLNDVFGHSKVTSEFLAKHFYDWCKQRFPETSSVRISETPKTWAEYRP

SEQ ID NO: 24888 - protein, 118 aa, Rhizobium pusense; identical to SEQ ID NO: 17156
  REGION 1..118: note = tr|A0A1L9D043|A0A1L9D043_9RHIZ 6-carboxy-5,6,7,8-tetrahydropterin synthase OS=Rhizobium pusense OX=648995 GN=BA725_09240 PE=3 SV=1

SEQ ID NO: 24889 - protein, 118 aa, Rhizobium radiobacter; identical to SEQ ID NO: 17139
  REGION 1..118: note = tr|A0A024ITY2|A0A024ITY2_RHIRD 6-carboxy-5,6,7,8-tetrahydropterin synthase OS=Rhizobium radiobacter OX=358 GN=queD PE=3 SV=1

SEQ ID NO: 24890 - protein, 118 aa, Rhizobium radiobacter
  REGION 1..118: note = tr|A0A1V2AI04|A0A1V2AI04_RHIRD 6-carboxy-5,6,7,8-tetrahydropterin synthase OS=Rhizobium radiobacter OX=358 GN=BV900_20990 PE=3 SV=1
MFRITKEFHFSASHQLKSLPADHQCARLHGHNYIVEVELSGEELNEHGFVRDYHELAPLKRYIDEHFDHRHLNDVLGHDRVTAECLAKHFYDWCKTSLPETSAVRVSETAKTWAEYRP

SEQ ID NO: 24891 - protein, 132 aa, unidentified
  source 1..132: note = Rhizobium rhizosphaerae
  REGION 1..132: note = tr|A0A1Q9AK75|A0A1Q9AK75_9RHIZ Uncharacterized protein OS=Rhizobium rhizosphaerae OX=1672749; GN = BJF92_08400 PE=4 SV=1
MFAVEVRDHIMIAHSLPRPVFGPAQGMHGATFVVDAAFFTRDVDEDGLAVDIGAATTVLAEVLKPLNYQNLDTLDVFKGKVSTTEVIAKHVFDALAAAVKAERLGPGSHRICRLKVTLHESHAARGWYEADL

SEQ ID NO: 24892 - protein, 132 aa, Rhizobium rosettiformans
  REGION 1..132: note = tr|A0A4S8PR62|A0A4S8PR62_9RHIZ 6-carboxytetrahydropterin synthase OS=Rhizobium rosettiformans W3 OX=538378 GN=FAA86_16965 PE=4 SV=1
MFAVEVRDHIMIAHSLPRPVFGPAQGMHGATFVVDAAFFTKDVDEDGLAVDIGAATTVLAEVLKPLNYQNLDEVEAFKGKVSTTEVIAKHIFDQLAKAVSDKRLGAGSHRICRLKVTLHESHAARGWYEADL

SEQ ID NO: 24893 - protein, 118 aa, Rhizobium selenitireducens
  REGION 1..118: note = tr|A0A376ABP8|A0A376ABP8_9RHIZ 6-carboxy-5,6,7,8-tetrahydropterin synthase OS=Rhizobium selenitireducens ATCC BAA-1503 OX=1336235 GN=RHIZ70_866; PE = 3 SV=1
MFRITKEFHFSASHQLKSLPDDHPCARLHGHNYVVEVELAAEMLDERGFVRDYHDLAVLKRYLDETFDHRHLNDVLGHGTITAEWLARHLFDWCRMNFPETAAVRVSETPKTWAEYRP

SEQ ID NO: 24894 - protein, 132 aa, Rhizobium selenitireducens
  REGION 1..132: note = tr|A0A376AL81|A0A376AL81_9RHIZ Uncharacterized protein OS=Rhizobium selenitireducens ATCC BAA-1503; OX = 1336235 GN=RHIZ70_4283 PE=4 SV=1
MFAVEVRDHIMIAHSLPRPVFGPAQGMHGATFVVDAAFFTRDLDEDGLAVDIGAATNVLGEVLKPLNYQNLDELPAFSGKVTTTEVVAKHIFDALARAVADRKLGPGSHRICRLKVTLHESHTARGWYEADL

SEQ ID NO: 24895 - protein, 132 aa, unidentified
  source 1..132: note = Rhizobium smilacinae
  REGION 1..132: note = tr|A0A5C4XGT9|A0A5C4XGT9_9RHIZ 6-carboxytetrahydropterin synthase OS=Rhizobium smilacinae; OX = 1395944 GN=FHP24_21035 PE=4 SV=1
MFAVEVRDHMMIAHSLPREVFGPAQAMHGATFVVDAAFMTEDLDEDGLGVDIGLATTVLKEAVAPLNYKNLDELDVFRGKVTTTEVLAKHIFDDLRRRIEAGELGTGGKRIRRLKITLHESHVARAWYEAAI

SEQ ID NO: 24896 - protein, 118 aa, unidentified
  source 1..118: note = Rhizobium sophoriradicis
  REGION 1..118: note = tr|A0A2A5KJ88|A0A2A5KJ88_9RHIZ 6-carboxy-5,6,7,8-tetrahydropterin synthase OS=Rhizobium sophoriradicis OX=1535245 GN=queD PE=3 SV=1
MYRITKEFHLSASHQLDHLPADHQCARLHGHNYIVVVELAAESLNDDGFVRDYHDLSPLKRYIDEALDHRHLNEVFGHSKVTSEFLAKHFYDWCKQRFPETSSVRVSETPKTWAEYRP

SEQ ID NO: 24897 - protein, 118 aa, unidentified
  source 1..118: note = Rhizobium sophoriradicis
  REGION 1..118: note = tr|A0A3R9B124|A0A3R9B124_9RHIZ 6-carboxy-5,6,7,8-tetrahydropterin synthase OS=Rhizobium sophoriradicis OX=1535245 GN=queD PE=3 SV=1
MYRITKEFHLSASHQLDYLPADHQCARLHGHNYIVVVELAAESLNDDGFVRDYHDLSPLKRYIDEALDHRHLNEVFGHSKVTSEFLAKHFYDWCKQRFPETSSVRVSETPKTWAEYRP

SEQ ID NO: 24898 - protein, 118 aa, Rhizobium sp.; identical to SEQ ID NO: 17156
  REGION 1..118: note = tr|U4Q5C5|U4Q5C5_9RHIZ 6-carboxy-5,6,7,8-tetrahydropterin synthase OS=Rhizobium sp. IRBG74 OX=424182 GN=queD PE=3 SV=1

SEQ ID NO: 24899 - protein, 132 aa, Rhizobium sp.
  REGION 1..132: note = tr|A0A2S6BH74|A0A2S6BH74_9RHIZ 6-carboxytetrahydropterin synthase OS=Rhizobium sp. KAs_5_22 OX=2067668 GN=C0075_14390 PE=4 SV=1
MFAVEVRDHIMIAHSLPRPVFGPAQGMHGATFVVDAAFFTRDVDEDGLAVDIGAATTVLGEVLKPLNYQNLDELSIFTGKITTTEVIAKHIFDALARAVADKKLGPGSHRICRLKVTLHESHAARGWYEADL

SEQ ID NO: 24900 - protein, 132 aa, unidentified
  source 1..132: note = Rhizobium straminoryzae
  REGION 1..132: note = tr|A0A549T7C1|A0A549T7C1_9RHIZ 6-carboxytetrahydropterin synthase OS=Rhizobium straminoryzae OX=1387186 GN=FNA46_14225 PE=4 SV=1
MFAVEVRDHIMIAHSLPRPVFGPAQGMHGATFVVDAAFFTRDVDEDGLAVDIGLATQVLSAVLKPLNYQNLDELAVFKGRITTTEVLAKHIFDALKEAVSEGRLGPGSARICRLRVLLHESHAARGWYEADL

SEQ ID NO: 24901 - protein, 118 aa, unidentified
  source 1..118: note = Rhizobium straminoryzae
  REGION 1..118: note = tr|A0A549SQX3|A0A549SQX3_9RHIZ 6-carboxy-5,6,7,8-tetrahydropterin synthase OS=Rhizobium straminoryzae OX=1387186 GN=queD PE=3 SV=1
MYRITKEFHFSASHQLAHLPADHQCARLHGHNYIVVVELAGETLNADGFVRDYHELKVLKTYIDEHFDHRHLNEVLGSSMSTAENLARHFYDWCKARFPETAAVKVSETPKTWAEYRP

SEQ ID NO: 24902 - protein, 118 aa, Rhizobium sullae
  REGION 1..118: note = tr|A0A4R3QPH2|A0A4R3QPH2_RHISU 6-carboxy-5,6,7,8-tetrahydropterin synthase OS=Rhizobium sullae OX=50338 GN=EV132_101350 PE=3 SV=1
MFRITKEFHFSASHQLTSLPTDHQCARLHGHNYVVEVELAAVALNSHGFVRDYHELAPLKRYIDECFDHRHLNEVLGHDQVTAECLAKHFYDWCKERLPETSAVRVSETPKTWAEYRP

SEQ ID NO: 24903 - protein, 118 aa, Rhizobium sullae
  REGION 1..118: note = tr|A0A2N0DF75|A0A2N0DF75_RHISU 6-carboxy-5,6,7,8-tetrahydropterin synthase OS=Rhizobium sullae OX=50338 GN=queD PE=3 SV=1
MFRITKEFHFSASHQLTSLPTDHQCARLHGHNYVVEVELGAVALNSHGFVRDYHELAPLKRYIDECFDHRHLNEVLGHDQVTAECLAKHFYDWCKERLPETSAVRVSETPKTWAEYRP

SEQ ID NO: 24904 - protein, 118 aa, Rhizobium taibaishanense
  REGION 1..118: note = tr|A0A1Q9A4W9|A0A1Q9A4W9_9RHIZ 6-carboxy-5,6,7,8-tetrahydropterin synthase OS=Rhizobium taibaishanense OX=887144 GN=BJF91_21625 PE=3 SV=1
MYRITKEFHFSASHQLKGLPADHQCARLHGHNYVVEVELSGEELNEHGFLRDYHELKVLKTYIDECFDHRHLNEVLGHDKTTAECLARHFYDWCKQRFTETSAVRVSETQKTWAEYRP

SEQ ID NO: 24905 - protein, 118 aa, Rhizobium tibeticum
  REGION 1..118: note = tr|A0A1H8U0E4|A0A1H8U0E4_9RHIZ 6-carboxy-5,6,7,8-tetrahydropterin synthase OS=Rhizobium tibeticum OX=501024 GN=queD PE=3 SV=1
MFRITKEFHFSASHQLTHLPADHQCARLHGHNYIVVVELAAAELDENGFVRDYHELSPLKRYIDERIDHRHLNEVFGHDRVTSEYLAKHFYDWCKEWLPETSAVRVSETPKTWAEYRP

SEQ ID NO: 24906 - protein, 119 aa, Rhizobium tropici
  REGION 1..119: note = tr|L0LUB6|L0LUB6_RHITR 6-carboxy-5,6,7,8-tetrahydropterin synthase OS=Rhizobium tropici CIAT 899 OX=698761 GN=queD PE=3 SV=1
MMYRITKEFHFSASHQLSHLPADHQCARLHGHNYIVVVELSAGELDENGFVRDYHELQPLKRYIDEGFDHRHLNDVFGHDRVTSEYLAKHFYDWCKERLPQTSAVRVSETPKTWAEYRP

SEQ ID NO: 24907 - protein, 118 aa, Rhizobium tropici
  REGION 1..118: note = tr|A0A5B0VRT9|A0A5B0VRT9_RHITR 6-carboxy-5,6,7,8-tetrahydropterin synthase OS=Rhizobium tropici OX=398 GN=queD PE=3 SV=1
MFRITKEFHFSASHQLSHLPDDHQCARMHGHNYIVVVELSADELDGNGFVRDYHELQPLKRYIDNEFDHRHLNDVLGHDRVTSEYLAKHFYDWCKSRLPETSAVRVSETPKTWAEYRP

SEQ ID NO: 24908 - protein, 118 aa, Rhizobium tubonense
  REGION 1..118: note = tr|A0A2W4ESC7|A0A2W4ESC7_9RHIZ 6-carboxy-5,6,7,8-tetrahydropterin synthase OS=Rhizobium tubonense OX=484088 GN=queD PE=3 SV=1
MYRITKEFHFSASHQLRALPLEHQCARLHGHNYIVEVELSAPELNEHGFVRDYQELAALKHYIDDSFDHRHLNEVLAHDQVTAECLAKHFYDWCKARLPETSAVRVSETTKTWAEYRP

SEQ ID NO: 24909 - protein, 118 aa, unidentified
  source 1..118: note = Rhizobium tumorigenes
  REGION 1..118: note = tr|A0A2W4AXJ5|A0A2W4AXJ5_9RHIZ 6-carboxy-5,6,7,8-tetrahydropterin synthase OS=Rhizobium tumorigenes OX=2041385 GN=queD PE=3 SV=1
MFRITKEFHFSASHQLTRLPADHQCARLHGHNYIVIVELSSPDLNEDGFVRDYHELAPLKRYIDDTFDHRHLNDVLGHDAVTSEYLAKHFFDWCRAILPETSAVRVSETPKTWAEYRP

SEQ ID NO: 24910 - protein, 118 aa, Rhizobium vallis
  REGION 1..118: note = tr|A0A432PAS5|A0A432PAS5_9RHIZ 6-carboxy-5,6,7,8-tetrahydropterin synthase OS=Rhizobium vallis OX=634290 GN=queD PE=3 SV=1
MYRITKEFHLSASHQLNHLPADHQCARLHGHNYVVVVELAAETLNDDGFVRDYHDLSPLKRYIDEALDHRHLNDVFGHSKVTSEFLAKHFYDWCKQRFPETSSVRVSETPKTWAEYRP

SEQ ID NO: 24911 - protein, 118 aa, Rhizobium yanglingense
  REGION 1..118: note = tr|A0A245ZAU6|A0A245ZAU6_9RHIZ 6-carboxy-5,6,7,8-tetrahydropterin synthase OS=Rhizobium yanglingense OX=61013 GN=AJ87_47175 PE=3 SV=1
MFRITKEFHFSASHRLTSLPADHQCGRLHGHNYVVEVELSAATLNSHGFVRDYHELAPLKSYIDENFDHRHLNEVLGHDQVTAECLAKHFYDWCKDRLPETSAVRVSETAKTWAEYRP

SEQ ID NO: 24912 - protein, 117 aa, Rhizomicrobium sp.
  REGION 1..117: note = tr|A0A177Q9A0|A0A177Q9A0_9PROT 6-carboxy-5,6,7,8-tetrahydropterin synthase; OS = Rhizomicrobium sp. SCGC AG-212-E05 OX=1799655; GN = AYO42_01090 PE=3 SV=1
MIELSQEFGFDAAHYLGNSAPENRRLHGHSFYAEVTLRGEPDAVTGFLRDLGEVDAALKVIRGELDHRLLNEIEGLGTPTLENLARFIFVRAKAALPEVVRVKLRRPSYGQTCVYEA

SEQ ID NO: 24913 - protein, 120 aa, unidentified
  source 1..120: note = Rhodanobacter denitrificans
  REGION 1..120: note = tr|I4WMY2|I4WMY2_9GAMM 6-carboxy-5,6,7,8-tetrahydropterin synthase; OS = Rhodanobacter denitrificans OX=666685 GN=R2APBS1_3783; PE = 3 SV=1
MHIFKVFQIEAAHRLPNVPAGHKCARLHGHSFRIEIHLAGEPDPQLGWVMDFADVKAAFAPLFDQLDHHYLNEIEGLENPTSEMLARWIWQRLQPRLSGLDKVVVHETCTSGASCSRDSF

SEQ ID NO: 24914 - protein, 120 aa, unidentified
  source 1..120: note = Rhodanobacter denitrificans
  REGION 1..120: note = tr|A0A368KC45|A0A368KC45_9GAMM 6-carboxy-5,6,7,8-tetrahydropterin synthase; OS = Rhodanobacter denitrificans OX=666685 GN=queD PE=3 SV=1
MHIFKVFQLEAAHRLPNVPAGHKCARLHGHSFRVEIHVTGEPDPQLGWVMDFADVKTAFAPLFDQLDHHYLNEIEGLENPTSEMLARWIWQRLQPRLAGLDKVVVHETCTSGASCSRDSF

SEQ ID NO: 24915 - protein, 129 aa, Rhodanobacter fulvus
  REGION 1..129: note = tr|I4VLS1|I4VLS1_9GAMM 6-carboxy-5,6,7,8-tetrahydropterin synthase; OS = Rhodanobacter fulvus Jip2 OX=1163408 GN=UU9_13638 PE=3; SV = 1
MPAVQCRMDIFKVFNVEAAHRLPHVPAGHKCSRLHGHSFRVEIHVSGEPGVDTGWVMDFADVKAAFAPIHDQLDHYYLNDIEGLDNPTSERLSIWIWDRLKPALPLLSEVVVHETCTSGCRYRGPSVAR

SEQ ID NO: 24916 - protein, 120 aa, unidentified
  source 1..120: note = Rhodanobacter glycinis
  REGION 1..120: note = tr|A0A502BZR7|A0A502BZR7_9GAMM 6-carboxy-5,6,7,8-tetrahydropterin synthase; OS = Rhodanobacter glycinis OX=582702 GN=queD PE=3 SV=1
MHIFKVFQLEAAHRLPHVPAGHKCARLHGHSFRIEIHVTGEPDPQLGWVMDFADLKTAFAPLYDQLDHHYLNDIEGLENPTSEMLARWIWQRLLPRLPGLDKVVVHETCTSGASCSRDSF

SEQ ID NO: 24917 - protein, 120 aa, unidentified
  source 1..120: note = Rhodanobacter glycinis
  REGION 1..120: note = tr|A0A1I4B223|A0A1I4B223_9GAMM 6-carboxy-5,6,7,8-tetrahydropterin synthase; OS = Rhodanobacter glycinis OX=582702 GN=queD PE=3 SV=1
MHIFKIFQIEAAHRLPHVPEGHKCARLHGHSFRIEIHLAGEPDPQMGWVMDFGDVKAAFAPLYDQLDHHYLNDIEGLENPTSEMLARWIWQRLAPRLPGLDKVVVHETCTSGASCSRDSF

SEQ ID NO: 24918 - protein, 120 aa, Rhodanobacter lindaniclasticus
  REGION 1..120: note = tr|A0A4S3KK29|A0A4S3KK29_9GAMM 6-carboxy-5,6,7,8-tetrahydropterin synthase; OS = Rhodanobacter lindaniclasticus OX=75310 GN=B1991_03130; PE = 3 SV=1
MHIFKVFQLEAAHRLPHVPEGHKCARLHGHSFRVEIHVSGEPDPRLGWVMDFAELKTAFQPLYDQLDHHYLNDIEGLENPTSEMLARWIWQRLEPRLAGLDKVVVHETCTSGASCSRVDF

SEQ ID NO: 24919 - protein, 120 aa, Rhodanobacter sp.
  REGION 1..120: note = tr|A0A1V3PT86|A0A1V3PT86_9GAMM 6-carboxy-5,6,7,8-tetrahydropterin synthase; OS = Rhodanobacter sp. C03 OX=1945858 GN=B0E48_14790 PE=3; SV = 1
MNIFKVFTLEAAHRLPNVPAGHKCARLHGHSFRVEIHVAGEPDPQLGWVMDFADLKTAFAPLYDQLDHHYLNDIDGLENPTSEMLARWIWQRLQPRLPGLDKVVVHETCTSGASCSRGSF

SEQ ID NO: 24920 - protein, 120 aa, Rhodanobacter sp.
  REGION 1..120: note = tr|A0A522SM55|A0A522SM55_9GAMM 6-carboxy-5,6,7,8-tetrahydropterin synthase; OS = Rhodanobacter sp. OX=1883446 GN=queD PE=3 SV=1
MHIFKVFQIEAAHRLPNVPAGHKCARLHGHSFRVEIHVTGEPDPQLGWVMDFADVKAAFAPLFDQLDHHYLNEIEGLENPTSEMLARWIWRRLQPRLTGLDKVVVHETCTSGASCSRDSF

SEQ ID NO: 24921 - protein, 118 aa, Rhodanobacter spathiphylli
  REGION 1..118: note = tr|I4W2K4|I4W2K4_9GAMM 6-carboxy-5,6,7,8-tetrahydropterin synthase; OS = Rhodanobacter spathiphylli B39 OX=1163407 GN=UU7_07626; PE = 3 SV=1
MNIFKVFTLEAAHRLPNVPEGHKCARLHGHSFRVELHLTGDVGAESGWVMDFGDVKAVFQPLYEQLDHHYLNDIQGLENPTSERLAVWIWDRLKPALPLLSEVVVHETCTSGCRYRGM

SEQ ID NO: 24922 - protein, 120 aa, Rhodanobacter thiooxydans
  REGION 1..120: note = tr|A0A154QFR1|A0A154QFR1_9GAMM 6-carboxy-5,6,7,8-tetrahydropterin synthase; OS = Rhodanobacter thiooxydans OX=416169 GN=RHOFW104T7_15840; PE = 3 SV=1
MHIFKVFQIEAAHRLPNVPVGHKCARLHGHSFRVEIHVSGEPGSQTGWVMDFADVKAAFAPLFDQLDHHYLNEIEGLENPTSEMLARWIWRRLQPRLAGLDKVVVHETCTSGASCSRDSF

SEQ ID NO: 24923 - protein, 119 aa, Rhodanobacter thiooxydans
  REGION 1..119: note = tr|A0A154QFQ8|A0A154QFQ8_9GAMM 6-carboxy-5,6,7,8-tetrahydropterin synthase; OS = Rhodanobacter thiooxydans OX=416169 GN=RHOFW104T7_15835; PE = 3 SV=1
MDIFKVFTLEAAHRLPNVPEGHKCARLHGHSFRVEVHLAGEPGAGTGWVMDFGDVKVAFQPIYDQLDHHYLNDIDGLDNPTSERLAVWIWERLKPRLPLLSEIVVRETCTSGCRYRAPK

SEQ ID NO: 24924 - protein, 120 aa, unidentified
  source 1..120: note = Rhodanobacteraceae bacterium
  REGION 1..120: note = tr|A0A2Z6E275|A0A2Z6E275_9GAMM 6-carboxy-5,6,7,8-tetrahydropterin synthase; OS = Rhodanobacteraceae bacterium Dysh456 OX=2010829; GN = ALSL_0192 PE=3 SV=1
MRIFKSFQIEAAHRLPHVPAGHKCARLHGHSFHIELHVAGEPDPTLGWIMDFAELKAAFQPLFEQLDHRYLNDIEGLENPTSETLARWIYERLAPRVPGLDEVVVRETCTAGASYRGPRG

SEQ ID NO: 24925 - protein, 125 aa, unidentified
  source 1..125: note = Rhodanobacteraceae bacterium
  REGION 1..125: note = tr|A0A522RVJ0|A0A522RVJ0_9GAMM 6-carboxy-5,6,7,8-tetrahydropterin synthase; OS = Rhodanobacteraceae bacterium OX=2052182 GN=EPN36_06275; PE = 3 SV=1
MSEQLFNVWKTFYFDAAHQLDAGPGGDPRYRRMHGHSYQVEVWLRGPLTERGWVVDMGDLERGIDTARDALDHRLLNDVEGLGIPTMENIARFVWERLDHLPQLQRVVVKREQNGEGCEYLGPGR

SEQ ID NO: 24926 - protein, 131 aa, Rhodobaca barguzinensis
  REGION 1..131: note = tr|A0A2K8K5C3|A0A2K8K5C3_9RHOB 6-carboxytetrahydropterin synthase OS=Rhodobaca barguzinensis OX=441209 GN=BG454_01420 PE=4 SV=1
MFAVEVRDHIMIAHSLPSPVFGPAQGMHGATFTVDAAFMTESIDQHGLVVDIGLATDALAQVLAPLRYKNLDEVPEFEGKFTTTEFLCHHIFEQMATRVRAGQLSDAGRVLRLRITLHESHTARAWYEGDI

SEQ ID NO: 24927 - protein, 329 aa, unidentified
  source 1..329: note = Rhodobacteraceae bacterium
  REGION 1..329: note = tr|A0A3N9QCM4|A0A3N9QCM4_9RHOB 6-pyruvoyl tetrahydrobiopterin synthase OS=Rhodobacteraceae bacterium CH30 OX=2490538 GN=EHS17_10465 PE=4 SV=1
MLMRMLHIAKAGFEAARSLSAILHGHSFSVTAKADLPLADLRARLGAICAGLDYCDLNTRFSCPDDLTLIRHLASDLAMPAALSLRSAPGRGVELDAEGQARVWLKTGFEAAHWLPHVPEGHQCGRLHGHGFGVRLLADAGLADYAALEKAWQPLHALLQHGTLNRIAGLENPTSEVLACWLFDALSARLPAMAAVEVFETATAGSRFDAQGLRIWKEQRFEAAVPFDGQGRYTGHSYLVRLHLAGDIDPEQGWVRDFGEVKALFKPLYARLDHHALDQLPGIDATDCAGIARYLATHFALPQLVRIDLLENETDGALLWLDGGRACTR

SEQ ID NO: 24928 - protein, 135 aa, unidentified
  source 1..135: note = Rhodobacteraceae bacterium
  REGION 1..135: note = tr|A0A2V2LDX7|A0A2V2LDX7_9RHOB Uncharacterized protein OS=Rhodobacteraceae bacterium TG-679 OX=2072018; GN = DKT77_05600 PE=4 SV=1
MFALEVRDHIMIAHSLPGEAFGPAQGMHGATFVIDVAFFRETLTENDIVVDIGLAADALKRVIAPVNYKNLDELDLFGGKRSTTEVLCKYVFDAMAAEIAAGRLGEDAREIVRMKVTLNESHVARAWLEGPVAGA

SEQ ID NO: 24929 - protein, 117 aa, unidentified
  source 1..117: note = Rhodobacterales bacterium
  REGION 1..117: note = tr|B6B7B1|B6B7B1_9RHOB 6-carboxy-5,6,7,8-tetrahydropterin synthase; OS = Rhodobacterales bacterium Y4I OX=439496 GN=queD PE=3; SV = 1
MFRITKEFHFSASHQLTHLPPDHQCARLHGHNYVVVVELAAKELNSDGFVRDYHELKPLKDYIDGTFDHRHLNDVLDGYSTAENMAKHFYDWCHARWPEVAAVKVSETPKTWAEYRP

SEQ ID NO: 24930 - protein, 118 aa, unidentified
  source 1..118: note = Rhodobacterales bacterium
  REGION 1..118: note = tr|A0A1Z8A3A9|A0A1Z8A3A9_9RHOB 6-carboxy-5,6,7,8-tetrahydropterin synthase; OS = Rhodobacterales bacterium 52_120_T64 OX=1856301; GN = A9Q96_13970 PE=3 SV=1
MYRITKEFHFSASHQLKDLPSDHQCARLHGHNYIVVVELSSGTLNEHGFVRDYHELSALKRYIDDELDHRHLNDVLGDDLVTSERLAKHFYDWCKARLPETSAVRVSETPKTWAEYRP

SEQ ID NO: 24931 - protein, 122 aa, unidentified
  source 1..122: note = Rhodobiaceae bacterium
  REGION 1..122: note = tr|A0A349J564|A0A349J564_9RHIZ 6-carboxy-5,6,7,8-tetrahydropterin synthase; OS = Rhodobiaceae bacterium OX=2026785 GN=DCS39_06710 PE=3; SV = 1
MKLSREFSFDAAHSLGHYPGGHANTRVHGHSFRARVTLEGMPDENGQIVDLEEMGRLLNELRNQLDHQMLNEIDGLEQPTLENLCLFIWDNLQNSLPQISAVEVFRDSLGQSCLYQGSQHVH

SEQ ID NO: 24932 - protein, 120 aa, unidentified
  source 1..120: note = Rhodobiaceae bacterium
  REGION 1..120: note = tr|A0A2D7FSU8|A0A2D7FSU8_9RHIZ 6-carboxy-5,6,7,8-tetrahydropterin synthase; OS = Rhodobiaceae bacterium OX=2026785 GN=CML80_03995 PE=3; SV = 1
MKLTREILFDAAHSLAQYGPGHPNARVHGHSFRARITLSGAPDANGQIMDFESFGDVLEKLRKRLDHNMLNDIDGLGTPTLENLCLWMWSELHGDLPHISAIEVFRDSLGQSCLYEGEAT

SEQ ID NO: 24933 - protein, 119 aa, Rhodoblastus acidophilus
  REGION 1..119: note = tr|A0A212RWT2|A0A212RWT2_RHOAC 6-carboxy-5,6,7,8-tetrahydropterin synthase; OS = Rhodoblastus acidophilus OX=1074 GN=SAMN06265338_108100; PE = 3 SV=1
MPITITQAFTFEAAHRLPHVPETHRCRRLHGHSYRVELTLGGEVDPHTGFVVDFFDVEAAFAPVLATLDHHLLNEIEGLDNPTAENIALWIYRKVSPNLPPLQAVKVFETPMCWAEYRA

SEQ ID NO: 24934 - protein, 134 aa, Rhodoblastus acidophilus
  REGION 1..134: note = tr|A0A212RHI0|A0A212RHI0_RHOAC 6-pyruvoyl-tetrahydropterin synthase OS=Rhodoblastus acidophilus OX=1074 GN=SAMN06265338_104230 PE=4 SV=1
MYAVEVRDHIMIAHSFRGELFGPAQRLHGATFIVDVAFFREELTDDGVVADIGRAHEALKAALAPLAYRNLDDLDLFNGRQTTTEVLARHIFDALAAATRSGALGPGGEGVERIRVTLHESHLARAWFEGRVAL

SEQ ID NO: 24935 - protein, 117 aa, Rhodoblastus sphagnicola
  REGION 1..117: note = tr|A0A2S6N5K9|A0A2S6N5K9_9RHIZ 6-carboxy-5,6,7,8-tetrahydropterin synthase; OS = Rhodoblastus sphagnicola OX=333368 GN=CCR94_14000 PE=3; SV = 1
MTITQGFTFEAAHHLPHVPETHRCRRLHGHSYRVELTLSGEVDPHTGFVIDFFDVEAAFAPVLARLDHHLLNEVEGLQNPTAENIALWIFRKVSPDLPRLTAVKVFETPMCWAEFQA

SEQ ID NO: 24936 - protein, 134 aa, unidentified
  source 1..134: note = Rhodococcus enclensis
  REGION 1..134: note = tr|A0A1C4GBK1|A0A1C4GBK1_9NOCA 6-pyruvoyltetrahydropterin/6-carboxytetrahydropterin synthase OS=Rhodococcus enclensis OX=1049584; GN = GA0061093_11958 PE=4 SV=1
MNIDTLVRMFSIEIRRTFAVRQGLPAPVRDAKNLPPLMPADGFRVTMRVAFSFEDDQLGERGWFVDTDALDESVDRCAEQLASGAWPEIFDFRPSFENVAKWAFTELASSIPQLTYVELDNETIGVATRYVRSQ

SEQ ID NO: 24937 - protein, 129 aa, Rhodococcus erythropolis
  REGION 1..129: note = tr|T5HR89|T5HR89_RHOER Uncharacterized protein; OS = Rhodococcus erythropolis DN1 OX=1381122 GN=N601_21810; PE = 4 SV=1
MVVMFSIEIRRTFAVRQGLPAPVRDAKNLPPLMPAEGFRVTMRVGFSFEDDQLGERGWFVDTDALDESVDRCAERLASGVWPEIFDFRPSFENVAKWSFTELASTIPQLTYVELDNETIGVATRYVRSH

SEQ ID NO: 24938 - protein, 90 aa, Rhodococcus erythropolis
  REGION 1..90: note = tr|A0A1F2PMI3|A0A1F2PMI3_RHOER Uncharacterized protein OS=Rhodococcus erythropolis OX=1833 GN=RERY_67050; PE = 4 SV=1
MTMRVGFSFEDDQLGERGWFVDTDALDESVDRCAERLASGVWPEIFDFRPSFENVAKWSFTELASTIPQLTYVELDNETIGVATRYVRSH

SEQ ID NO: 24939 - protein, 134 aa, Rhodococcus qingshengii
  REGION 1..134: note = tr|A0A1X0M593|A0A1X0M593_9NOCA Uncharacterized protein OS=Rhodococcus qingshengii OX=334542; GN = BXO91_00330 PE=4 SV=1
MNIDTLVRMFSIEIRRTFAVRQGLPAPVRDAKNLPPLMPAEGFRVTMRVAFSFEDDQLGERGWFVDTDALDESVDRCAEQLASGAWPEIFDFRPSFENVAKWAFSELASSIPQLTYVELDNETIGVATRYVRSH

SEQ ID NO: 24940 - protein, 160 aa, Rhodococcus qingshengii
  REGION 1..160: note = tr|A0A4R5ZVP0|A0A4R5ZVP0_9NOCA 6-carboxytetrahydropterin synthase QueD OS=Rhodococcus qingshengii OX=334542 GN=queD PE=4 SV=1
MYGFRIVDKLQKIDEDIQRKELKYHTKRVLVSKEFTFDAAHHLHCYEGKCKNLHGHTYKVVFGISGYVDDRGLMMDFGDIKVIWKNEIEIHLDHRYLNETLPPMNTTAENIVVWIYEKMQTALAKEENKDQFLGARVEFVRLFETPTSYAEARREWMENE

SEQ ID NO: 24941 - protein, 134 aa, Rhodococcus sp.
  REGION 1..134: note = tr|A0A3G8ZTQ9|A0A3G8ZTQ9_9NOCA Uncharacterized protein OS=Rhodococcus sp. NJ-530 OX=2490853; GN = EHW12_02945 PE=4 SV=1
MNIDTLVRMFSIEIRRTFAVRQGLPAPVRDAKNLPPLMPAEGFRVTMRVAFSFEDDQLGERGWFVDTDALDESVDRCAEQLASGVWPEIFDFRPSFENVAKWAFSELASSIPQLTYVELDNETIGVATRYVRSQ

SEQ ID NO: 24942 - protein, 116 aa, Rhodococcus sp.; identical to SEQ ID NO: 21985
  REGION 1..116: note = tr|A0A2S7TR45|A0A2S7TR45_9NOCA 6-carboxy-5,6,7,8-tetrahydropterin synthase OS=Rhodococcus sp. SAORIC-690 OX=1923970 GN=BSZ31_07655 PE=3 SV=1

SEQ ID NO: 24943 - protein, 128 aa, Rhodococcus wratislaviensis
  REGION 1..128: note = tr|X0RB86|X0RB86_9NOCA 6-carboxy-5,6,7,8-tetrahydropterin synthase OS=Rhodococcus wratislaviensis NBRC 100605 OX=1219028 GN=RW1_051_00490; PE = 3 SV=1
MTEHMEIFREFNFEAAHRLPNVPDGHKCSRLHGHSYRFTVHVAGPVDEQFGWVMDFGDLKSVVNPVVARLDHYYLNDIDGLKNPTSEVLAKWIWDELEENLPLMTAVTVRETCTSGCTYRGTRAVLTS

SEQ ID NO: 24944 - protein, 150 aa, unidentified
  source 1..150: note = Rhodocyclaceae bacterium
  REGION 1..150: note = tr|A0A5C7KFS3|A0A5C7KFS3_9RHOO 6-carboxytetrahydropterin synthase QueD OS=Rhodocyclaceae bacterium OX=1898103 GN=queD PE=4 SV=1
MLITRRLEFDAGHRIPDHKSQCRHLHGHRYAIEITLSGSVIDKAGDAANGMVMDFSQVKDLANTHLVKEWDHAFLAFAGDTAIVDFLSSLPGHKTVLLDRVPTAENLARIAFERLDAVYRDTYGNHLRLEQVRLYETPNCWADAIRTRLD

SEQ ID NO: 24945 - protein, 150 aa, unidentified
  source 1..150: note = Rhodocyclaceae bacterium
  REGION 1..150: note = tr|A0A524BBQ1|A0A524BBQ1_9RHOO 6-carboxytetrahydropterin synthase QueD OS=Rhodocyclaceae bacterium OX=1898103 GN=queD PE=4 SV=1
MLITRRLEFDAGHRIPDHKSQCRHLHGHRYAIEITLSGSVIDKAGDAANGMVMDFSQVKDLAKAHLVDLWDHAFLAFAGDTKIVEFLQSIPGHKTVILDRVPTAENLARLAFEILDGAYRDTYGNHLRLEQVRLYETPNCWSDAIRSRLD

SEQ ID NO: 24946 - protein, 150 aa, unidentified
  source 1..150: note = Rhodocyclales bacterium
  REGION 1..150: note = tr|A0A1G3HLR8|A0A1G3HLR8_9RHOO 6-carboxytetrahydropterin synthase QueD OS=Rhodocyclales bacterium RIFCSPLOWO2_02_FULL_63_24 OX=1802018; GN = A3H93_10565 PE=4 SV=1
MRITRRLEFDAGHRIPNHQSQCRHLHGHRYALEITLAGGVIDAAGQPDDGMVMDFSELKAIAKQHVVDAWDHAFLVWRGDRTVADFLASLPNHKTVVLDAVPTAENLARIAFSILDPLYHDNYGNHLQLERIRLYETPNCWADATRQDLA

SEQ ID NO: 24947 - protein, 152 aa, unidentified
  source 1..152: note = Rhodocyclales bacterium
  REGION 1..152: note = tr|A0A363SG74|A0A363SG74_9RHOO 6-carboxytetrahydropterin synthase QueD OS=Rhodocyclales bacterium OX=2072421 GN=queD PE=4 SV=1
MRITRRLEFDSGHRIPDHQSQCRHLHGHRYAIEITLLGDIIRQAGSPLNGMVMDFSDIKTLARQNLVDAWDHAFLVWRGDSALMSFLESLPGHKTVVLEVVPTAENLAAEAFRLLDRVYRDTYGNHLRLEQVRLYETPNCWADALRGEAGQD

SEQ ID NO: 24948 - protein, 147 aa, unidentified
  source 1..147: note = Rhodoferax ferrireducens
  REGION 1..147: note = tr|Q21V74|Q21V74_RHOFT Uncharacterized protein; OS = Rhodoferax ferrireducens (strain ATCC BAA-621 / DSM 15236 / T118) OX=338969 GN=Rfer_2613 PE=4 SV=1
MLTITRKMEFDAGHRIPDHKSQCRNMHGHRYTLLITLTGDVVQQEGESDNGMIMDFGDIKALANQHLVKLWDHAFIVYAHDTVVRDFLDSMPNHKTVVIDRVPTVENLAKIAFDILKEVYHGRYGRHLSLAKVTLYETPNCWAEIDG

SEQ ID NO: 24949 - protein, 134 aa, unidentified
  source 1..134: note = Rhodoferax koreense
  REGION 1..134: note = tr|A0A1P8JQ13|A0A1P8JQ13_9BURK 6-carboxy-5,6,7,8-tetrahydropterin synthase OS=Rhodoferax koreense OX=1842727 GN=RD110_00115 PE=3 SV=1
MSQPHTPGTEALLGRFEVSQRFFFDAAHTLQREIEAESSARIHGHTYHAEVTLAGQPDPQTGMVVDLGQVRAHIATLREQLDHRLLDEVPGLGVPTLENLCRFIADGMASYASMLSAVRVWRESTGDGCVLRLG

SEQ ID NO: 24950 - protein, 122 aa, Rhodoferax sp.
  REGION 1..122: note = tr|A0A515EMA4|A0A515EMA4_9BURK 6-carboxy-5,6,7,8-tetrahydropterin synthase OS=Rhodoferax sp. Gr-4 OX=2527691 GN=EXZ61_06070 PE=3 SV=1
MMFEISQRFFFDAAHTLQREIEAEGSRRVHGHTYHAEVFVQGEANASGMVMDLGFIRREVAVLRESLDHHFLDEVPDLGTPTLENLCAYIYKRLKPILPNLSAVTVERHSIGDKCTYRPAQG

SEQ ID NO: 24951 - protein, 134 aa, Rhodoferax sp.
  REGION 1..134: note = tr|A0A255ZK02|A0A255ZK02_9BURK 6-carboxy-5,6,7,8-tetrahydropterin synthase OS=Rhodoferax sp. TH121 OX=2022803 GN=CHU94_05855 PE=3 SV=1
MTQAPAIPIPRRCEVSQKFFFDAAHTLKRTLDDAEEVAGSRRIHGHTYHAEVTVAGNADEDTGMVVDLGHLRNAIAVLRPQLDHHLLDEVEGLGPPTLENLAAFIWRAMAREFSGLWQVRVWREGIGDSCTLRA

SEQ ID NO: 24952 - protein, 129 aa, unidentified
  source 1..129: note = Rhodohalobacter barkolensis
  REGION 1..129: note = tr|A0A2N0VMD6|A0A2N0VMD6_9BACT 6-carboxy-5,6,7,8-tetrahydropterin synthase; OS = Rhodohalobacter barkolensis OX=2053187 GN=CWD77_04295; PE = 3 SV=1
MPTWTLHTEFKFDAAHFIDGYDGKCGRMHGHTYKVHISAKSHELNPSKYLKSADMVCDFKELKWAASDSKKGGFDHSVLNEEIPVATTAERIAEYIHKETVKRIPGNIELKVTVWETDTSWVEYTDQDV

SEQ ID NO: 24953 - protein, 145 aa, unidentified
  source 1..145: note = Rhodohalobacter barkolensis
  REGION 1..145: note = tr|A0A2N0VLS6|A0A2N0VLS6_9BACT 6-carboxy-5,6,7,8-tetrahydropterin synthase; OS = Rhodohalobacter barkolensis OX=2053187 GN=CWD77_06585; PE = 3 SV=1
MALIFVTRKAHFNASHRLHNPGKSDEWNQKTFGKCNNPNWHGHNYVLEVTVAGEPDPETGYVIDLGKLKSIIQERILDPCDHKNLNIEVPFLDNIIPTSENLVKAFFDELEHDVTDAAYGKSKLYSVKLFETERNIAEYCPYRAV

SEQ ID NO: 24954 - protein, 129 aa, unidentified
  source 1..129: note = Rhodohalobacter sp.
  REGION 1..129: note = tr|A0A371QN11|A0A371QN11_9BACT 6-carboxy-5,6,7,8-tetrahydropterin synthase; OS = Rhodohalobacter sp. SW132 OX=2293433 GN=DYD21_09385; PE = 3 SV=1
MPTWVLHTEFKFDAAHFIDGYDGKCGRMHGHTYKVHIKAKSHKLNPSKYLKTPDMVCDFKELKWAASDSKKGGLDHSVLNEEIPVATTAERIAEYIHKETKNRIPADIDLHVTVWETETSWVEYTDQDV

SEQ ID NO: 24955 - protein, 143 aa, unidentified
  source 1..143: note = Rhodohalobacter sp.
  REGION 1..143: note = tr|A0A371QN22|A0A371QN22_9BACT 6-carboxy-5,6,7,8-tetrahydropterin synthase; OS = Rhodohalobacter sp. SW132 OX=2293433 GN=DYD21_09145; PE = 3 SV=1
MIYVTRKSHFNAAHRLHNPDKTEEWNVKTFGKCNNPNWHGHNYRLEVTVAGEADPDTGYVIDLGVLKNIIQKRILDKCDHKNLNLEVSFLKGINPTSENLVKAFFQELEDDINAKSYGSSFLYSVKLYETERNIAEYRPNPRI

SEQ ID NO: 24956 - protein, 118 aa, unidentified
  source 1..118: note = Rhodomicrobium udaipurense
  REGION 1..118: note = tr|A0A037UZQ1|A0A037UZQ1_9RHIZ 6-carboxy-5,6,7,8-tetrahydropterin synthase; OS = Rhodomicrobium udaipurense JA643 OX=858455; GN = T281_02105 PE=3 SV=1
MKVTQSFRFEAAHRLPFVKDTHPCRRVHGHSYRVELQLEGPVDPETGFVVDFFDIEAAFGPLLKRLDHYYLNEVEGLENPTAENIAAWIWDRVKDALPQLTAVRVYETPECWAEYNGA

SEQ ID NO: 24957 - protein, 118 aa, Rhodomicrobium vannielii; identical to SEQ ID NO: 24956
  REGION 1..118: note = tr|E3I8B0|E3I8B0_RHOVT 6-carboxy-5,6,7,8-tetrahydropterin synthase; OS = Rhodomicrobium vannielii (strain ATCC 17100 / ATH 3.1.1 / DSM 162 / LMG 4299) OX=648757 GN=Rvan _0453 PE=3 SV=1

SEQ ID NO: 24958 - protein, 139 aa, Rhodonellum psychrophilum
  REGION 1..139: note = tr|U5BZ45|U5BZ45_9BACT 6-pyruvoyl tetrahydrobiopterin synthase OS=Rhodonellum psychrophilum GCM71 = DSM 17998 OX=1123057 GN=P872_07990 PE=4 SV=1
MIHVCRKEHFNAAHKLWNPNWTEEKNFQIFGPCSNVNWHGHNFELIVTVKGLPDPETGFVVDLKHLSTLIQTLVIEKVDHKNLNLDVDFMFGKMASCENLVMEFWKILAPAVNQIVPHGKLYKLTLYETPRNFVEYFGE

SEQ ID NO: 24959 - protein, 136 aa, Rhodonellum psychrophilum
  REGION 1..136: note = tr|U5C2U5|U5C2U5_9BACT 6-carboxy-5,6,7,8-tetrahydropterin synthase OS=Rhodonellum psychrophilum GCM71 = DSM 17998 OX=1123057 GN=P872_15010; PE = 3 SV=1
MKVTVFRKEHFNAAHRLNNPFWSDEKNENIFGKCNNKNFHGHNYELIVQIRGSVDPETGYLIDLKILSDIIKEHVLNRFDHKNLNLDTDEFQNLNPTAENIAVVIWNILRKQLEDKYDLTIRLYETERNFVEYDGN

SEQ ID NO: 24960 - protein, 164 aa, unidentified
  source 1..164: note = Rhodopirellula bahusiensis
  REGION 1..164: note = tr|A0A2G1WDL1|A0A2G1WDL1_9PLAN 6-pyruvoyl tetrahydrobiopterin synthase OS=Rhodopirellula bahusiensis; OX = 2014065 GN=CEE69_01755 PE=4 SV=1
MSATFRVEVSKEQFIFSAAHFITFAGDICERIHGHNYGVRVSVEGPLDENRYVVDFIALRDAVLKQTQALDHHVILPRDHQEILITQDETETTARFRERRWVFPNEDCIIMPVINTTAEEIARVIAENVREQTREQFGSALSSIEVAVDENAGQWGVCKLPWNE

SEQ ID NO: 24961 - protein, 137 aa, unidentified
  source 1..137: note = Rhodopirellula bahusiensis
  REGION 1..137: note = tr|A0A2G1VYE6|A0A2G1VYE6_9PLAN 6-carboxytetrahydropterin synthase QueD OS=Rhodopirellula bahusiensis OX=2014065 GN=queD PE=4 SV=1
MRRFSFCAGHRLVGHEGKCQNLHGHNYVLEVYVTGAEQDAVGRILDFKQLKTRCKDWIDENWDHTFVLWEKDQNGLDAIRSSEPHRIYELDSNPTAENMAKHFLEQICPKILGDSGATAYKVRLWESEETYAEVELD

SEQ ID NO: 24962 - protein, 126 aa, Rhodopirellula baltica
  REGION 1..126: note = tr|L7CJY9|L7CJY9_RHOBT 6-pyruvoyl tetrahydrobiopterin synthase OS=Rhodopirellula baltica SWK14 OX=993516 GN=RBSWK_01697 PE=4 SV=1
MVGHEGKCQNLHGHNYVLEVYVTGEEQDAIGRILDFKQLKTRCKNWIDENWDHTFVLWEKDQNGLDAIRSSEPHRIYELESNPTAENMAKHFLEKICPSILGDSGATAYKVRLWESEETYAEVELD

SEQ ID NO: 24963 - protein, 164 aa, Rhodopirellula baltica
  REGION 1..164: note = tr|K5DNV8|K5DNV8_RHOBT 6-pyruvoyl-tetrahydropterin synthase OS=Rhodopirellula baltica SH28 OX=993517; GN = RBSH_00179 PE=4 SV=1
MSATFRVDVSKEQFIFSAAHFITFAGDICERIHGHNYGVRVSVEGPLDENRYVVDFIALRDAVLKQTQALDHHVILPRDHKEILVTQDETETTARFRERRWVFPNEDCIIMPVINTTAEEIARVIAENVREQTKEQFGKALSSIEVAVDENAGQWGVCKLPWNE

SEQ ID NO: 24964 - protein, 142 aa, unidentified
  source 1..142: note = Rhodopirellula europaea
  REGION 1..142: note = tr|M5RYS1|M5RYS1_9PLAN 6-pyruvoyl tetrahydrobiopterin synthase OS=Rhodopirellula europaea SH398 OX=1263868 GN=RESH_04816 PE=4 SV=1
MSIRIMRRFTFCAGHRLVGHEGKCQNLHGHNYVLEVYVTGAEQDAVGRILDFKQLKTRCKNWIDENWDHTFVLWEKDQNGLDAIRSSEPHRIYELDSNPTAENMAKHFLEQICPSILGDSGATAYKVRLWESEETYAEVELD

SEQ ID NO: 24965 - protein, 137 aa, unidentified
  source 1..137: note = Rhodopirellula europaea
  REGION 1..137: note = tr|M2AX27|M2AX27_9PLAN 6-pyruvoyl tetrahydrobiopterin synthase OS=Rhodopirellula europaea 6C; OX = 1263867 GN=RE6C_05197 PE=4 SV=1
MRRFTFCAGHRLVGHEGKCQNLHGHNYVLEVYVTGAEQDAVGRILDFKQLKTRCKNWIDENWDHTFVLWEKDQNGLDAIRSSEPHRIYELDSNPTAENMAKHFLEQICPAILGDSGATAYKVRLWESEETYAEVELD

SEQ ID NO: 24966 - protein, 142 aa, unidentified
  source 1..142: note = Rhodopirellula islandica
  REGION 1..142: note = tr|A0A0J1BJA3|A0A0J1BJA3_RHOIS 6-carboxy-5,6,7,8-tetrahydropterin synthase; OS = Rhodopirellula islandica OX=595434 GN=RISK_001719 PE=3; SV = 1
MSIRIMRRFTFCAGHRLVGHEGKCQSLHGHNYVLEVYVTGKKQDAVGRILDFKQLKARCKDWIDENWDHTFVLWEKDQNGLDAIRSSEPHRIYELDSNPTAENMAKHFLEKVCPEILGDSGATAYKVRLWESEETYAEAELD

SEQ ID NO: 24967 - protein, 164 aa, unidentified
  source 1..164: note = Rhodopirellula islandica
  REGION 1..164: note = tr|A0A0J1BA84|A0A0J1BA84_RHOIS Queuosine biosynthesis QueD, PTPS-I / Folate biosynthesis protein PTPS-III OS=Rhodopirellula islandica OX=595434; GN = RISK_004725 PE=4 S V=1
MSATFRVDVSKEQFIFSAAHFITFAGDICERIHGHNYGVRVSVEGPLDENRYVVDFIALRDAVLKQTQALDHHVILPRDHKEILITQDETETTARFRERRWVFPNEDCILLPVINTTAEEIARVIAENVREQTREQFGDALSSIEVAVDENAGQWGICKLPWNE

SEQ ID NO: 24968 - protein, 138 aa, unidentified
  source 1..138: note = Rhodopirellula maiorica
  REGION 1..138: note = tr|M5RKX6|M5RKX6_9PLAN 6-pyruvoyl tetrahydrobiopterin synthase OS=Rhodopirellula maiorica SM1 OX=1265738 GN=RMSM_03249 PE=4 SV=1
MRRFTFCAGHRLVGHEGKCQNLHGHNYLVEIYVTGREQDSVGRILDFKMLKERCKGWLDENWDHSFILWDQDENGLAAIRSSEPHRIYELASNPTAENMALHLLNEVCPKILEGTGASAFKVRLWESEETCAEVELDA

SEQ ID NO: 24969 - protein, 166 aa, unidentified
  source 1..166: note = Rhodopirellula maiorica
  REGION 1..166: note = tr|M5S2D6|M5S2D6_9PLAN 6-pyruvoyl-tetrahydropterin synthase OS=Rhodopirellula maiorica SM1 OX=1265738; GN = RMSM_01297 PE=4 SV=1
MTQATFRVDVTKEQFVFSAAHFITFAGDICERIHGHNYAVRASVEGPLDENRYVVDFIALRDAVLEQTTRLDHHIILPQDHAEIKVTSDETETTARFRDRRWVFPNDDCVILPVINTTAEEIARVIAERVREATRAKFGDALTWIEVAVDENCGQWGVCRLPWQNG

SEQ ID NO: 24970 - protein, 166 aa, unidentified
  source 1..166: note = Rhodopirellula sallentina
  REGION 1..166: note = tr|M5TYL2|M5TYL2_9PLAN 6-pyruvoyl-tetrahydropterin synthase OS=Rhodopirellula sallentina SM41 OX=1263870; GN = RSSM_04266 PE=4 SV=1
MTQPTFRVDVSKEQFVFSAAHFITFAGDICERIHGHNYGVRVSVEGPLDENRYVVDFIALRDAVLLQTQALDHHVILPRHHHEIKVSQDETETTVRFRERRWVFPNEDAVILPVINTTAEEIARVIAERVREQTREQFGDALTFIEVAVDENCGQWGVCRLPWHVG

SEQ ID NO: 24971 - protein, 136 aa, unidentified
  source 1..136: note = Rhodopirellula sallentina
  REGION 1..136: note = tr|M5U4X5|M5U4X5_9PLAN 6-pyruvoyl tetrahydrobiopterin synthase OS=Rhodopirellula sallentina SM41 OX=1263870 GN=RSSM_02059 PE=4 SV=1
MRRFTFCAGHRLVGHEGKCQNLHGHNYVLEVYVTGQEQDAVGRILDFKQLKTRCKTWIDENWDHTFVLWDKDQNGLDAIRSSVPHRIYELDCNPTAENMAKHFLHEICPKLLDQSGATAFKVRLWESEETYAEVTI

SEQ ID NO: 24972 - protein, 158 aa, Rhodopirellula sp.
  REGION 1..158: note = tr|A0A2A2WGJ5|A0A2A2WGJ5_9PLAN 6-pyruvoyl tetrahydrobiopterin synthase OS=Rhodopirellula sp. SM50; OX = 595453 GN=CKO51_06635 PE=4 SV=1
MALTIMRRIKFCAGHRLFGHGGKCEHFHGHNYVADFFVQGEVQDDVGRILDFSVLKQRVKGWIDEHWDHSFLIHQDDANARQALELVKPCRFFVMPYNPTAENMAKYLLEEMCPDVLEGTGARACQVRIWETDESYAEASLDPTGGEAVTYSAMAVGE

SEQ ID NO: 24973 - protein, 158 aa, Rhodopirellula sp.
  REGION 1..158: note = tr|A0A255R8J0|A0A255R8J0_9PLAN 6-pyruvoyl tetrahydrobiopterin synthase OS=Rhodopirellula sp. MGV; OX = 2023130 GN=CGZ80_06520 PE=4 SV=1
MALTIMRRIKFCAGHRLLHHGGKCENFHGHNYVADFFVQGEQQDDVGRVIDFSDLKSRVKGWIDENWDHGFLIHQDDDNARTALEMVTPSRIFLMPYNPTAENMAKYLLEEMCPAALDGSGAKAVRVRVWETDESFAEASLDPVGGSTNLYSEMAVGQ

SEQ ID NO: 24974 - protein, 133 aa, Rhodoplanes elegans
  REGION 1..133: note = tr|A0A327JRX0|A0A327JRX0_9RHIZ Uncharacterized protein OS=Rhodoplanes elegans OX=29408 GN=CH338_29465; PE = 4 SV=1
MYAVEVRHHIMIAHSFRGAVFGPAQALHGATFVVDAAILAEALDQNGIVVDIGRLDEALKAVLAPLNYKNLDDLPQFAGKNTTTEFLTRHVHDTLAETARAGGLGRDGRELHAIRVTISESHVARAWYEAPLW

SEQ ID NO: 24975 - protein, 133 aa, unidentified
  source 1..133: note = Rhodoplanes piscinae
  REGION 1..133: note = tr|A0A327K047|A0A327K047_9RHIZ Uncharacterized protein OS=Rhodoplanes piscinae OX=444923 GN=CH340_16490; PE = 4 SV=1
MYAVEVRHHIMIAHSFRGAVFGPAQALHGATFVIDAAILAETLDENGIVVDIGRAHEALKAVLAPLDYQNLDALPEFAGQNTTTEFLTRHVFDRLAAAARAGDLGRDGRALAAIRVTISESHVARAWYEAPLW

SEQ ID NO: 24976 - protein, 133 aa, unidentified
  source 1..133: note = Rhodoplanes piscinae
  REGION 1..133: note = tr|A0A447D0U6|A0A447D0U6_9RHIZ Uncharacterized protein OS=Rhodoplanes piscinae OX=444923; GN = RHODGE_RHODGE_04697 PE=4 SV=1
MYAVEVRHHIMIAHSFRGAVFGPAQALHGATFVVDAAILAETLDENGIVVDIGRAHEALKAVLAPLDYQNLDALPEFAGQNTTTEFLTRHIFDRLAAAARAGDLGRDGRALAAIRVTISESHVARAWYEAPLW

SEQ ID NO: 24977 - protein, 133 aa, Rhodoplanes roseus
  REGION 1..133: note = tr|A0A327KKK8|A0A327KKK8_9RHIZ Uncharacterized protein OS=Rhodoplanes roseus OX=29409 GN=CH341_28530 PE=4; SV = 1
MYAVEVRHHIMIAHSFRGAVFGPAQALHGATFVIDAAFLAETLDDNGIVVDIGRADTALKEVLAPLNYKNLDDVEEFAGRNTTTEVLTRHVFDRLAEAARAGALGRDGRALAAIRVTISESHVARAWYEAPLW

SEQ ID NO: 24978 - protein, 118 aa, Rhodoplanes sp.
  REGION 1..118: note = tr|A0A127EXY1|A0A127EXY1_9RHIZ 6-carboxy-5,6,7,8-tetrahydropterin synthase OS=Rhodoplanes sp. Z2-YC6860 OX=674703 GN=RHPLAN_37990 PE=3 SV=1
MYTICKRFAFSASHVIGGLAPDHPCGRLHGHNYQVEVNLQSSALDDTGFVRDFHELAALKQFIDGTLDHKHLNDVLGHDRTTTEVICKWLYDWCKTRWPEVTAVRVSETPNTWAEYRP

SEQ ID NO: 24979 - protein, 133 aa, Rhodoplanes sp.
  REGION 1..133: note = tr|A0A127EVW2|A0A127EVW2_9RHIZ 6-pyruvoyl tetrahydropterin synthase OS=Rhodoplanes sp. Z2-YC6860; OX = 674703 GN=RHPLAN_29890 PE=4 SV=1
MFTVEVRDHIMIAHSFRGAVFGPAQALHGATFVVDAAFIADTLDANSIVIDIGRAHEVLKATLGPLNYKNLDDVPEFKGKNTTTEFLTKHIYDQLAKAARGDGLGRPGRELKAIRITISESHVARASYEAPLW

SEQ ID NO: 24980 - protein, 118 aa, Rhodopseudomonas faecalis
  REGION 1..118: note = tr|A0A318TSA5|A0A318TSA5_9BRAD 6-carboxy-5,6,7,8-tetrahydropterin synthase; OS = Rhodopseudomonas faecalis OX=99655 GN=BJ122_11117 PE=3; SV = 1
MKITQAFRFEAAHRLPNVPPTHRCHRMHGHSYRVELQLQGDVDATTGFVVDFFEIEAAFGGLLAQLDHHCLNDIEGLENPTAENIAIWIWQRTKPALPQLAQVRVFETPDCWAEYDGA

SEQ ID NO: 24981 - protein, 122 aa, Rhodopseudomonas palustris
  REGION 1..122: note = tr|Q2IT94|Q2IT94_RHOP2 6-carboxy-5,6,7,8-tetrahydropterin synthase; OS = Rhodopseudomonas palustris (strain HaA2) OX=316058; GN = RPB_3873 PE=3 SV=1
MKITQAFRFEAAHQLPNVPETHRCRRMHGHSYRVELQLSGPINPTTGFVLDFFEIEAAFGPLLARLDHYCLNDIEGLENPTAENIAIWIWDRTKPGLPALSNVRVYETPDCWADYAGEDTGV

SEQ ID NO: 24982 - protein, 120 aa, Rhodopseudomonas palustris
  REGION 1..120: note = tr|E6VHW7|E6VHW7_RHOPX 6-carboxy-5,6,7,8-tetrahydropterin synthase; OS = Rhodopseudomonas palustris (strain DX-1) OX=652103; GN = Rpdx1_3859 PE=3 SV=1
MKITQAFRFEAAHYLPNVPETHRCKRMHGHSYRVELQLSGPVDPLTGFVVDFFEIEAAFGPLLKRLDHHCLNEIEGLDNPTAENIAVWIWQRTKPELPQLCGVRVYETSDCWADYAGEDD

SEQ ID NO: 24983 - protein, 120 aa, unidentified
  source 1..120: note = Rhodopseudomonas pentothenatexigens
  REGION 1..120: note = tr|A0A336JYU6|A0A336JYU6_9BRAD 6-carboxy-5,6,7,8-tetrahydropterin synthase; OS = Rhodopseudomonas pentothenatexigens OX=999699; GN = SAMN05892882_14319 PE=3 SV=1
MKITQAFRFEAAHYLPNVPETHRCKRMHGHSYRVELQLCGPVNPDTGFVLDFFEIEAVFGPLLKRLDHYCLNEIEGLENPTAENIAVWIWRRTKPELPQLCGVRVYETSDCWADYAGEDD

SEQ ID NO: 24984 - protein, 122 aa, unidentified
  source 1..122: note = Rhodopseudomonas pseudopalustris
  REGION 1..122: note = tr|A0A1H8PBR4|A0A1H8PBR4_9BRAD 6-carboxy-5,6,7,8-tetrahydropterin synthase; OS = Rhodopseudomonas pseudopalustris OX=1513892; GN = SAMN05444123_102490 PE=3 SV=1
MKITQAFRFEAAHQLPNVPETHRCRRMHGHSYRVELQLSGPVNPTTGFVLDFFEIEASFGPLLARLDHYCLNDIEGLENPTAENIAIWIWTRTKPSLSALSNVRVYETPDCWADYAGEDAGD

SEQ ID NO: 24985 - protein, 122 aa, Rhodopseudomonas sp.
  REGION 1..122: note = tr|A0A0N0KJB8|A0A0N0KJB8_9BRAD 6-carboxy-5,6,7,8-tetrahydropterin synthase; OS = Rhodopseudomonas sp. AAP120 OX=1523430 GN=IP86_05100; PE = 3 SV=1
MKITQAFRFEAAHHLPHVPETHRCKRMHGHSYRVELQLSGPVNPKTGFVLDFFEIEAAFGPLLARLDHYCLNDVEGLENPTAENIAIWIWDRTKPTLAALSNVRVYETQDCWADYGGEDRGV

SEQ ID NO: 24986 - protein, 131 aa, unidentified; identical to SEQ ID NO: 22137
  source 1..131: note = Rhodospirillaceae bacterium
  REGION 1..131: note = tr|A0A1Z8LM99|A0A1Z8LM99_9PROT Uncharacterized protein OS=Rhodospirillaceae bacterium TMED8 OX=1986645; GN = CBB68_09345 PE=4 SV=1

SEQ ID NO: 24987 - protein, 118 aa, unidentified; identical to SEQ ID NO: 22136
  source 1..118: note = Rhodospirillaceae bacterium
  REGION 1..118: note = tr|A0A2E2MM33|A0A2E2MM33_9PROT 6-carboxy-5,6,7,8-tetrahydropterin synthase; OS = Rhodospirillaceae bacterium OX=1898112 GN=CMM77_08075; PE = 3 SV=1

SEQ ID NO: 24988 - protein, 132 aa, unidentified
  source 1..132: note = Rhodospirillales bacterium
  REGION 1..132: note = tr|A0A257VL86|A0A257VL86_9PROT Uncharacterized protein OS=Rhodospirillales bacterium 12-71-4 OX=1970563; GN = B7Z53_00765 PE=4 SV=1
MFSLTVVDHIMIAHSFRGAAFGPAQRLHGATFIVEAEFRAPQLDDLHLLVDIGLAKDQLRAILAPLDYRNLDAEEAFAGKNTTTEYLCLHIHGLLAQACRDGVLGDGGRAVTGLKILLRESHVAWAAFEGPV

SEQ ID NO: 24989 - protein, 175 aa, unidentified
  source 1..175: note = Rhodospirillales bacterium
  REGION 1..175: note = tr|A0A259MFM2|A0A259MFM2_9PROT 6-pyruvoyl tetrahydropterin synthase OS=Rhodospirillales bacterium 39-66-50 OX=1970570 GN=B7X63_20315 PE=4 SV=1
MFSLVFTRRYSMAHRLIADPAGKCAIPHGHNEQVIARLQSAAPQRLDGGANMVVPFDRAKARWHRFIDDQVDHAFQLGAGDPMIDWFRAHEPQRLGRLLVTPGDPTTEMLAACLMAKLNAFLAADGNGLRCVELTVEETPTNAVTLAGDPADVLPAGDGAGWWVRADDSINDLAS

SEQ ID NO: 24990 - protein, 133 aa, unidentified
  source 1..133: note = Rhodospirillum centenum
  REGION 1..133: note = tr|B6IVH4|B6IVH4_RHOCS 6-pyruvoyl tetrahydropterin synthase, putative OS=Rhodospirillum centenum (strain ATCC 51521 / SW) OX=414684 GN=RC1_2930 PE=4 SV=1
MYSLTVRDHMMIAHSFVGAVFGPAQELHGATFLVDAEFRRPSLSADGLVVDIGLASALLKEVLAPLTYRNLDGLPDFRGRNTTTEFLAGEIFRRLRARIADGALGDDGRALVGLRVELHESHVARAAFEGPLP

SEQ ID NO: 24991 - protein, 191 aa, Rhodospirillum rubrum
  REGION 1..191: note = tr|Q2RTB4|Q2RTB4_RHORT Uncharacterized protein; OS = Rhodospirillum rubrum (strain ATCC 11170 / ATH 1.1.1 / DSM 467 / LMG 4362 / NCIB 8255 / S1) OX=269796; GN = Rru_A1831PE=4 SV=1
MFEITRKIEIDAGHRIREHGSKCRNLHGHRYQIHVSVRSDQLVAGGSESGMVADFSFLKELMISEIDGPCDHAFILDAEDTLYVELFGLREVAQAVRRDARAAPALSAQGSKMYVVPFAPTAENLAAHWHALLAPLVSAHGKGGIFLAAVRAFETPNCEATFPAPGRFSVIEEAPPRLAEPLALAAYRDHA

SEQ ID NO: 24992 - protein, 135 aa, unidentified
  source 1..135: note = Rhodothermaceae bacterium
  REGION 1..135: note = tr|A0A2E3QZ45|A0A2E3QZ45_9BACT 6-carboxy-5,6,7,8-tetrahydropterin synthase; OS = Rhodothermaceae bacterium OX=2026787 GN=CMM85_13870; PE = 3 SV=1
MPTVYVTRKAHFNAAHRLHNPDQSAEWNQATFGKCNSPNWHGHNYELDVTVAGEPDPQTGFVVDLAALKHLIEAHVVEPLDHKNLNLDVPFLEGKKTSTETLAVAIWEQLAPHVPGLYEVVLRETHNNSVVYRGE

SEQ ID NO: 24993 - protein, 127 aa, unidentified
  source 1..127: note = Rhodothermaceae bacterium
  REGION 1..127: note = tr|A0A424HMT1|A0A424HMT1_9BACT 6-carboxy-5,6,7,8-tetrahydropterin synthase; OS = Rhodothermaceae bacterium TMED105 OX=1986665; GN = CBC65_006525 PE=3 SV=1
MPTWTLHTVFTFDAAHYIEGYDGKCANMHGHTYKVQMSAKSTVLHPSKYLPTADMVCDFKELKWPATDTEKGGFDHGLLNDVMETATTAERLAELIHKRTMERIPSSIQLTVTVWETPTSWVEYSDE

SEQ ID NO: 24994 - protein, 139 aa, unidentified; identical to SEQ ID NO: 20366
  source 1..139: note = Rhodothermaeota bacterium
  REGION 1..139: note = tr|A0A2A5XA94|A0A2A5XA94_9BACT 6-carboxytetrahydropterin synthase QueD OS=Rhodothermaeota bacterium MED-G18 OX=1986239 GN=CNE34_01700 PE=4 SV=1

SEQ ID NO: 24995 - protein, 127 aa, unidentified; identical to SEQ ID NO: 24993
  source 1..127: note = Rhodothermaeota bacterium
  REGION 1..127: note = tr|A0A368D8J1|A0A368D8J1_9BACT 6-carboxy-5,6,7,8-tetrahydropterin synthase; OS = Rhodothermaeota bacterium MED-G64 OX=2164156; GN = DBW78_01645 PE=3 SV=1

SEQ ID NO: 24996 - protein, 138 aa, Rhodothermus marinus
  REGION 1..138: note = tr|D0MCY8|D0MCY8_RHOM4 6-carboxy-5,6,7,8-tetrahydropterin synthase; OS = Rhodothermus marinus (strain ATCC 43812 / DSM 4252 / R-10) OX=518766 GN=Rmar_0192 PE=3 SV=1
MPTVYVTRRVHFNAAHRLHNPARSEAWNRETFGPCNHPNWHGHNYVLEVTVAGEPDPETGFVLNLSHLKEILETRILQKLDHKNLNLDVDFLQGVIPTTENLAVAIWRELEDALPAGRLHRIRLYETEHNYVEYYGEE

SEQ ID NO: 24997 - protein, 156 aa, Rhodothermus marinus
  REGION 1..156: note = tr|D0MDN2|D0MDN2_RHOM4 Uncharacterized protein; OS = Rhodothermus marinus (strain ATCC 43812 / DSM 4252 / R-10) OX=518766 GN=Rmar_0320 PE=4 SV=1
MKVAKRFRFEAAHRLPWHPGACRHLHGHSYRLVVGLEGNPDARGILVDFQDLKRLVQPLIDTWDHATLVASDDTALQDALDALGSRYVVLPFDSTAENLCAYVADYLIREAGDWLRARGVRRLWVRLAETETSFAETERALIRDVRPEPAAHAEAR

SEQ ID NO: 24998 - protein, 156 aa, Rhodothermus profundi
  REGION 1..156: note = tr|A0A1M6VW74|A0A1M6VW74_9BACT 6-pyruvoyltetrahydropterin/6-carboxytetrahydropterin synthase OS=Rhodothermus profundi OX=633813; GN = SAMN04488087_2138 PE=4 SV=1
MKIAKQFRFEAAHRLPWHPGACRHLHGHSYRLTVGLEGTPDARGILVDFQDLKRLLNPLIESWDHATLVASDDTALQEALDVLGSRYVVLPFDSTAENLCTYVADYLIREAGEWLRARGVRRLWVRLAETETSFAETECALVSDVRPQPATHAETH

SEQ ID NO: 24999 - protein, 138 aa, Rhodothermus profundi
  REGION 1..138: note = tr|A0A1M6TV62|A0A1M6TV62_9BACT 6-carboxy-5,6,7,8-tetrahydropterin synthase; OS = Rhodothermus profundi OX=633813 GN=SAMN04488087_1548; PE = 3 SV=1
MPTVYVTRRVRFSAAHRLHNPARSEAWNQKTFGLCNHPNWHGHNYVLEVTVAGEPDPETGFVLNLSHLKEILETCILKKLDHKNLNLDVDFLQGVIPTTENLAIAIWRELESALPKGRLHCVRLYETEHNYVEYYGEE

SEQ ID NO: 25000 - protein, 179 aa, Rhodovarius sp.
  REGION 1..179: note = tr|A0A437MEF6|A0A437MEF6_9PROT 6-carboxytetrahydropterin synthase OS=Rhodovarius sp. CCP-6 OX=1979269 GN=EOD42_13010 PE=4 SV=1
MFSLVFSRRYAMAHRLTSGLSEACAIPHGHNETVTVTLRATSPSRLDGGANMVEPFERAKATWHRWIDQSLDHSLHLSGDDPLLDWFRVREPHRLARILVTPGDPTTEVLALCLMSKLNAFLAADGGRLFCAAIRVEETPTNTVTFEGDPLPMLPRLMQAEPWWLRADMSINDLMQVPA

SEQ ID NO: 25001 - protein, 133 aa, Rhodovarius sp.
  REGION 1..133: note = tr|A0A437MNM5|A0A437MNM5_9PROT 6-carboxytetrahydropterin synthase OS=Rhodovarius sp. CCP-6 OX=1979269 GN=EOD42_03670 PE=4 SV=1
MFSLTVVDHIMVAHSFRGKEFGPAQRLHGATFVVEAEFRAPKLDDLHLLIDIGLAKDELRKILSAIDYRNLDEEPVFAGKNTTTEYLCLHIHGLLAEACRDGRMGPGGAGVTGIKVLLRESHVAWAAFEGPVA

SEQ ID NO: 25002 - protein, 132 aa, Rhodovulum sp.
  REGION 1..132: note = tr|J5PUW0|J5PUW0_9RHOB PTPS-like protein; OS = Rhodovulum sp. PH10 OX=1187851 GN=A33M_3862 PE=4 SV=1
MFALEVRRHVMIAHSFRGAVFGPAQALHGATFLVDAAFMTETLDPHGLVVDIGRAGDVLEGALAPLAYRNLDDLPDFLGVNTTTEFLAKHIHDRLAEAARAGALGRAASEIAAIRVTLSESHVARAWYEAPP

SEQ ID NO: 25003 - protein, 132 aa, Rhodovulum sp.; identical to SEQ ID NO: 21007
  REGION 1..132: note = tr|A0A2E2JV44|A0A2E2JV44_9RHOB 6-carboxytetrahydropterin synthase OS=Rhodovulum sp.; OX = 34009 GN=CMM86_10795 PE=4 SV=1

SEQ ID NO: 25004 - protein, 131 aa, Rhodovulum sulfidophilum
  REGION 1..131: note = tr|A0A2W5NBK0|A0A2W5NBK0_RHOSU Uncharacterized protein OS=Rhodovulum sulfidophilum OX=35806; GN = DI556_07785 PE=4 SV=1
MFAVEVRDHVMVAHSLPSKTFGPAQGLHGATFVVDAAFFAEELDPEGLVVDIGLATEALGEVLAPLRYANLDEKPEFLGRFTTTEFLCKHIFDDLAALIETGRLGDSKRLARLRITLHESHVAKAWYEARL

SEQ ID NO: 25005 - protein, 280 aa, unidentified
  source 1..280: note = Richelia intracellularis
  REGION 1..280: note = tr|M1WZP4|M1WZP4_9NOST 6-pyruvoyl tetrahydrobiopterin synthase OS=Richelia intracellularis HH01 OX=1165094 GN=RINTHH_16070 PE=4 SV=1
MQCIVNRRAKFSASHRYWLPEISESENLEKFSACSKYPGHGHNYVLFVSMAGKLNEYGMVLNLSDVKHIIKKEITSQLDFSYLNNVWSEFEETLPTTENIARVIWQRLAPHLPLVRVRLFESSELWTDYMGNSMESYLTISTHFSAAHRLASPLLNDEKNAEIYGKCSRPHGHGHNYHLEVTVKGEIDERTGMIVDLGTLHQVIENYVVELFDHTFLNKDILFFTQVVPTAENIALHISNLLQQPIQELGIQLYKVKLIESPNNSCEIYCDQPVLRGVQL

SEQ ID NO: 25006 - protein, 280 aa, unidentified; identical to SEQ ID NO: 25005
  source 1..280: note = Richelia sp.
  REGION 1..280: note = tr|A0A3B9F5P2|A0A3B9F5P2_9NOST 6-carboxytetrahydropterin synthase OS=Richelia sp.; OX = 2053605 GN=DCG18_01125 PE=4 SV=1

SEQ ID NO: 25007 - protein, 172 aa, Rickettsia africae
  REGION 1..172: note = tr|C3PML9|C3PML9_RICAE Putative 6-pyruvoyl tetrahydropterin synthase OS=Rickettsia africae (strain ESF-5) OX=347255 GN=RAF_ORF0217 PE=4 SV=1
MLRQLLRNFPHNDVVPFLLFAKKVKSFKERKYIIMIKCTRRIEFDAGHRIIEHQNKCQFLHGHRYVLEIAIAANKTDKLGMVIDFGLIKDLAKKWIDENFDHSLILHQDDKEMGQQIENCTGQKIYYMQNNPTAENIAMHLKNEIFPKLFVSQNFFVTSLKLYETPNCFVEV

SEQ ID NO: 25008 - protein, 147 aa, Rickettsia akari
  REGION 1..147: note = tr|A8GMF1|A8GMF1_RICAH Uncharacterized protein; OS = Rickettsia akari (strain Hartford) OX=293614; GN = A1C_01290 PE=4 SV=1
MTIEKKYIIMIKCTRRIEFDAGHRIIGHQNKCQFLHGHRYVLEITIAAHETDKLGMIVDFGLIKDLAKKWIDEHFDHSLILHQDDKEMGQQIANCTGQKIYYMQNNPTAENIATHLKNEILPKLFVGQNFFVASLKLYETPNCFVEV

SEQ ID NO: 25009 - protein, 138 aa, unidentified
  source 1..138: note = Rickettsia amblyommatis
  REGION 1..138: note = tr|A0A0F3N0R7|A0A0F3N0R7_RICAM 6-pyruvoyl tetrahydropterin synthase family protein OS=Rickettsia amblyommatis str. Ac/Pa OX=1359164 GN=APHACPA_0636 PE=4; SV = 1
MIKCTRRIEFDAGHRIIEHQNKCQFLHGHRYVLEIAIAANKTDKLGMVIDFGLIKDLAKKWIDENFDHSLILHQDDKEMGQQIENCTGQKIYYMQNNPTAENIATHLKNEIFPKLFVSQNFFITSLKLYETPNCFVEV

SEQ ID NO: 25010 - protein, 138 aa, unidentified; identical to SEQ ID NO: 25009
  source 1..138: note = Rickettsia amblyommatis
  REGION 1..138: note = tr|A0A0F3QXV6|A0A0F3QXV6_RICAM 6-pyruvoyl tetrahydropterin synthase family protein OS=Rickettsia amblyommatis str. Darkwater OX=1359166 GN=RAMDARK_0407; PE = 4 SV=1

SEQ ID NO: 25011 - protein, 138 aa, unidentified
  source 1..138: note = Rickettsia argasii
  REGION 1..138: note = tr|A0A0F3RGC3|A0A0F3RGC3_9RICK 6-pyruvoyl tetrahydropterin synthase family protein OS=Rickettsia argasii T170-B OX=1268837 GN=RAT170B_0132 PE=4 SV=1
MIKCTRRIEFDAGHRIIEHQNKCQFLHGHRYVLEIAIAANKTDKLGMVIDFGLIKDLAKKWIDENFDHSLILHQDDKEMGQQIENCTGQKIYYMQNNPTAENIATHLKNEIFPKLFVSQNFFVTSLKLYETPNCFVEV

SEQ ID NO: 25012 - protein, 138 aa, unidentified
  source 1..138: note = Rickettsia asembonensis
  REGION 1..138: note = tr|A0A0C2QXU7|A0A0C2QXU7_9RICK 6-carboxy-5,6,7,8-tetrahydropterin synthase OS=Rickettsia asembonensis OX=1068590 GN=SB78_04310 PE=4 SV=1
MIKCTRRIEFDAGHRIIGHQNKCQFLHGHRYVLEIAIAANKTDKLGMVIDFGLIKDLAKKWIDENFDHSLILHQDDKEMGQQIENCTGQKIYYMQNNPTAENIATHLKDEIFPKLFVGQNFFVASLKLYETPNCFVEV

SEQ ID NO: 25013 - protein, 162 aa, Rickettsia asiatica
  REGION 1..162: note = tr|A0A510G6K3|A0A510G6K3_9RICK 6-carboxy-5,6,7,8-tetrahydropterin synthase OS=Rickettsia asiatica OX=238800 GN=queD PE=4 SV=1
MTICVPFLLLEKEVKLFKERKYIIMIKCTRRIEFDAGHRIIGHQNKCQFLHGHRYVLEITIAANEIDKLGMVIDFGLIKDLAKKWIDENFDHSLILHQDDKKMGQQIENCTGQKIYYMQNNPTAENIAMHLKNEIFPKLFIGQNFFIASLKLYETPNCFVEV

SEQ ID NO: 25014 - protein, 138 aa, Rickettsia australis
  REGION 1..138: note = tr|H8K8M0|H8K8M0_RICAC 6-carboxy-5,6,7,8-tetrahydropterin synthase OS=Rickettsia australis (strain Cutlack) OX=1105110 GN=MC5_06875 PE=4; SV = 1
MIKCTRRIEFDAGHRIIGHQNKCQFLHGHRYVLEITIAAHETDKLGMIVDFGLIKDLAKKWIDKHFDHSLILHQDDKDMGQQIENCTGQKIYYMQNNPTAENIATHLKNEIFSKLFVGHNFFVASLKLYETPNCFVEV

SEQ ID NO: 25015 - protein, 138 aa, Rickettsia bellii
  REGION 1..138: note = sp|Q1RHI6|QUED_RICBR 6-carboxy-5,6,7,8-tetrahydropterin synthase OS=Rickettsia bellii (strain RML369-C) OX=336407 GN=queD PE=3 SV=1
MIKCTRRIEFDAGHRIIGHQNKCQYLHGHRYVLEITIAAKNTDELGMVVDFGLIKDLAKGWVDENFDHSLILHQGDKEIGQKIESHTGQKVYYLKNNPTAENIALHLKNEIFPKLFESQKFFVTNIKLFETPNCFVEV

SEQ ID NO: 25016 - protein, 138 aa, Rickettsia bellii; identical to SEQ ID NO: 25015
  REGION 1..138: note = tr|A0A0F3QFS3|A0A0F3QFS3_RICBE 6-pyruvoyl tetrahydropterin synthase family protein OS=Rickettsia bellii str. RML Mogi OX=1359194 GN=RBEMOGI_0036 PE=4 SV=1

SEQ ID NO: 25017 - protein, 60 aa, unidentified
  source 1..60: note = Rickettsia buchneri
  REGION 1..60: note = tr|A0A067AA71|A0A067AA71_9RICK Uncharacterized protein OS=Rickettsia buchneri OX=1462938 GN=REISMN_06080; PE = 4 SV=1
MGQQIENCTGQKIYYMQNNPTAENIATHLKNEIFPKLFVGQNFFIASLKLYETLNCFVEV

SEQ ID NO: 25018 - protein, 60 aa, unidentified
  source 1..60: note = Rickettsia buchneri
  REGION 1..60: note = tr|A0A067A9C9|A0A067A9C9_9RICK Queuosine biosynthesis protein QueD OS=Rickettsia buchneri; OX = 1462938 GN=REISMN_06085 PE=4 SV=1
MIKCTRRIEFDAGHRIIGHQNKCQFLHGHRYVLEITIATNETDKLGMIIDFGLIKDLAKK

SEQ ID NO: 25019 - protein, 138 aa, Rickettsia canadensis
  REGION 1..138: note = tr|A8EXQ3|A8EXQ3_RICCK Uncharacterized protein; OS = Rickettsia canadensis (strain McKiel) OX=293613; GN = A1E_00940 PE=4 SV=1
MIKCTRRIEFDSGHRIIGHQNKCQFLHGHRYVLEITIAANKTDTLGMVIDFGLIKDLAKKWIDKNFDHSLILHQDDKEMGQQIENCTGQKIYYMRNNPTAENIAIHLKNEIFPKLFINQQFSVTSLKLFETPNCFVEV

SEQ ID NO: 25020 - protein, 138 aa, Rickettsia conorii; identical to SEQ ID NO: 25011
  REGION 1..138: note = sp|Q92J44|QUED_RICCN 6-carboxy-5,6,7,8-tetrahydropterin synthase OS=Rickettsia conorii (strain ATCC VR-613 / Malish 7) OX=272944 GN=queD; PE = 3 SV=2

SEQ ID NO: 25021 - protein, 60 aa, unidentified; identical to SEQ ID NO: 25018
  source 1..60: note = Rickettsia endosymbiont
  REGION 1..60: note = tr|C4YW53|C4YW53_9RICK Queuosine biosynthesis protein QueD OS=Rickettsia endosymbiont of Ixodes scapularis OX=444612 GN=REIS_1699 PE=4 SV=1

SEQ ID NO: 25022 - protein, 138 aa, unidentified
  source 1..138: note = Rickettsia endosymbiont
  REGION 1..138: note = tr|A0A0F3REA9|A0A0F3REA9_9RICK 6-pyruvoyl tetrahydropterin synthase family protein OS=Rickettsia endosymbiont of Ixodes pacificus OX=1133329 GN=ptpS PE=4; SV = 1
MIKCTRRIEFDAGHRIIGHQNKCQFLHGHRYILEITIATNETDKLGMVIDFGLIKDLAKKWIDENFDHSLILNQDDKEMGQQIENCTGQKIYYMQNNPTAENIATHLKNEIFPKLFVSQNFFIASLKLYETLNCFVEV

SEQ ID NO: 25023 - protein, 138 aa, Rickettsia felis
  REGION 1..138: note = sp|Q4UKI6|QUED_RICFE 6-carboxy-5,6,7,8-tetrahydropterin synthase OS=Rickettsia felis (strain ATCC VR-1525 / URRWXCal2) OX=315456 GN=queD; PE = 3 SV=1
MIKCTRRIEFDAGHRIIGHQNKCQFLHGHRYVLEIAIAANKTDKLGMVIDFGLIKDVAKKWIDENFDHSLILHQDDKEMGQQIENCTGQKIYYMQNNPTAENIATHLKNEIFPKLFVGQNFFVSNLKLYETPNCFVEV

SEQ ID NO: 25024 - protein, 138 aa, Rickettsia felis; identical to SEQ ID NO: 25023
  REGION 1..138: note = tr|A0A0F3MWH4|A0A0F3MWH4_RICFI 6-pyruvoyl tetrahydropterin synthase family protein OS=Rickettsia felis str. Pedreira OX=1359196 GN=RFEPED_1314 PE=4 SV=1

SEQ ID NO: 25025 - protein, 138 aa, Rickettsia heilongjiangensis; identical to SEQ ID NO: 25011
  REGION 1..138: note = tr|G0GX08|G0GX08_RICH0 6-carboxy-5,6,7,8-tetrahydropterin synthase OS=Rickettsia heilongjiangensis (strain ATCC VR-1524 / 054) OX=1032845; GN = Rh054_01325 PE=4 SV=1

SEQ ID NO: 25026 - protein, 138 aa, Rickettsia japonica; identical to SEQ ID NO: 25011
  REGION 1..138: note = tr|A0A3B7DJK9|A0A3B7DJK9_RICJA 6-pyruvoyl tetrahydropterin synthase family protein OS=Rickettsia japonica OX=35790 GN=D0Z68_01395 PE=4 SV=1

SEQ ID NO: 25027 - protein, 138 aa, Rickettsia japonica; identical to SEQ ID NO: 25011
  REGION 1..138: note = tr|G4KM97|G4KM97_RICJY Putative 6-pyruvoyl tetrahydropterin synthase OS=Rickettsia japonica (strain ATCC VR-1363 / YH) OX=652620 GN=RJP_0184 PE=4 SV=1

SEQ ID NO: 25028 - protein, 138 aa, Rickettsia massiliae
  REGION 1..138: note = tr|H6QL20|H6QL20_RICMA 6-carboxy-5,6,7,8-tetrahydropterin synthase OS=Rickettsia massiliae str. AZT80 OX=1105112 GN=RMB_01295 PE=4 SV=1
MIKCIRRIEFDAGHRIIEHQNKCQFLHGHRYVLEIAIAANQTDKLGMVIDFGLIKDLAKKWIDENFDHSLILHQDDKEMGQQIENCTGQKIYYMQNNPTAENIATHLKNEIFPKLFVSQNFFVTSLKLYETPNCFVEV

SEQ ID NO: 25029 - protein, 140 aa, Rickettsia massiliae
  REGION 1..140: note = tr|A8F0T5|A8F0T5_RICM5 Putative 6-pyruvoyl tetrahydropterin synthase OS=Rickettsia massiliae (strain Mtu5) OX=416276 GN=RMA_0237 PE=4 SV=1
MIMIKCTRRIEFDAGHRIIEHQNKCQFLHGHRYVLEITIAANQTDKLGMVIDFGLIKDLAKKWIDENFDHSLILHQDDKEMGQQIENCTGQKIYYMQNNPTAENIATHLKNEIFPKLFVSQNFFVTSLKLYETPNCFVEV

SEQ ID NO: 25030 - protein, 138 aa, unidentified
  source 1..138: note = Rickettsia monacensis
  REGION 1..138: note = tr|A0A0B7IYW9|A0A0B7IYW9_9RICK 6-pyruvoyl tetrahydropterin synthase OS=Rickettsia monacensis; OX = 109232 GN=RMONA_03675 PE=4 SV=1
MIKCTRRIEFDAGHRIIGHQNKCQFLHGHRYVLEITIATNETDKLGMVIDFGLIKDLAKKWIDENFDHSLILNQGDKEMGQQIENCTGQKIYYMQNNPTAENIATHLKNEIFPKLFVSQNFFIASLKLYETLNCFVEV

SEQ ID NO: 25031 - protein, 138 aa, Rickettsia montanensis
  REGION 1..138: note = tr|H8KC97|H8KC97_RICMS 6-carboxy-5,6,7,8-tetrahydropterin synthase OS=Rickettsia montanensis (strain OSU 85-930) OX=1105114 GN=MCI_05365; PE = 4 SV=1
MIKCTRRIEFDAGHRIIEHQNKCQFLHGHRYVLEIAIAANKTDKLGMVIDFGLIKDLAKKWIDENFDHSLILHQDDKEMGQQIENCTGQKIYYMQSNPTAENIATHLKNEIFPKLFVSQNFFVTSLKLYETPNCFVEV

SEQ ID NO: 25032 - protein, 138 aa, Rickettsia parkeri; identical to SEQ ID NO: 25011
  REGION 1..138: note = tr|A0A0F3QNQ5|A0A0F3QNQ5_RICPA 6-pyruvoyl tetrahydropterin synthase family protein OS=Rickettsia parkeri str. Grand Bay OX=1359203 GN=RPAGB_1413 PE=4 SV=1

SEQ ID NO: 25033 - protein, 138 aa, Rickettsia peacockii
  REGION 1..138: note = tr|C4K117|C4K117_RICPU Uncharacterized protein; OS = Rickettsia peacockii (strain Rustic) OX=562019; GN = RPR_02095 PE=4 SV=1
MIKCTRRIEFDAGHRIIEHQNKCQFLHGHRYVLEIAIAANKTDKLGMVIDFGLIKDLAKKWIDENFDHSLILHQDDKEMGQQIENCTGQKIYYMQNNPTAENIATHLKNEIFPKLFVSQNFFVTSLKLYETPHCFVEV

SEQ ID NO: 25034 - protein, 138 aa, unidentified
  source 1..138: note = Rickettsia philipii
  REGION 1..138: note = tr|H6PWF0|H6PWF0_RICP3 6-carboxy-5,6,7,8-tetrahydropterin synthase OS=Rickettsia philipii (strain 364D) OX=481009 GN=RSA_01235 PE=4 SV=1
MIKCTRRIEFDAGHRIIEHQNKCQFLHGHRYVLEIAIAANKTDKLGMVIDFGLIKDLAKKWIDENFDHSLILHQDDNEMGQQIENCTGQKIYYMQNNPTAENIATHLKNEIFPKLFVSQNFFVTSLKLYETPNCFVEV

SEQ ID NO: 25035 - protein, 138 aa, Rickettsia prowazekii
  REGION 1..138: note = sp|Q9ZDY5|QUED_RICPR 6-carboxy-5,6,7,8-tetrahydropterin synthase OS=Rickettsia prowazekii (strain Madrid E) OX=272947 GN=queD PE=3 SV=1
MIKCTRRINFDAGHRIIGHKNKCQFLHGHHYVLEITIAANKTDTLGMVIDFGLIKNLAKKWIDANFDHNLILHQDDKEMGQQIENYTRQKIYYMRNNPTAENIATHLKNEIFPKLFVSQNFFVTSLKLYETQNCFVEV

SEQ ID NO: 25036 - protein, 138 aa, Rickettsia prowazekii; identical to SEQ ID NO: 25035
  REGION 1..138: note = tr|D5AWA0|D5AWA0_RICPP Putative 6-pyruvoyl tetrahydropterin synthase OS=Rickettsia prowazekii (strain Rp22) OX=449216 GN=rpr22_CDS170 PE=4 SV=1

SEQ ID NO: 25037 - protein, 138 aa, Rickettsia raoultii; identical to SEQ ID NO: 25011
  REGION 1..138: note = tr|A0A126EB83|A0A126EB83_9RICK 6-carboxy-5,6,7,8-tetrahydropterin synthase OS=Rickettsia raoultii OX=369822 GN=UQ52_01280 PE=4 SV=1

SEQ ID NO: 25038 - protein, 138 aa, Rickettsia rhipicephali
  REGION 1..138: note = tr|A0A0S2CC41|A0A0S2CC41_RICRH 6-carboxy-5,6,7,8-tetrahydropterin synthase OS=Rickettsia rhipicephali OX=33992 GN=ASQ44_06460 PE=4 SV=1
MIKCTRRIEFDAGHRIIEHQNKCQFLHGHRYVLEIAIAANQTDKLGMVIDFGLIKDLAKKWIDENFDHSLILHQDDKAMGQQIENCTGQKIYYMQNNPTAENIATHLKNEIFPKLFVSQNFFVTSLKLYETPNCFVEV

SEQ ID NO: 25039 - protein, 138 aa, Rickettsia rhipicephali; identical to SEQ ID NO: 25028
  REGION 1..138: note = tr|A0A0F3PG77|A0A0F3PG77_RICRH 6-pyruvoyl tetrahydropterin synthase family protein OS=Rickettsia rhipicephali str. Ect OX=1359199 GN=RMAECT_0454 PE=4 SV=1

SEQ ID NO: 25040 - protein, 138 aa, Rickettsia rickettsii
  REGION 1..138: note = tr|A0A0H3AVG5|A0A0H3AVG5_RICRS Uncharacterized protein OS=Rickettsia rickettsii (strain Sheila Smith); OX = 392021 GN=A1G_01285 PE=4 SV=1
MIKCTRRIEFDAGHRIIKHQNKCQFLHGHRYVLEITIAANKTDKLGMVIDFGLIKDLAKKWIDENFDHSLILHQDDKEMGQQIENCTGQKIYYMQNNPTAENIATHLKNEIFPKLFVSQNFFVTSLKLYETPNCFVEV

SEQ ID NO: 25041 - protein, 161 aa, Rickettsia rickettsii
  REGION 1..161: note = tr|B0BWG2|B0BWG2_RICRO 6-pyruvoyl tetrahydropterin synthase OS=Rickettsia rickettsii (strain Iowa) OX=452659; GN = RrIowa_0279 PE=4 SV=1
MTWSRFYSLKKKVKSFKERKYIIMIKCTRRIEFDAGHRIIKHQNKCQFLHGHRYVLEITIAANKTDKLGMVIDFGLIKDLAKKWIDENFDHSLILHQDDKEMGQQIENCTGQKIYYMQNNPTAENIATHLKNEIFPKLFVSQNFFVTSLKLYETPNCFVEV

SEQ ID NO: 25042 - protein, 138 aa, Rickettsia sibirica; identical to SEQ ID NO: 25011
  REGION 1..138: note = tr|Q7PAX3|Q7PAX3_RICS2 Uncharacterized protein; OS = Rickettsia sibirica (strain ATCC VR-151 / 246); OX = 272951 GN=rsib_orf479 PE=4 SV=1

SEQ ID NO: 25043 - protein, 138 aa, Rickettsia slovaca; identical to SEQ ID NO: 25011
  REGION 1..138: note = tr|H8LM62|H8LM62_RICSL 6-carboxy-5,6,7,8-tetrahydropterin synthase OS=Rickettsia slovaca str. D-CWPP OX=1105109 GN=MC3_01315 PE=4 SV=1

SEQ ID NO: 25044 - protein, 138 aa, Rickettsia sp.
  REGION 1..138: note = tr|A0A1C3EXM9|A0A1C3EXM9_9RICK 6-carboxy-5,6,7,8-tetrahydropterin synthase OS=Rickettsia sp. wb OX=1851512 GN=A8V33_01240 PE=4 SV=1
MIKCTRRIEFDAGHRIIGHKNKCQYLHGHRYVLEITIAAKNTDELGMVVDFGLIKDLAKGWIDENFDHSLILHQDDKEIGQKIESHTGQKVYYLKNNPTAENIALHLKNEIFPKLFESQKFFVTSIKLFETPNCFVEV

SEQ ID NO: 25045 - protein, 138 aa, Rickettsia sp.; identical to SEQ ID NO: 25044
  REGION 1..138: note = tr|A0A249E3C6|A0A249E3C6_9RICK 6-carboxy-5,6,7,8-tetrahydropterin synthase OS=Rickettsia sp. MEAM1 (Bemisia tabaci) OX=1182263 GN=BA173_05205 PE=4; SV = 1

SEQ ID NO: 25046 - protein, 138 aa, Rickettsia typhi
  REGION 1..138: note = sp|Q68XI9|QUED_RICTY 6-carboxy-5,6,7,8-tetrahydropterin synthase OS=Rickettsia typhi (strain ATCC VR-144 / Wilmington) OX=257363 GN=queD; PE = 3 SV=1
MIKCTRRIDFDAGHRIIGHKNKCQFLHGHHYVLEITIAANKTDKLGMVIDFGLIKNLAKKWIDANFDHNLILHQDDKEIGKQIENYTGQKIYYMRNNPTAENIAIHLKNEIFPKLFIDQNFFVTSLKLYETQNCFVEV

SEQ ID NO: 25047 - protein, 118 aa, unidentified
  source 1..118: note = Rickettsiales bacterium
  REGION 1..118: note = tr|A0A1Z9MWX1|A0A1Z9MWX1_9RICK 6-carboxy-5,6,7,8-tetrahydropterin synthase; OS = Rickettsiales bacterium TMED211 OX=1986869; GN = CBD71_02110 PE=3 SV=1
MIIYKKYYFDTAHFMPNHSKNHKYSKVHGHSYEITIFLNGKQNKKKGWVMDFEKIDIFMKPILKKIDHNLLNDLHGLENPTSENIAKWFWLHLKGKIKNLEKIEINRPRIGGCVYSGE

SEQ ID NO: 25048 - protein, 118 aa, unidentified
  source 1..118: note = Rickettsiales bacterium
  REGION 1..118: note = tr|A0A2E3SSF8|A0A2E3SSF8_9RICK 6-carboxy-5,6,7,8-tetrahydropterin synthase; OS = Rickettsiales bacterium OX=2026788 GN=queD PE=3 SV=1
MEIYKTFIFHAAHRMTNMPKGHEYSKIHGHSFTVDIYVKGSLDRENGWVMDFKEIEKAFKPIHASLDHGFLNDIKGLNNPTSENLARWIWKELKPSLPKLSKVVVGRSSIGGAVYKGR

SEQ ID NO: 25049 - protein, 149 aa, unidentified
  source 1..149: note = Rickettsiales endosymbiont
  REGION 1..149: note = tr|A0A3S8T1W3|A0A3S8T1W3_9RICK Uncharacterized protein OS=Rickettsiales endosymbiont of Stachyamoeba lipophora OX=2486578 GN=EF513_02300 PE=4 SV=1
MNLAKVILSYSSKFSCSLELVNPILNEGEHQLVYGSEDRKYLGEIKFEILAGDNIEQVTGMNINHTILKKAAKQIVEEFNGQNLNEAMEEFKTIPPTLENIAKTIWDKLNQHSDLKDKLKAIKLIDQNNFAVIYSQQESGYDDVAGFMA

SEQ ID NO: 25050 - protein, 147 aa, unidentified
  source 1..147: note = Rickettsiales endosymbiont
  REGION 1..147: note = tr|A0A4Q7DMM1|A0A4Q7DMM1_9RICK 6-carboxytetrahydropterin synthase OS=Rickettsiales endosymbiont of Peranema trichophorum OX=2486577; GN = EDM53_01740 PE=4 SV=1
MLTCTKRIEFDAAHRVREHRSVCKMLHGHRYAIEATFASQELNQIGMIIDFGEIKDKLKSWIDKYWDHNTILHADDENLGRAIGQITTQNVFFMNCNPTAENMANFVLHEICPSLFVDTNVQCIKIRLYETPSCYAEATIEKINAHV

SEQ ID NO: 25051 - protein, 147 aa, Riemerella anatipestifer
  REGION 1..147: note = tr|E4TBV1|E4TBV1_RIEAD Uncharacterized protein; OS = Riemerella anatipestifer (strain ATCC 11845 / DSM 15868 / JCM 9532 / NCTC 11014) OX=693978 GN=RA0C_1082 PE=4 SV=1
MIRITKIFSFETAHVLYNYDGKCKNMHGHSYKLFVTVKGVPINDLDHPKNGMVVDFGDIKKIVKEEIVDVWDHAVLLNANSPHISLGKELEEKGHKVIFCNYQPTCENMLYDIAAKIKNRLPESVQLAYLKLHETENSYGEWLAEEN

SEQ ID NO: 25052 - protein, 147 aa, Riemerella anatipestifer
  REGION 1..147: note = tr|J9R5A2|J9R5A2_RIEAN 6-carboxy-5,6,7,8-tetrahydropterin synthase OS=Riemerella anatipestifer RA-CH-1 OX=1228997 GN=B739_1039 PE=3 SV=1
MIRITKIFSFETAHVLYNYDGKCKNMHGHSYKLFVTVKGVPINDLDHPKNGMVVDFGDIKKIVKEEIVDVWDHAVLLNASSPHISLGKELEEKGHKVIFCNYQPTCENMLYDIAAKIKNRLPKSVQLAYLKLHETENSYGEWLAEEN

SEQ ID NO: 25053 - protein, 148 aa, unidentified
  source 1..148: note = Riemerella columbipharyngis
  REGION 1..148: note = tr|A0A1G7CZG5|A0A1G7CZG5_9FLAO 6-carboxy-5,6,7,8-tetrahydropterin synthase OS=Riemerella columbipharyngis OX=1071918 GN=SAMN05421544_10986 PE=3 SV=1
MIRITKIFTFETAHVLYNYDGKCKNMHGHSYKLFVTVKGKPISDLNHPKNGMVVDFGDIKKIVKEEIVDCWDHAVLVNGLSPHKELGDELASKGHKVIYCDYQPTCENMLYDIAEKIKQRLPSPLQLAYLKLHETENSYGEWLAEENP

SEQ ID NO: 25054 - protein, 148 aa, Riemerella sp.
  REGION 1..148: note = tr|A0A496P3F3|A0A496P3F3_9FLAO 6-carboxy-5,6,7,8-tetrahydropterin synthase OS=Riemerella sp. OX=2382126 GN=D8B49_05330 PE=3 SV=1
MIRVTKIFTFETAHVLYGYDGKCKNIHGHSYKLFVTIKGKPIDDINNEKNGMVLDFGDLKAIVKEEIVDEWDHGLMVNALSPHKDLGKELEQKGHKVIYCDYQPTCENMLYEIADKIKKRLPSQVQLVYLKLHETENSYGEWFAEDNE

SEQ ID NO: 25055 - protein, 151 aa, Rikenella microfusus
  REGION 1..151: note = tr|A0A379MRQ9|A0A379MRQ9_9BACT 6-pyruvoyl tetrahydropterin synthase/QueD family protein OS=Rikenella microfusus OX=28139 GN=NCTC11190_00519 PE=4 SV=1
MATIRLTREFSFETAHALEGYDGLCRHVHGHSYKLFVTVSGIPCDDPSSPKYGMVMDFGDLKRIVNELVVDRYDHALVLRRTSGNTELLERVREKWERVYLVDYQPTCEMMLSRFAEQIAAALPAGVRLAELSLYETAKSHATWRAEDNPL

SEQ ID NO: 25056 - protein, 142 aa, unidentified
  source 1..142: note = Rikenellaceae bacterium
  REGION 1..142: note = tr|A0A359H1F6|A0A359H1F6_9BACT 6-carboxy-5,6,7,8-tetrahydropterin synthase; OS = Rikenellaceae bacterium OX=2049048 GN=DEG92_05090 PE=3; SV = 1
MTKEFRFEGAHALTDYDGKCRHIHGHSYKLYVTLKGMPRDELHHPKNGMVVDFTDLKGVVNRLIVDPFDHALLLRQDAKLASEISDAYENVIILDFQPTCENLTIYFAKLLQGNMPAGVSLHSIKLYETPTSFVEWVASENN

SEQ ID NO: 25057 - protein, 109 aa, unidentified
  source 1..109: note = Rikenellaceae bacterium
  REGION 1..109: note = tr|A0A351NH55|A0A351NH55_9BACT 6-carboxytetrahydropterin synthase QueD OS=Rikenellaceae bacterium OX=2049048 GN=DCW53_04890 PE=4 SV=1
MYYVSKRFEVSAAHYVTTDHRSKCEALHGHNWIVIVHCKSETLNDDGMVTDFTVIKQNIMSKIDHKNLNEVLPFSPTAENLAKWICDETPNCYRVEIWESENNKAEYEI

SEQ ID NO: 25058 - protein, 136 aa, unidentified
  source 1..136: note = Rippkaea orientalis
  REGION 1..136: note = tr|B7K1S3|B7K1S3_RIPO1 6-carboxy-5,6,7,8-tetrahydropterin synthase OS=Rippkaea orientalis (strain PCC 8801) OX=41431 GN=PCC8801_0124 PE=3; SV = 1
MTANFHDNWLIFKEFRFEAAHRLPHYDGKCHRLHGHSWVGRIYVQGDRLVKDGPKQGMIMDFSDIQRYLEPLLENFLDHYYLNETMGLENPTCEAVAQWIFEKLEKAGLQGLQAVEIQETCTSGVRYSRSQKSVGA

SEQ ID NO: 25059 - protein, 291 aa, unidentified
  source 1..291: note = Rippkaea orientalis
  REGION 1..291: note = tr|B7K2P5|B7K2P5_RIPO1 Uncharacterized protein; OS = Rippkaea orientalis (strain PCC 8801) OX=41431; GN = PCC8801_2427 PE=4 SV=1
MQCVINRRAQFSASHRYWLSELDEQENRLKFGDCTRFPGHGHNYVLYVSLLGEIDSYGMVENLSTVKRVIKEEITSQLDYCYLNDVWEEFQDSLPTTENLARVIWQRLAPHLPLVNIQLFEHPQLWADYQGNAMKATLTIQTHFSAAHRLALPELTLEQNSEIYGKCARIHGHGHNYHLEVSVTGEIDPRTGMLVDLGILQQVVKDYVVEPFDHTFLNKDIPYFAQVVPTAENIALYIAQLLQTPIQQLGAELDKVKLIESPNNSCEIYCRHLPQPPESLASRQPILVGTR

SEQ ID NO: 25060 - protein, 133 aa, Rivibacter subsaxonicus
  REGION 1..133: note = tr|A0A4Q7VGB0|A0A4Q7VGB0_9BURK 6-carboxy-5,6,7,8-tetrahydropterin synthase OS=Rivibacter subsaxonicus OX=457575 GN=EV670_2775 PE=3 SV=1
MFELSQSFYFEAAHTLRRNVDDATEAAGSRRIHGHTYQAEVTVCGQRDPATGMVLDLALLRAVVARVRTTLDHHFLDEIEGLGVPTLENLCLYIHRSLAAAVPGVTQVSVWRESSGDRCTYRPDRSSTAGGPR

SEQ ID NO: 25061 - protein, 326 aa, unidentified
  source 1..326: note = Rivicola pingtungensis
  REGION 1..326: note = tr|A0A318KJQ4|A0A318KJQ4_9NEIS 6-pyruvoyltetrahydropterin/6-carboxytetrahydropterin synthase OS=Rivicola pingtungensis OX=1054498; GN = DFR34_12733 PE=4 SV=1
MPLMHAASCGFEAARSVRNVADLRRCLHGHSFLCSARWADGAPDVGAALSTALAPLDYADLNQAVAVPDDASLLGWIAGHLPHADGLWLRSAPDRGVLRASAQTPLLHWLHADFEAAHQLPNVPPGHQCGRLHGHGFGVTLCAAASHAELEQAWARLRPLLHQRMLNDIPGLENPTSEVISAWLWRQLADVLALDHVIVRETATAGSQFNGHTHRIWKTQRFEAATPFDAHGRYTGHSYSLRLHLSGQLDEVMGWVQDFGDVKTRFKPFYQQLDHYPLDQVDGLSVANCAGIAQWAAAKLANTPELCRVDVYQRPGEGSLFSVEAA

SEQ ID NO: 25062 - protein, 129 aa, Rivularia sp.
  REGION 1..129: note = tr|K9R8S3|K9R8S3_9CYAN 6-carboxy-5,6,7,8-tetrahydropterin synthase OS=Rivularia sp. PCC 7116 OX=373994 GN=Riv7116_0915 PE=3 SV=1
MPKWKLVTEFTFDSAHYIKDYNGPCGRMHGHSYTVRIEAISTKLHSSEFCPHPVMVADFRSLRWAKKDVAKGGLDHCVLNEVMPPEYETTAEMIAKYIYDETKKKLPEGVKIKVAVSETANSWAEYEDD

SEQ ID NO: 25063 - protein, 290 aa, Rivularia sp.
  REGION 1..290: note = tr|K9RLR4|K9RLR4_9CYAN 6-pyruvoyl-tetrahydropterin synthase OS=Rivularia sp. PCC 7116 OX=373994; GN = Riv7116_5670 PE=4 SV=1
MQCIVNRRAQFSASHRYWLPELSEAENNEKFAACANFPGHGHNYVLFISLQGELDEYGMVLNLSDVKKVIKREITSQLDFSYLNDVWEEFGQTLPTTENIARVIYKRLSSYLPIVRVQLFEHPQLWADYMGNSMEAYLTVGTHFSAAHRLASPKLSKEENLEIYGKCARPHGHGHNYHLEITVKGEIAERTGMLVDLGALNKVIDDYVLEPFDHTFLNKDIPYFAEIVPTAENIALYISNTLREPIAKLGATLYKVKLIESPNNSCEIYCNNSESNLSGATQEQPVLVKL

SEQ ID NO: 25064 - protein, 151 aa, unidentified
  source 1..151: note = Robbsia andropogonis
  REGION 1..151: note = tr|A0A0F5K3W1|A0A0F5K3W1_9BURK 6-carboxy-5,6,7,8-tetrahydropterin synthase OS=Robbsia andropogonis OX=28092 GN=WM40_04100 PE=4 SV=1
MIRITRRLEFDAGHRIPDHRSQCRNLHGHRYVLELTLEGEVVEESGSPECGMVMDFADVKSLANAHLVDRWDHAFLVYQGDEAVMRFLETLPGHKTVVIDRIPTVENLAQWAYETLAPVYDGHYGRALRLIRVRLYETPNCWADAGPKLEG

SEQ ID NO: 25065 - protein, 148 aa, unidentified
  source 1..148: note = Robbsia sp.
  REGION 1..148: note = tr|A0A494Y799|A0A494Y799_9BURK 6-carboxytetrahydropterin synthase OS=Robbsia sp. DHC34; OX = 2419776 GN=D7S86_01195 PE=4 SV=1
MLSITRKLEFDAGHRIPDHRSQCRNLHGHRYVLEITLEGELVDVEGAPDRGMVMDFADVKSLANTHLVDLWDHAFLVFEGDTQVRDFLATMPGHKTVVLDRIPTVENLALAAFGILSKVYDQHYGVDLRLKRVRLYETPNCWADAERA

SEQ ID NO: 25066 - protein, 136 aa, unidentified
  source 1..136: note = Robertkochia marina
  REGION 1..136: note = tr|A0A4V3UXU2|A0A4V3UXU2_9FLAO 6-carboxy-5,6,7,8-tetrahydropterin synthase; OS = Robertkochia marina OX=1227945 GN=E7Z59_13735 PE=3 SV=1
MRVKVSRKAHFNAAHRLYRKDWSFEKNEQVFGKCNNPHYHGHNYELIASVSGPIDPETGFVIDVKVLKDLIKAEVEDYMDHKNLNEEVEEFKTLNPTAENIAVVIYNRLKPHLKADLDLEVVLYETPRNFVTYSGE

SEQ ID NO: 25067 - protein, 150 aa, unidentified
  source 1..150: note = Robertkochia marina
  REGION 1..150: note = tr|A0A4S3M2W6|A0A4S3M2W6_9FLAO 6-carboxytetrahydropterin synthase OS=Robertkochia marina; OX = 1227945 GN=E7Z59_02500 PE=4 SV=1
MSKIRITKMFNFETGHALYGYDGKCRNVHGHSYKLSVTVIGTPIADTSHVKYGMVIDFGDLKKIVKEEIVDKFDHATVFNKNTPHIELAKELEERGHNVILVNYQPTSEEMIIDFAAKIKARLPENITLHSLKLQETETSFAEWHAADQV

SEQ ID NO: 25068 - protein, 151 aa, Robiginitalea biformata
  REGION 1..151: note = tr|A4CIF9|A4CIF9_ROBBH 6-pyruvoyl tetrahydropterin synthase OS=Robiginitalea biformata (strain ATCC BAA-864 / HTCC2501 / KCTC 12146) OX=313596 GN=RB2501_07445 PE=4 S V=1
MARVRITKEFTFETGHALYGYDGKCRNVHGHSYHLSVTVIGTPIAEDGAVKLGMVMDFGDLKKVVREEVVDRFDHATIFNRNTPHVELARTLEREGHRVILADYQPTSENMVVDFAHRISKRLPEHIRLHSLRLRETGTAYAEWFASDNPD

SEQ ID NO: 25069 - protein, 137 aa, Robiginitalea biformata
  REGION 1..137: note = tr|A4CQ76|A4CQ76_ROBBH 6-carboxy-5,6,7,8-tetrahydropterin synthase; OS = Robiginitalea biformata (strain ATCC BAA-864 / HTCC2501 / KCTC 12146) OX=313596 GN=RB2501_02005PE=3 SV=1
MRVTVSRKAHFNAAHRLYRPDWDDARNREVFGKCSNPLYHGHNYELIVSVTGPIDPETGFVVDMAELKVLIRDKVEDALDHKNLNEEVPEFRELNPTAENIAVVIWDKLRPHIPASCDLEITLYETPRNFVSYRGAE

SEQ ID NO: 25070 - protein, 154 aa, Robiginitalea myxolifaciens
  REGION 1..154: note = tr|A0A1I6G4P6|A0A1I6G4P6_9FLAO 6-pyruvoyltetrahydropterin/6-carboxytetrahydropterin synthase OS=Robiginitalea myxolifaciens OX=400055; GN = SAMN04490243_1239 PE=4 SV=1
MSRIRITKEFNFETGHALYGYDGKCRNVHGHSYHLSVTIIGTPITETGHIKLGMVMDFGDLKKIVNEEVVDLFDHATVFNKNSPHIELARTLESQGHRVILADYQPTSENMVIDFAERISKRLPANIQLHSLKLRETGTAYAEWVAADNPESAS

SEQ ID NO: 25071 - protein, 135 aa, Robiginitalea myxolifaciens
  REGION 1..135: note = tr|A0A1I6FP16|A0A1I6FP16_9FLAO 6-carboxy-5,6,7,8-tetrahydropterin synthase; OS = Robiginitalea myxolifaciens OX=400055; GN = SAMN04490243_0294 PE=3 SV=1
MRVKVSRKAHFNAAHRLYRPDWDDAKNLRVFGKCSNPKYHGHNYELIVSVTGEIDPETGFVIDLKVLKDLIREQVEDAMDHKNLNEEVEEFKELNPTAEHIAMVIWKRLRPHLPEGSDLEVQLYETPRNFVTFTG

SEQ ID NO: 25072 - protein, 125 aa, Robiginitomaculum sp.
  REGION 1..125: note = tr|A0A2G1YV57|A0A2G1YV57_9RHOB 6-carboxy-5,6,7,8-tetrahydropterin synthase; OS = Robiginitomaculum sp. OX=2030823 GN=COB92_04300 PE=3; SV = 1
MNADIILSRSFTFEAAHSIDLPDGTNPGYKNLHGHSFSASLSVKGRQADIDKWLLDFGSLDPVIEKIRAKLDHAYLNDIEGLKYSTLENLCAYIFKLAKPMVPGLHGVEISRHTCGQTCKLVVDD

SEQ ID NO: 25073 - protein, 124 aa, Robiginitomaculum sp.
  REGION 1..124: note = tr|A0A2G2G5F5|A0A2G2G5F5_9RHOB 6-carboxy-5,6,7,8-tetrahydropterin synthase; OS = Robiginitomaculum sp. OX=2030823 GN=COA43_13055 PE=3; SV = 1
MQANIILSKTFTFEAAHSLDLKDGTDLGYKRLHGHSFTATLSIKGPKSEIDDWLMDFGSFAPTIEQLKDKLDHAFLNELVGLKSPTLENMCAYIFDLASKSLPNLFAVDIARITCGQNCRLEVG

SEQ ID NO: 25074 - protein, 139 aa, Robinsoniella sp.
  REGION 1..139: note = tr|A0A371AXT7|A0A371AXT7_9FIRM 6-carboxy-5,6,7,8-tetrahydropterin synthase; OS = Robinsoniella sp. MCWD5 OX=1812858 GN=DWV06_04765 PE=3; SV = 1
MYSIIVEESFDSAHFLSGYNGKCSHIHGHRWRLLVEVQTKELQDEGQCKGMVVDFTQLKKDLKKLAEDFDHCLIIEKETMREQTLNCLVEDGFRIVSIPFRPTAEKFAEFFFHSIEKKGYQVKRVSVYETPNNCAVYEG

SEQ ID NO: 25075 - protein, 141 aa, unidentified; identical to SEQ ID NO: 23748
  source 1..141: note = Rodentibacter genomosp.
  REGION 1..141: note = tr|A0A1V3JR50|A0A1V3JR50_9PAST 6-carboxy-5,6,7,8-tetrahydropterin synthase; OS = Rodentibacter genomosp. 2 OX=1908266 GN=BKK55_01090; PE = 3 SV=1

SEQ ID NO: 25076 - protein, 141 aa, unidentified
  source 1..141: note = Rodentibacter genomosp.
  REGION 1..141: note = tr|A0A1V3JNK6|A0A1V3JNK6_9PAST 6-carboxy-5,6,7,8-tetrahydropterin synthase; OS = Rodentibacter genomosp. 2 OX=1908266 GN=BKK56_00325; PE = 3 SV=1
MFKISKEFSFDMAHLLDGHDGKCQNLHGHTYKLQVEIMGDLSPLGAKKSMVIDFSDLKTIVKKAILEPMDHAFIYDETNERESKIAKLLQSLDSKTFGVPFRTTAEELARFIFNRLKYDEKLAVSTIRLWETPTSFCEYSE

SEQ ID NO: 25077 - protein, 141 aa, unidentified
  source 1..141: note = Rodentibacter heidelbergensis
  REGION 1..141: note = tr|A0A1V3IBI1|A0A1V3IBI1_9PAST 6-carboxy-5,6,7,8-tetrahydropterin synthase; OS = Rodentibacter heidelbergensis OX=1908258 GN=BKK48_01025; PE = 3 SV=1
MFKISKEFSFDMAHLLDGHDGKCQNLHGHTYKLQVEMSGDLSPSGTKKSMVMDFSDLKAIVKKAILIPMDHAFIYDETNERESKIAQLLQELHSKTFGVPFRTTAEELARFIFNRLKYDEKLPVSTIRLWETPTSFCEYSE

SEQ ID NO: 25078 - protein, 141 aa, unidentified; identical to SEQ ID NO: 23748
  source 1..141: note = Rodentibacter heylii
  REGION 1..141: note = tr|A0A1V3KPU2|A0A1V3KPU2_9PAST 6-carboxy-5,6,7,8-tetrahydropterin synthase; OS = Rodentibacter heylii OX=1906744 GN=BKG96_01715 PE=3 SV=1

SEQ ID NO: 25079 - protein, 141 aa, unidentified; identical to SEQ ID NO: 23741
  source 1..141: note = Rodentibacter heylii
  REGION 1..141: note = tr|A0A1V3KSA8|A0A1V3KSA8_9PAST 6-carboxy-5,6,7,8-tetrahydropterin synthase; OS = Rodentibacter heylii OX=1906744 GN=BKG97_06060 PE=3 SV=1

SEQ ID NO: 25080 - protein, 141 aa, unidentified
  source 1..141: note = Rodentibacter mrazii
  REGION 1..141: note = tr|A0A1V3IDD4|A0A1V3IDD4_9PAST 6-carboxy-5,6,7,8-tetrahydropterin synthase; OS = Rodentibacter mrazii OX=1908257 GN=BKK47_10260 PE=3 SV=1
MFKISKEFSFDMAHLLDGHDGKCQNLHGHTYKLQVEISKDLVHCGAKKSMVMDFSDLKNIVKKAVLDPMDHAFIYDQTSERESKIAALLQELNSKTFAVPFRTTAEEMARFIFKRLKYDEKLAVSAIRLWETPTSFCEYSE

SEQ ID NO: 25081 - protein, 141 aa, unidentified
  source 1..141: note = Rodentibacter myodis
  REGION 1..141: note = tr|A0A1V3JRD9|A0A1V3JRD9_9PAST 6-carboxy-5,6,7,8-tetrahydropterin synthase; OS = Rodentibacter myodis OX=1907939 GN=BKL49_05380 PE=3 SV=1
MFKVSKEFSFDMAHLLDGHDGKCQNLHGHTYKLQVEIAGDLHQYGAKKAMVMDFSDLKAIVKKAILDPMDHAFIYDQTSERESKIAHLLQDLRSKTFGVPFRTTAEEMARFIFNRLKYEEKLPVSAIRLWETPTSFCEYGE

SEQ ID NO: 25082 - protein, 141 aa, unidentified
  source 1..141: note = Rodentibacter pneumotropicus
  REGION 1..141: note = tr|A0A1V3K3R7|A0A1V3K3R7_9PAST 6-carboxy-5,6,7,8-tetrahydropterin synthase; OS = Rodentibacter pneumotropicus OX=758 GN=queD PE=3 SV=1
MFKISKEFSFDMAHLLDGHDGKCQNLHGHTYKLQVEIMGDLSPLGAKKSMVIDFSDLKTIVKKAILEPMDHAFIYDETNERESKIAKLLQEVDSKIFGVPFRTTAEELARFIFNRLKYDEKLAVSTIRLWETPTSFCEYSE

SEQ ID NO: 25083 - protein, 115 aa, unidentified
  source 1..115: note = Rodentibacter pneumotropicus
  REGION 1..115: note = tr|A0A448MQM5|A0A448MQM5_9PAST 6-carboxy-5,6,7,8-tetrahydropterin synthase; OS = Rodentibacter pneumotropicus OX=758 GN=queD PE=4 SV=1
MFKISKEFSFDMAHLLDGHDGKCQNLHGHTYKLQVEIMGDLSPLGAKKSMVIDFSDLKTIVKKAILEPMDHAFIYDETNERESKIAKLLQEVDSKIFGVPFRTTAEELARFILIA

SEQ ID NO: 25084 - protein, 141 aa, unidentified
  source 1..141: note = Rodentibacter rarus
  REGION 1..141: note = tr|A0A1V3IJT6|A0A1V3IJT6_9PAST 6-carboxy-5,6,7,8-tetrahydropterin synthase; OS = Rodentibacter rarus OX=1908260 GN=BKK50_08410 PE=3 SV=1
MFKISKEFSFDMAHLLDGHDGKCQNLHGHTYKLQVEISGDLSPIGAKKSMVMDFSDLKAIVKKAILIPMDHAFIYDETNERESKIAQLLQELHSKTFGVPFRTTAEELARFIFNRLKYDEKLPVSTIRLWETPTSFCEYSE

SEQ ID NO: 25085 - protein, 141 aa, unidentified
  source 1..141: note = Rodentibacter ratti
  REGION 1..141: note = tr|A0A1V3L882|A0A1V3L882_9PAST 6-carboxy-5,6,7,8-tetrahydropterin synthase; OS = Rodentibacter ratti OX=1906745 GN=BKG93_03725 PE=3 SV=1
MFKISKEFSFDMAHLLDGHDGKCQNLHGHTYKLQVEIMGDLSPLGAKKSMVMDFSDLKTIVKKAILEPMDHAFIYDETNERENKIAKLLQSLDSKTFGVPFRTTAEELARFIFNRLKYDEKLAVSTIRLWETPTSFCEYSE

SEQ ID NO: 25086 - protein, 141 aa, unidentified
  source 1..141: note = Rodentibacter ratti
  REGION 1..141: note = tr|A0A1V3LB10|A0A1V3LB10_9PAST 6-carboxy-5,6,7,8-tetrahydropterin synthase; OS = Rodentibacter ratti OX=1906745 GN=BKG88_02340 PE=3 SV=1
MFKISKEFSFDMAHLLDGHDGKCQNLHGHTYKLQVEIMGDLSPLGAKKSMVIDFSDLKTIVKKAILEPMDHAFIYDETNERESKIAKLLQSLDSKTFGVPFRTTAEELARFIFNRLKYDEKLTISTIRLWETPTSFCEYSE

SEQ ID NO: 25087 - protein, 141 aa, unidentified
  source 1..141: note = Rodentibacter sp.
  REGION 1..141: note = tr|A0A1V3JY22|A0A1V3JY22_9PAST 6-carboxy-5,6,7,8-tetrahydropterin synthase; OS = Rodentibacter sp. Ppn85 OX=1908525 GN=BKL51_03865 PE=3; SV = 1
MFKISKEFSFDMAHLLDNHDGKCQNLHGHTYKLQVEISKDLVNYGEKKSMVMDFSDLKNTVKKAILDPMDHAFIYDQTSKRESKIAALLQELNSKTFAVPFRTTAEEMARFIFNRLKYDEKLAISAIRLWETPTSFCEYSE

SEQ ID NO: 25088 - protein, 141 aa, unidentified; identical to SEQ ID NO: 25084
  source 1..141: note = Rodentibacter trehalosifermentans
  REGION 1..141: note = tr|A0A1V3INK0|A0A1V3INK0_9PAST 6-carboxy-5,6,7,8-tetrahydropterin synthase; OS = Rodentibacter trehalosifermentans OX=1908263; GN = BKK51_10850 PE=3 SV=1

SEQ ID NO: 25089 - protein, 370 aa, Roseateles aquatilis
  REGION 1..370: note = tr|A0A246IY52|A0A246IY52_9BURK 6-pyruvoyl tetrahydropterin synthase OS=Roseateles aquatilis; OX = 431061 GN=CDN99_23305 PE=4 SV=1
MSSFPSPLFTASAGFESACQIDALPPGHRSRGLHGHSYLATVRAELPNGWAPFPGSEVHALRDCLERCIAPLDHALLNQHITQPTDENVARWIRHRLETEFKVPGITQVGIQSTAHSGVDLDANGHAHVWRRYRFQAAHQLPNVPMGHKCGRMHGHGFELILHANQDLGGRDLSIDYDHLDDLWAPFHAQLNYQCLNEIEGLSNPTSELISSWLWERLKPKLPELSWVTVYETGSSGANFDGERYRIWKEFTLDSAVKLTRAPDGHPLAGIHGHTFTLRLHLNAPLDEVHGWAMDFSDVKQLFDPIYKAMDHHPLHELAGLPDADTASLAAWVLQHAKAQLPPLERVDLYETRGSGAIVSHGPVEELIPV

SEQ ID NO: 25090 - protein, 370 aa, Roseateles depolymerans
  REGION 1..370: note = tr|A0A0U3MRU4|A0A0U3MRU4_9BURK 6-pyruvoyl tetrahydropterin synthase OS=Roseateles depolymerans; OX = 76731 GN=RD2015_91 PE=4 SV=1
MSAFPSSLFTASAGFESACHIDALPESHRSRRLHGHSYLATVRAELPAGWAPFPGGEVHALRECLERCIAPLDHALLNDHIAQPTDENIARWIRSRLVDEFGVPGISQVGIQSTTHCGVDLDAQGQAHVWRRYRFQAAHQLPNVPMGHKCGRMHGHGFELILHANQDLGERDLSIDYDRLDEIWAPFHAQLNYQCLNEIEGLSNPTSEIISSWLWARIKPQLPELSWVTVYETGSSGANFDGERYRIWKEFTLDSAVKLRRAPGDHPLAGIHGHTFTLRLHLSALLDQVYGWAMDFGDVKRLFDPIFKSLDHHPLHEIPGLADTDTATLAAWILEQSRAQLPPLERVDLYETRGSGAIVSLVPFEELIPV

SEQ ID NO: 25091 - protein, 370 aa, Roseateles depolymerans
  REGION 1..370: note = tr|A0A2W5DC24|A0A2W5DC24_9BURK 6-pyruvoyl tetrahydropterin synthase OS=Roseateles depolymerans; OX = 76731 GN=DI603_20630 PE=4 SV=1
MSVSVLHCGSAGFESACRIPALPATHRSHGLHGHSYFATVRADLRPGWAAASGGFPGGEVELLRGLMADAVAPLDHALLNDHLPDPTDENLARWVRAHLATQVSGIRQVGVQSTAHSGVDLDAAGQAHVWRRYRFQAAHQLPNVPLGHKCGRMHGHGFEVILHANADLGERALAIDYDHLDEVWAPLHMALNYQCLNQIEGLENPTSEVISAWLWQRLKPVLPELSWVTVYETGSSGANFNGTHYRIWKEMTLDSAVRLNHAPAGHPLGGIHGHTFTLRLHLAAPLDAVMGWTVDFGDVKTLFNPLFKRLDHHPLHELAGLPDGDTASLAAWVLREGGAVLPQIDRVDLYETRGNGAIVSRADSQELIPV

SEQ ID NO: 25092 - protein, 370 aa, Roseateles sp.
  REGION 1..370: note = tr|A0A1H7KH67|A0A1H7KH67_9BURK 6-pyruvoyltetrahydropterin/6-carboxytetrahydropterin synthase OS=Roseateles sp. YR242 OX=1855305; GN = SAMN05216359_103376 PE=4 SV=1
MSAFPSSLFTASAAFESACHIDALPKSHRSHRLHGHSYLATVRAQLPAGWAPFPGGEVHALREALERCVAPLDHALLNDQIAQPTDENIARWIRHRLAHEFGVPGISQVGIQSTTHSGVDLDAEGRAHVWRRYRFQAAHQLPNVPLGHKCGRMHGHGFELILHANQDLGERDLSIDYDHLDEIWAPFHALLNYQCLNEIDGLSNPTSEIISSWLWARIKPQLPELSWVTVYETGSSGANFDGERYRIWKEFTLDSAVKLNRAPGDHPLAGIHGHTFTLRLHLSALLDQVYGWAMDFGDVKQLFEPIYKSLDHHPLHEIPGLADTDTASLAAWILEQSRAQLPPLERVDLYETRGSGAIVSLVPFEELIPV

SEQ ID NO: 25093 - protein, 141 aa, Roseburia sp.
  REGION 1..141: note = tr|A0A1Q6U107|A0A1Q6U107_9FIRM 6-carboxy-5,6,7,8-tetrahydropterin synthase OS=Roseburia sp. CAG:197_41_10 OX=1897018 GN=BHW45_02325 PE=3 SV=1
MYILKTEASFDSAHFLAGYEGKCSNIHGHRWKIILEVKTEELKDDVQHRGMYVDFGELKKDLRELADSMDHALIIEKNTLKETTLEALKSENFHIIALDFRPTAENMARYFHEKIKALGYNMHAVTVYETPTNGATYMEQC

SEQ ID NO: 25094 - protein, 139 aa, Roseburia sp.; identical to SEQ ID NO: 20243
  REGION 1..139: note = tr|R5U7A7|R5U7A7_9FIRM 6-carboxy-5,6,7,8-tetrahydropterin synthase OS=Roseburia sp. CAG:50 OX=1262949 GN=BN683_01979 PE=3 SV=1

SEQ ID NO: 25095 - protein, 131 aa, unidentified
  source 1..131: note = Roseibaca calidilacus
  REGION 1..131: note = tr|A0A0P8AGX1|A0A0P8AGX1_9RHOB 6-pyruvoyl-tetrahydropterin synthase OS=Roseibaca calidilacus OX=1666912 GN=HLUCCA05_11205 PE=4 SV=1
MFAVEVRDHIMIAHSLPSPVFGPAQGMHGATFTVDAAFYTEDIDAHGLVVDIGLATEALADTLAPLRYKNLDEVPEFTGKFTTTEFLCKHIFDSMKARIAAGDLNDGGRVKKLRILLHESHMARAWFEGQV

SEQ ID NO: 25096 - protein, 131 aa, Roseibaca ekhonensis
  REGION 1..131: note = tr|A0A3B0MWV9|A0A3B0MWV9_9RHOB Uncharacterized protein OS=Roseibaca ekhonensis OX=254356 GN=ROE7235_02052; PE = 4 SV=1
MFAVEVRDHIMIAHSLPSPVFGPAQGMHGATFTVDAAFYTEDIDAHGLVVDIGLATEALAEVLQPLRYQNLDEVPEFKAKFTTTEFLCKHIFDAMQARISSGFLKDEGRVKRLRILLHESHTARAWYEGQV

SEQ ID NO: 25097 - protein, 121 aa, Roseibacillus sp.
  REGION 1..121: note = tr|A0A3R7RK53|A0A3R7RK53_9BACT 6-carboxy-5,6,7,8-tetrahydropterin synthase; OS = Roseibacillus sp. TMED18 OX=1986590 GN=queD PE=3 SV=1
  VARIANT 30: note = Xaa can be any naturally occurring amino acid
  VARIANT 36: note = Xaa can be any naturally occurring amino acid
  VARIANT 48: note = Xaa can be any naturally occurring amino acid
MRARLTKEFRFEAAHTLPSLPEGHKCRQMXGHSFKXEISVEGEVDEEXGWVYDHKRISSAMEPLLEELDHGYLNDIEGLDSPTIERMAGWFWKKLEKDLPGLCEIVIFETPTARCVFRGEF

SEQ ID NO: 25098 - protein, 121 aa, Roseibacillus sp.
  REGION 1..121: note = tr|A0A2E3NAR8|A0A2E3NAR8_9BACT 6-carboxy-5,6,7,8-tetrahydropterin synthase; OS = Roseibacillus sp. OX=2024856 GN=queD PE=3 SV=1
MRARLTKEFRFEAAHTLPSLPEGHKCRKMHGHSFKVEISVEGAVDEEIGWVYDHKQISLAMEPLLAELDHGYLNDIEGLESPTIERMAGWFWKKLEKDLPGLCEIVIFETPTARCVFRGEF

SEQ ID NO: 25099 - protein, 133 aa, Roseibium hamelinense
  REGION 1..133: note = tr|A0A562T0L9|A0A562T0L9_9RHOB 6-pyruvoyl-tetrahydropterin synthase OS=Roseibium hamelinense OX=150831 GN=JM93_02326 PE=4 SV=1
MFAVEVRDHVMIAHSFKGELFGPAQALHGATFVVDAAFLASELDNNGVVIDIGRAHEALKEVLRPLNYQNLDELPQFKGINTTTEFLTKHIYDHLAAAAKADRLGRAGSELDAIRITISESHVARAWYEAPVG

SEQ ID NO: 25100 - protein, 123 aa, Roseibium hamelinense
  REGION 1..123: note = tr|A0A562SKP3|A0A562SKP3_9RHOB 6-carboxy-5,6,7,8-tetrahydropterin synthase OS=Roseibium hamelinense OX=150831 GN=JM93_03807 PE=3 SV=1
MFRITKEFHFSASHQLFGLEEDHPCARLHGHNYVVEVELESSELNRIGFVRDYRELGAFKTYLDDCLDHRHLNDVLGDDCVTAETMARHFYNWCRQHWPETSAVRVKETPKTCAEYRPIGIAA

SEQ ID NO: 25101 - protein, 134 aa, Roseibium sp.
  REGION 1..134: note = tr|E2CF19|E2CF19_9RHOB 6-pyruvoyl tetrahydropterin synthase OS=Roseibium sp. TrichSKD4 OX=744980; GN = TRICHSKD4_1646 PE=4 SV=1
MFAVEVRDHIMIAHSFRGELFGPAQALHGATFVVDAAFFSRELDANGVVIDIGRAHEVLKEILAPLNYKNLDAVEAFEGQNTTTEFLTKHIHDRLALAARELRLGRADGEITLIRVTLSESHVARAWYEAPVEG

SEQ ID NO: 25102 - protein, 124 aa, Roseibium sp.
  REGION 1..124: note = tr|E2CGX8|E2CGX8_9RHOB 6-carboxy-5,6,7,8-tetrahydropterin synthase OS=Roseibium sp. TrichSKD4 OX=744980 GN=queD PE=3 SV=1
MFRIWKEFHFSASHQLFGLPEDHPCARLHGHNYVVEVELASEELDSVGFVRDYRELGAFKSYIDDTLDHLHLNDILGDDGVTAERMAQHFHDWCKARWPEVVAVRVRETPKTCAEYRPMRCTHG

SEQ ID NO: 25103 - protein, 131 aa, Roseicitreum antarcticum
  REGION 1..131: note = tr|A0A1H2TH68|A0A1H2TH68_9RHOB 6-pyruvoyl-tetrahydropterin synthase OS=Roseicitreum antarcticum OX=564137 GN=SAMN04488238_10258 PE=4 SV=1
MYAVEVRDHIMIAHSFPSPVFGPAQGVHGATFTVDAAFFAEDIDEHGLVVDIGLAIDALAQVLEPLRYKNLDDESQFKGTFTTTEFLSGHIFRALAEKVRAGELKDAKRVKRLRITLHESHLARGWFEAEI

SEQ ID NO: 25104 - protein, 280 aa, Roseiflexus castenholzii
  REGION 1..280: note = tr|A7NG46|A7NG46_ROSCS Uncharacterized protein; OS = Roseiflexus castenholzii (strain DSM 13941 / HLO8); OX = 383372 GN=Rcas_0300 PE=4 SV=1
MIYATRRFEFSAAHRYWRSDWSAEENERVFGPCAYPYGHGHNYTLDVTITGDLDPRTGMVMNMTELKALVSEVLEEFDHKHLNEDTPYFCEQLPTTENIVRVLWRLIAARLPHTARLARLRLYETSDLWAEYDGAEETTFARMYAFSAAHRLHSPLLSDKENLAIYGKCNNPNGHGHTYTLEVTVAGPVDPETGMVIDLTAMDRTVRSVLDRLDYRHLDREIAAFATQPSTAENIVIYLWQELAPRFEGRLRHLKLWETRKNVFEYTGPGAALPHTRHNR

SEQ ID NO: 25105 - protein, 275 aa, Roseiflexus sp.
  REGION 1..275: note = tr|A5UR67|A5UR67_ROSS1 Uncharacterized protein; OS = Roseiflexus sp. (strain RS-1) OX=357808 GN=RoseRS_0704; PE = 4 SV=1
MVYATRRFEFSAAHRYWRPDWSAEENERVFGPCAYPYGHGHNYTLDVTITGELDPRTGMVMNMTELKSLVSEVLNEFDHKHLNEDTPYFRDQLPTTENIVRVLWRLIAARLPVAARLVRLRLYETGDLWAEYDGADETTFARVYTFSAAHRLHSPLLSDEENLAIYGKCNNPNGHGHTYTLEVSVAGPVDPDTGMVIDLATMDRTVRSVLDRIDYRHLDREIAAFATKPSTAENIVIYLWDELAPRFEGRLRHLTLWETRKNVFEYAGPDARHHG

SEQ ID NO: 25106 - protein, 143 aa, unidentified
  source 1..143: note = Roseimaritima ulvae
  REGION 1..143: note = tr|A0A5B9QUN7|A0A5B9QUN7_9PLAN 6-carboxy-5,6,7,8-tetrahydropterin synthase; OS = Roseimaritima ulvae OX=980254 GN=queD_2 PE=4 SV=1
MSLTVMRRVTFCAGHRLLNHDGKCVNLHGHNYVAEFYVVADQQDEVGRVIDFKLLKIRCKGWLDEHWDHAFLLWDKDTEALNAIRQTNPHRIFELPYNPTAENLAKYLLEIACPQMLEGTGARAQRVVIWESEESCAEVTVAD

SEQ ID NO: 25107 - protein, 169 aa, unidentified
  source 1..169: note = Roseimaritima ulvae
  REGION 1..169: note = tr|A0A5B9QIL5|A0A5B9QIL5_9PLAN 6-carboxy-5,6,7,8-tetrahydropterin synthase; OS = Roseimaritima ulvae OX=980254 GN=queD_1 PE=4 SV=1
MPAPQQATFRVDVSKEAFVFSAAHFITFAGDICERLHGHNYGVRVTVEGPLDDNRYVVDFIALRDAVLAETGQWDHHVLLPTEHAEIRVHSDDKETTATFRERRWVFPNEDCILLPVINTTAEEMARVLAERVRQRTREQFGETLTWIEVAVDENHGQWGVCRLPWNAS

SEQ ID NO: 25108 - protein, 121 aa, unidentified
  source 1..121: note = Roseimicrobium gellanilyticum
  REGION 1..121: note = tr|A0A366H2P9|A0A366H2P9_9BACT 6-carboxy-5,6,7,8-tetrahydropterin synthase; OS = Roseimicrobium gellanilyticum OX=748857 GN=DES53_1195; PE = 3 SV=1
MRCRLVKDYRFEAAQTLPSLPGNHKCKKMHGHSFKVEIAVEGEVDPKIGWVYDHAEISRAMNPLLEQLDHSYLNEIEGLENPTIEIMAAWLWKKLAPQLPGLCEIVIHETPTARCVFRGEF

SEQ ID NO: 25109 - protein, 131 aa, Roseinatronobacter monicus
  REGION 1..131: note = tr|A0A543K9C3|A0A543K9C3_9RHOB 6-pyruvoyl-tetrahydropterin synthase OS=Roseinatronobacter monicus OX=393481 GN=BD293_0219 PE=4 SV=1
MYAVEVRDHIMIAHSFPSPLFGPAQGMHGATFTVDAAFFADDIDEHGLVVDIGLATEALAQVLEPLRYKNLDEVAQFKGVFTTTEFLSGHIFREMADRVRAGDLKDSGRVKRLRITLHESHLARGWFEAEI

SEQ ID NO: 25110 - protein, 117 aa, Roseinatronobacter monicus
  REGION 1..117: note = tr|A0A543KBB9|A0A543KBB9_9RHOB 6-carboxy-5,6,7,8-tetrahydropterin synthase; OS = Roseinatronobacter monicus OX=393481 GN=BD293_0979 PE=3; SV = 1
MFRITKEFHFSASHQLSHLPADHQCARLHGHNYIVVVELAAPDLNADGFVRDYHELKPLKAYIDDTFDHHHLDDVLEVPSTAENLARHFYDWCKARWSETAAVKVSETPKTWAEYRP

SEQ ID NO: 25111 - protein, 131 aa, Roseinatronobacter thiooxidans
  REGION 1..131: note = tr|A0A2W7QB26|A0A2W7QB26_9RHOB 6-pyruvoyl-tetrahydropterin synthase OS=Roseinatronobacter thiooxidans OX=121821 GN=LY56_01461 PE=4 SV=1
MFAVEVRDHIMIGHSLPSPVFGPAQGMHGATFTVDAAFMTEDIDQHGLVVDIGLATDALAQVLAPLRYKNLDEVPEFEGKFTTTEFLCRHIFDQMAMRVRAGQLSDAGRVLRLRIMLHESHLARAWYEGSI

SEQ ID NO: 25112 - protein, 117 aa, Roseinatronobacter thiooxidans
  REGION 1..117: note = tr|A0A2W7Q889|A0A2W7Q889_9RHOB 6-carboxy-5,6,7,8-tetrahydropterin synthase; OS = Roseinatronobacter thiooxidans OX=121821 GN=LY56_02302; PE = 3 SV=1
MFRITKEFHFSASHQLSHLPSDHQCARLHGHNYIVVVELAAHSLNTDGFVRDYHELKPLKSYIDDTFDHHHLDDILDIPSTAENLARHFYDWCKARWPETAAVKVSETPKTWAEYRP

SEQ ID NO: 25113 - protein, 139 aa, Roseivirga echinicomitans
  REGION 1..139: note = tr|A0A150XUF5|A0A150XUF5_9BACT 6-pyruvoyl tetrahydrobiopterin synthase OS=Roseivirga echinicomitans; OX = 296218 GN=AWN68_13980 PE=4 SV=1
MIYISRKEHFNAAHKLYNPNWSEEKNVEVFGPCANANWHGHNFELITTVKGKPDPETGFVVDLKQLSNVIRAEVIEKLDHKNLNIDVDFMQGKMASCEILVMEIWKILEPEVAKITSTGKLHSLRLYETPRNFVEYFGE

SEQ ID NO: 25114 - protein, 135 aa, Roseivirga echinicomitans
  REGION 1..135: note = tr|A0A150XJG4|A0A150XJG4_9BACT 6-carboxy-5,6,7,8-tetrahydropterin synthase OS=Roseivirga echinicomitans OX=296218 GN=AWN68_04420 PE=3 SV=1
MKIAVYRKEHFNAAHRLHNPKWTEEKNDEIFGKCNNPSFHGHNYELIVKVVGEQDPETGYVCDMKILKDIIKAHVTDKFDHRNLNLDVTEFKNLNPTAENIAVVIYNLLRPEIDQKLELKIRLYETERNFVEYPA

SEQ ID NO: 25115 - protein, 139 aa, Roseivirga ehrenbergii
  REGION 1..139: note = tr|A0A150XND2|A0A150XND2_9BACT 6-pyruvoyl tetrahydrobiopterin synthase OS=Roseivirga ehrenbergii; OX = 279360 GN=MB14_16810 PE=4 SV=1
MIYISRKEHFNAAHKLYNPNWSEEKNVEVFGPCANANWHGHNFELITTVKGKPDPETGFVVDLKQLSNVIRAEVIEKLDHKNLNMDVDFMQGKMASCEILVMEIWKILEPEVTKITSTGKLHSLRLYETPRNFVEYFGE

SEQ ID NO: 25116 - protein, 135 aa, Roseivirga ehrenbergii
  REGION 1..135: note = tr|A0A150XP96|A0A150XP96_9BACT 6-carboxy-5,6,7,8-tetrahydropterin synthase OS=Roseivirga ehrenbergii OX=279360 GN=MB14_15325 PE=3 SV=1
MKIAVYRKEHFNAAHRLYNPKWSEEKNDEVFGKCNNPSFHGHNYELIVKVVGEQDPETGYVCDMKILKDIIKTHVTDKFDHKNLNLDVTEFKNLNPTAENIAVVIYNLLRPEIDQKLELKIRLYETERNFVEYPA

SEQ ID NO: 25117 - protein, 135 aa, unidentified; identical to SEQ ID NO: 25116
  source 1..135: note = Roseivirga seohaensis
  REGION 1..135: note = tr|A0A0L8ALN6|A0A0L8ALN6_9BACT 6-carboxy-5,6,7,8-tetrahydropterin synthase OS=Roseivirga seohaensis subsp. aquiponti OX=1566026 GN=OB69_05840 PE=3; SV = 1

SEQ ID NO: 25118 - protein, 135 aa, unidentified
  source 1..135: note = Roseivirga seohaensis
  REGION 1..135: note = tr|A0A150Y1V8|A0A150Y1V8_9BACT 6-carboxy-5,6,7,8-tetrahydropterin synthase OS=Roseivirga seohaensis OX=1914963 GN=AWW67_16880 PE=3 SV=1
MKIAVYRKEHFNAAHRLYNPKWSEEKNDEVFGKCNNPSFHGHNYELIVKVVGEQDPETGYVCDMKILKDIIKTHVTDKFDHKNLNLDVTEFKNLNPTAENIALVIYNLLRPEIDQKLELKIRLYETERNFVEYPA

SEQ ID NO: 25119 - protein, 139 aa, Roseivirga sp.
  REGION 1..139: note = tr|A0A316KA77|A0A316KA77_9BACT 6-carboxytetrahydropterin synthase QueD OS=Roseivirga sp. XM-24bin3 OX=2133949 GN=DCO95_07350 PE=4 SV=1
MVYVSRKEHFNAAHKLYNPNWSEEKNVELFGPCANANWHGHNFELITTVKGQPDAETGFVVDLKQLSNLIRAEVIDKLDHKNLNVDVDFMRGKMASCENLVMEIWKILAPRVAEITPQGQLHSLKLYETPRNFVEYFGE

SEQ ID NO: 25120 - protein, 135 aa, Roseivirga sp.
  REGION 1..135: note = tr|A0A316KCS7|A0A316KCS7_9BACT 6-carboxy-5,6,7,8-tetrahydropterin synthase OS=Roseivirga sp. XM-24bin3 OX=2133949 GN=DCO95_03525 PE=3 SV=1
MKVAVFRKEHFNAAHRLHNPKWSKEKNESIFGKCNNEYYHGHNYELIIKVSGEPDPDTGYVYDMKVLSDMIKDNVTDKFDHRNLNLDVEEFKDLNPTAENIAVVIYNILRDKIEPRFDLKVTLYETERNFVEYPA

SEQ ID NO: 25121 - protein, 139 aa, Roseivirga spongicola
  REGION 1..139: note = tr|A0A150WXU4|A0A150WXU4_9BACT 6-pyruvoyl tetrahydrobiopterin synthase OS=Roseivirga spongicola; OX = 333140 GN=AWW68_18735 PE=4 SV=1
MVYVSRKEHFNAAHKLYNPNWSEEKNVEVFGPCANANWHGHNFELITTVKGQPDAETGFVVDLKQLSNLIRAEVIDKLDHRNLNVDVDFMEGKMASCENLVMEIWKILAPRVAEITPQGQLHSLKLYETPRNFVEYFGE

SEQ ID NO: 25122 - protein, 135 aa, Roseivirga spongicola; identical to SEQ ID NO: 25120
  REGION 1..135: note = tr|A0A150X5W6|A0A150X5W6_9BACT 6-carboxy-5,6,7,8-tetrahydropterin synthase OS=Roseivirga spongicola OX=333140 GN=AWW68_15750 PE=3 SV=1

SEQ ID NO: 25123 - protein, 131 aa, Roseivivax halotolerans
  REGION 1..131: note = tr|A0A1I6AML5|A0A1I6AML5_9RHOB 6-pyruvoyl-tetrahydropterin synthase OS=Roseivivax halotolerans OX=93684 GN=SAMN05421853_12611 PE=4 SV=1
MFAVEVRDHIMIGHSLPSPVFGPAQGMHGATFTVDVAFYTEDIDEHGLVVDIGLATEALTATLNPLRYQNLDEVPEFKGKFTTTEFLCKHIFDQMAKAVRDGDLQDKSRVKKLRILLHESHVARAWYEGVI

SEQ ID NO: 25124 - protein, 131 aa, Roseivivax isoporae
  REGION 1..131: note = tr|X7F870|X7F870_9RHOB 6-pyruvoyl tetrahydropterin synthase OS=Roseivivax isoporae LMG 25204 OX=1449351; GN = RISW2_04235 PE=4 SV=1
MFAVEVRDHIMIAHSFPSELFGPAQGMHGATFIVDAAFFTDDIDEHGLVVDIGLATEVLTDALGPLRYKNLDEVPEFAGKFTTTEFLCGHIFKVMAERVRAGDLKDSGRVKRLRIQLHESHTARAWYEAEI

SEQ ID NO: 25125 - protein, 131 aa, unidentified
  source 1..131: note = Roseivivax jejudonensis
  REGION 1..131: note = tr|A0A1X7AAI9|A0A1X7AAI9_9RHOB 6-pyruvoyl tetrahydropterin synthase OS=Roseivivax jejudonensis; OX = 1529041 GN=ROJ8625_04012 PE=4 SV=1
MFAVEVTDHIMIGHSLPSEVFGPAQGMHGATFTVDAAFFTNDIDDHGLVVDIGLATEALNEVLGPLRYKNLDEVPEFKGKFTTTEFLCGHIFARMAEKVRSGALNDGGRVKRLRILLHESHVARAWFEDEI

SEQ ID NO: 25126 - protein, 131 aa, Roseivivax lentus
  REGION 1..131: note = tr|A0A1N7PAH8|A0A1N7PAH8_9RHOB 6-pyruvoyl-tetrahydropterin synthase OS=Roseivivax lentus; OX = 633194 GN=SAMN05421759_11423 PE=4 SV=1
MFAVEVRDHIMIAHSFASPIFGPAQNMHGATFTVDAAFYTEDIDQHGLVVDIGLATDMLSEVLAPLKFQNLDEVPEFEGKFTTTEFLCRHIFDRMAGFVREGRLKDDGRVKKLRILLHESHVARAWYEGEV

SEQ ID NO: 25127 - protein, 121 aa, unidentified
  source 1..121: note = Rosenbergiella nectarea
  REGION 1..121: note = tr|A0A1H9ITS7|A0A1H9ITS7_9ENTR 6-carboxy-5,6,7,8-tetrahydropterin synthase; OS = Rosenbergiella nectarea OX=988801; GN = SAMN05216522_106176 PE=3 SV=1
MAVTTLFKEFQFEAAHFLPHVPEGHKCGRLHGHSFLVRLEITGEVDAHTGWVMDFAELKAAFKPLYERLDHHYLNDIAGLENPTSEVLAVWIWQQMKPKLPLLSAVMIKETCTAGCTYRGE

SEQ ID NO: 25128 - protein, 117 aa, Roseobacter sp.
  REGION 1..117: note = tr|B7RRH7|B7RRH7_9RHOB 6-carboxy-5,6,7,8-tetrahydropterin synthase OS=Roseobacter sp. GAI101 OX=391589 GN=queD PE=3 SV=1
MYRITKEFHFSASHQLSHLPDGHQCARLHGHNYIVVVELAAADLNADGFVRDYGELKPLKTYIDDTFDHRHLNDVMDVASTGENMARHFYDWCVALWPETTAVKVSETPKTWAEYRP

SEQ ID NO: 25129 - protein, 121 aa, Roseobacter sp.
  REGION 1..121: note = tr|A4EQD4|A4EQD4_9RHOB 6-carboxy-5,6,7,8-tetrahydropterin synthase OS=Roseobacter sp. SK209-2-6 OX=388739 GN=RSK20926_13174 PE=3 SV=1
MFRITKEFHFSASHQLTHLPADHQCARMHGHNYIVMIELAARELNTDGFVRDYHELKPLKDYIDGTFDHRHLNDVLEGPSTAENMAKHFYDWSHARWPEVTAVKVSETPKTWAEYRPEVRP

SEQ ID NO: 25130 - protein, 133 aa, Roseococcus sp.
  REGION 1..133: note = tr|A0A4R0YLP5|A0A4R0YLP5_9PROT 6-carboxytetrahydropterin synthase OS=Roseococcus sp. SYP-B2431 OX=2496640 GN=EJV46_07590 PE=4 SV=1
MFSLTVVDHIMVAHSFRGAEFGPAQRLHGATFVVEAEFRAPKLDDLHLLIDIGLAKDELRKILAALDYRNLDEVPEFAAKNTTTEFLCLHIHGLLAAACRDGRMGPGGDGVTGIKVLLRESHVAWAAFEGPLE

SEQ ID NO: 25131 - protein, 122 aa, Roseococcus sp.
  REGION 1..122: note = tr|A0A4R0YCJ3|A0A4R0YCJ3_9PROT 6-carboxy-5,6,7,8-tetrahydropterin synthase OS=Roseococcus sp. SYP-B2431 OX=2496640 GN=EJV46_00775 PE=3 SV=1
MFELSKQFRFEAAHTLHRAIDAEPSRRIHGHSYRAEVTLRGPRDPETGMVMDLGLFRRALEGVRDGLDHRFLDEVPDLGPPTLESLSAWIWQRLETDCPNLAKVTVYRDSEGDTCSYFGPNS

SEQ ID NO: 25132 - protein, 169 aa, unidentified
  source 1..169: note = Roseofilum reptotaenium
  REGION 1..169: note = tr|A0A1L9QUH6|A0A1L9QUH6_9CYAN Uncharacterized protein OS=Roseofilum reptotaenium AO1-A OX=1925591; GN = BI308_06790 PE=4 SV=1
MEIVSVSEPIDKQPKLKYQSTKVFDGFSTCFRQWRSQGSHCHFLHGYSVSFKVWFEGELDHHCWVWDFGGMKKARTQIDGMNPKAWMEYMFDHTVIVAEDDPYLPSFYQLQEQGVIQLRVLQAVSAEKFAELVLTKLNEFVQTETAGRVRVKRVEFREHERNSAVVESN

SEQ ID NO: 25133 - protein, 132 aa, Roseomonas aestuarii
  REGION 1..132: note = tr|A0A2U1V921|A0A2U1V921_9PROT Uncharacterized protein OS=Roseomonas aestuarii OX=568898 GN=CR165_00375; PE = 4 SV=1
MFSLTVADHIMVAHSFRGEEFGPAQRVHGATFVVEAEFRAARLDASNLLVDIAAARVELRRILDAIDYRNLDTVPEFAGQNTSTEFLCQHIHGRLGAAVKDGRLGESGRKVEAIKVLLRESPLAWAAYEAAV

SEQ ID NO: 25134 - protein, 135 aa, Roseomonas cervicalis
  REGION 1..135: note = tr|D5RRW6|D5RRW6_9PROT Uncharacterized protein; OS = Roseomonas cervicalis ATCC 49957 OX=525371; GN = HMPREF0731_3828 PE=4 SV=1
MPMFSLTVADHIMVAHSFRGEGFGPAQRVHGATFVVEAEFRAPRLGPDNLLIDIAAARVELRRILDGFDYNNLDTLPQFAGQNTSTEFLCQHIHALLSAALREGRLGAGGGAVTGIKVLLRESPLAWAAYEAEPA

SEQ ID NO: 25135 - protein, 133 aa, unidentified
  source 1..133: note = Roseomonas deserti
  REGION 1..133: note = tr|A0A1V2GVY9|A0A1V2GVY9_9PROT Uncharacterized protein OS=Roseomonas deserti OX=1817963 GN=BKE38_24175; PE = 4 SV=1
MFSLTVADHIMVAHSFRGEGFGPAQRVHGATFVVEAEFRAPRLDEANLLVDIAAARVELRKILDAIDYRNLDTVPEFAGQNTSTEFLCHHIHGLLSAAVKDGRLGDSGRKVEAIKVLLRESPLAWAAYEAPVA

SEQ ID NO: 25136 - protein, 178 aa, unidentified
  source 1..178: note = Roseomonas deserti
  REGION 1..178: note = tr|A0A1V2H4L4|A0A1V2H4L4_9PROT 6-pyruvoyl tetrahydropterin synthase OS=Roseomonas deserti OX=1817963; GN = BKE38_07325 PE=4 SV=1
MFGLVFSRRFSMAHRLTAGLSEKCALPHGHNETVTVRLTATQPQRLDGAANMVEPFERAKARWHGWIDDAVDHAFQVNAADPLLGWFRQHEPTRAARLLVTPGDPTTEMLACLMMTKISAFLAADGGVLRCASIRIEETPTNSVTFDGDPAAFLPEGLPADAWWHRADASINDLGAAA

SEQ ID NO: 25137 - protein, 132 aa, Roseomonas gilardii
  REGION 1..132: note = tr|A0A1L7ACA9|A0A1L7ACA9_9PROT 6-carboxy-5,6,7,8-tetrahydropterin synthase OS=Roseomonas gilardii OX=257708 GN=RGI145_04290 PE=3 SV=1
MIETLKEFTFEAAHQLPPFSGLHGHSFLVQVFLRGEPDPVYGWSHNLYEVEKVVEKVRLKVDHTYLNDIEGLEHPSLENVARWIWTQLASDLDGLDRVVVRRGPDGLAEGCTYSGRTSGEKRGAGEIYNLGG

SEQ ID NO: 25138 - protein, 132 aa, Roseomonas gilardii
  REGION 1..132: note = tr|A0A379NEQ3|A0A379NEQ3_9PROT 6-carboxy-5,6,7,8-tetrahydropterin synthase OS=Roseomonas gilardii subsp. rosea OX=243956 GN=queD PE=3 SV=1
MIETLKEFTFEAAHQLPPFSGLHGHSFLVQVFLRGEPDPVYGWSHNLYEVEKVVEKVRLKVDHTYLNDIEGLEHPSLENVARWIWNQLAGDLDGLDRVMVRRGPDGLAEGCTYSGRPISEKQGAGEIYNLGG

SEQ ID NO: 25139 - protein, 187 aa, Roseomonas mucosa
  REGION 1..187: note = tr|A0A1S8D9G1|A0A1S8D9G1_9PROT 6-pyruvoyl tetrahydropterin synthase OS=Roseomonas mucosa OX=207340; GN = APZ41_000050 PE=4 SV=1
MFGLVFSRRYAMGHRLLSGGSEKCAVPHGHNETVTVRLEAARPAPLDGHANMVEPFERAKSRWHRWIDGAVDHAFQIAEHDPLLAWFRQNEPHRLDRLLVTPGDPTTEVLACLFMSKLNTFLAEDGGRLRCVGIRIEETPTNTVTFDGDPLAFLPAAALDGAPRWWQRADDSINNLSMPLRAVVGAA

SEQ ID NO: 25140 - protein, 132 aa, Roseomonas mucosa
  REGION 1..132: note = tr|A0A4Y1MWD4|A0A4Y1MWD4_9PROT 6-carboxy-5,6,7,8-tetrahydropterin synthase OS=Roseomonas mucosa OX=207340 GN=RADP37_01288 PE=3 SV=1
MIETLKEFTFEAAHQLPPFSGLHGHSFLVQVFLRGEPDPVYGWSHNLYEVEKVVEKVRLKVDHTYLNDIEGLEHPSLENVARWIWGQLSTELDGLDRVVVRRGPDGLAEGCTYSGHSDAGKLVTERIHNLGG

SEQ ID NO: 25141 - protein, 170 aa, unidentified
  source 1..170: note = Roseomonas nepalensis
  REGION 1..170: note = tr|A0A502G818|A0A502G818_9PROT 6-pyruvoyl tetrahydrobiopterin synthase OS=Roseomonas nepalensis; OX = 1854500 GN=EAH89_08695 PE=4 SV=1
MDTLPQRVAVPAIWRSTKTYGHEEGLSCCFRQWRATHSHCQLLHGYALSFRLTFASSELDERYWCFDFGGLKPIKAWLHEMFDHTLLVAADDPGLPEFQRLAAGGLAELRVLPAVGCEATARHAFDYIARYVDTSTDGRVWLEEVEVREHSGNSAIYTPNSQSRRSGPSS

SEQ ID NO: 25142 - protein, 170 aa, unidentified
  source 1..170: note = Roseomonas nepalensis
  REGION 1..170: note = tr|A0A502EFB3|A0A502EFB3_9PROT 6-pyruvoyl tetrahydrobiopterin synthase OS=Roseomonas nepalensis; OX = 1854500 GN=EAH89_30175 PE=4 SV=1
MDTLTQRAAVPASWRSTKTYGHEEGLSCCFRQWRATHSHCQLLHGYALSFRLTFASSELDERHWCFDFGGLKPIKAWLHEMFDHTLLVAADDPSLPEFQGLAASGLAELRVLPAVGCEATARYAFDYIARYVDMSTGGRVWLEEVEVREHSGNSAMYTPNGQSRGISASS

SEQ ID NO: 25143 - protein, 133 aa, unidentified
  source 1..133: note = Roseomonas oryzae
  REGION 1..133: note = tr|A0A5B2TFB0|A0A5B2TFB0_9PROT 6-carboxytetrahydropterin synthase OS=Roseomonas oryzae; OX = 1608942 GN=F0Q34_13945 PE=4 SV=1
MFSLTVADHIMVAHSFRGEAFGPAQRVHGATFVVEAEFRAPKLDDANLLVDIAAARVELRRILDEIDYRNLDEEPRFAGQNTSTEFLCHHIHGALAAAVREGRLGESGRSVRSIKVLMRESPLAWAAYEADLA

SEQ ID NO: 25144 - protein, 137 aa, unidentified
  source 1..137: note = Roseomonas rhizosphaerae
  REGION 1..137: note = tr|A0A2C7AGI5|A0A2C7AGI5_9PROT Uncharacterized protein OS=Roseomonas rhizosphaerae OX=1335062; GN = CR162_02790 PE=4 SV=1
MFSLTVADHIMVAHSFRGEAFGPAQRVHGATFVVEAEFRAPRLDAANLLVDIAAARVELRAILDEIDYRNLDTVPEFAGQNTSTEFLCRHIHGRLCAALRGGRLRESGHMVEAVKVLLRESPLAWAAYEAPVTGGAG

SEQ ID NO: 25145 - protein, 139 aa, unidentified
  source 1..139: note = Roseomonas rosea
  REGION 1..139: note = tr|A0A1M6KWX9|A0A1M6KWX9_9PROT 6-pyruvoyl-tetrahydropterin synthase OS=Roseomonas rosea; OX = 198092 GN=SAMN02745194_03009 PE=4 SV=1
MYSLTVADHVMIAHSFRGEAFGPAQRVHGATFVVEAEFRAPRLDDANLLVDIAAARVELRRILDSFDYSNLDTLPAFTGQNTTTEFLCFHVHGLLCGALAEGKLGAGGKDVVSVKVLLRESPLAWAAYEAEVPKRTAAA

SEQ ID NO: 25146 - protein, 132 aa, Roseomonas sp.
  REGION 1..132: note = tr|A0A1Q2YVU4|A0A1Q2YVU4_9PROT 6-carboxy-5,6,7,8-tetrahydropterin synthase OS=Roseomonas sp. TAS13 OX=1926319 GN=queD PE=3 SV=1
MIETLKEFTFEAAHQLPPFSGLHGHSFLVQVFLRGEPDPVYGWSHNLYEVEKVVEKVRLKVDHTYLNDIEGLEHPSLENVARWIWGQLSTELDGLDRVVVRRGPDGLAEGCTYSGHSDAGKLVTERIHNLEG

SEQ ID NO: 25147 - protein, 132 aa, Roseomonas sp.
  REGION 1..132: note = tr|A0A317FBX4|A0A317FBX4_9PROT Uncharacterized protein OS=Roseomonas sp. CQN31 OX=2184016 GN=DFH01_15795; PE = 4 SV=1
MFSLTVVDHIMIAHSFRGEAFGPAQRLHGATFVVEAEFCAPKLDDLHLLIDIGLAKDVLRAVLAPIDYRNLDAEPVFAGKNTTTEYLCLHIQQELASACRDGRLGDGGKAVTGIKVLLRESHIAWAAFEGPV

SEQ ID NO: 25148 - protein, 132 aa, Roseomonas stagni
  REGION 1..132: note = tr|A0A1I4CJN1|A0A1I4CJN1_9PROT 6-pyruvoyl-tetrahydropterin synthase OS=Roseomonas stagni DSM 19981 OX=1123062 GN=SAMN02745775_107233 PE=4 SV=1
MFSLTVVDHIMIAHSFRGDAFGPAQRLHGATFIVEAEFRAPKLDDLHLLVDIGMAKDHLRAILAPMDYRNLDAEPVFAGKNTTTEYLCLHIHGLLAQACRDGVLGDGGKAVTGLKILLRESHIAWAAFEGPV

SEQ ID NO: 25149 - protein, 118 aa, Roseovarius aestuarii
  REGION 1..118: note = tr|A0A1X7BN10|A0A1X7BN10_9RHOB 6-carboxy-5,6,7,8-tetrahydropterin synthase OS=Roseovarius aestuarii OX=475083 GN=queD PE=3 SV=1
MYRITKEFHFSASHQLCGLSDDHPCARLHGHNYIVEVELSSDTLDENGFVLDYRALAPLKKYIDEELDHRHLNDVFGHDMVTSERLAKDLYDWCRARWDQVSALRISETPKTWAEYRP

SEQ ID NO: 25150 - protein, 118 aa, unidentified
  source 1..118: note = Roseovarius albus
  REGION 1..118: note = tr|A0A1X6ZHB1|A0A1X6ZHB1_9RHOB 6-carboxy-5,6,7,8-tetrahydropterin synthase OS=Roseovarius albus OX=1247867 GN=queD PE=3 SV=1
MYRITKEFAFSASHQLIGLPEDHQCGRMHGHNYIVMIELSANELNENGFVRDYQELAPLKAYIDDNFDHRHLNDVLSNDMVTAERLAKHFFDWAKARWSEVSAVRVCETPKTWAEYRP

SEQ ID NO: 25151 - protein, 131 aa, unidentified
  source 1..131: note = Roseovarius atlanticus
  REGION 1..131: note = tr|A0A0T5NU19|A0A0T5NU19_9RHOB 6-pyruvoyl tetrahydropterin synthase OS=Roseovarius atlanticus; OX = 1641875 GN=XM53_12360 PE=4 SV=1
MFAVEVRDHIMIAHSLPSPVFGPAQGLHGATFVVDAAFYTEDLDENGLVVDIGLATEALNAALEPLKYGNLDDKPEFEGKITTTEFLCHHIWAQLRDHTKTEGLGDGGRVKRIRVQLHESHVARGWYESDI

SEQ ID NO: 25152 - protein, 122 aa, unidentified
  source 1..122: note = Roseovarius atlanticus
  REGION 1..122: note = tr|A0A0T5NTH7|A0A0T5NTH7_9RHOB 6-carboxy-5,6,7,8-tetrahydropterin synthase OS=Roseovarius atlanticus OX=1641875 GN=XM53_11365 PE=3 SV=1
MYTITKEFHFSASHQLHGLPEDHQCARLHGHNYVVVIELRAEALNGHGFVRDYLDLAEFKRYIDDTLDHRHLNDVLGDDCVTAERLARHFHDWCRERWPEVTAAKVSETPKTWAEYRPVSWP

SEQ ID NO: 25153 - protein, 118 aa, unidentified
  source 1..118: note = Roseovarius azorensis
  REGION 1..118: note = tr|A0A1H7WI30|A0A1H7WI30_9RHOB 6-carboxy-5,6,7,8-tetrahydropterin synthase OS=Roseovarius azorensis OX=1287727 GN=SAMN05443999_11577 PE=3 SV=1
MYRITKEFHFSASHQLKDLPATHQCARLHGHNYVVVVELASDALNAHGFVRDYHDLAELKRYIDEELDHRHLNDVLGDDCVTAERMARHFHDWCKTRWPEVVAARVSETPKTWAEYRP

SEQ ID NO: 25154 - protein, 118 aa, unidentified
  source 1..118: note = Roseovarius gaetbuli
  REGION 1..118: note = tr|A0A1X6YFF0|A0A1X6YFF0_9RHOB 6-carboxy-5,6,7,8-tetrahydropterin synthase OS=Roseovarius gaetbuli OX=1356575 GN=queD PE=3 SV=1
MYRISKEFHFSASHQLKGLPEDHQCARLHGHNYIVVIELASTELNAHGFVRDYLDLAPLKCYIDDTLDHRHLNDILGDDCVTAERMAKHFYNWAHARWPEVSAAKVSETPKTWAEYRP

SEQ ID NO: 25155 - protein, 118 aa, Roseovarius halotolerans
  REGION 1..118: note = tr|A0A1X6YE17|A0A1X6YE17_9RHOB 6-carboxy-5,6,7,8-tetrahydropterin synthase OS=Roseovarius halotolerans OX=505353 GN=queD PE=3 SV=1
MYTITKEFHFSASHQLFGLPEDHQCARLHGHNYIVVVELRSETLNQHGFVRDYHDLAGLKRYIDEELDHRHLNDVLGDDCVTAERMAKHFFQWCHAQWPEVTAVRVSETPKTWAEYRP

SEQ ID NO: 25156 - protein, 118 aa, Roseovarius indicus
  REGION 1..118: note = tr|A0A0T5P3G2|A0A0T5P3G2_9RHOB 6-carboxy-5,6,7,8-tetrahydropterin synthase OS=Roseovarius indicus OX=540747 GN=SAMN04488031_12125 PE=3 SV=1
MYRITKEFAFSASHQLKDLPSDHQCARLHGHNYVVVVELASAELNAHGFVRDYHELGPLKRYIDDELDHRHLNDVLGDDMVTAERLAKHFHDWCADRWPETAAVKVSETPKTWAEYRP

SEQ ID NO: 25157 - protein, 131 aa, unidentified
  source 1..131: note = Roseovarius litoreus
  REGION 1..131: note = tr|A0A1M7C665|A0A1M7C665_9RHOB 6-pyruvoyl-tetrahydropterin synthase OS=Roseovarius litoreus OX=1155722 GN=SAMN05443432_10246 PE=4 SV=1
MFAVEVRDHIMIAHSLPSPVFGPAQGMHGATFTVDAAFYTADIDAHGLVVDIGLATEALTDTLAPLRYKNLDEIPEFAGKFTTTEFLCKHIFDRMAEAVRDGRLKDDGRVRKLRIQLHESHVARAWYEGDI

SEQ ID NO: 25158 - protein, 118 aa, unidentified
  source 1..118: note = Roseovarius litoreus
  REGION 1..118: note = tr|A0A1M7F597|A0A1M7F597_9RHOB 6-carboxy-5,6,7,8-tetrahydropterin synthase OS=Roseovarius litoreus OX=1155722 GN=SAMN05443432_10440 PE=3 SV=1
MYTITKEFHFSASHQLFGLPEDHQCARLHGHNYIVVVELRAEDLNAHGFVRDYLDLAELKRYIDDKLDHRHLNDVLGDDCVTAERMARHFYEWCVGRWPEVSAVKVSETPKTWAEYRP

SEQ ID NO: 25159 - protein, 118 aa, unidentified
  source 1..118: note = Roseovarius lutimaris
  REGION 1..118: note = tr|A0A1I5FFG1|A0A1I5FFG1_9RHOB 6-carboxy-5,6,7,8-tetrahydropterin synthase OS=Roseovarius lutimaris OX=1005928 GN=SAMN04487859_11993 PE=3 SV=1
MYRISKEFHFSASHQLKGLPEDHQCARLHGHNYIVVIELASPALNTHGFVRDYLDLAPLKHYIDDTLDHRHLNDILGDDCVTAERMAKHFYDWAHARWPEVSAAKVSETPKTWAEYRP

SEQ ID NO: 25160 - protein, 118 aa, unidentified
  source 1..118: note = Roseovarius marisflavi
  REGION 1..118: note = tr|A0A1M6VPG0|A0A1M6VPG0_9RHOB 6-carboxy-5,6,7,8-tetrahydropterin synthase OS=Roseovarius marisflavi OX=1054996 GN=SAMN05444414_101437 PE=3 SV=1
MYRISKEFHFSASHQLKGLPEDHQCARLHGHNYIVVIELASTELNAHGFVRDYLDLAPLKRYIDDTLDHRHLNDILGDDGVTAERMAKHFYDWAHARWPEVSAAKVSETPKTWAEFRP

SEQ ID NO: 25161 - protein, 131 aa, Roseovarius mucosus
  REGION 1..131: note = tr|A0A1V0RJ92|A0A1V0RJ92_9RHOB 6-pyruvoyl tetrahydropterin synthase OS=Roseovarius mucosus OX=215743; GN = ROSMUCSMR3_00332 PE=4 SV=1
MFAVEVRDHIMIAHSLPNPVFGPAQGVHGATFVVDAAFYTEDIDAHGLVVDIGLASDALARVLAPLRYGNLDDKPEFKGKFTTTEFLCHHIWTGLRDIARSEGLGDAGRLRRIRVKLHESHMARGWYEADI

SEQ ID NO: 25162 - protein, 131 aa, Roseovarius mucosus
  REGION 1..131: note = tr|A0A0A0HR78|A0A0A0HR78_9RHOB 6-pyruvoyl-tetrahydropterin synthase OS=Roseovarius mucosus DSM 17069 OX=1288298 GN=rosmuc_01427 PE=4 SV=1
MFAVEVRDHIMIAHSLPDPVFGPAQGVHGATFVVDAAFYTEDIDAHGLVVDIGLASEALARVLAPLRYGNLDDKPEFKGKFTTTEFLCHHIWTGLRDIARAEGLGDAGRLARIRVMLHESHVARGWYEADL

SEQ ID NO: 25163 - protein, 118 aa, Roseovarius nanhaiticus
  REGION 1..118: note = tr|A0A1N7FP88|A0A1N7FP88_9RHOB 6-carboxy-5,6,7,8-tetrahydropterin synthase OS=Roseovarius nanhaiticus OX=573024 GN=SAMN05421666_1231 PE=3 SV=1
MYRITKEFHFSASHQLFGLPEDHQCARLHGHNYIVVVELAGAELNQHGFVRDYLELAPLKRYIDDELDHRHLNDVLGDDCVTAERMAKHLYDWCAARWPETAAVKVSETPKTWAEYRP

SEQ ID NO: 25164 - protein, 131 aa, Roseovarius nanhaiticus
  REGION 1..131: note = tr|A0A1N7G1J2|A0A1N7G1J2_9RHOB 6-pyruvoyl-tetrahydropterin synthase OS=Roseovarius nanhaiticus OX=573024 GN=SAMN05421666_1577 PE=4 SV=1
MFAVEVRDHIMIGHSLPSPVFGPAQGMHGATFTVDAAFYTEEIDDHGLVVDIGLATEALTDVLGPLRYKNLDEVPEFKGKFTTTEFLCKHIFDAMAGTVRKGGLKDEGRVKKLRILLHESHVARAWYEGEI

SEQ ID NO: 25165 - protein, 117 aa, Roseovarius nubinhibens
  REGION 1..117: note = tr|A3SN31|A3SN31_ROSNI 6-carboxy-5,6,7,8-tetrahydropterin synthase OS=Roseovarius nubinhibens (strain ATCC BAA-591 / DSM 15170 / ISM); OX = 89187 GN=ISM_13435 PE=3 SV=1
MYRICKEFHFSASHQLAHLPEHHQCARLHGHNYVVAVELAAPELDANGFVRDYHDLAALKSYIDTRFDHRHLNDVLDGPSTAEALARHFFDYCAGQWPETVAVRVSETPRSWAEYRP

SEQ ID NO: 25166 - protein, 117 aa, Roseovarius nubinhibens; identical to SEQ ID NO: 25165
  REGION 1..117: note = tr|A0A348WIX8|A0A348WIX8_9RHOB 6-carboxy-5,6,7,8-tetrahydropterin synthase OS=Roseovarius nubinhibens OX=314263 GN=DCS45_21835 PE=3 SV=1

SEQ ID NO: 25167 - protein, 118 aa, Roseovarius pacificus
  REGION 1..118: note = tr|A0A1M7DFD5|A0A1M7DFD5_9RHOB 6-carboxy-5,6,7,8-tetrahydropterin synthase OS=Roseovarius pacificus OX=337701 GN=SAMN05444398_105245 PE=3 SV=1
MYTITKEFHFSASHQLFGLPDEHQCARLHGHNYIVVVELRAEELNAHGFVRDYLDLAELKRYIDEKLDHRHLNDVLGDDGVTAERMARHFYDWCAARWPEVSAIKVSETPKTWAEYRP

SEQ ID NO: 25168 - protein, 118 aa, Roseovarius sp.
  REGION 1..118: note = tr|A0A365TZA7|A0A365TZA7_9RHOB 6-carboxy-5,6,7,8-tetrahydropterin synthase OS=Roseovarius sp. TE539 OX=2249812 GN=queD PE=3 SV=1
MFTITKEFHFSASHQLHGLPPEHQCARLHGHNYIVVLELRGDALNEHGFVRDYLDLAAFKSHIDDELDHRHLNDVLGDDMVTAERLAKYFFDWARVRWPEVSAVRVSETPKTWAEYRP

SEQ ID NO: 25169 - protein, 118 aa, Roseovarius sp.
  REGION 1..118: note = tr|A0A176FNZ1|A0A176FNZ1_9RHOB 6-carboxy-5,6,7,8-tetrahydropterin synthase OS=Roseovarius sp. HI0049 OX=1822235 GN=A3731_10445 PE=3 SV=1
MFRITKEFAFSASHQLKDLPPEHQCARLHGHNYVVVVELAGAALDAHGFVRDYHELAPLKRYIDEELDHRHLNDVLGDDMVTAERLAKHLYDWCAARWAETAAVRVSETPKTWAEYRP

SEQ ID NO: 25170 - protein, 131 aa, Roseovarius tolerans
  REGION 1..131: note = tr|A0A0L6CR72|A0A0L6CR72_9RHOB 6-pyruvoyl tetrahydropterin synthase OS=Roseovarius tolerans OX=74031; GN = ROTO_31980 PE=4 SV=1
MFAVEVRDHIMIAHSLPAPVFGPAQGVHGATFVVDAAFYTEDLDAHGLVVDIGLATEALARALEPLRYGNLDEKPEFEGKFTTTEFLCHHIWSALRETAKSEGLGDAGRLRRIRVMLHESHVARGWYEADI

SEQ ID NO: 25171 - protein, 118 aa, Roseovarius tolerans
  REGION 1..118: note = tr|A0A0L6CUR6|A0A0L6CUR6_9RHOB 6-carboxy-5,6,7,8-tetrahydropterin synthase OS=Roseovarius tolerans OX=74031 GN=queD PE=3 SV=1
MYRITKEFHFSASHQLHGLPPEHQCARLHGHNYIVVVELTAADLNPHGFVRDYLDLAELKRYIDDELDHRHLNDVLGDDCVTAERMAKHFYDWCRARWPEVTAVKVSETPKTWAEYRP

SEQ ID NO: 25172 - protein, 119 aa, unidentified
  source 1..119: note = Rouxiella badensis
  REGION 1..119: note = tr|A0A1X0WKJ3|A0A1X0WKJ3_9GAMM 6-carboxy-5,6,7,8-tetrahydropterin synthase OS=Rouxiella badensis OX=1646377 GN=BS640_02285 PE=3 SV=1
MTTTLFKDFMFEAAHHLPHVPAGHKCGRLHGHSFAVRLEITGEVDPHTGWVMDFAELKAAFKPTLDSLDHYYLNDIPGLENPTSEVLAEWIWNKMKPQLPLLSAVRIKETCTAGCVYRG

SEQ ID NO: 25173 - protein, 119 aa, unidentified
  source 1..119: note = Rouxiella silvae
  REGION 1..119: note = tr|A0A1X0W5D6|A0A1X0W5D6_9GAMM 6-carboxy-5,6,7,8-tetrahydropterin synthase OS=Rouxiella silvae OX=1646373 GN=BS639_06760 PE=3 SV=1
MTTTLFKDFMFEAAHHLPHVPAGHKCGRLHGHSFAVRLEITGEVDPHTGWVMDFAELKVAFGPILDSLDHYYLNDIPGLENPTSEVLAEWIWNKMKPLLPLLSAVRIKETCTAGCVYRG

SEQ ID NO: 25174 - protein, 118 aa, unidentified
  source 1..118: note = Rubellimicrobium roseum
  REGION 1..118: note = tr|A0A5C4N8B3|A0A5C4N8B3_9RHOB 6-carboxy-5,6,7,8-tetrahydropterin synthase; OS = Rubellimicrobium roseum OX=687525 GN=queD PE=3 SV=1
MFRITKEFHFSASHQLSRLPSDHQCARLHGHNYVVVVELAAKELNAFGFVRDYHELAPLKHYIDDHLDHRHLNDVLGHDAVTAEYLAKHLYDWCKERLPETVAVRVSETPKTWAEYRP

SEQ ID NO: 25175 - protein, 290 aa, unidentified
  source 1..290: note = Rubidibacter lacunae
  REGION 1..290: note = tr|U5D6Z1|U5D6Z1_9CHRO 6-pyruvoyl-tetrahydropterin synthase OS=Rubidibacter lacunae KORDI 51-2 OX=582515; GN = KR51_00029580 PE=4 SV=1
MKCIINRRAQFFASHRYWLPELSDDENRAKFGTGSRFPGHGHNYVLYVSLAGDIDGCGMVMNLSAVKAAIAEHVTRQLDNTYLNTVWPEFQAALPTTENIAYAIWQRLVPHLPLTAVRLYEHPELWVDYRGNDMQVSLTHKTHFSAAHRLARSDFSEAENYATYGKCARPNGHGHNYHLAVTVTGDMDPRTGMSVDLGALIQAIDDRVTEPLDHTFLNLDIPYFSEVVPTAENIALYIARLLMAPARDLGVTLETIELIESPNNSCTIHCRQLAPELALSEAPEPRFAVH

SEQ ID NO: 25176 - protein, 163 aa, unidentified
  source 1..163: note = Rubinisphaera brasiliensis
  REGION 1..163: note = tr|F0SFP4|F0SFP4_RUBBR Uncharacterized protein; OS = Rubinisphaera brasiliensis (strain ATCC 49424 / DSM 5305 / JCM 21570 / NBRC 103401 / IFAM 1448) OX=756272; GN = Plabr_ 2905 PE=4 SV=1
MLIEKEYKFYAAHRNEELQDKCSNIHGHRYGLKCSFEVERNGSISTLFGEFDDKVEPLIKQKYDHGMLLNIHDPLLQSLNDHMERTGENLKLKLMNGPTSVENLAFMLFTEITELGFRLVRLDVRETDSSVVTYTIADWNHDRETVFRDQSPCSIEPIPSQLS

SEQ ID NO: 25177 - protein, 167 aa, unidentified
  source 1..167: note = Rubinisphaera brasiliensis
  REGION 1..167: note = tr|F0SRV2|F0SRV2_RUBBR Uncharacterized protein; OS = Rubinisphaera brasiliensis (strain ATCC 49424 / DSM 5305 / JCM 21570 / NBRC 103401 / IFAM 1448) OX=756272; GN = Plabr_ 2668 PE=4 SV=1
MANSPQYHVRVTKDHLVFSAAHFITFNGNICERLHGHNWRLAVEVAGPLDENRYVFDFIALRDAAQKVVDELDHRVLLPTHHETISVVDHGHEVEARYEDRRWIFPREDCILLPVINTTAEEIANWIAGRLLEQWDESARRSITRLQTEVEENFGQWAICRHDGPFA

SEQ ID NO: 25178 - protein, 163 aa, unidentified
  source 1..163: note = Rubinisphaera sp.
  REGION 1..163: note = tr|A0A2E9VJ23|A0A2E9VJ23_9PLAN 6-pyruvoyl tetrahydrobiopterin synthase OS=Rubinisphaera sp.; OX = 2024857 GN=CMN21_00685 PE=4 SV=1
MSLTIMKRIRFCAGHRLFGHEGKCAFFHGHNYIADIYVTGEETDEVGRLVDFAHLKKAFKGWIDENWDHAFLLNVSDENGIDAIKRVEPSKYFILPYNPTAENIAKYLLENVAVELMENQPHSVSKVVIWETEDSFAEASVEQSSEFMESYPEVSAFVKSYHG

SEQ ID NO: 25179 - protein, 166 aa, unidentified
  source 1..166: note = Rubinisphaera sp.
  REGION 1..166: note = tr|A0A2E9VL19|A0A2E9VL19_9PLAN 6-pyruvoyl tetrahydrobiopterin synthase OS=Rubinisphaera sp.; OX = 2024857 GN=CMN21_04240 PE=4 SV=1
MSEASYRVRVTKDHLVFSAAHFITFNGNICERLHGHNWRVAVEVTGGLDENRYVFDFIALRDATQAIVNELDHRMLLPTGHPTISVTVDEDNEEVEAKFESRRWVFPKEDCIILPVPNTTAEEIAHWIATRLVDDVIKKHRHELKSIRVDVEENFGQWAQCELSLD

SEQ ID NO: 25180 - protein, 140 aa, unidentified; identical to SEQ ID NO: 20863
  source 1..140: note = Rubneribacter badeniensis
  REGION 1..140: note = tr|A0A2K2U5T8|A0A2K2U5T8_9ACTN 6-carboxy-5,6,7,8-tetrahydropterin synthase; OS = Rubneribacter badeniensis OX=2070688 GN=C2L80_05805; PE = 3 SV=1

SEQ ID NO: 25181 - protein, 139 aa, unidentified
  source 1..139: note = Rubneribacter badeniensis
  REGION 1..139: note = tr|A0A2K2U5S4|A0A2K2U5S4_9ACTN 6-carboxy-5,6,7,8-tetrahydropterin synthase; OS = Rubneribacter badeniensis OX=2070688 GN=C2L80_05475; PE = 3 SV=1
MYGLKTEASFDSAHFLTDYYGKCENLHGHRWRMVVHLESPDLQADGTMKDMVMDFGVFKRAVRALAEELDHTFLVEEGSLSDATLAALEAEGFSLTILPFRTTAENLARYACERLTEQGLPVSQVDMYETPNNCAVYRA

SEQ ID NO: 25182 - protein, 138 aa, Rubricoccus marinus
  REGION 1..138: note = tr|A0A259TWT7|A0A259TWT7_9BACT 6-carboxy-5,6,7,8-tetrahydropterin synthase OS=Rubricoccus marinus OX=716817 GN=BSZ36_03265 PE=3 SV=1
MPTVYVTRKAHFNAAHRLHNPEKSDDWNRETFGKCNSSNWHGHNYELDVTVAGEPDPETGFVVDLADLKQVIRDRVEEPLDHKNLNLDVPFLKGRMTSTETLAIAIWEQLQDAIPGSGRLYELVLRETPNNSVVYRGE

SEQ ID NO: 25183 - protein, 137 aa, Rubrimonas cliftonensis
  REGION 1..137: note = tr|A0A1H4BAL4|A0A1H4BAL4_9RHOB 6-pyruvoyl-tetrahydropterin synthase OS=Rubrimonas cliftonensis OX=89524 GN=SAMN05444370_10594 PE=4 SV=1
MSAAGMYAVEVRDHMLIAHSLPGEVFGPAQGMHGATYVVDVCFMRETLTEDRIVVDIGRAHDALKAALKPLNYQNLDAAPETKGELTTTEWLCRFIFERIAEAKRAGGLGPGGDGVQRIRVTLNESHVARAWFEGPV

SEQ ID NO: 25184 - protein, 166 aa, unidentified
  source 1..166: note = Rubripirellula obstinata
  REGION 1..166: note = tr|A0A5B1CEQ9|A0A5B1CEQ9_9PLAN 6-carboxy-5,6,7,8-tetrahydropterin synthase; OS = Rubripirellula obstinata OX=406547 GN=queD_1 PE=4 SV=1
MTQATFRVDVTKEQFIFSAAHFITFAGDICERIHGHNYAVRASVEGPLDENRYVVDFIALRDAVLAETQQLDHHVVLPADHAEIKITSDDKETTATFRDRRWVFPNEDCVILPVVNTTAEEMARVIAERVVERTKETFGNKLTWIEVAVDENQGQWGVCRLPWPQS

SEQ ID NO: 25185 - protein, 154 aa, unidentified
  source 1..154: note = Rubripirellula obstinata
  REGION 1..154: note = tr|A0A5B1CQ47|A0A5B1CQ47_9PLAN 6-carboxy-5,6,7,8-tetrahydropterin synthase; OS = Rubripirellula obstinata OX=406547 GN=queD_2 PE=4 SV=1
MRRIKFCAGHRLFEHGGKCEHFHGHNYVADFFVTGDEQDDVGRVIDFSELKKRVKGWIDEHWDHSFLISHRDENARQALEVVIPSRFFVMPYNPTAENMAKYLLEEMCPKALAGTGARATRVRIWETEEAFAEASIDSGSGEVESYSAVGSADA

SEQ ID NO: 25186 - protein, 151 aa, unidentified
  source 1..151: note = Rubritalea profundi
  REGION 1..151: note = tr|A0A2S7U3Z2|A0A2S7U3Z2_9BACT 6-pyruvoyl tetrahydropterin synthase OS=Rubritalea profundi; OX = 1658618 GN=BSZ32_12050 PE=4 SV=1
MSYRICKMIEVENGHLLSKHPDKCRFPHGHTRKVELIFEADSLDDHEMVFDFKLVKRMVDEFLETYDHALCMNTEDPKFEFFKDAYGERIIGFEGLDPTTEVMAKTIFDHTAGELKHHIDNPDPEYPVRAEVRLKTIRVWETTSSWAEYGE

SEQ ID NO: 25187 - protein, 151 aa, Rubritalea squalenifaciens
  REGION 1..151: note = tr|A0A1M6D3U0|A0A1M6D3U0_9BACT 6-pyruvoyltetrahydropterin/6-carboxytetrahydropterin synthase OS=Rubritalea squalenifaciens DSM 18772; OX = 1123071 GN=SAMN02745181_0633PE=4 SV=1
MPYRICKMIEVENGHLLSKHPDKCRFPHGHTRKVELIFEADSLDDREMVFDFKLVKRMVDDFLETYDHALCMNTSDPKFEFFKEAYGDRIIGFENLDPTTEVMAKTIFDHTSGQLQHHVDNPDPEYPVRAEVKLKTVRVWETTSSWAEYGL

SEQ ID NO: 25188 - protein, 135 aa, unidentified
  source 1..135: note = Rubrivirga marina
  REGION 1..135: note = tr|A0A271IX25|A0A271IX25_9BACT 6-carboxy-5,6,7,8-tetrahydropterin synthase OS=Rubrivirga marina OX=1196024 GN=BSZ37_04765 PE=3 SV=1
MPTVYVTRKAHFNAAHRLHNPDQSDEWNRATFGKCNSPNWHGHNYELDVTVAGEPDPDTGFVVDLADLKRVLEERVVEPLDHKNLNLDVPFLEGKKTSTETLAVAIWEQLAPHVPGLHEIVLRETPNNSVVYRGE

SEQ ID NO: 25189 - protein, 135 aa, unidentified; identical to SEQ ID NO: 24992
  source 1..135: note = Rubrivirga sp.
  REGION 1..135: note = tr|A0A271J841|A0A271J841_9BACT 6-carboxy-5,6,7,8-tetrahydropterin synthase OS=Rubrivirga sp. SAORIC476 OX=1961794 GN=B1759_12195 PE=3 SV=1

SEQ ID NO: 25190 - protein, 121 aa, Rubrivivax sp.
  REGION 1..121: note = tr|A0A519ZJ37|A0A519ZJ37_9BURK 6-carboxy-5,6,7,8-tetrahydropterin synthase OS=Rubrivivax sp. OX=50259 GN=EOP40_12770 PE=3 SV=1
MFELSQTFSFDAAHTLKRHVDEAEALGSRRIHGHTYTAEVMVKGERQPASGMVVDLNVLRGVIQGVRDQLDHHFLDEVAGLGAPTLENLCVFIYAQVSQQLPQVSAVAVSRAAGDRCVYRP

SEQ ID NO: 25191 - protein, 121 aa, Rubrivivax sp.
  REGION 1..121: note = tr|A0A519GAJ8|A0A519GAJ8_9BURK 6-carboxy-5,6,7,8-tetrahydropterin synthase OS=Rubrivivax sp. OX=50259 GN=EOP38_06805 PE=3 SV=1
MFELSQTFTFDAAHTLKRAVSPEEAAGSRRIHGHTYTAEVAVLGPRQPDTGMVVDLSVLRAALAEVRSQLDHHFLDEVAGLGTPTLENLCVFIFDQVKARIPQVSAVSVWRASGDRCIYRP

SEQ ID NO: 25192 - protein, 126 aa, Rubrobacter radiotolerans
  REGION 1..126: note = tr|A0A023X4X8|A0A023X4X8_9ACTN 6-pyruvoyl-tetrahydropterin synthase OS=Rubrobacter radiotolerans OX=42256 GN=RradSPS_2120 PE=4 SV=1
MYEVLVAESFEAAHRLVGDFGPATRVHGHTYRVEVAVRGERLGDDGTLYDLGKLGENVKGLAAELHYRNLDEVEGLAGKNTTAEAVADFVWERLAKTLAGSGLSSLTVRVWENPNACAAREDRLPG

SEQ ID NO: 25193 - protein, 124 aa, Rubrobacter taiwanensis
  REGION 1..124: note = tr|A0A4R1BR78|A0A4R1BR78_9ACTN 6-carboxy-5,6,7,8-tetrahydropterin synthase OS=Rubrobacter taiwanensis OX=185139 GN=E0L93_01755 PE=3 SV=1
MYEIYVAARFEAAHRLVGDFGPATRLHGHTYRLEVLVRGERLDGSGVLFDIGELRGAVDELAAGLHYRNLDDVPGLEGRNTTAEVVADHAWEKLAPGLRGRGLDSLLVRVWESPDVYAAREDAL

SEQ ID NO: 25194 - protein, 125 aa, Rubrobacter xylanophilus
  REGION 1..125: note = tr|Q1ASY5|Q1ASY5_RUBXD Uncharacterized protein; OS = Rubrobacter xylanophilus (strain DSM 9941 / NBRC 16129); OX = 266117 GN=Rxyl_2576 PE=4 SV=1
MYEIRVAARFEAAHRLAGDFGPASRLHGHTYRLEAIVRGERLREDGTLYDIGALREAVDALASSLHYRNLDEVPGLAGKNTTAEAVASHCWESLAPGLRGRGLSSLAVRVWENPEVYAAREGPLG

SEQ ID NO: 25195 - protein, 125 aa, Rubrobacter xylanophilus
  REGION 1..125: note = tr|A0A510HIV8|A0A510HIV8_9ACTN 6-carboxy-5,6,7,8-tetrahydropterin synthase OS=Rubrobacter xylanophilus OX=49319 GN=RxyAA322_17630 PE=4 SV=1
MYEVCVATSFEAAHRLVGDFGPASRLHGHTYRLEVVVRGERLREDGTLYDIGALQEAVDGIAASLHYRNLDEVPGLSGANTTAEVVASHCWESLAPGLRGRGLSSLTVRIWENPDVYAACEGALE

SEQ ID NO: 25196 - protein, 135 aa, Ruegeria atlantica
  REGION 1..135: note = tr|A0A0P1EBG5|A0A0P1EBG5_9RHOB 6-carboxy-5,6,7,8-tetrahydropterin synthase OS=Ruegeria atlantica OX=81569 GN=queD PE=3 SV=1
MYRINKEFHFSASHQLTHLPEDHQCARMHGHNYVVVVELAQRELNADGFVRDYHELKPLKTYIDDEFDHRHLNNVLNVVSTAENLARHFFDWCAARWPETAAVKVSETPKTWAEYRPRPLEYPKYLAPRYRAKAR

SEQ ID NO: 25197 - protein, 117 aa, Ruegeria atlantica
  REGION 1..117: note = tr|A0A0P1EIZ0|A0A0P1EIZ0_9RHOB 6-carboxy-5,6,7,8-tetrahydropterin synthase OS=Ruegeria atlantica OX=81569 GN=queD PE=3 SV=1
MYRITKEFHFSASHQLTHLPEDHQCARMHGHNYVVVVELARRELNADGFVRDYHELKPLKTYIDDEFDHRHLNNVLNVVSTAENLARHFFDWCAARWPETASVKVSETHKTWAEYRP

SEQ ID NO: 25198 - protein, 117 aa, unidentified
  source 1..117: note = Ruegeria denitrificans
  REGION 1..117: note = tr|A0A0N7MAX4|A0A0N7MAX4_9RHOB 6-carboxy-5,6,7,8-tetrahydropterin synthase OS=Ruegeria denitrificans OX=1715692 GN=queD PE=3 SV=1
MYRITKEFHFSASHQLTHLPDDHQCARMHGHNYIVEIELAAVDLNTDGFVRDYGELKPLKTYIDETFDHRHLNDVMNILTTAENMARHFYDWCAARRPETAAVRVSETPKTWAEYRP

SEQ ID NO: 25199 - protein, 118 aa, unidentified
  source 1..118: note = Ruegeria intermedia
  REGION 1..118: note = tr|A0A1M5AWQ1|A0A1M5AWQ1_9RHOB 6-carboxy-5,6,7,8-tetrahydropterin synthase OS=Ruegeria intermedia OX=996115 GN=SAMN05444279_12911 PE=3 SV=1
MFRITKEFHFSASHQLCHLPDDHPCARLHGHNYIVEVELAAEELDANGFVVDYRDLKPLKTYIDEELDHRHLNDVFWHDMVTSERLAKEIYDFCKARWAQTSAVRVSETPKTWAEYRP

SEQ ID NO: 25200 - protein, 117 aa, unidentified
  source 1..117: note = Ruegeria litorea
  REGION 1..117: note = tr|A0A1Y5TNH7|A0A1Y5TNH7_9RHOB 6-carboxy-5,6,7,8-tetrahydropterin synthase OS=Ruegeria litorea R37 OX=1200284 GN=queD PE=3 SV=1
MYRITKEFHFSASHQLIHLPAEHQCHRMHGHNYIVVVELAGAELNADGFVRDYHELGPLKSYIDDTFDHRHLNDVLDVPTTAENMARHFYDWCKARWPETAAVKVSETPKTWAEYRP

SEQ ID NO: 25201 - protein, 118 aa, Ruegeria marina
  REGION 1..118: note = tr|A0A1G7BYJ9|A0A1G7BYJ9_9RHOB 6-carboxy-5,6,7,8-tetrahydropterin synthase OS=Ruegeria marina OX=639004 GN=SAMN04488239_11740 PE=3 SV=1
MYRITKEFHFSASHQLCHLPDDHPCARLHGHNYIVEVELASAELDANGFVRDYRALKPLKTWIDDALDHRHLNEVFGHDMVTSERLAKEVYDFCKARWPETSAVRVSETPKTWAEYRP

SEQ ID NO: 25202 - protein, 118 aa, unidentified
  source 1..118: note = Ruegeria marisrubri
  REGION 1..118: note = tr|A0A0X3TQZ7|A0A0X3TQZ7_9RHOB 6-carboxy-5,6,7,8-tetrahydropterin synthase OS=Ruegeria marisrubri OX=1685379 GN=AVO45_09250 PE=3 SV=1
MFRITKEFHFSASHQLCHLPEDHPCARLHGHNYIVEVELAAEDLDANGFVVDYRDLKPLKTYIDEELDHRHLNDVFGHDMVTSERLAKEIYDFCKARWAQTSAVRVSETPKTWAEYRP

SEQ ID NO: 25203 - protein, 118 aa, unidentified
  source 1..118: note = Ruegeria mediterranea
  REGION 1..118: note = tr|A0A2R8C6J5|A0A2R8C6J5_9RHOB 6-carboxy-5,6,7,8-tetrahydropterin synthase OS=Ruegeria mediterranea M17 OX=1200281 GN=queD PE=3 SV=1
MMFRITKEFHFSASHQLTHLPADHQCHRMHGHNYIVVVELAAADLNADGFVRDYHELGPLKSYIDDTFDHRHLNDVLDVPTTAENMARHFYEWCKARWPETAAVKVSETPKTWAEYRP

SEQ ID NO: 25204 - protein, 118 aa, Ruegeria pomeroyi
  REGION 1..118: note = tr|Q5LM12|Q5LM12_RUEPO 6-carboxy-5,6,7,8-tetrahydropterin synthase OS=Ruegeria pomeroyi (strain ATCC 700808 / DSM 15171 / DSS-3); OX = 246200 GN=SPO3903 PE=3 SV=1
MYRITKEFHFSASHQLCHLPDDHPCARLHGHNYIVEVELAAAELDANGFVRDYRELKPLKTWIDDALDHRHLNEVFGHDMVTSERLAKEVYEFCKARWAETSAVRVSETPKTWAEYRP

SEQ ID NO: 25205 - protein, 117 aa, Ruegeria sp.
  REGION 1..117: note = tr|A0A366XBF1|A0A366XBF1_9RHOB 6-carboxy-5,6,7,8-tetrahydropterin synthase OS=Ruegeria sp. A3M17 OX=2267229 GN=queD PE=3 SV=1
MYRITKEFHFSASHQLTHLPEDHQCARMHGHNYVVVVELARRELNADGFVRDYHELKPLKTYIDDEFDHRHLNNVLNVVSTAENLARHFFDWCAARWPETAAVKVSETPKTWAEFRP

SEQ ID NO: 25206 - protein, 117 aa, Ruegeria sp.
  REGION 1..117: note = tr|B7QQA0|B7QQA0_9RHOB 6-carboxy-5,6,7,8-tetrahydropterin synthase OS=Ruegeria sp. R11 OX=439497 GN=queD PE=3 SV=1
MFRITKEFHFSASHQLTHLPADHQCARLHGHNYIVVVELAGAELNSDGFVRDYHELAPLKNYIDGSFDHRHLNDVMEGPSTAENMARYFYDWCVSRWPETAAVRVSETPKTWAEYRP

SEQ ID NO: 25207 - protein, 135 aa, unidentified
  source 1..135: note = Rufibacter immobilis
  REGION 1..135: note = tr|A0A3M9N582|A0A3M9N582_9BACT 6-carboxy-5,6,7,8-tetrahydropterin synthase OS=Rufibacter immobilis OX=1348778 GN=EFA69_00640 PE=3 SV=1
MNVTVCRKENFNAAHRLHNPHWTEEENQRVFGLCNNPHYHGHNYDLVVKLTGPVDEETGYVYDMKKLSLLIKAEILDKFDHKNLNLDTEEFQQLNPTAENIAVVIWQRLRPHLPEDFALSVTLFETERNFVEYHG

SEQ ID NO: 25208 - protein, 149 aa, unidentified
  source 1..149: note = Rufibacter immobilis
  REGION 1..149: note = tr|A0A3M9MZM0|A0A3M9MZM0_9BACT 6-carboxy-5,6,7,8-tetrahydropterin synthase OS=Rufibacter immobilis OX=1348778 GN=EFA69_07830 PE=3 SV=1
MNRIRLTRRFTFEAAHALTHYDGACRHIHGHSYKLEVTIIGTPLNEEQHPKDGMVLDFGDLKTTVNTHVLQPLDHALVLRENSSPALLNVLQEEGHKVLLTAFQPTCENLLLYIKDQLQPHLPAHVQLHSLKLWETENAFGEWYVSDNE

SEQ ID NO: 25209 - protein, 135 aa, unidentified
  source 1..135: note = Rufibacter sp.
  REGION 1..135: note = tr|A0A0H4W2G8|A0A0H4W2G8_9BACT 6-pyruvoyl tetrahydrobiopterin synthase OS=Rufibacter sp. DG31D; OX = 1379910 GN=TH63_01710 PE=4 SV=1
MNVTICRKENFNAAHRLHNPAWSDEQNQKVFGLCNNPNYHGHNYNLIVKLTGPVDPDTGYVYDMKKLSLLIKAEILDKFDHRNLNLDTEEFKNLNPTAENIAVVTWQRLRPHLPESFALSVTLFETERNFVEYHG

SEQ ID NO: 25210 - protein, 135 aa, unidentified
  source 1..135: note = Rufibacter sp.
  REGION 1..135: note = tr|A0A127B232|A0A127B232_9BACT 6-carboxy-5,6,7,8-tetrahydropterin synthase OS=Rufibacter sp. DG15C OX=1379909 GN=TH61_10225 PE=3 SV=1
MNVTVCRKENFNAAHRLHNPAWTDEQNTRVFGLCNNPNYHGHNYELVVRLTGPVDPDTGYVYDMKKLSLLIKAEILDKFDHRNLNLDTDEFKHLNPTAENIAMVIWQRLRPHLSENLALSVTLFETERNFVEYHG

SEQ ID NO: 25211 - protein, 135 aa, unidentified
  source 1..135: note = Rufibacter tibetensis
  REGION 1..135: note = tr|A0A0P0CW67|A0A0P0CW67_9BACT 6-carboxy-5,6,7,8-tetrahydropterin synthase OS=Rufibacter tibetensis OX=512763 GN=DC20_12120 PE=3 SV=1
MNVTVCRKENFNAAHRLHNPNWTNEQNQSVFGKCNNPNYHGHNYNLIVKLTGPINEDTGYVFDMKKLSLLIKAEILDKFDHKNLNLDTEEFQHLNPTAENIAVVIWQRLRPHLPENLALSLTLFETERNFVEYHG

SEQ ID NO: 25212 - protein, 138 aa, unidentified
  source 1..138: note = Rufibacter tibetensis
  REGION 1..138: note = tr|A0A0P0C0C4|A0A0P0C0C4_9BACT 6-pyruvoyl tetrahydrobiopterin synthase OS=Rufibacter tibetensis; OX = 512763 GN=DC20_01770 PE=4 SV=1
MVYVSRLEHFNAAHKLHNPNWSLAKNKEVFGPCANTNWHGHNYELIVTVKGKPDPDTGFVIDLKKLSTLIREHIIKKVDHKNLNMDVAFMEGKLASTENLVMEFWNILNPLIPRISGAQLHSLKLYETPRNFVEYFGE

SEQ ID NO: 25213 - protein, 148 aa, Rugamonas rubra
  REGION 1..148: note = tr|A0A1I4R3N8|A0A1I4R3N8_9GAMM 6-carboxy-5,6,7,8-tetrahydropterin synthase OS=Rugamonas rubra OX=758825 GN=SAMN02982985_04150 PE=3 SV=1
MLTITRKLEFDAGHRIPDHKSQCRNLHGHRYTLEITLTGEVISVEGNSDNGMIMDFSDIKALAKEHLVDVWDHAFLVYEKDAVVRDFLATLPGHKTVTIDRIPTVENLARIAFDILKAAYKDRFGTGLHLHKLVLHETPNCWAEITDA

SEQ ID NO: 25214 - protein, 152 aa, unidentified
  source 1..152: note = Rugosibacter aromaticivorans
  REGION 1..152: note = tr|A0A0C5JC84|A0A0C5JC84_9RHOO 6-carboxy-5,6,7,8-tetrahydropterin synthase; OS = Rugosibacter aromaticivorans OX=1565605 GN=PG1C_03655; PE = 4 SV=1
MQITRRLEFDAGHRIPDHKSQCRHLHGHRYAIEITLTGQVIDVPGRSDNGMVMDFSEVKTLAKTHVVDAWDHAFLVWREDHAVATFLATLPNHKTVITDTVPTAENLARTAFAILDQIYHSTFGNQIRLERVRLFETPNCWADALREENIEC

SEQ ID NO: 25215 - protein, 152 aa, unidentified
  source 1..152: note = Rugosibacter sp.
  REGION 1..152: note = tr|A0A521KCL8|A0A521KCL8_9RHOO 6-carboxytetrahydropterin synthase QueD OS=Rugosibacter sp. OX=1914450 GN=queD PE=4 SV=1
MQITRRLEFDAGHRIPDHKSQCRHLHGHRYAIEITLAGQVINVPGRSDNGMVMDFSDVKTLAKVHVVDAWDHAFLVWREDHAVAAFLATLPNHKTVVMDAVPTAENLARTAFAILDPIYRSMFGNHIRLERIRLFETPNCWADALREEGIES

SEQ ID NO: 25216 - protein, 152 aa, unidentified; identical to SEQ ID NO: 25214
  source 1..152: note = Rugosibacter sp.
  REGION 1..152: note = tr|A0A522YDB0|A0A522YDB0_9RHOO 6-carboxytetrahydropterin synthase QueD OS=Rugosibacter sp. OX=1914450 GN=queD PE=4 SV=1

SEQ ID NO: 25217 - protein, 187 aa, unidentified
  source 1..187: note = Ruminiclostridium hungatei
  REGION 1..187: note = tr|A0A1V4SFT8|A0A1V4SFT8_RUMHU 6-pyruvoyl tetrahydropterin synthase OS=Ruminiclostridium hungatei; OX = 48256 GN=CLHUN_34230 PE=4 SV=1
MRSFTTLDLQYAHRFLGFKGEAQYLHGHTGILTLEVEDTVNTGVNMVFPCNEIKKTAWEVLQNFDHALVLREDDPLLPAILGVYEAQGIKDGAQTNKQKGPAFKTELATAYPECRLVVTKETMTVEGMIKIVYDLLKDKLNIVKITFTSGVNGATEEYEPQKDIDRCPLCGIALNENGVCPKCGYKK

SEQ ID NO: 25218 - protein, 154 aa, unidentified
  source 1..154: note = Ruminiclostridium papyrosolvens
  REGION 1..154: note = tr|U4R2X0|U4R2X0_9FIRM Precorrin-3B C17-methyltransferase OS=Ruminiclostridium papyrosolvens C7 OX=1330534 GN=L323_07700 PE=4 SV=1
MGKISITKEFSWDMAHMLSDHRGLCSNLHGHTYRMQVQISRKNEGLLEDTLHSDGMVMDFSDLKAIVQRKIIEPLDHAFMFWCDTNDSVERQIAELLRSSGKKVATVKYRPTAEEMAASFFDDLTQELVDSDIVVDKIKIWETTTSFAEVIREV

SEQ ID NO: 25219 - protein, 154 aa, unidentified
  source 1..154: note = Ruminiclostridium papyrosolvens
  REGION 1..154: note = tr|F1TE87|F1TE87_9FIRM Uncharacterized protein; OS = Ruminiclostridium papyrosolvens DSM 2782 OX=588581; GN = Cpap_1445 PE=4 SV=1
MGKISITKEFSWDMAHMLSNHRGLCSNLHGHTYRMQVQISRKDKGVLEDTLHSDGMVMDFSDLKAIVQRKIIEPLDHAFMFWCDTNDSVERQIAELLKSSGKKVASVKYRPTAEEMAASFFDVLTQELADSDIVVDKIKIWETTTSFAEVIREV

SEQ ID NO: 25220 - protein, 127 aa, unidentified; identical to SEQ ID NO: 21150
  source 1..127: note = Ruminiclostridium sp.
  REGION 1..127: note = tr|A0A3B8KRY8|A0A3B8KRY8_9FIRM 6-carboxy-5,6,7,8-tetrahydropterin synthase; OS = Ruminiclostridium sp. OX=2053608 GN=queD PE=3 SV=1

SEQ ID NO: 25221 - protein, 178 aa, unidentified
  source 1..178: note = Ruminiclostridium sp.
  REGION 1..178: note = tr|A0A4U7J753|A0A4U7J753_9FIRM 6-pyruvoyl tetrahydrobiopterin synthase OS=Ruminiclostridium sp. MA18; OX = 2488810 GN=EHE19_17585 PE=4 SV=1
MFSEMLGINIFMTEKRHQQYKFKFYLNASHSIYINGEPGSRHPHTWEISIHLLKMRNEFIKFSSIETHIESLLDEYQDKYLNDVEPFNTINPTLENICTYFKNRIRELVNCEGWILLLIEISETPARSYVINLLSEESNTNMDNIDSQRMQYQHYMNQCKLTADDVAESIIKSFLDDK

SEQ ID NO: 25222 - protein, 132 aa, unidentified
  source 1..132: note = Ruminiclostridium sufflavum
  REGION 1..132: note = tr|A0A318XJK5|A0A318XJK5_9FIRM 6-pyruvoyl tetrahydropterin synthase-like protein; OS = Ruminiclostridium sufflavum DSM 19573 OX=1121337; GN = LY28_03379 PE=4 SV=1
MFEGYKLKYRLNAKHSLLSDTENIHPHTFEISLFIEQGSKYKQVSFNALDKIVKPFLFRYQNSYLNNIPPFNMLEPTIENMGETFYEELKTILNSKKFNLIQLEISETPLRVYLISDRLMFSSITRAINSAI

SEQ ID NO: 25223 - protein, 167 aa, unidentified
  source 1..167: note = Ruminiclostridium sufflavum
  REGION 1..167: note = tr|A0A318XKI5|A0A318XKI5_9FIRM 6-pyruvoyltetrahydropterin/6-carboxytetrahydropterin synthase OS=Ruminiclostridium sufflavum DSM 19573; OX = 1121337 GN=LY28_03386 PE=4 S V=1
MSIKRHRQYKFKFYLNASHAIFINGALGSRHTHTWEISIHLLKILDEFIKFTSFESHIEALLEEYQDKFINEVEPFNIINPTLENICTYFKDRIRELVNCEGWILLLIEISETPTRSYVINLLTEESDTSLDNIDSQKMQYENYMRHCKLTANDIADNIIDNLLSDK

SEQ ID NO: 25224 - protein, 189 aa, unidentified
  source 1..189: note = Ruminococcaceae bacterium
  REGION 1..189: note = tr|A0A3D0Z507|A0A3D0Z507_9FIRM Rubredoxin; OS = Ruminococcaceae bacterium OX=1898205 GN=DEQ02_06780; PE = 4 SV=1
MRSFTTLDIQYAHRFYGFKGEAQYLHGHTGILTVEVEDTINTGVNMVFPCNEINKTVWDVVQNFDHALILREDDPLLPAILDVYETQGIKNGAPTNKQKGPSFKTELATAYPECRLVVTKETMTVEGMIKIVYDLLKDKLNIAKITFTSGVNGAVQEYGKENQKEKDRCQLCGIFLNENGVCPKCGYRK

SEQ ID NO: 25225 - protein, 139 aa, unidentified
  source 1..139: note = Ruminococcaceae bacterium
  REGION 1..139: note = tr|A0A1G4W495|A0A1G4W495_9FIRM 6-carboxy-5,6,7,8-tetrahydropterin synthase; OS = Ruminococcaceae bacterium P7 OX=1200751; GN = SAMN02910436_01171 PE=3 SV=1
MYSLKTSAAFDSAHFLAGYKGKCANIHGHRWVIEAVVSQEELIDSGEKRGMILDFSDLKKAVRAIAESFDHVLIIEAGSLKPTTVAALEDEGFRLREVRFRPTAENFARYFYALLKSDHLPVRSVTVYETPDNCAEYEE

SEQ ID NO: 25226 - protein, 140 aa, Ruminococcus albus
  REGION 1..140: note = tr|A0A011VUM8|A0A011VUM8_RUMAL 6-carboxy-5,6,7,8-tetrahydropterin synthase; OS = Ruminococcus albus SY3 OX=1341156 GN=RASY3_11630 PE=3; SV = 1
MYHLKTEAHFDSAHFLAGYNGKCANIHGHSWKIEAEILGSELQQAGEKRGMLIDFGDFKKAVRRLADSFDHTLIYEKGSLKAATLAALKDEGFSLTEVDFRPTAENLSRHFYDMLTAQGLPVSRITVYETPENCAYYEGE

SEQ ID NO: 25227 - protein, 140 aa, Ruminococcus albus
  REGION 1..140: note = tr|A0A1H7GLV4|A0A1H7GLV4_RUMAL 6-carboxy-5,6,7,8-tetrahydropterin synthase; OS = Ruminococcus albus OX=1264 GN=SAMN05216469_102165 PE=3; SV = 1
MYHLKTEAHFDSAHFLAGYNGKCANIHGHSWKIEAEIYGSELQQAGEKRGMLIDFGDLKNAVRGLADSFDHTLIYEKGSLKAATLVALAEEGFSLIEVDFRPTAENLAKHFYDMLAAQGFAVSRITVYETPENCAYYEGE

SEQ ID NO: 25228 - protein, 156 aa, Ruminococcus callidus
  REGION 1..156: note = tr|U2K953|U2K953_9FIRM Queuosine biosynthesis protein QueD OS=Ruminococcus callidus ATCC 27760 OX=411473; GN = RUMCAL_03061 PE=4 SV=1
MQSYVQCGCIFYWEENRMFELKTSASFDSAHFLSGYQGKCSNLHGHRWKIEVTVGQETLQEEGNYRGMVIDFGDVKHAVKALADSYDHAMIYEEGTLQRATVEALLAEGFRLIAVPFRPTAEQFAKCFYEKLTADGLPVRRVAVYETPENCAVYEV

SEQ ID NO: 25229 - protein, 141 aa, Ruminococcus flavefaciens
  REGION 1..141: note = tr|A0A1H7LPP5|A0A1H7LPP5_RUMFL 6-carboxy-5,6,7,8-tetrahydropterin synthase; OS = Ruminococcus flavefaciens OX=1265 GN=SAMN02910353_01705; PE = 3 SV=1
MYKLKTSAAFDSAHFLAGYNGKCANIHGHRWTMEVTAESSELIAEGEKRGMVIDFGDLKKAVRALADKHDHALIFEEGTLRTVTLTALDEEGFRLIAVPFRPTAENFARHFYEVLKAEGLPVSSVTVYETPENCAIYEEEK

SEQ ID NO: 25230 - protein, 141 aa, Ruminococcus flavefaciens
  REGION 1..141: note = tr|W7UB52|W7UB52_RUMFL 6-carboxy-5,6,7,8-tetrahydropterin synthase; OS = Ruminococcus flavefaciens 007c OX=1341157; GN = RF007C_13175 PE=3 SV=1
MYRLKTSAAFDSAHFLAGYEGKCANIHGHRWIIEAEFSGSELIREGTERGMLTDFGDIKNAVRQLADSFDHSLIYEENSLKAATITALEDEKFRLIPVPFRPTAENFAEYFYRRLRAAELPVSSVAVYETPENCAVYEEDI

SEQ ID NO: 25231 - protein, 122 aa, Ruminococcus gnavus
  REGION 1..122: note = tr|A0A415S9D6|A0A415S9D6_RUMGN 6-carboxy-5,6,7,8-tetrahydropterin synthase; OS = Ruminococcus gnavus OX=33038 GN=queD PE=3 SV=1
MKIHIGRKFEFEACHFLPGKDIYGECSNLHGHRYELEVIVAGEINENGWLFNFKDLKRLVEDTVISKYDHQNLNEYFEVPTAENMGAYIFQNLSEELKKHNMTLKRIKLNETSKCYVEITEN

SEQ ID NO: 25232 - protein, 187 aa, Ruminococcus gnavus
  REGION 1..187: note = tr|A0A415S188|A0A415S188_RUMGN Rubredoxin; OS = Ruminococcus gnavus OX=33038 GN=DWZ50_18710 PE=4 SV=1
MRSITQLDLQYAHRFYGFQGEAQYLHGHTGVLTIEVEGSVNAGVNMVFPCNEIQKTTWEVLKNFDHALVLREDDPLLPAILEVYGKQGIKGGSPNNTMKGPAFKTELARAYPDCRLVVTKETMTAEGMIKIVYDLLKDKFNIVKLSFTSGVNQASEEYETCLEVERCPLCGIALNEHGVCPKCGYKR

SEQ ID NO: 25233 - protein, 139 aa, Ruminococcus lactaris
  REGION 1..139: note = tr|B5CRQ7|B5CRQ7_9FIRM 6-carboxy-5,6,7,8-tetrahydropterin synthase; OS = Ruminococcus lactaris ATCC 29176 OX=471875 GN=queD PE=3; SV = 1
MYYLKTESSFDSAHFLKGYNGKCRNLHGHRWRVVVEIAADQLKDEGQTRGMLVDFSDLKNALEDICDDFDHSLIYEKGSLKGATIAALQAEEFRMIEVGFRPTAEHFSKYFYELMSEKGFPIHRVEVYETPNNLAAYEE

SEQ ID NO: 25234 - protein, 139 aa, Ruminococcus lactaris
  REGION 1..139: note = tr|A0A3E4LH70|A0A3E4LH70_9FIRM 6-carboxy-5,6,7,8-tetrahydropterin synthase; OS = Ruminococcus lactaris OX=46228 GN=queD PE=3 SV=1
MYYLKTESNFDSAHFLKGYDGKCRNLHGHRWRVVVEIAADQLKDEGQTRGMLVDFSDLKNALEDICDDFDHSLIYEKGSLKGATIAALQAEEFRMIEVGFRPTAEHFSKYFYELMSEKGFPIHRVEVYETPNNLAAYEE

SEQ ID NO: 25235 - protein, 140 aa, Ruminococcus sp.
  REGION 1..140: note = tr|A0A373SNP4|A0A373SNP4_9FIRM 6-carboxy-5,6,7,8-tetrahydropterin synthase; OS = Ruminococcus sp. AF25-17 OX=2293164 GN=queD PE=3 SV=1
MYYLQTKASFDAAHFLWKYEGKCRNIHGHRWNVVAKIKSQELEQEGQTRGMVVDFGNLKKDLKKLCDSFDHSLIYEVGSLKAETVAALQNEDFHLEKVSFRPTAENFAYYFYKELTELGYEVHCVEVYETPNNCAVYEEE

SEQ ID NO: 25236 - protein, 139 aa, Ruminococcus sp.
  REGION 1..139: note = tr|A0A1K1NC68|A0A1K1NC68_9FIRM 6-carboxy-5,6,7,8-tetrahydropterin synthase; OS = Ruminococcus sp. YE71 OX=244362 GN=SAMN02910447_01756; PE = 3 SV=1
MYILKTQASFDSAHFLSGYNGKCANIHGHHWIVEVEVSQEKLIEGGEKRGMVIDFGDLKKAVRRLCDSYDHALIHEVGTLRPETIAAFDSEGFRRIEISCRPTAENFAKLFYEELTRQGLPVSRVTVYETPDNCACYEV

SEQ ID NO: 25237 - protein, 140 aa, unidentified; identical to SEQ ID NO: 25235
  source 1..140: note = [Ruminococcus] torques
  REGION 1..140: note = tr|D4LZK6|D4LZK6_9FIRM 6-carboxy-5,6,7,8-tetrahydropterin synthase; OS = [Ruminococcus] torques L2-14 OX=657313 GN=RTO_27650; PE = 3 SV=1

SEQ ID NO: 25238 - protein, 140 aa, unidentified
  source 1..140: note = [Ruminococcus] torques
  REGION 1..140: note = tr|A0A174YBA1|A0A174YBA1_9FIRM 6-carboxy-5,6,7,8-tetrahydropterin synthase; OS = [Ruminococcus] torques OX=33039 GN=ERS852502_00634 PE=3; SV = 1
MYYLQTKASFDAAHFLWKYEGKCRNIHGHRWNIVAKIKSQKLEQEGQTRGMVVDFGNLKKDLKKLCDSFDHSLIYEVGSLKAETVAALQNEDFHLEKVSFRPTAENFAYYFYKKLTELGYGVHCVEVYETPNNCAVYEEE

SEQ ID NO: 25239 - protein, 142 aa, Rummeliibacillus sp.
  REGION 1..142: note = tr|A0A3N6BSU9|A0A3N6BSU9_9BACL 6-carboxy-5,6,7,8-tetrahydropterin synthase; OS = Rummeliibacillus sp. TYF005 OX=2058214 GN=queD PE=3 SV=1
MLQQFYPQPPSHPYPFELNKDMHFAAAHFIPDERAGKCAFTHGHTYFVNLTIAGEQLDEMGMLVNFSDLKKIVHDKYDHQLLNDFPEYKKRAPSTEEVSRQIYQLIKNHLVTLPNKPKCLQVIVRETPTSYCIYRPKREEKA

SEQ ID NO: 25240 - protein, 138 aa, Runella sp.
  REGION 1..138: note = tr|A0A3C0UYH2|A0A3C0UYH2_9BACT 6-pyruvoyl tetrahydrobiopterin synthase OS=Runella sp. OX=1960881; GN = DCM71_25055 PE=4 SV=1
MNNPRVAVFRKAHFNAAHRLNNPTWSDEENARVFGKCNYPNYHGHNYELIVQVTGEVNPETGYVVDLKWLNDLIEQTVLIKFDHKNLNLDTEEFKNMNPSAENISIVIYNLLREHLAESLDLKIRLYETERNFVEYPA

SEQ ID NO: 25241 - protein, 139 aa, Runella sp.
  REGION 1..139: note = tr|A0A344TGK3|A0A344TGK3_9BACT 6-carboxytetrahydropterin synthase OS=Runella sp. HYN0085; OX = 2259595 GN=DR864_08505 PE=4 SV=1
MVYVTRKEHFNAAHRVYNPSWSDEKNTEVFGICANPNFHGHNFELIVTVKGKINPDTGFVVDMKLLGNLMKTAVIDKVDHRNLNLDVDFMQGIIPSCENFIVEIWNILEKGLIELAPNTKLHYLKLIETPKNFVEYYGE

SEQ ID NO: 25242 - protein, 188 aa, unidentified
  source 1..188: note = Ruthenibacterium lactatiformans
  REGION 1..188: note = tr|A0A0D8J293|A0A0D8J293_9FIRM Rubredoxin; OS = Ruthenibacterium lactatiformans OX=1550024; GN = ASJ35_12265 PE=4 SV=1
MRSITTLDLQYAHRFYGFKGEAQYLHGHTGVLTIEVEDSVNAGVNMVFPCNEIQKTAWDVLKNFDHALILREDDPLLPAILDVYEKQGIKNGHPNNVMKGEAFKTELATAYPDCRLVVTKETMTVEGMIKIVYDLLKDKLNIAKLTFTSGVNAASAEFDTKNEIDRCPLCGIALNENGVCPKCGYKKQ

SEQ ID NO: 25243 - protein, 107 aa, unidentified
  source 1..107: note = Ruthenibacterium lactatiformans
  REGION 1..107: note = tr|A0A3B9WLU0|A0A3B9WLU0_9FIRM Rubredoxin (Fragment); OS = Ruthenibacterium lactatiformans OX=1550024; GN = DCL51_12335 PE=4 SV=1
FPCNEIQKTAWDVLKNFDHALILREDDPLLPAILDVYEKQGIKNGHPNNVMKGEAFKTELATAYPDCRLVVTKETMTVEGMIKIVYDLLKDKLNIAKLTFTSGVNAA

SEQ ID NO: 25244 - protein, 125 aa, unidentified
  source 1..125: note = Ruthia magnifica
  REGION 1..125: note = tr|A1AVX4|A1AVX4_RUTMC 6-carboxy-5,6,7,8-tetrahydropterin synthase OS=Ruthia magnifica subsp. Calyptogena magnifica OX=413404; GN = Rmag_0303 PE=3 SV=1
MFVLKIVTDFASAHLLRDYPGDCSRLHGHNWKVEMMVVARKLNSNGITIDFREIKKQTKVVVKLLDHQYLNEIAPFDKLNPTAENIAKYFFYEVGQLINTNDVKVKEVTIWETSRASVTYYQGDL

SEQ ID NO: 25245 - protein, 167 aa, Saccharibacillus sp.
  REGION 1..167: note = tr|A0A4Y6UYR1|A0A4Y6UYR1_9BACL 6-carboxytetrahydropterin synthase QueD; OS = Saccharibacillus sp. ATSA2 OX=2583377 GN=queD PE=4 SV=1
MSEREQQRRSPGPYQIVERLQVFGEDISGEQLRYHRKRVLVSKSFTFDAAHHLHDYEGKCKNLHGHTYEVVFGLSAIPSANGIAVDFGEIKQIWKEEIETYLDHRYLNETLPLMNTTAENMVVWIYEQMEDALASERYAHLEARTEFVRLFETPTSYAEARREWMER

SEQ ID NO: 25246 - protein, 166 aa, Saccharibacillus sp.
  REGION 1..166: note = tr|A0A254NSG9|A0A254NSG9_9BACL 6-carboxytetrahydropterin synthase QueD; OS = Saccharibacillus sp. O23 OX=2009338 GN=queD PE=4 SV=1
MSDSAFQRQPGPFHIVQKLQVFGEDISGEQLRYHRKRVMVSKSFTFDAAHHLHDYEGKCKNLHGHTYEVVFGISAVPSANGIAVDFGEIKRIWKERIETYLDHRYLNETLPLMNTTAENMVVWIYEQMENALKSDEHAALGARTEFVRLFETPTSYAEARREWMEE

SEQ ID NO: 25247 - protein, 86 aa, Saccharibacter sp.
  REGION 1..86: note = tr|A0A060QAQ1|A0A060QAQ1_9PROT Queuosine biosynthesis QueD, PTPS-I OS=Saccharibacter sp. AM169; OX = 1343158 GN=SACS_1731 PE=4 SV=1
MNPQRLDRLVVTPGDPTTELLAALLMSKLQAFLTAQGGLLSPASLEIKETPTNTVRLHGDPSLYLPLVDRPADRCWWHRADDTTRD

SEQ ID NO: 25248 - protein, 150 aa, unidentified
  source 1..150: note = Saccharicrinis carchari
  REGION 1..150: note = tr|A0A521CK14|A0A521CK14_9BACT 6-pyruvoyltetrahydropterin/6-carboxytetrahydropterin synthase OS=Saccharicrinis carchari OX=1168039; GN = SAMN06265379_103168 PE=4 SV=1
MGKKIRLTKEFRFEMAHALWNYDGLCKHFHGHSYILRVTVIGEPNANRESPKCGMVMDFGVLKEIVNQEVVDRLDHALVLNKNAEHKDLLALPQMGERLILTDYQPTCENMLIEMAERISGRLPQNVKLHNLRLHETANSYAEWFAEDNG

SEQ ID NO: 25249 - protein, 200 aa, unidentified
  source 1..200: note = Saccharicrinis carchari
  REGION 1..200: note = tr|A0A521BZW0|A0A521BZW0_9BACT 6-pyruvoyltetrahydropterin/6-carboxytetrahydropterin synthase OS=Saccharicrinis carchari OX=1168039; GN = SAMN06265379_102262 PE=4 SV=1
MIIRKKFKFEGAHIVRDCSSDRCKKSLHGHSYVVEVFLSSNKLDFGHMIYDFGLTKGTIKDIIDSFDHAYAMWDKESDEFKTFIRNNSERYIEMPVSPSAECFALTLLFLIDKTLQATEFKNGEGKVSVSSVRVHETDTGYAEAFRKDLDWFTFELADVTFSQAVKDEWKDAEMYDKLLMYHKGELDAKPFVNPQVERIF

SEQ ID NO: 25250 - protein, 201 aa, unidentified
  source 1..201: note = Saccharicrinis fermentans
  REGION 1..201: note = tr|W7YKG1|W7YKG1_9BACT Queuosine biosynthesis protein QueD OS=Saccharicrinis fermentans DSM 9555 = JCM 21142 OX=869213 GN=JCM21142_41489 PE=4 SV=1
MIIRKKFKFEGAHIVRDCSSNRCKKSLHGHSYIVEVFLTSNKLDYGQMIYDFGLTKGTIKDIIDSFDHAYAMWSKESDDFKSFIKANSDRYIIMPVSPSAECFSLTLLFLIDKILQATEFKNGEGDVRVRSVRVHETETGYAEAFREDLEWFNFSLKDIIFSSEIKNEWTDKEMYDKLIAYYDKQLGTKPFSNPVVSRHFE

SEQ ID NO: 25251 - protein, 150 aa, unidentified
  source 1..150: note = Saccharicrinis fermentans
  REGION 1..150: note = tr|W7Y2J2|W7Y2J2_9BACT 6-carboxy-5,6,7,8-tetrahydropterin synthase; OS = Saccharicrinis fermentans DSM 9555 = JCM 21142; OX = 869213 GN=JCM21142_379 PE=4 SV=1
MGRKIRLTKEFRFEMAHALWKYDGLCKHFHGHSYILRVTVMGEPIEDKKSPKYGMVMDFGLLKQIVHEEVVDRMDHALVLNNDSEHQALLSLPEMGERVILTQYQPTCENMLLEMAERIKPRLPKGVLLHSLRLNETANSFAEWYAEDNK

SEQ ID NO: 25252 - protein, 187 aa, Saccharomonospora marina
  REGION 1..187: note = tr|H5WZ63|H5WZ63_9PSEU 6-pyruvoyl-tetrahydropterin synthase OS=Saccharomonospora marina XMU15 OX=882083; GN = SacmaDRAFT_0149 PE=4 SV=1
MLGTETTDHAAAHRAALVTEDSAPTAHQITIEHTFETAHRLPHLGDKCTSLHGHSWRVAVPVIAPTLSNDVTVVEFGALKAGIREWIDTYLDHGTMLGVHDPLAVHLYVAKCKVFRFGADSCQTTVDAELLATDLVWPTVEAVAVLLRRVSQAALAALPCAPDARVGRVFVRETHLNTATYGPVDAP

SEQ ID NO: 25253 - protein, 118 aa, Saccharomonospora sp.
  REGION 1..118: note = tr|A0A4P7CEV8|A0A4P7CEV8_9PSEU 6-carboxy-5,6,7,8-tetrahydropterin synthase; OS = Saccharomonospora sp. 31sw OX=2528243 GN=queD PE=3 SV=1
MEIFREFTFEAAHRLPEVPDGHKCARLHGHSYRVTVHVEGPVDRRAGWIMDFGDVKAAFKPLEEQLDHRYLNEVEGLENPTSENLAMWIWDRLVLRLPELSAVTVQETCTSGCTYRGR

SEQ ID NO: 25254 - protein, 126 aa, Saccharomonospora sp.
  REGION 1..126: note = tr|A0A1Q9UVF8|A0A1Q9UVF8_9PSEU 6-carboxy-5,6,7,8-tetrahydropterin synthase; OS = Saccharomonospora sp. CUA-673 OX=1904969 GN=BJF85_04635; PE = 3 SV=1
MSYRIGKSFTFDAAHYLPSLPPEHKCSRLHGHTYTVEVVLSAASLAPPGFVTDFGELGPLRHYLDATLDHQHLNRALDVEPTSENLARHIADWFQENVEPTIPARLETVRVRESPTSWAEYQVPQP

SEQ ID NO: 25255 - protein, 278 aa, Saccharophagus degradans
  REGION 1..278: note = tr|Q21LH1|Q21LH1_SACD2 Uncharacterized protein; OS = Saccharophagus degradans (strain 2-40 / ATCC 43961 / DSM 17024) OX=203122 GN=Sde_1196 PE=4 SV=1
MQLFVDNLTNLDFSYLHPTRGVVGETWLASVVLDGALDEQGMVCDFGIVKKMLRKWLDNEIDHRLLVPTQASTLTINPPADRASLSWPISSKGTLSTDCPEQAIARVTAESITPESVAQWAITQLQPLFPQSVNKLSLTFTPEVITTPFYHYSHGLKKHGGNCQRIAHGHRSKIEIWRNGELSLPDMSAWADLWADIYIGTEEDVVSTQGEHTAFVYTAQQGEFSLKLPSACVYMIDTDTTVEFIAQHIANTLKQQNPADSFTVKAYEGLAKGAIASS

SEQ ID NO: 25256 - protein, 132 aa, unidentified
  source 1..132: note = Saccharopolyspora dendranthemae
  REGION 1..132: note = tr|A0A561V8L2|A0A561V8L2_9PSEU 6-pyruvoyl-tetrahydropterin synthase OS=Saccharopolyspora dendranthemae OX=1181886 GN=FHU35_11570 PE=4 SV=1
MFTVTVRDHVMVAHSFRGEVFGPAQRLHGATFVVDATFTREELDDDNIVVDIGRATEQLGDVLGGLNYRNLDDEPEFAGVNTSTEFLAKVIADRIAERVHAGALGEGGRGLQGLRVTLHESHVAWAGYERAL

SEQ ID NO: 25257 - protein, 122 aa, Saccharopolyspora flava
  REGION 1..122: note = tr|A0A1I6S9D6|A0A1I6S9D6_9PSEU 6-pyruvoyl tetrahydropterin synthase OS=Saccharopolyspora flava; OX = 95161 GN=SAMN05660874_03010 PE=4 SV=1
MIAHSFRGETFGPAQRLHGATYVVDATFQREQLDADNVVVDIGRATEQLGEVLAELNYRNLDEVEEFAGINTSTEFLAKVVADRLADRIGSGKLGASARGLSGLKVVLHESHVAWAGYEREL

SEQ ID NO: 25258 - protein, 132 aa, Saccharopolyspora sp.
  REGION 1..132: note = tr|A0A4R5BZF3|A0A4R5BZF3_9PSEU 6-carboxytetrahydropterin synthase OS=Saccharopolyspora sp. 5K548 OX=2530386 GN=E1202_06980 PE=4 SV=1
MFTVTVRDHVMIAHSFRGEVFGPAQRLHGATFVVDATFTREELDADNIVVDIGRATDQLGEVLAGLNYRNLDEEPEFAGVNTSTEFLAKVIADRIADRVHEGALGASARGLNGLRVALHESHVAWAGYERAL

SEQ ID NO: 25259 - protein, 132 aa, Saccharopolyspora sp.
  REGION 1..132: note = tr|A0A4R4VSA5|A0A4R4VSA5_9PSEU 6-carboxytetrahydropterin synthase OS=Saccharopolyspora sp. 16K309 OX=2530384 GN=E1181_05200 PE=4 SV=1
MFTVTVRDHVMIAHSFRGEVFGPAQRLHGATFVVDATFTREELDADNIVVDIGRATEQLGEVLAGLNYRNLDEEPEFAGVNTSTEFLAKVIADRLADRVHEGSLGESARGLSGLRVALHESHVAWAGYERAL

SEQ ID NO: 25260 - protein, 285 aa, Saccharospirillum sp.
  REGION 1..285: note = tr|A0A2T6E4N7|A0A2T6E4N7_9GAMM Uncharacterized protein OS=Saccharospirillum sp. MSK14-1 OX=1897632; GN = BGP77_03330 PE=4 SV=1
MSRLFVDNLTVLDFSYLHPSRGVVGESWIVDVELEGELNEEGMVFDFGHVKKLLKQALDSGMDHTLVVPLALPGLTLVEEQDGERLNLEYRDTNGQLKFRYQAPREAVFQLDSASVNIDAALPALEAHLNTLVPANVRKVHLHLHTEQIDGAFYHYAHGLKKHQGDCQRLCHGHRSRVEIWRDGQRDAETERDWAQRFADIYLVTAEDTLDSREDHLTHVGYDAEQGRFDVWLERQQCYAMNTDTTVELIASHLANELGREHPDSHWRVKAFEGVRKGAIAEYRP

SEQ ID NO: 25261 - protein, 126 aa, Saccharospirillum sp.
  REGION 1..126: note = tr|A0A2T6EA49|A0A2T6EA49_9GAMM 6-pyruvoyl tetrahydropterin synthase OS=Saccharospirillum sp. MSK14-1; OX = 1897632 GN=BGP77_17545 PE=4 SV=1
MYTVAVTQDFIANHYLIGGDWGSENNPHAHHYVLEVQIESDTLNEHGYLVDIVEIEAALNKVVDYYRDSMLNDKPEFAGLNPSIEHFSRILSEQLLAGITPPGTGALTVKLWENDTCWAAYRHSFG

SEQ ID NO: 25262 - protein, 123 aa, Saccharothrix australiensis
  REGION 1..123: note = tr|A0A495W1T7|A0A495W1T7_9PSEU 6-carboxy-5,6,7,8-tetrahydropterin synthase; OS = Saccharothrix australiensis OX=2072 GN=C8E97_2410 PE=3; SV = 1
MLSIRKEFSFSASHILEHLPEGHPCGRMHGHNYVVVVELRAPESDLDKAGFVRDYRELDGFKRWLDDTVDHRHLNDVMAGLNPSAEHLALWIFRRWRDEFPELSAVSISETPKTWAEYRPLAG

SEQ ID NO: 25263 - protein, 122 aa, unidentified
  source 1..122: note = Saccharothrix carnea
  REGION 1..122: note = tr|A0A2P8IEQ4|A0A2P8IEQ4_9PSEU 6-pyruvoyl tetrahydropterin synthase-like protein OS=Saccharothrix carnea OX=1280637 GN=B0I31_103711 PE=4 SV=1
MVAHSFRGEVFGPAQRLHGATFVVDARFKRDELDADNIVVDIGLATERLRAVLADLNYRNLDDVPAFAGVNTSTEFLAKHIADQLADAVHAGSLGEGARGLTGIEVTLHESHVAWASYERPL

SEQ ID NO: 25264 - protein, 144 aa, Saccharothrix espanaensis
  REGION 1..144: note = tr|K0K4D0|K0K4D0_SACES Uncharacterized protein; OS = Saccharothrix espanaensis (strain ATCC 51144 / DSM 44229 / JCM 9112 / NBRC 15066 / NRRL 15764) OX=1179773; GN = BN6_41 260 PE=4 SV=1
MHRRIAHPVEVTLFSITVRDHVMVAHSFSGEVFGPAQRLHGATFVVDARFKRVELDQDNIVVDIGLATQELRAVLADLNYRNLDEVPEFAGINTSTEFLAKHIADRLADRVRAGALGVGAHGLSGIEVSLHESHVAWASYERDL

SEQ ID NO: 25265 - protein, 118 aa, Saccharothrix espanaensis
  REGION 1..118: note = tr|K0JQ41|K0JQ41_SACES 6-carboxy-5,6,7,8-tetrahydropterin synthase; OS = Saccharothrix espanaensis (strain ATCC 51144 / DSM 44229 / JCM 9112 / NBRC 15066 / NRRL 15764)OX=1179773; GN = BN6_20850 PE=3 SV=1
MELFKEFTFEAAHRMPEVPEGHKCGRLHGHSYRVTVRLEGAVEPKAGWVVDFGEVKAAFKPLEERLDHHYLNEVDGLSNPTSENLAVWIWDRLSAALPTLSAVTVRETCTSGCTYRGT

SEQ ID NO: 25266 - protein, 128 aa, Saccharothrix sp.
  REGION 1..128: note = tr|A0A0F0HNA8|A0A0F0HNA8_9PSEU 6-carboxy-5,6,7,8-tetrahydropterin synthase; OS = Saccharothrix sp. ST-888 OX=1427391 GN=UK12_26170 PE=3; SV = 1
MQGRHRIAKRYRFEAAHFLTGLPEGHQCSQMHGHSYEVEFVLTADHLTAPGFVTDFGELAPVKRMIDETLDHTVLNEVLPVVPTSENLAAHLAGWFVEHVEPSLPGRLAAVRVSETASSWAEFELAER

SEQ ID NO: 25267 - protein, 118 aa, Saccharothrix sp.
  REGION 1..118: note = tr|A0A1V2Q5E5|A0A1V2Q5E5_9PSEU 6-carboxy-5,6,7,8-tetrahydropterin synthase; OS = Saccharothrix sp. ALI-22-I OX=1933778 GN=ALI22I_33375; PE = 3 SV=1
MEIFREFTFEAAHRLPEVPEGHKCARLHGHSYRVTVHVEGPVDERAGWVMDFGDLKTAFKPLEEQLDHHYLNEVEGLENPTSENLAVWIWDCLSPELPTLSAVTVRETCTSGCTYRGR

SEQ ID NO: 25268 - protein, 122 aa, Saccharothrix texasensis
  REGION 1..122: note = tr|A0A3N1H6Q2|A0A3N1H6Q2_9PSEU 6-pyruvoyl tetrahydropterin synthase-like protein OS=Saccharothrix texasensis OX=103734 GN=EDD40_3499 PE=4 SV=1
MVAHSFRGEVFGPAQRLHGATFVVDAKFKRAELDADNIVVDIGLATERLRAVLGELNYRNLDDVPEFAGVNTSTEFLAKHIADELAEAVHAGSLGEGARGLSGIEVSLHESHVAWASYERPL

SEQ ID NO: 25269 - protein, 136 aa, Saccharothrix variisporea
  REGION 1..136: note = tr|A0A495X4S8|A0A495X4S8_9PSEU 6-pyruvoyl-tetrahydropterin synthase OS=Saccharothrix variisporea OX=543527 GN=DFJ66_1295 PE=4 SV=1
MEVTLFSITVRDHVMVAHSFRGEVFGPAQRLHGATFVVDAKFTRLDLDSDNIVVDIGLATRELGAVLAELNYRNLDDVPEFAGVNTSTEFLAKHIADRLADRVHDGALGPGALGLSGIEVTLHESHVAWASYERSL

SEQ ID NO: 25270 - protein, 229 aa, Saccharothrix variisporea
  REGION 1..229: note = tr|A0A495XD48|A0A495XD48_9PSEU 6-pyruvoyl-tetrahydropterin synthase OS=Saccharothrix variisporea OX=543527 GN=DFJ66_2688 PE=4 SV=1
MKAAEGKRAADGRITISQSFDFSASHELRLLPIGHKCSRNHGHNYTVAVSALVHDDTHGDLSALGEYLDATFDHRLLNEQVTFHPTSELLVVHLVEWFRDNVQSSTSIRLVAMVVSETATTSARCDGVTDEVTISKTFKTSHGDVTLVLGADGLDEFGFITDFGDLKPFGAYLQAPAADAGLRTAGPALVAHLAGWFVDNIEPEIRGRLVSVRVDSGTTTGLWERGDAS

SEQ ID NO: 25271 - protein, 136 aa, Salegentibacter agarivorans
  REGION 1..136: note = tr|A0A1I2L9C4|A0A1I2L9C4_9FLAO 6-carboxy-5,6,7,8-tetrahydropterin synthase; OS = Salegentibacter agarivorans OX=345907; GN = SAMN04488033_1074 PE=3 SV=1
MRLSVHRKAHFNAAHRLYRKDWSDEKNLQVFGKCSNPHYHGHNYDLIVKVTGEIDPETGFVMDLKRLKDLIYEEVEVPFDHKNLNEEVPPFNNLNPTAENIAVVIWNKIREKLKPALDLEITLYETPRNYVTYKGE

SEQ ID NO: 25272 - protein, 149 aa, Salegentibacter agarivorans
  REGION 1..149: note = tr|A0A1I2MH26|A0A1I2MH26_9FLAO 6-carboxy-5,6,7,8-tetrahydropterin synthase; OS = Salegentibacter agarivorans OX=345907; GN = SAMN04488033_113100 PE=3 SV=1
MSKIRITKQFSFETGHALYGYDGKCRNVHGHSYKLSVCVIGEPITDKDNVKFGMVIDFGDLKKIVKSEIVDKFDHATVFNKNTPHVELAEELKNRGHHVILVEYQPTSENMVVNFAEKIQKHLPEHIKLHSLKLQETESSFAEWFANDQ

SEQ ID NO: 25273 - protein, 136 aa, unidentified
  source 1..136: note = Salegentibacter echinorum
  REGION 1..136: note = tr|A0A1M5GRU6|A0A1M5GRU6_9FLAO 6-carboxy-5,6,7,8-tetrahydropterin synthase; OS = Salegentibacter echinorum OX=1073325; GN = SAMN05444483_104280 PE=3 SV=1
MRLSVNRKAHFNAAHRLYRKDWSDEKNREIFGKCSNPHYHGHNYELIVKVTGKIDPETGFVMDLKRLKKLIYEEVEVPFDHKNLNKEVKPFDELNPTAENIVVVIWKKLRNKLRSNLDLEVTLYETPRNFVTYKGE

SEQ ID NO: 25274 - protein, 158 aa, unidentified
  source 1..158: note = Salegentibacter echinorum
  REGION 1..158: note = tr|A0A1M5IMN3|A0A1M5IMN3_9FLAO 6-pyruvoyltetrahydropterin/6-carboxytetrahydropterin synthase OS=Salegentibacter echinorum OX=1073325; GN = SAMN05444483_10842 PE=4 SV=1
MSKIRITKKFSFETGHALYGYDGKCRNVHGHSYKLSVCVIGEPINDMDHVKNGMVIDFGDLKKIVKSEIVDQFDHATVFNQNTPHIELARELKEREHHVILVDYQPTSENMVVDFAKKIQKHLPDHIKLHSLKLQETESSFAEWYASDQSAPQTPKGE

SEQ ID NO: 25275 - protein, 152 aa, Salegentibacter flavus
  REGION 1..152: note = tr|A0A1I5AZQ2|A0A1I5AZQ2_9FLAO 6-pyruvoyltetrahydropterin/6-carboxytetrahydropterin synthase OS=Salegentibacter flavus OX=287099; GN = SAMN05660413_02128 PE=4 SV=1
MSKIRITKQFNFETGHALYGYDGKCRNVHGHSYKLNVTVIGEPISDKNDVKFGMVIDFGDLKKIVKSEIVDKFDHATVFNKNTPHIELAQELMNRDHHVILVEYQPTSENMVIDFAEKIKKHLPGHIQLHSLKLQETESSFAEWYASDQDSH

SEQ ID NO: 25276 - protein, 136 aa, Salegentibacter flavus
  REGION 1..136: note = tr|A0A1I4Y7V7|A0A1I4Y7V7_9FLAO 6-carboxy-5,6,7,8-tetrahydropterin synthase; OS = Salegentibacter flavus OX=287099 GN=SAMN05660413_00601; PE = 3 SV=1
MRLTVHRKAHFNAAHRLYRKDWDQAKNEAVFGKCSNPHYHGHNYELVVSVKGEIDEETGFVMDLKLLKELIYEEVEVPFDHKNLNEELPEFKNLNPTAENIAVVIWNKLRSKLKPELKLEVTLYETPRNFVTYNGE

SEQ ID NO: 25277 - protein, 149 aa, Salegentibacter holothuriorum
  REGION 1..149: note = tr|A0A1T5BTI0|A0A1T5BTI0_9FLAO 6-carboxy-5,6,7,8-tetrahydropterin synthase; OS = Salegentibacter holothuriorum OX=241145; GN = SAMN05660776_1486 PE=3 SV=1
MSKIRITKQFSFETGHALYGYDGKCRNVHGHSYKLSVCVIGEPITDSDNVKFGMVIDFGDLKKIVKSEIVDQFDHATVFNKNTPHVELAKELKNRGHHVILVEYQPTSENMVVDFAEKIKKYLPEHIKLHSLRLQETESSFAEWFASDQ

SEQ ID NO: 25278 - protein, 136 aa, Salegentibacter holothuriorum
  REGION 1..136: note = tr|A0A1T5CNJ4|A0A1T5CNJ4_9FLAO 6-carboxy-5,6,7,8-tetrahydropterin synthase; OS = Salegentibacter holothuriorum OX=241145; GN = SAMN05660776_2093 PE=3 SV=1
MRLSVHRKAHFNAAHRLYRKDWSDEKNLEVFGKCSNPHYHGHNYDLIVTVTGEIDPETGFVMDLKRLKDLIYEEVEVPFDHKNLNEEVAPFDELNPTAENITVVIWNKIRAKLRPELDLEITLYETPRNYVTYKGE

SEQ ID NO: 25279 - protein, 157 aa, Salegentibacter mishustinae
  REGION 1..157: note = tr|A0A0Q9ZA84|A0A0Q9ZA84_9FLAO 6-pyruvoyl tetrahydropterin synthase OS=Salegentibacter mishustinae; OX = 270918 GN=APR42_14275 PE=4 SV=1
MSKIRITKQFSFETGHALYGYDGKCRNVHGHSYKLSVCVIGEPITDKDNVKFGMVIDFGDLKKIVKSEIVDKFDHATVFNKNTPHVELAEELKNRGHHVILVEYQPTSENMVVDFAEKIQKHLPDHIKLHSLKLQETESSFAEWFASDQAPQPPKGE

SEQ ID NO: 25280 - protein, 136 aa, Salegentibacter mishustinae
  REGION 1..136: note = tr|A0A0Q9ZDU8|A0A0Q9ZDU8_9FLAO 6-carboxy-5,6,7,8-tetrahydropterin synthase; OS = Salegentibacter mishustinae OX=270918 GN=APR42_06170; PE = 3 SV=1
MRLSVHRKAHFNAAHRLYRKDWSDEKNLKVFGKCSNPHYHGHNYDLIVKVTGEIDPETGFVMDLKRLKDLIYEEVEVPFDHKNLNEEVAPFDELNPTAENITVVIWNKIRAKLKPELDLEITLYETPRNYVTYKGE

SEQ ID NO: 25281 - protein, 149 aa, Salegentibacter salarius
  REGION 1..149: note = tr|A0A2N0TVG1|A0A2N0TVG1_9FLAO 6-carboxy-5,6,7,8-tetrahydropterin synthase; OS = Salegentibacter salarius OX=435906 GN=APR40_12945 PE=3; SV = 1
MSKIRITKQFSFETGHALYGYDGKCRNVHGHSYKLSVCVIGEPITDKDNVKFGMVIDFGDLKKIVKSEIVDKFDHATVFNKNTPHVELAEELKNRGHHVILVEYQPTSENMVVDFAEKIQKHLPEHIKLHSLKLQETESSFAEWFASDQ

SEQ ID NO: 25282 - protein, 136 aa, Salegentibacter salarius
  REGION 1..136: note = tr|A0A2N0TQ59|A0A2N0TQ59_9FLAO 6-carboxy-5,6,7,8-tetrahydropterin synthase; OS = Salegentibacter salarius OX=435906 GN=APR40_04335 PE=3; SV = 1
MRLSVHRKAHFNAAHRLYRKDWSDEKNLKVFGKCSNPHYHGHNYDLIVKVTGEIDPETGFVMDLKRLKDLIYEEVEVPFDHKNLNEEVAPFDELNPTAENITVVIWNKMRAKLKPELDLEITLYETPRNYVTYKGE

SEQ ID NO: 25283 - protein, 150 aa, Salegentibacter salegens
  REGION 1..150: note = tr|A0A1M7M9F7|A0A1M7M9F7_9FLAO 6-pyruvoyltetrahydropterin/6-carboxytetrahydropterin synthase OS=Salegentibacter salegens OX=143223; GN = SAMN05878281_2336 PE=4 SV=1
MSKIRITKKFSFETGHALYGYDGKCRNVHGHSYKLDVCVIGEPITDSDNVKLGMVIDFGDLKKIVKSEIVDQFDHATVFNKNTPHVELAKELKNRGHHVILVEYQPTSENMVVDFAEKIQKHLPEHIKLHSLKLQETESSFAEWFASDQN

SEQ ID NO: 25284 - protein, 136 aa, Salegentibacter salegens
  REGION 1..136: note = tr|A0A1M7NGT3|A0A1M7NGT3_9FLAO 6-carboxy-5,6,7,8-tetrahydropterin synthase; OS = Salegentibacter salegens OX=143223 GN=SAMN05878281_3144; PE = 3 SV=1
MRLSVHRKAHFNAAHRLYRKDWSDEKNLRVFGKCSNPHYHGHNYDLIVKVTGEIDPETGFVMDLKRLKDLIYEEVEVPFDHKNLNEEVPPFNELNPTAENIAVVIWNKIREKLKAELDLEITLYETPRNYVTYKGE

SEQ ID NO: 25285 - protein, 136 aa, Salegentibacter salinarum
  REGION 1..136: note = tr|A0A2N0TX22|A0A2N0TX22_9FLAO 6-carboxy-5,6,7,8-tetrahydropterin synthase; OS = Salegentibacter salinarum OX=447422 GN=APR41_16165 PE=3; SV = 1
MRLSVHRKAHFNAAHRLYRKDWSDEKNLQVFGKCSNPHYHGHNYDLIVKVTGEIDPETGFVMDLKRLKDLIYEEVEVPFDHKNLNEEVPPFNELNPTAENIAVVIWNKIREKLKPELDLEITLYETPRNYVTYKGE

SEQ ID NO: 25286 - protein, 149 aa, Salegentibacter salinarum
  REGION 1..149: note = tr|A0A2N0U3J1|A0A2N0U3J1_9FLAO 6-carboxy-5,6,7,8-tetrahydropterin synthase; OS = Salegentibacter salinarum OX=447422 GN=APR41_00810 PE=3; SV = 1
MSKIRITKKFSFETGHALYGYDGKCRNVHGHSYKLSVCVIGEPITDKDNVKFGMVIDFGDLKKIVKAEIVDQFDHATVFNKNTPHVELAEELKNRGHHVILVGYQPTSENMVVDFAKKIQKHLPDHIKLHSLKLQETESSFAEWYASDQ

SEQ ID NO: 25287 - protein, 151 aa, Salegentibacter sp.
  REGION 1..151: note = tr|A0A4R6G1B5|A0A4R6G1B5_9FLAO 6-pyruvoyltetrahydropterin/6-carboxytetrahydropterin synthase OS=Salegentibacter sp. 24 OX=2183986; GN = DET49_109102 PE=4 SV=1
MSKIRITKKFSFETGHALYGYDGKCRNVHGHSYKLSVCVIGEPITDKNNVKFGMVIDFGDLKKIVKTEIVDRFDHATVFNRNTPHLELAEELKNRGHHVILVEYQPTSENMVVDFAEKIQRHLPDHIKLHSLKLQETESSFAQWCASDQVQ

SEQ ID NO: 25288 - protein, 149 aa, Salegentibacter sp.; identical to SEQ ID NO: 25272
  REGION 1..149: note = tr|A0A1L6R0K9|A0A1L6R0K9_9FLAO 6-carboxy-5,6,7,8-tetrahydropterin synthase; OS = Salegentibacter sp. T436 OX=1729720 GN=AO058_03890 PE=3; SV = 1

SEQ ID NO: 25289 - protein, 149 aa, unidentified
  source 1..149: note = Salibacterium halotolerans
  REGION 1..149: note = tr|A0A1I5T485|A0A1I5T485_9BACI 6-carboxy-5,6,7,8-tetrahydropterin synthase; OS = Salibacterium halotolerans OX=1884432; GN = SAMN05518683_1106 PE=3 SV=1
MIHQFYPQVPHTYRYELNKDMQLAAAHFIPAAAAGKCANVHGHTYVINVTIAGDELDDTGFLVDFKMIKELVHDRFDHSLLNDDEAFADTPDSDSETFPTTEVVARTIWQSIQKELDTRFNQPRCLQVIVRETPTSYVVYRAKEGDFTS

SEQ ID NO: 25290 - protein, 149 aa, unidentified
  source 1..149: note = Salibacterium qingdaonense
  REGION 1..149: note = tr|A0A1I4IEV3|A0A1I4IEV3_9BACI 6-carboxy-5,6,7,8-tetrahydropterin synthase; OS = Salibacterium qingdaonense OX=266892; GN = SAMN04488054_10210 PE=3 SV=1
MIHQFYPQVPHTYRYELNKDMQLAAAHFIPAAAAGKCANIHGHTYVINVTIAGDELDDTGFLVDFKMIKELVHDRFDHSLFNDDDAFADTPDSDSETFPTTEVVARTIWQSIQKELDTRFNQPRCLQVIVRETPTSYVVYRAKEGDFTS

SEQ ID NO: 25291 - protein, 141 aa, unidentified
  source 1..141: note = Salilacibacter sp.
  REGION 1..141: note = tr|A0A514LLB0|A0A514LLB0_9ACTN 6-carboxy-5,6,7,8-tetrahydropterin synthase; OS = Salilacibacter sp. NKC3-5 OX=2502791 GN=queD PE=3 SV=1
MLQQFYPQVFHDFRYELNKDMQIAAAHFINHKDAGQCRETHGHTYFINITIAGDTLDDSGFLVNFKTLKDEVHGVFDHSLLNDHPSFADGLPTTEMVARVFWEKIDERLAAQENRPYCLQVLVRETPTSYAIYRPKRDEHR

SEQ ID NO: 25292 - protein, 155 aa, Salimicrobium flavidum
  REGION 1..155: note = tr|A0A1N7IR62|A0A1N7IR62_9BACI 6-pyruvoyltetrahydropterin/6-carboxytetrahydropterin synthase OS=Salimicrobium flavidum OX=570947; GN = SAMN05421687_1027 PE=4 SV=1
MYGFTIVENLQKIDEHIKRHELNYHSKRVMVSKEFTFDAAHHLHCYDGKCKNLHGHTYTAVFGISGYTDDIGLVIDFGDIKTIWKEQIEVHLDHRYLNDTLPDMNTTAENMVVWCYEKMDEALAGYPNSCRLEFVRLYETPTSYAEARREWMTHG

SEQ ID NO: 25293 - protein, 155 aa, Salimicrobium halophilum
  REGION 1..155: note = tr|A0A1G8T6A9|A0A1G8T6A9_9BACI 6-pyruvoyltetrahydropterin/6-carboxytetrahydropterin synthase OS=Salimicrobium halophilum OX=86666; GN = SAMN04490247_1734 PE=4 SV=1
MYGFTIVENLQKIDEHIKRHELNYHSKRVMVSKEFTFDAAHHLHCYDGKCKNLHGHTYTAVFGISGHTDDIGLVIDFGDIKTIWKEQIEVHLDHRYLNDTLPNMNTTAENMVVWCYEKMDAALADYPNGCRVEFVRLYETPTSYAEARREWMRNG

SEQ ID NO: 25294 - protein, 134 aa, unidentified
  source 1..134: note = Salinarimonadaceae bacterium
  REGION 1..134: note = tr|A0A0N8KET3|A0A0N8KET3_9RHIZ 6-pyruvoyl-tetrahydropterin synthase OS=Salinarimonadaceae bacterium HL-109 OX=1653334 GN=HLUCCO17_03370 PE=4 SV=1
MFAVEVRDHVMIAHSFKGDLFGPAQKLHGATFVIDVAFFRKELGPEGVVVDIGRAHEALKATLGPLNYQNLDELPQFAGQNTTTEFLCKHIFDAMAQAATSGALGPGSEKIAKIRVLIGESHVARAWYEAELAG

SEQ ID NO: 25295 - protein, 135 aa, Salinarimonas sp.
  REGION 1..135: note = tr|A0A5B2VW06|A0A5B2VW06_9RHIZ 6-carboxytetrahydropterin synthase OS=Salinarimonas sp. BN140002 OX=1638099 GN=F0L46_03485 PE=4 SV=1
MYAVEVRDHIMIAHSFKGALFGPAQGLHGATFVVDVAFFRPELTADAVVVDIGRAHEALKATLGPLNYRNLDEVPAFAGQNTTTEFLCRHIFDAMAAAAREGRLGPGSEGVSRIRVSLHESHVARAWYEAELARG

SEQ ID NO: 25296 - protein, 123 aa, Salinibacter ruber
  REGION 1..123: note = tr|D5H9C4|D5H9C4_SALRM Putative 6-pyruvoyl tetrahydrobiopterin synthase OS=Salinibacter ruber (strain M8) OX=761659 GN=ygcM PE=4 SV=1
MYELMVRRDFVAQHYLTVPDCGPENEWHSHHFDVEVALEGDELNEHGYLVDIVEVEGALEALVDRYEDATLNDLPEFEGLNPSIEHFSRIFCTALTEQLNTARLETVTVKIWEDDTAWASYTA

SEQ ID NO: 25297 - protein, 123 aa, Salinibacter ruber
  REGION 1..123: note = tr|Q2S2F0|Q2S2F0_SALRD Uncharacterized protein; OS = Salinibacter ruber (strain DSM 13855 / M31) OX=309807; GN = SRU_1508 PE=4 SV=1
MYELMVRRDFVAQHYLTVPDCGPENEWHSHHFDVEVALKGDELNEHGYLVDIVEVEGALEALVDRYEDATLNDLPEFEGLNPSIEHFSRIFCTALTEQLNTAQLETVTVKIWEDDTAWASYTA

SEQ ID NO: 25298 - protein, 129 aa, Salinibacter sp.
  REGION 1..129: note = tr|A0A2P6BX73|A0A2P6BX73_9BACT 6-pyruvoyl tetrahydropterin synthase OS=Salinibacter sp. 10B; OX = 1923971 GN=BSZ35_01700 PE=4 SV=1
MYTLRVHRDFVAQHYLTVPDCGPENEWHSHHFGVEVLLKGKELNDHGYLVDIVDVEEALDQIVARYRDSTLNDLPEFEGRNPSIEHFSRIVCISLQDRLSLDATTGITVRIWEDEEAWASYSTEGVHSD

SEQ ID NO: 25299 - protein, 137 aa, Salinibacter sp.
  REGION 1..137: note = tr|A0A2P6C5X1|A0A2P6C5X1_9BACT 6-carboxy-5,6,7,8-tetrahydropterin synthase; OS = Salinibacter sp. 10B OX=1923971 GN=BSZ35_14315 PE=3 SV=1
MSTVYVTRKVHFNAAHRLHNPEKSDEWNEETFGKCSNPNWHGHNFELEVTVAGTPDPETGYVVDLGALKDILHERVVDKVDHKNLNLEVDFMDGVIPSTENFAIAIWNQLEDALPSGRLHAIRLYETPRNFVEYRGE

SEQ ID NO: 25300 - protein, 138 aa, Salinicoccus alkaliphilus
  REGION 1..138: note = tr|A0A1M7F022|A0A1M7F022_9STAP 6-carboxy-5,6,7,8-tetrahydropterin synthase; OS = Salinicoccus alkaliphilus DSM 16010 OX=1123231; GN = SAMN02745189_01282 PE=3 SV=1
MMIYPIPSHDYEYELNKDLNFSAAHHIPDARAGKCERVHGHTYHVNITIAGDALDDLGFLVNFSALKKLIMDEFDHRLLNDHEAFRDIPPTSETLAKVIHDMVQSYIKTEQPNEVKCLQIILKETPTSYVVYRPKEKR

SEQ ID NO: 25301 - protein, 137 aa, Salinicoccus halodurans
  REGION 1..137: note = tr|A0A0F7HJA4|A0A0F7HJA4_9STAP 6-carboxy-5,6,7,8-tetrahydropterin synthase; OS = Salinicoccus halodurans OX=407035 GN=AAT16_02230 PE=3; SV = 1
MMYQTPSHDFEYELNKDLNFSAAHHIPDARAGKCAKIHGHTYFVNMTIAGDTLDDLGFLVNFSDIKKLIDEAFDHTLLNDHTRFSDIPPTSETMAKTIYDMVEEYLDRLDNRPVCLQVVLRETPTSYVVYRPKEYRK

SEQ ID NO: 25302 - protein, 137 aa, unidentified
  source 1..137: note = Salinicoccus kekensis
  REGION 1..137: note = tr|A0A285URU7|A0A285URU7_9STAP 6-carboxy-5,6,7,8-tetrahydropterin synthase; OS = Salinicoccus kekensis OX=714307 GN=SAMN05878391_2407; PE = 3 SV=1
MFYPIPDHDYEYELNKDLNFSAAHHIPDARAGKCERVHGHTYHVNITIAGDVLDDLGFLVNFSALKKLIMDAFDHRLLNDHEAFRDIPPTSETLAKVIYDMVDEYITAEQPNKLECLQIILKETPTSYVVYRPKGRK

SEQ ID NO: 25303 - protein, 138 aa, Salinicoccus qingdaonensis
  REGION 1..138: note = tr|A0A1G9DKH0|A0A1G9DKH0_9STAP 6-carboxy-5,6,7,8-tetrahydropterin synthase; OS = Salinicoccus qingdaonensis OX=576118; GN = SAMN05216216_10639 PE=3 SV=1
MMYPIPVHDYEYELNKDLNFSAAHFIPDKRAGKCERVHGHTYHVNITIVGDTLDELGFLVNFSALKNLIMEAFDHRLLNEHEAFSEIPPTSETLAKVIYEMVDKYIKEEQENELQCLQIILRETPTSYVVYRPKEKDE

SEQ ID NO: 25304 - protein, 138 aa, Salinicoccus roseus
  REGION 1..138: note = tr|A0A265E6P7|A0A265E6P7_9STAP 6-carboxy-5,6,7,8-tetrahydropterin synthase; OS = Salinicoccus roseus OX=45670 GN=queD PE=3 SV=1
MMSYKTPDHDYRFELNKDLNFSAAHFIPDDRAGKCSNVHGHTYFVNITIAGDELDDLGFLVNFSSLKSLISDAFDHTLLNEHERFQERPPTTETMAETIYDMVAEFVDGLDNRPVCLQVYLRETPTSYVIYRPKERRN

SEQ ID NO: 25305 - protein, 138 aa, Salinicoccus roseus
  REGION 1..138: note = tr|A0A0C2HDK2|A0A0C2HDK2_9STAP 6-carboxy-5,6,7,8-tetrahydropterin synthase; OS = Salinicoccus roseus OX=45670 GN=SN16_03460 PE=3 SV=1
MMSYKTPDHDYRFELNKDLNFSAAHFIPDDRAGKCSNVHGHTYFVNITIAGDELDDLGFLVNFSSLKSLISDAFDHTLLNEHERFQERPPTTETMAETIYDMVAEFVDGLDNRPVCLQVYLRETPTSYVIYRPKESRN

SEQ ID NO: 25306 - protein, 137 aa, unidentified
  source 1..137: note = Salinicoccus sediminis
  REGION 1..137: note = tr|A0A0M2SIP0|A0A0M2SIP0_9STAP 6-carboxy-5,6,7,8-tetrahydropterin synthase; OS = Salinicoccus sediminis OX=1432562 GN=WN59_07470 PE=3; SV = 1
MMYQTPVHDFEYELNKDLNFSAAHHIPNRRAGKCANIHGHTYFVNMTIAGDMLDDLGFLVNFSDVKKLIDEAFDHTLLNDHPRFLDIPPTSETLAKTIHEMVSEYLATLDNRPVCLQVFLRETPSSYVIYRPKEFRK

SEQ ID NO: 25307 - protein, 136 aa, Salinicoccus sp.
  REGION 1..136: note = tr|A0A558AR05|A0A558AR05_9STAP 6-carboxy-5,6,7,8-tetrahydropterin synthase; OS = Salinicoccus sp. CT19 OX=2493691 GN=queD PE=3 SV=1
MYQTPAHDYQYELNKDLNFSAAHYVPDERAGKCSRVHGHTYFVNITIAGDELDDLGFLVNFSSLKSLISDAFDHTLLNEHERFKERPPTSETLAETIYDMVETFIAGLDNRPVCLQIYLQETPTSYVIYRPKESRK

SEQ ID NO: 25308 - protein, 287 aa, Salinicola socius
  REGION 1..287: note = tr|A0A1Q8SPE4|A0A1Q8SPE4_9GAMM 6-pyruvoyl tetrahydropterin synthase-related protein OS=Salinicola socius OX=404433 GN=BTW07_14470 PE=4 SV=1
MTLFVNNLTNIDASIWSPQRGLSGASWHVDVELDGELAEDGMLLDFGEVKPWIKARLDAGLDHTLLVPTQAAGVKIEECSEGLHMATELPFPFELRAPRQGFTLFPWGEITAERLGAHLSTELSKRPPPRVEAIRIRLREELADGAIYSYSHGLKHHKGNCQRIAHGHRSHLRIWRNGQRDSELEGFWAQRLDNGYLVDEADIVGPRRQDDIMRVRYRSAQGQFQLHLPKARCHTLPAPTTVENIAAWLARQIALSTGAHIRVQAFEGIDKGALAESRGISAGDQGI

SEQ ID NO: 25309 - protein, 132 aa, Salinicola socius
  REGION 1..132: note = tr|A0A1Q8SR55|A0A1Q8SR55_9GAMM Uncharacterized protein OS=Salinicola socius OX=404433 GN=BTW07_11510 PE=4; SV = 1
MFSLTVRDHMMIAHSFNSETFGPAQKLHGATYVVDVTFKRPELDPDDLVVDIGLASEVLKRILGEFTLNNLDEIDEFKGRNTTTEFMARVVFDRLSHAIRDGELGDGARHLTALAVTLHESHVAWASYEGGL

SEQ ID NO: 25310 - protein, 284 aa, Salinicola sp.
  REGION 1..284: note = tr|A0A1Q8T3N5|A0A1Q8T3N5_9GAMM 6-pyruvoyl tetrahydropterin synthase-related protein OS=Salinicola sp. MH3R3-1 OX=1928762 GN=BTW08_08355 PE=4 SV=1
MTLFVNNLTNIDASIWSPQRGLSGASWHVDVELDGELGEDGMLFDFGEVKPWIKSRLDGGLDHTLLVPTQAAGVKIEECSEGLHMAAELPFPFELRAPRQGFTLFPWGEVTAERLGAHLSSELSKRPPPRVEAIRIRLREELVDGAIYSYSHGLKHHKGNCQRIAHGHRSHLRIWRDGQRDSELERLWAQRLDNAYLVDEADIVNPRRNDDIMRVRYRSAQGQFQLHLPKERCHTLSAPTTVENIAAWLAHQIALSTGAHIRVQAFEGIDKGALAESRGTPAGG

SEQ ID NO: 25311 - protein, 132 aa, Salinicola sp.
  REGION 1..132: note = tr|A0A1S2DDK0|A0A1S2DDK0_9GAMM Uncharacterized protein OS=Salinicola sp. MIT1003 OX=1882734; GN = BC443_11160 PE=4 SV=1
MFSLTVRDHMMIAHSFHSETFGPAQKLHGATYVVDVTFKRPELDHDDLVVDIGLASETLKRVLGEFTLNNLDEVEEFKGRNTTTEFMARVVFDRLSHAIREGALGDGGRHLTAMTVTLHESHIAWASYEGGL

SEQ ID NO: 25312 - protein, 136 aa, Salinimicrobium catena
  REGION 1..136: note = tr|A0A1H5NSD5|A0A1H5NSD5_9FLAO 6-carboxy-5,6,7,8-tetrahydropterin synthase; OS = Salinimicrobium catena OX=390640 GN=SAMN04488034_105125; PE = 3 SV=1
MKVTVNRKAHFNAAHRLFRKEWDDEKNKRVFGKCSNPHYHGHNYELTVSVTGEICEETGFVIDLKDLKDLIYEKIEVPFDHKNLNLEVPEFKELNPTAENIAVVIWRKLRHELAAHLDLEVTLYETPRNFVTYRGQ

SEQ ID NO: 25313 - protein, 150 aa, Salinimicrobium catena
  REGION 1..150: note = tr|A0A1H5IX61|A0A1H5IX61_9FLAO 6-pyruvoyltetrahydropterin/6-carboxytetrahydropterin synthase OS=Salinimicrobium catena OX=390640; GN = SAMN04488034_101556 PE=4 SV=1
MGLIRITKQFSFETGHALYGYDGKCKNVHGHSYKLAVTVIGEPITDVDNVKLGMVIDFGDLKKIVKQEIVDVFDHATVFNKNTPHVELAKELKDRGHTVILVDYQPTSENMIQDFAAKIQKRLPEHIKLFSLRLQETETSYAEWYASDNA

SEQ ID NO: 25314 - protein, 136 aa, unidentified
  source 1..136: note = Salinimicrobium sediminis
  REGION 1..136: note = tr|A0A285X6T8|A0A285X6T8_9FLAO 6-carboxy-5,6,7,8-tetrahydropterin synthase; OS = Salinimicrobium sediminis OX=1343891; GN = SAMN06296241_2568 PE=3 SV=1
MRVTVNRKAHFNAAHRLHRKDWDDAKNSRVFGKCSNPNYHGHNYELIVAVTGNINPETGFVMDLKDLKELIYQKIEQPFDHKNLNIEVAEFRDLNPTAENIAVVIWNKLRAELEPHLDLEVTLYETPRNFVTYRGE

SEQ ID NO: 25315 - protein, 165 aa, unidentified
  source 1..165: note = Salinimicrobium sediminis
  REGION 1..165: note = tr|A0A285X1L8|A0A285X1L8_9FLAO 6-pyruvoyltetrahydropterin/6-carboxytetrahydropterin synthase OS=Salinimicrobium sediminis OX=1343891; GN = SAMN06296241_0763 PE=4 SV=1
MQGVKNLYLCTKFVPMALIRITKQFSFETGHALFGYDGKCKNVHGHSYKLAVTVIGEPISDEDHVKLGMVIDFGDLKKIVKQEIVDKFDHATVFNKNTPHVELAEELQTRGHNVILVDYQPTSENMIQDFAERIKSRLPQHIELYSLRLQETETSYAEWYASDNS

SEQ ID NO: 25316 - protein, 294 aa, unidentified
  source 1..294: note = Salinimonas sediminis
  REGION 1..294: note = tr|A0A346NLW7|A0A346NLW7_9ALTE Uncharacterized protein OS=Salinimonas sediminis OX=2303538 GN=D0Y50_09195; PE = 4 SV=1
MQLFVNDLTVMDFSYLCPRRGMVGESWIVDVVLDGNLNDESMIQDFGKVKKNLKRLIDEYVDHKLLVPLEYTGSTVIHRTQDEQVEVRFETNEHSVIQLFCPAEAYAFVYADEVTMDSVGNYLREVIATHLPDNVASIELKLRAEQILTPYYHYTHGLKKHDGNCQRIAHGHRSKIGIVIDGQDCLESQQYWAQRWADIYIISAQDIIEYDARQATGTVDNPDEYYCCAYESSQGYFELLIARNVCEVIETDSTVECLAQFVFAEQKKRSGDSTLQVMAYEGVGKGAMVRDEVC

SEQ ID NO: 25317 - protein, 292 aa, Salinimonas sp.
  REGION 1..292: note = tr|A0A5B7YE97|A0A5B7YE97_9ALTE Uncharacterized protein OS=Salinimonas sp. KX18D6 OX=2572577; GN = FBQ74_08595 PE=4 SV=1
MQLFVNDLTVMDFSYLCPRRGMVGESWIVDVMLDGDLNDESMIQDFGKVKKDLKRLIDEYVDHKLLVPADHAGASITHLDDEQVEVRFTLDNDEIIQLFCPAEAYAFVYADTVTMASVGSYMREVIATHLPENVANIELKLRAEQILTPFYHYTHGLKKHDGNCQRIAHGHRSRIGIFIDEQACLESQQYWAQRWEDIYIITREDIIDYEGRRSSGALDNPLDYYCCAYESSQGYFELIIPRKSCEVVETDSTVECLAQFIFDEQRKRTGSGNLRVMAYEGVGKGAMVAGTV

SEQ ID NO: 25318 - protein, 293 aa, unidentified
  source 1..293: note = Saliniradius amylolyticus
  REGION 1..293: note = tr|A0A2S2E4Z9|A0A2S2E4Z9_9ALTE Isocitrate dehydrogenase (NADP(+)) OS=Saliniradius amylolyticus; OX = 2183582 GN=idh1 PE=4 SV=1
MQLFVNDLTVMDFSYLCPERGMVGESWIVDVILDGALNDESMVLDFGKVKKQLKRLIDDYVDHKLLVPAEHSYTEIRHHPQTEQVTVDFHRPEGRSIHLYCPPEAYAFVYAEEVTMDSVRDYLRDIIATHLPDNVEGLTLELRTEELRTPYYHYTHGLKKHDGNCQRIAHGHRSKVDVWRDEHHAPDLQCYWAERWQDIYIGTREDLVKPGELHLSPKACQLDLDEHYGFAYEASQGLFELVIPMRETEIVETDSTVECLAQFMADEHKRLNPESTYQVMAYEGVGKGAIASA

SEQ ID NO: 25319 - protein, 284 aa, unidentified
  source 1..284: note = Salinisphaera halophila
  REGION 1..284: note = tr|A0A423PRR1|A0A423PRR1_9GAMM Uncharacterized protein OS=Salinisphaera halophila YIM 95161 OX=1051139; GN = SAHL_10565 PE=4 SV=1
MKPGDTVDLFVEQVTHIDCGVLDPDTGLDGRTWLVDARLSGTRDAHGMLFDFGPARRLLKRAIDERLDHRLLVPLRAPGLSRHGDDLRLTTTRGAHIDYAGPAEGVALLNAERIGPALLADWLTDRIAPLLPDNIDDLQLSLRAEAIDGAAYHYCHGLRSHDGNCQRMGHGHRCRLAIAVDGRDDPARARRWAEDWQGVFIGDRADLARRDADGRHHFDYVAPQGRFALTIDAGRCVLLDGPPTVENIAAHIADALAAELPDRHLEVRAYEGVGKGAIVCRGPA

SEQ ID NO: 25320 - protein, 132 aa, unidentified
  source 1..132: note = Salinisphaera halophila
  REGION 1..132: note = tr|A0A423PSQ0|A0A423PSQ0_9GAMM 6-pyruvoyl tetrahydropterin synthase OS=Salinisphaera halophila YIM 95161 OX=1051139 GN=SAHL_10070 PE=4 SV=1
MYSLTVRDHFMIAHSFNGEIFGPAQHTHGATYVVDVTFRREALDADDLVIDIGLAGAGLKDVLAGLNMRDLDEEPAFSGRNTTTEFLAGVVFERMREAIRAGRLGDSARGVEGMSVTLSESHIAWASFEGRV

SEQ ID NO: 25321 - protein, 132 aa, Salinisphaera hydrothermalis
  REGION 1..132: note = tr|A0A084IQQ3|A0A084IQQ3_SALHC Uncharacterized protein OS=Salinisphaera hydrothermalis (strain C41B8); OX = 1304275 GN=C41B8_02867 PE=4 SV=1
MFHLTVRDHVMIAHSFSSPTFGPAQALHGATYVVDVTFYREALDADDLVVDIGAASSALSAVLAEFNLCNLDDNPALAGHNTTTEYMAGIIFSRMKQAIAEGRLGENAAGLSRMGVRLSESHIAWAGYEAEL

SEQ ID NO: 25322 - protein, 290 aa, Salinisphaera hydrothermalis
  REGION 1..290: note = tr|A0A084IHT2|A0A084IHT2_SALHC Uncharacterized protein OS=Salinisphaera hydrothermalis (strain C41B8); OX = 1304275 GN=C41B8_15702 PE=4 SV=1
MNPGDDSLQLFVEHVTHIDCGVLDAEAGLRGATWLVDATLTGRRGDDGMLFDFGPAKKLLKAEIDALVDHRLLVPALAPGLEIDVDAGRLDFTTTSGDRYRYAGPASATTIFDATEIQPRALARWLEERVGPKLPANVDALKINLRPEAIAGPVYDYTHGLAAHDGNCQRLAHGHRCRLAIALDGVDRTDIALAWAQAWQGVFIGHRADLTTAADAERLGFGYTAPQGEFALDIAAERCVLLDGPPTVENIADHIAGELAARYPGHLVEVRAYEGVGKGAIATRSHAPRT

SEQ ID NO: 25323 - protein, 286 aa, unidentified
  source 1..286: note = Salinisphaera japonica
  REGION 1..286: note = tr|A0A423PGZ5|A0A423PGZ5_9GAMM Uncharacterized protein OS=Salinisphaera japonica YTM-1 OX=1209778; GN = SAJA_13650 PE=4 SV=1
MNPAQRSDSLTLFVDHVTHVDCGVLDSARGLCGATWLVDVALTGTRDDQGMLFDFGPAKKLLKAEIDALVDHRLLVPTAAEGISWHGETIKLVTGSGDRYVYTGPASALAYLDCDRITPEFLADWLGARVAAQMPDNVDHVALTLRAEAIDGPVYDYTHGLSAHDGNCQRLAHGHRCRLAVWLDDTPRPDIAHAWAERWQGIFIGSRADLTTPDDATRLGFAYDAPQGHFAIELARERCALIDGPATVENIADAIARALADEHAGQAVTVQAYEGVGKGAIVTHAL

SEQ ID NO: 25324 - protein, 132 aa, unidentified
  source 1..132: note = Salinisphaera japonica
  REGION 1..132: note = tr|A0A423Q2E8|A0A423Q2E8_9GAMM 6-pyruvoyl tetrahydropterin synthase OS=Salinisphaera japonica YTM-1; OX = 1209778 GN=SAJA_00885 PE=4 SV=1
MFHLTVRDHMMIAHSFNSPTFGPAQKLHGATYIVDVTFYRPELDADDLVVDIGAAAAALGEITQTFNLTNLDEHEAFAGHNTTTEFMARAVFDAMKAAIAADKLGPGAHGVTRLGVRLAESHIAWAGYEADL

SEQ ID NO: 25325 - protein, 132 aa, unidentified
  source 1..132: note = Salinisphaera orenii
  REGION 1..132: note = tr|A0A423PXX3|A0A423PXX3_9GAMM 6-pyruvoyl tetrahydropterin synthase OS=Salinisphaera orenii MK-B5; OX = 856730 GN=SAOR_01145 PE=4 SV=1
MYSLTVRDHFMIAHSFNGEIFGPAQHTHGATYVVDVTFRREALDADDLVIDIGLAGAGLKEVLAGLNMRDLDEEPAFSGRNTTTEFLAGVVFERMREAIRAGRLGDSARGVEAMSVTLSESHIAWASFEGRV

SEQ ID NO: 25326 - protein, 284 aa, unidentified
  source 1..284: note = Salinisphaera orenii
  REGION 1..284: note = tr|A0A423PFV8|A0A423PFV8_9GAMM Uncharacterized protein OS=Salinisphaera orenii MK-B5 OX=856730; GN = SAOR_14795 PE=4 SV=1
MKPGDTVDLFVEQVTHIDCGVLDPDTGLDGRTWLVDARLSGTRDAHGMLFDFGPARRLLKRAIDERLDHRLLVPLRAPGLSRHGDDLRLTTTRGAHIDYAGPAEGVALLDAERIGPALLADWLTDRIAPLLPDNIDDLQLSLRAEAIDGAAYHYCHGLRSHDGNCQRMGHGHRCRLAIAVDGRDDPARARRWAEGWQGVFIGDRADLARRDADGRHHFDYVAPQGRFALTIDAGRCVLLDGPPTVENVAAHIADTLAAELPDRHLEVRAYEGVGKGAIVCRGPA

SEQ ID NO: 25327 - protein, 132 aa, Salinisphaera shabanensis
  REGION 1..132: note = tr|U2EHT2|U2EHT2_9GAMM 6-pyruvoyl tetrahydrobiopterin synthase protein OS=Salinisphaera shabanensis E1L3A OX=1033802 GN=SSPSH_003294 PE=4 SV=1
MFSLTVRDHFMIAHSFNGEIFGPAQHTHGATYVVDVSFMRAELDDDDLVIDIGLASDALKRTLGELNMRNLDDVDEFKGRNTTTEFLAKAVFDRLRAAIQAGDLGDSARSLAAMRVTLAESHIAWASYEGDV

SEQ ID NO: 25328 - protein, 175 aa, Salinisphaera shabanensis
  REGION 1..175: note = tr|U2EMQ8|U2EMQ8_9GAMM 6-pyruvoyl tetrahydrobiopterin synthase protein OS=Salinisphaera shabanensis E1L3A OX=1033802 GN=SSPSH_001520 PE=4 SV=1
MTAAYRIRRQIGIDAGHRIRLHGSKCRHLHGHRYTIEAVCEADQLAGEGEQAGMVLDFAFLKDEMIGQIDAPCDHGFIAELADIELLAMFTPAEAGRVEFVEKLDTAVREQGFAVPDHTALGTKLYVIPVPPTAENLARHWFERLAPRVATRSEGRARLARVVVWETPNCAAEWP

SEQ ID NO: 25329 - protein, 132 aa, Salinisphaera sp.
  REGION 1..132: note = tr|A0A2E0IWK1|A0A2E0IWK1_9GAMM Uncharacterized protein OS=Salinisphaera sp. OX=1914330 GN=CMN26_03520; PE = 4 SV=1
MFSLTVRDHFMIAHSFTGEIFGPAQQTHGATFVVDVTFMRPELDGDDLVVDIGLASAALKQQLATLNMRNLDEASEFRGHNTTTEFLAKAVFDRLRTAIRSGDLGQSAKDLSALRVTLAESHIAWATFEGDL

SEQ ID NO: 25330 - protein, 132 aa, Salinisphaera sp.
  REGION 1..132: note = tr|A0A2Z3JE40|A0A2Z3JE40_9GAMM PTPS-like type 4; OS = Salinisphaera sp. LB1 OX=2183911 GN=SALB1_3104 PE=4 SV=1
MYHLTVRDHIMIAHSFSSPTFGPAQALHGATYVVDVTFYRQTLDDDDLVVDIGAASTALSAALAEFNLRNLDDNPAMAGRNTTTEFMAGEIFNRLQQAIADGRLGAGAAGLCRMGVQLSESHIAWAGYEAEL

SEQ ID NO: 25331 - protein, 144 aa, unidentified
  source 1..144: note = Salinisphaeraceae bacterium
  REGION 1..144: note = tr|A0A2D4S8R5|A0A2D4S8R5_9GAMM 6-pyruvoyl tetrahydrobiopterin synthase OS=Salinisphaeraceae bacterium OX=2026789 GN=CMN28_02250 PE=4 SV=1
MSDPKTRPIVSLVRRESFSAAHRLWSDALSEAENHRLYGPCARPHGHGHNFDLEVALKGPIDPVTGVIVNLADLRDVIRRRIIDLVDQRHLNYDCALTADINPTVENLVVRFWDTLAEVYGDLLHEIRLRETASNWTVYRGERG

SEQ ID NO: 25332 - protein, 147 aa, unidentified
  source 1..147: note = Salinispira pacifica
  REGION 1..147: note = tr|V5WMB5|V5WMB5_9SPIO Uncharacterized protein; OS = Salinispira pacifica OX=1307761 GN=L21SP2_3437 PE=4 SV=1
MKDHTHGMHEETRRYRVGVRGNFTAIHALVGDVPEHEKTPHEHEYLLEWTFTLQSLDERGFSLDIALLERLRDALIHEIRGVNLNGLPYFSGVNSSLENLCGFFFQRLSQMLREELGDPDLKRIGEMEIRIWENDQAWAGLAGSVTP

SEQ ID NO: 25333 - protein, 132 aa, Salinispora arenicola
  REGION 1..132: note = tr|A8M5L7|A8M5L7_SALAI Uncharacterized protein; OS = Salinispora arenicola (strain CNS-205) OX=391037; GN = Sare_2750 PE=4 SV=1
MFSVTVRDHMMIAHSFQGEVFGPAQRLHGATFVVDATFRRPDLDLDGIVVDIGRATEQLREVLGELTYRNLDDEPEFAGVNTTTEVLARTVADRLVARIHAGELGPGARGLTGVSVTLHESHVAWASYERSL

SEQ ID NO: 25334 - protein, 241 aa, Salinispora arenicola
  REGION 1..241: note = tr|A0A542XM42|A0A542XM42_9ACTN 6-pyruvoyltetrahydropterin/6-carboxytetrahydropterin synthase OS=Salinispora arenicola OX=168697 GN=FB564_2048; PE = 4 SV=1
MYRIGKQFTFDAAHAVPAAVDERHCPPGLHGHTYTIGVVLAAEQVEPPGFVIDFAALNPFARHLNEVLDHRLLNDVLDQPPTHQAINGYLRRWLETFLVAPTGRVTLDAVSIQAPTLPGQGPLAEYEVTFEAAHRLPGLPIGHKCARIHGHSYRAAFRFDGTSRLPDACLAALNGYISTAFNGCYLNDSVPHAGPPTSENLARHLYEWACKELSLPDGTTITAARVSETASTWAEYQETTW

SEQ ID NO: 25335 - protein, 132 aa, Salinispora tropica
  REGION 1..132: note = tr|A4X807|A4X807_SALTO Uncharacterized protein; OS = Salinispora tropica (strain ATCC BAA-916 / DSM 44818 / CNB-440) OX=369723 GN=Strop_2563 PE=4 SV=1
MFSVTVRDHMMIAHSFQGEVFGPAQRLHGATFVVDATFRRSDLDADGIVVDIGRATAQLRAVLGELTYRNLDDEPEFAGVNTTTEVLARTVADRLAARVNAGELGAGAGGLTGISVTLHESHVAWASYERSL

SEQ ID NO: 25336 - protein, 120 aa, unidentified
  source 1..120: note = Salinivibrio kushneri
  REGION 1..120: note = tr|A0A1V3GHV0|A0A1V3GHV0_9GAMM 6-carboxy-5,6,7,8-tetrahydropterin synthase; OS = Salinivibrio kushneri OX=1908198 GN=BZG09_11855 PE=3; SV = 1
MTTELFKEFTFEAAHHLPNVPEGHKCGRLHGHSFIVRLYVEGEVDPHTGWVIDFAEIKAAFKPIYNRLDHYYLNEIEGLENPTSEVLAQWIWQQVKPELPLLSKVMVKETCTAGCTYYGD

SEQ ID NO: 25337 - protein, 120 aa, unidentified
  source 1..120: note = Salinivibrio kushneri
  REGION 1..120: note = tr|A0A4P8H2L8|A0A4P8H2L8_9GAMM 6-carboxy-5,6,7,8-tetrahydropterin synthase; OS = Salinivibrio kushneri OX=1908198 GN=queD PE=3 SV=1
MTTELFKEFTFEAAHHLPNVPEGHKCGRLHGHSFIVRLYVEGEVDPHTGWVIDFAEIKAAFKPIYNRLDHYYLNEIEGLENPTSEVLAQWIWQQVKPDLPLLSKVMVKETCTAGCTYYGD

SEQ ID NO: 25338 - protein, 120 aa, Salinivibrio sharmensis
  REGION 1..120: note = tr|A0A1V3H251|A0A1V3H251_9GAMM 6-carboxy-5,6,7,8-tetrahydropterin synthase; OS = Salinivibrio sharmensis OX=390883 GN=BZG74_07470 PE=3; SV = 1
MTTELFKEFTFEAAHHLPNVPEGHKCGRLHGHSFIVRLYVEGEVDPHTGWVIDFAEIKAAFKPIYNRLDHYYLNEIEGLENPTSEVLAQWIWQQVKPNLPLLSKVMVKETCTAGCTYYGD

SEQ ID NO: 25339 - protein, 120 aa, Salinivibrio sp.
  REGION 1..120: note = tr|A0A1V3I3N1|A0A1V3I3N1_9GAMM 6-carboxy-5,6,7,8-tetrahydropterin synthase; OS = Salinivibrio sp. IB872 OX=1766123 GN=BZJ18_05690 PE=3; SV = 1
MTTELFKEFTFEAAHHLPNVPEGHKCGRLHGHSFMVRLYVEGEVDPHTGWVIDFADIKAAFKPIYDRLDHYYLNEIEGLENPTSEVLARWIWQQVKPNLPLLSKVMVKETCTAGCTYRGE

SEQ ID NO: 25340 - protein, 170 aa, Salinivibrio sp.
  REGION 1..170: note = tr|A0A0F5APE4|A0A0F5APE4_9GAMM Queuosine biosynthesis protein QueD OS=Salinivibrio sp. KP-1; OX = 1406902 GN=WN56_12670 PE=4 SV=1
MTIHTIDKAQLISDVQFGDNLNHAVVQGRRSDFALMMALLSGDANESTPLTPIDTPVSNDQVLRQRFQLPDPQPLAASNEEDYQRASAQADAFHRGGIASANLRFQLAPAAMHYPPQGTHGFDEAVYHNLSGHERRHLTDTEPKRPAYNPATLYEKLTTSHCFDKMRVSA

SEQ ID NO: 25341 - protein, 149 aa, unidentified
  source 1..149: note = Salinivirga cyanobacteriivorans
  REGION 1..149: note = tr|A0A0S2I090|A0A0S2I090_9BACT 6-carboxy-5,6,7,8-tetrahydropterin synthase OS=Salinivirga cyanobacteriivorans OX=1307839 GN=queD_1 PE=3 SV=1
MSKIRITKEFSFEMAHALRNYDGPCRNIHGHSYKLFVTIIGEPKQDDADPKNGMLMDFGALKKLVNTEIVDKYDHSVVVYKNDERLPEMQKLFENIIIEAKQPTCENLVSDFASTINTRLPDNLSVFSIKLYETATSYAEWYASDNPTE

SEQ ID NO: 25342 - protein, 137 aa, unidentified
  source 1..137: note = Salinivirga cyanobacteriivorans
  REGION 1..137: note = tr|A0A0S2I2U4|A0A0S2I2U4_9BACT 6-carboxy-5,6,7,8-tetrahydropterin synthase OS=Salinivirga cyanobacteriivorans OX=1307839 GN=queD_2 PE=4 SV=1
MVYVTRRERFNAAHRLFKAEWSEEKNYEIFGKCSNPNWHGHNYELFVTVKGKVNPETGFVVNLKELSNLIKEHIISKVDHKNLNTEVDFLQGRMMSTEVIAKAFWQQLEHHVKLLGAQLHCVKITETENNYVEYYGD

SEQ ID NO: 25343 - protein, 147 aa, unidentified
  source 1..147: note = Salinivirgaceae bacterium
  REGION 1..147: note = tr|A0A2N5ZZY3|A0A2N5ZZY3_9BACT 6-carboxytetrahydropterin synthase QueD OS=Salinivirgaceae bacterium OX=2053305 GN=C0599_02900 PE=4 SV=1
MAKIRITKEFSFEMAHALRNYDGPCRNIHGHSYKLFVTVIGSPISDDENAKNGMLMDFGQLKKIVNKNIVDVYDHAVVVYKNDDRLSEMQKVFENIIAADYQPTCENMVSDFAAVVNKELPEGLTVFSIRLYETATSYAEWYAMDNE

SEQ ID NO: 25344 - protein, 137 aa, unidentified
  source 1..137: note = Salinivirgaceae bacterium
  REGION 1..137: note = tr|A0A2N5ZGY2|A0A2N5ZGY2_9BACT 6-pyruvoyl tetrahydrobiopterin synthase OS=Salinivirgaceae bacterium; OX = 2053305 GN=C0599_13005 PE=4 SV=1
MVYVTRRERFNAAHRLFRNDWSDETNNEIFGKCSNPNWHGHNYELHVTVRGKVSTETGFVVNLKDLSRILKTKIVDKVDHKNLNLEVEFLKGMIISSENLAKAFWREIEHDIKLLGAELHCVKVTETENNYVEYFGE

SEQ ID NO: 25345 - protein, 160 aa, unidentified
  source 1..160: note = Salipaludibacillus aurantiacus
  REGION 1..160: note = tr|A0A1H9S7S2|A0A1H9S7S2_9BACI 6-pyruvoyltetrahydropterin/6-carboxytetrahydropterin synthase OS=Salipaludibacillus aurantiacus OX=1601833; GN = SAMN05518684_10475 PE=4SV=1
MYGFRIVDKLERIDEDIQKEELKYHTKRVMVSKEFTFDAAHHLHCYEGKCKNLHGHTYKVIFGISGYVNGTGLMIDFGEIKEIWKNDIEIHLDHRYLNETLPNMNTTAENMVVWIYEKMAEAIQANDELSRDQGARVEFVRLFETPTSYAEARREWMESE

SEQ ID NO: 25346 - protein, 160 aa, unidentified
  source 1..160: note = Salipaludibacillus keqinensis
  REGION 1..160: note = tr|A0A323TJC1|A0A323TJC1_9BACI 6-carboxytetrahydropterin synthase QueD; OS = Salipaludibacillus keqinensis OX=2045207 GN=queD PE=4; SV = 1
MYGFKIVENLEKINEDIHKDQLKYHSKRVLVSKEFTFDAAHHLHCYEGKCKNLHGHTYKVIFGISGYVDSVGLMIDFGDIKQIWKDEIEIHLDHRYINETLPPMNTTAENMVVWIYEKMADAIFSNESLRKDQGARVEFVRLFETPTSYAEARREWMEGE

SEQ ID NO: 25347 - protein, 160 aa, unidentified
  source 1..160: note = Salipaludibacillus neizhouensis
  REGION 1..160: note = tr|A0A3A9KS06|A0A3A9KS06_9BACI 6-carboxytetrahydropterin synthase QueD; OS = Salipaludibacillus neizhouensis OX=885475 GN=queD PE=4; SV = 1
MYGFKIVDKLEKIDEDIRRDQLKYHSKRVLVSKEFTFDAAHHLHCYEGKCKNLHGHTYTAIFGISGFVDETGLMMDFGDIKDIWKKEIEIHLDHRYLNETLPAMNTTAENMVVWIYEKMAESLLKPENKKKYEGGRLEFVRLFETPTSYAEARREWMENE

SEQ ID NO: 25348 - protein, 117 aa, unidentified
  source 1..117: note = Salipiger thiooxidans
  REGION 1..117: note = tr|A0A1G7FIA0|A0A1G7FIA0_9RHOB 6-carboxy-5,6,7,8-tetrahydropterin synthase OS=Salipiger thiooxidans OX=282683 GN=SAMN04488105_10794 PE=3 SV=1
MFRIRKEFHFSASHRLEHLPPDHQCARLHGHNYVVVVELSAETLNTDGFVRDYHDLADLKTYIDGQFDHRHLNDVLEVPSTAEHMARHFFDWCRARWPETSAVLVSETPKTWAEYRP

SEQ ID NO: 25349 - protein, 157 aa, unidentified
  source 1..157: note = Salisediminibacterium haloalkalitolerans
  REGION 1..157: note = tr|A0A1H9T983|A0A1H9T983_9BACI 6-pyruvoyltetrahydropterin/6-carboxytetrahydropterin synthase OS=Salisediminibacterium haloalkalitolerans; OX = 1464123 GN=SAMN05444126_1 0931 PE=4 SV=1
MYGFEIVDKLEKIDEDIQRDELKYHSKRVLISKEFTFDAAHHLHCYEGKCKNLHGHTYTVVFGISGYTEATGLMMDFGDIKEIWKEEIEIHLDHRYLNDTLPKMNTTAENMVVWIYEKMADALKRRDTGQQERVEFVRLFETPTSYAEARREWMELE

SEQ ID NO: 25350 - protein, 120 aa, unidentified
  source 1..120: note = Salmonella abony
  REGION 1..120: note = tr|A0A5I1FPK6|A0A5I1FPK6_SALAB 6-carboxytetrahydropterin synthase QueD OS=Salmonella abony OX=29482 GN=queD PE=4 SV=1
MSTTLYKDFTFEAAHRLPHVPEGHKCGRLHGHSFMVRLEITGEVDPHTGWIMDFADLKAAFKPTYDRLDHYYLNDIPGLSNPTSEVLAKWIWDQVKPVVPLLSAVMVKETCTAGCVYRGE

SEQ ID NO: 25351 - protein, 120 aa, unidentified; identical to SEQ ID NO: 25350
  source 1..120: note = Salmonella agona
  REGION 1..120: note = tr|B5F432|B5F432_SALA4 6-carboxy-5,6,7,8-tetrahydropterin synthase OS=Salmonella agona (strain SL483) OX=454166 GN=queD PE=3 SV=1

SEQ ID NO: 25352 - protein, 120 aa, unidentified
  source 1..120: note = Salmonella anatum
  REGION 1..120: note = tr|A0A3Y5SEL0|A0A3Y5SEL0_SALAN 6-carboxy-5,6,7,8-tetrahydropterin synthase OS=Salmonella anatum OX=58712 GN=queD PE=3 SV=1
MSTTLYKDFTFEAAHRLPHVPEGHKCGRLHGHSFMVRLEITGEVDPHTGWIMDFADLKAAFKPTYDRLDHYYLNDIPGLSNPTSEVLAKWIWDQVKPVVPLLSAVMVKETCTAGCIYRGE

SEQ ID NO: 25353 - protein, 120 aa, unidentified; identical to SEQ ID NO: 25350
  source 1..120: note = Salmonella anatum
  REGION 1..120: note = tr|A0A2T8MKU4|A0A2T8MKU4_SALAN 6-carboxy-5,6,7,8-tetrahydropterin synthase OS=Salmonella anatum OX=58712 GN=queD PE=3 SV=1

SEQ ID NO: 25354 - protein, 120 aa, unidentified; identical to SEQ ID NO: 25350
  source 1..120: note = Salmonella arizonae
  REGION 1..120: note = tr|A9MF15|A9MF15_SALAR 6-carboxy-5,6,7,8-tetrahydropterin synthase OS=Salmonella arizonae (strain ATCC BAA-731 / CDC346-86 / RSK2980); OX = 41514 GN=SARI_00013 PE=3 SV= 1

SEQ ID NO: 25355 - protein, 120 aa, unidentified; identical to SEQ ID NO: 25350
  source 1..120: note = Salmonella berta
  REGION 1..120: note = tr|A0A3V6R0Y0|A0A3V6R0Y0_SALBE 6-carboxy-5,6,7,8-tetrahydropterin synthase OS=Salmonella berta OX=28142 GN=queD PE=3 SV=1

SEQ ID NO: 25356 - protein, 120 aa, unidentified; identical to SEQ ID NO: 25350
  source 1..120: note = Salmonella blockley
  REGION 1..120: note = tr|A0A5H8HAP3|A0A5H8HAP3_SALBL 6-carboxytetrahydropterin synthase QueD OS=Salmonella blockley OX=57741 GN=queD PE=4 SV=1

SEQ ID NO: 25357 - protein, 120 aa, Salmonella bongori
  REGION 1..120: note = tr|A0A248K686|A0A248K686_SALBN 6-carboxy-5,6,7,8-tetrahydropterin synthase OS=Salmonella bongori serovar 66:z41:- str. SA19983605 OX=1243617; GN = queD PE=3 SV=1
MPTTLYKDFTFEAAHRLPHVPEGHKCGRLHGHSFMVRLEITGEVDPHTGWIMDFADLKAAFKPTYDRLDHYYLNDIPGLENPTSEVLAKWIWDQVKPVVPLLSAVQVKETCTAGCVYRGA

SEQ ID NO: 25358 - protein, 120 aa, Salmonella bongori; identical to SEQ ID NO: 25357
  REGION 1..120: note = tr|A0A0K0HDZ9|A0A0K0HDZ9_SALBC 6-carboxy-5,6,7,8-tetrahydropterin synthase OS=Salmonella bongori (strain ATCC 43975 / DSM 13772 / NCTC 12419); OX = 218493 GN=SBG_2564 P E=3 SV=1

SEQ ID NO: 25359 - protein, 120 aa, unidentified; identical to SEQ ID NO: 25350
  source 1..120: note = Salmonella choleraesuis
  REGION 1..120: note = tr|Q57KH6|Q57KH6_SALCH 6-carboxy-5,6,7,8-tetrahydropterin synthase OS=Salmonella choleraesuis (strain SC-B67) OX=321314 GN=ptpS PE=3 SV=1

SEQ ID NO: 25360 - protein, 120 aa, unidentified; identical to SEQ ID NO: 25350
  source 1..120: note = Salmonella derby
  REGION 1..120: note = tr|A0A3Y7QZG5|A0A3Y7QZG5_SALDE 6-carboxy-5,6,7,8-tetrahydropterin synthase OS=Salmonella derby OX=28144 GN=queD PE=3 SV=1

SEQ ID NO: 25361 - protein, 120 aa, unidentified
  source 1..120: note = Salmonella diarizonae
  REGION 1..120: note = tr|A0A2I5HCY1|A0A2I5HCY1_SALDZ 6-carboxy-5,6,7,8-tetrahydropterin synthase OS=Salmonella diarizonae OX=59204 GN=queD PE=3 SV=1
MSTTLYKDFTFEAAHRLPHVPEGHKCGRLHGHSFTVRLEITGEVDPHTGWIIDFADLKAAFKPTYDRLDHYYLNDIPGLSNPTSEVLAKWIWDQVKPVVPLLSAVMVKETCTAGCVYRGE

SEQ ID NO: 25362 - protein, 120 aa, unidentified; identical to SEQ ID NO: 25350
  source 1..120: note = Salmonella dublin
  REGION 1..120: note = tr|A0A3T3IFN6|A0A3T3IFN6_SALDU 6-carboxy-5,6,7,8-tetrahydropterin synthase OS=Salmonella dublin OX=98360 GN=queD PE=3 SV=1

SEQ ID NO: 25363 - protein, 120 aa, Salmonella enterica; identical to SEQ ID NO: 25350
  REGION 1..120: note = tr|A0A0F7JCU9|A0A0F7JCU9_SALER 6-carboxy-5,6,7,8-tetrahydropterin synthase OS=Salmonella enterica OX=28901 GN=ptpS PE=3 SV=1

SEQ ID NO: 25364 - protein, 120 aa, Salmonella enterica; identical to SEQ ID NO: 25350
  REGION 1..120: note = tr|A0A3R0AGM0|A0A3R0AGM0_SALET 6-carboxy-5,6,7,8-tetrahydropterin synthase OS=Salmonella enterica subsp. enterica serovar Braenderup str. CFSAN001740 OX=1299119 GN=q ueD PE=3 SV=1

SEQ ID NO: 25365 - protein, 120 aa, unidentified; identical to SEQ ID NO: 25350
  source 1..120: note = Salmonella enteritidis
  REGION 1..120: note = tr|A0A2R4HMM9|A0A2R4HMM9_SALEN 6-carboxy-5,6,7,8-tetrahydropterin synthase OS=Salmonella enteritidis OX=149539 GN=queD PE=3 SV=1

SEQ ID NO: 25366 - protein, 120 aa, unidentified
  source 1..120: note = Salmonella enteritidis
  REGION 1..120: note = tr|A0A3Z2NSH2|A0A3Z2NSH2_SALEN 6-carboxy-5,6,7,8-tetrahydropterin synthase OS=Salmonella enteritidis OX=149539 GN=queD PE=3 SV=1
MSTTLYKDFTFEAAHRLPHVPEGHKCGRLHGHSFMVRLEITSEVDPHTGWIMDFADLKAAFKPTYDRLDHYYLNDIPGLSNPTSEVLAKWIWDQVKPVVPLLSAVMVKETCTAGCVYRGE

SEQ ID NO: 25367 - protein, 120 aa, unidentified; identical to SEQ ID NO: 25350
  source 1..120: note = Salmonella gallinarum
  REGION 1..120: note = tr|B5RDS2|B5RDS2_SALG2 6-carboxy-5,6,7,8-tetrahydropterin synthase OS=Salmonella gallinarum (strain 287/91 / NCTC 13346) OX=550538 GN=ptpS; PE = 3 SV=1

SEQ ID NO: 25368 - protein, 120 aa, unidentified; identical to SEQ ID NO: 25350
  source 1..120: note = Salmonella gallinarum
  REGION 1..120: note = tr|A0A3V9NUM0|A0A3V9NUM0_SALGL 6-carboxy-5,6,7,8-tetrahydropterin synthase OS=Salmonella gallinarum OX=594 GN=queD PE=3 SV=1

SEQ ID NO: 25369 - protein, 120 aa, unidentified; identical to SEQ ID NO: 25350
  source 1..120: note = Salmonella hadar
  REGION 1..120: note = tr|A0A3V2W3U5|A0A3V2W3U5_SALHA 6-carboxy-5,6,7,8-tetrahydropterin synthase OS=Salmonella hadar OX=149385 GN=queD PE=3 SV=1

SEQ ID NO: 25370 - protein, 121 aa, unidentified
  source 1..121: note = Salmonella houtenae
  REGION 1..121: note = tr|A0A2K0JEK5|A0A2K0JEK5_SALHO 6-carboxy-5,6,7,8-tetrahydropterin synthase OS=Salmonella houtenae OX=59205 GN=queD PE=3 SV=1
MMSTTLFKDFTFEAAHRLPHVPEGHKCGRLHGHSFMVRLEITGEVDPHTGWIMDFADLKAAFKPTYDRLDHYYLNDIPGLENPTSEVLAKWIWDQVKPVVPLLSAVMVKETCTAGCVYRGQ

SEQ ID NO: 25371 - protein, 120 aa, unidentified; identical to SEQ ID NO: 25350
  source 1..120: note = Salmonella infantis
  REGION 1..120: note = tr|A0A3V0IAH4|A0A3V0IAH4_SALIN 6-carboxy-5,6,7,8-tetrahydropterin synthase OS=Salmonella infantis OX=595 GN=queD PE=3 SV=1

SEQ ID NO: 25372 - protein, 120 aa, unidentified; identical to SEQ ID NO: 25350
  source 1..120: note = Salmonella montevideo
  REGION 1..120: note = tr|A0A3U8JHT7|A0A3U8JHT7_SALMO 6-carboxy-5,6,7,8-tetrahydropterin synthase OS=Salmonella montevideo OX=115981 GN=queD PE=3 SV=1

SEQ ID NO: 25373 - protein, 120 aa, unidentified; identical to SEQ ID NO: 25352
  source 1..120: note = Salmonella montevideo
  REGION 1..120: note = tr|A0A3V6QII7|A0A3V6QII7_SALMO 6-carboxy-5,6,7,8-tetrahydropterin synthase OS=Salmonella montevideo OX=115981 GN=queD PE=3 SV=1

SEQ ID NO: 25374 - protein, 120 aa, unidentified
  source 1..120: note = Salmonella moscow
  REGION 1..120: note = tr|A0A5H7LJN6|A0A5H7LJN6_SALMC 6-carboxytetrahydropterin synthase QueD OS=Salmonella moscow OX=28146 GN=queD PE=4 SV=1
MSTTLYKDFTFEAAHRLPHVPEGHKCGRLHGHSFMVRLEITGEVDPHTGWIMDFADLKAAFKPTYDRLDRYYLNDIPGLSNPTSEVLAKWIWDQVKPVVPLLSAVMVKETCTAGCVYRGE

SEQ ID NO: 25375 - protein, 120 aa, unidentified; identical to SEQ ID NO: 25350
  source 1..120: note = Salmonella muenchen
  REGION 1..120: note = tr|A0A3T3ESX9|A0A3T3ESX9_SALMU 6-carboxy-5,6,7,8-tetrahydropterin synthase OS=Salmonella muenchen OX=596 GN=queD PE=3 SV=1

SEQ ID NO: 25376 - protein, 120 aa, unidentified; identical to SEQ ID NO: 25350
  source 1..120: note = Salmonella muenster
  REGION 1..120: note = tr|A0A5J1AUH9|A0A5J1AUH9_SALMS 6-carboxytetrahydropterin synthase QueD OS=Salmonella muenster OX=82689 GN=queD PE=4 SV=1

SEQ ID NO: 25377 - protein, 120 aa, unidentified; identical to SEQ ID NO: 25352
  source 1..120: note = Salmonella muenster
  REGION 1..120: note = tr|A0A5J1R3N1|A0A5J1R3N1_SALMS 6-carboxytetrahydropterin synthase QueD OS=Salmonella muenster OX=82689 GN=queD PE=4 SV=1

SEQ ID NO: 25378 - protein, 120 aa, unidentified; identical to SEQ ID NO: 25350
  source 1..120: note = Salmonella newport
  REGION 1..120: note = tr|A0A0H3BW42|A0A0H3BW42_SALNS 6-carboxy-5,6,7,8-tetrahydropterin synthase OS=Salmonella newport (strain SL254) OX=423368 GN=SNSL254_A3160 PE=3 SV=1

SEQ ID NO: 25379 - protein, 120 aa, unidentified; identical to SEQ ID NO: 25350
  source 1..120: note = Salmonella newport
  REGION 1..120: note = tr|A0A0R9MH25|A0A0R9MH25_SALNE 6-carboxy-5,6,7,8-tetrahydropterin synthase OS=Salmonella newport OX=108619 GN=queD PE=3 SV=1

SEQ ID NO: 25380 - protein, 105 aa, unidentified
  source 1..105: note = Salmonella oranienberg
  REGION 1..105: note = tr|A0A5J0J6Z2|A0A5J0J6Z2_SALON 6-carboxytetrahydropterin synthase QueD (Fragment); OS = Salmonella oranienberg OX=28147 GN=queD PE=4 SV=1
MKTTLYKDFTFEAAHRLPNVPDGHKCGRLHGHSFVVRLEITGEMDKHAGWIIDFAELKAIFKPTLDRLDHYYLNDIPGLENPTSEVLAQWIWNQVKPQLPILSAV

SEQ ID NO: 25381 - protein, 120 aa, unidentified
  source 1..120: note = Salmonella oranienberg
  REGION 1..120: note = tr|A0A5I0ZZ13|A0A5I0ZZ13_SALON 6-carboxytetrahydropterin synthase QueD OS=Salmonella oranienberg OX=28147 GN=queD PE=4 SV=1
MKTTLYKDFTFEAAHRLPNVPDGHKCGRLHGHSFVVRLEITGEMDKHAGWIIDFAELKAIFKPTLDRLDHYYLNDIPGLENPTSEVLAQWIWNQVKPQLPILSAVIVKETCSAGCIYRGE

SEQ ID NO: 25382 - protein, 120 aa, unidentified; identical to SEQ ID NO: 25350
  source 1..120: note = Salmonella paratyphi
  REGION 1..120: note = tr|C0PXC7|C0PXC7_SALPC 6-carboxy-5,6,7,8-tetrahydropterin synthase OS=Salmonella paratyphi C (strain RKS4594) OX=476213 GN=ptpS PE=3 SV=1

SEQ ID NO: 25383 - protein, 120 aa, unidentified; identical to SEQ ID NO: 25350
  source 1..120: note = Salmonella paratyphi
  REGION 1..120: note = tr|A0A5J2RQX6|A0A5J2RQX6_SALPT 6-carboxytetrahydropterin synthase QueD OS=Salmonella paratyphi A OX=54388 GN=queD PE=4 SV=1

SEQ ID NO: 25384 - protein, 120 aa, unidentified; identical to SEQ ID NO: 25350
  source 1..120: note = Salmonella potsdam
  REGION 1..120: note = tr|A0A5I6RXT9|A0A5I6RXT9_SALPO 6-carboxytetrahydropterin synthase QueD OS=Salmonella potsdam OX=597 GN=queD PE=4 SV=1

SEQ ID NO: 25385 - protein, 109 aa, unidentified
  source 1..109: note = Salmonella rubislaw
  REGION 1..109: note = tr|A0A5J2B3Y4|A0A5J2B3Y4_SALRU 6-carboxytetrahydropterin synthase QueD (Fragment); OS = Salmonella rubislaw OX=598 GN=queD PE=4 SV=1
EAAHRLPHVPEGHKCGRLHGHSFMVRLEITGEVDPHTGWIMDFADLKAAFKPTYDRLDHYYLNDIPGLSNPTSEVLAKWIWDQVKPVVPLLSAVMVKETCTAGCVYRGE

SEQ ID NO: 25386 - protein, 120 aa, unidentified; identical to SEQ ID NO: 25350
  source 1..120: note = Salmonella rubislaw
  REGION 1..120: note = tr|A0A3V7ILN3|A0A3V7ILN3_SALRU 6-carboxy-5,6,7,8-tetrahydropterin synthase OS=Salmonella rubislaw OX=598 GN=queD PE=3 SV=1

SEQ ID NO: 25387 - protein, 120 aa, unidentified; identical to SEQ ID NO: 25350
  source 1..120: note = Salmonella schwarzengrund
  REGION 1..120: note = tr|A0A0N1R155|A0A0N1R155_SALSV 6-carboxy-5,6,7,8-tetrahydropterin synthase OS=Salmonella schwarzengrund (strain CVM19633) OX=439843 GN=queD PE=3; SV = 1

SEQ ID NO: 25388 - protein, 120 aa, unidentified; identical to SEQ ID NO: 25350
  source 1..120: note = Salmonella senftenberg
  REGION 1..120: note = tr|A0A401AT47|A0A401AT47_SALSE 6-carboxy-5,6,7,8-tetrahydropterin synthase OS=Salmonella senftenberg OX=28150 GN=queD PE=3 SV=1

SEQ ID NO: 25389 - protein, 120 aa, Salmonella sp.; identical to SEQ ID NO: 25350
  REGION 1..120: note = tr|A0A509BI17|A0A509BI17_9ENTR 6-carboxy-5,6,7,8-tetrahydropterin synthase OS=Salmonella sp. NCTC 6947 OX=2583581 GN=queD PE=3 SV=1

SEQ ID NO: 25390 - protein, 120 aa, Salmonella sp.; identical to SEQ ID NO: 25350
  REGION 1..120: note = tr|A0A509B083|A0A509B083_9ENTR 6-carboxy-5,6,7,8-tetrahydropterin synthase OS=Salmonella sp. NCTC 3046 OX=2583580 GN=queD PE=3 SV=1

SEQ ID NO: 25391 - protein, 120 aa, unidentified; identical to SEQ ID NO: 25350
  source 1..120: note = Salmonella thompson
  REGION 1..120: note = tr|A0A403SMJ0|A0A403SMJ0_SALTH 6-carboxy-5,6,7,8-tetrahydropterin synthase OS=Salmonella thompson OX=600 GN=queD PE=3 SV=1

SEQ ID NO: 25392 - protein, 120 aa, unidentified; identical to SEQ ID NO: 25350
  source 1..120: note = Salmonella typhi
  REGION 1..120: note = tr|Q8XGC8|Q8XGC8_SALTI 6-carboxy-5,6,7,8-tetrahydropterin synthase OS=Salmonella typhi OX=90370 GN=queD PE=3 SV=1

SEQ ID NO: 25393 - protein, 120 aa, unidentified; identical to SEQ ID NO: 25350
  source 1..120: note = Salmonella typhimurium
  REGION 1..120: note = tr|Q7CPW5|Q7CPW5_SALTY 6-carboxy-5,6,7,8-tetrahydropterin synthase OS=Salmonella typhimurium (strain LT2 / SGSC1412 / ATCC 700720) OX=99287; GN = ptpS PE=3 SV=1

SEQ ID NO: 25394 - protein, 120 aa, unidentified; identical to SEQ ID NO: 25350
  source 1..120: note = Salmonella typhimurium
  REGION 1..120: note = tr|A0A3Z6NZS3|A0A3Z6NZS3_SALTU 6-carboxy-5,6,7,8-tetrahydropterin synthase OS=Salmonella typhimurium (strain ATCC 68169 / UK-1) OX=990282 GN=queD; PE = 3 SV=1

SEQ ID NO: 25395 - protein, 120 aa, unidentified; identical to SEQ ID NO: 25350
  source 1..120: note = Salmonella virchow
  REGION 1..120: note = tr|A0A3V4BHM9|A0A3V4BHM9_SALVI 6-carboxy-5,6,7,8-tetrahydropterin synthase OS=Salmonella virchow OX=48409 GN=queD PE=3 SV=1

SEQ ID NO: 25396 - protein, 145 aa, Salsuginibacillus halophilus
  REGION 1..145: note = tr|A0A2P8HLC0|A0A2P8HLC0_9BACI 6-carboxy-5,6,7,8-tetrahydropterin synthase; OS = Salsuginibacillus halophilus OX=517424 GN=B0H94_105170; PE = 3 SV=1
MLQQFYPQVFHDYRYELNKDMNLAAAHFIPDAEAGVCQQMHGHTYFINVTIVGDELDRTGFLVNFKTLKEEIHKRYDHSLLNDHEAFAGDQPDTIPTTEVVAAQIWQQVDALLAERPNRPYCLQVLVRETPTSYVTYRPKKEDHR

SEQ ID NO: 25397 - protein, 120 aa, Samsonia erythrinae
  REGION 1..120: note = tr|A0A4R3VGR2|A0A4R3VGR2_9GAMM 6-carboxy-5,6,7,8-tetrahydropterin synthase OS=Samsonia erythrinae OX=160434 GN=EDC54_11056 PE=3 SV=1
MVTTIFKDFQFEAAHHLPHVPEGHKCGRLHGHSFMVRLEITGELDPHTGWVMDFADLKAAFKPTWERLDHHYLNEIPGLENPTSEVLAQWIWHQLKPTLPQLSAVTVKETCTAGCVYKGE

SEQ ID NO: 25398 - protein, 211 aa, unidentified
  source 1..211: note = Sandaracinaceae bacterium
  REGION 1..211: note = tr|A0A520QIH6|A0A520QIH6_9DELT Uncharacterized protein OS=Sandaracinaceae bacterium OX=2510337; GN = EVA89_21180 PE=4 SV=1
MGSGSTPSNRRHGHRHGSSLLPVRDARARYGPAMYRITKGIHAHFAHHVRGHRGACISLHGHTWKLEVTVAAETLDDESFVVDFSVMKREVLQPAHLLLDHSLAIGEATWAETKDSLATLGNILVDSRQHTMGSRGELQPHLQGELAGARNELPGDIKIAVFPFAPTSETLARWLYELAEERLADDRVSIVNARIYEALHPVETWAEYAPR

SEQ ID NO: 25399 - protein, 118 aa, Sandaracinus amylolyticus
  REGION 1..118: note = tr|A0A0F6W4S9|A0A0F6W4S9_9DELT 6-carboxy-5,6,7,8-tetrahydropterin synthase; OS = Sandaracinus amylolyticus OX=927083 GN=DB32_004636 PE=3; SV = 1
MEIWKEFSFEAAHRLPNVPPEHKCARLHGHSYRVRLTVRGELDPQLGWVVDFDTIREAFEPVRAQLDHYYLNEIEGLSNPTSELLARWIWARTKPRLPQLARVEVMETCTSGARYEGA

SEQ ID NO: 25400 - protein, 157 aa, Sandaracinus sp.
  REGION 1..157: note = tr|A0A2E0TGM2|A0A2E0TGM2_9DELT 6-pyruvoyl tetrahydropterin synthase OS=Sandaracinus sp. OX=2024858; GN = CMN29_13980 PE=4 SV=1
MAHRLASGASAKCATPHGHNEQVSVELEPKAPATLDGAKNMVAEFAAAKRRWHRWIDERVDHALQLGAEDPFLAVVRERFPEWNVMVTPGDPTTELLAVLFMAKCQAFLDAEGLPLRCRRVTLQETPTNAVVFEGDPREALPTGLDGWWWRADESIA

SEQ ID NO: 25401 - protein, 168 aa, Sandaracinus sp.
  REGION 1..168: note = tr|A0A2D9T1F7|A0A2D9T1F7_9DELT 6-pyruvoyl tetrahydropterin synthase OS=Sandaracinus sp. OX=2024858; GN = CMN30_07045 PE=4 SV=1
MSVALRFRRRFSMAHRLASGSSLKCATPHGHDEYVVVELEPQDHGRLDGEANMVVEFARAKGRWHRFVDERLDHGFQLGERDPLLALAREHFPDWRLVVTPGDPTTELMAACLAAKCQAILDDEGVVLRVRRLTLEETPTNAVVVEGDFRALLPRADGWWSRPDESTE

SEQ ID NO: 25402 - protein, 178 aa, unidentified
  source 1..178: note = Sanguibacteroides justesenii
  REGION 1..178: note = tr|A0A0C3R6E5|A0A0C3R6E5_9PORP 6-carboxy-5,6,7,8-tetrahydropterin synthase; OS = Sanguibacteroides justesenii OX=1547597 GN=BA92_03380; PE = 4 SV=1
MLIRKLFKFEGAHIVRNCSSQRCRENIHGHSYIVEVFIASDKLDKGYMVMDFVLLDKVKELIDSFDHSYSLWQKEEEDLKQFVYRYNRRVAEIPVSPSAEGYALLFLFLIDKILQRTEHKNGEGNVRLNSVRVHETATGYAEAFREDLSLVDFSLKDIRFSEAIQEEWKDNVWWKTLK

SEQ ID NO: 25403 - protein, 152 aa, unidentified
  source 1..152: note = Sapientia aquatica
  REGION 1..152: note = tr|A0A4R5W7U7|A0A4R5W7U7_9BURK 6-carboxytetrahydropterin synthase QueD OS=Sapientia aquatica OX=1549640 GN=queD PE=4 SV=1
MLTITRKMEFDSGHRIPDHNSQCRNLHGHRYTLLITLVGEVVKQDGVSDNGMIMDFSDIKALANEHLVNVWDHAFIVYEKDAVVKDFLKSLPGHKTVVIDRVPTVENLAQIAFDILKGVYHNRYGRSLALQKVTLYETPNCWAEINDASIHD

SEQ ID NO: 25404 - protein, 138 aa, Saprospira grandis
  REGION 1..138: note = tr|H6L298|H6L298_SAPGL 6-carboxy-5,6,7,8-tetrahydropterin synthase OS=Saprospira grandis (strain Lewin) OX=984262 GN=ptpS PE=3 SV=1
MRQMSVYRRAHFNAAHRLHNPAWTSEQNEEVFGLCNNEYYHGHNYELEVKVTGPVDPETGYVIDLKILNDIIKHKIEAKFDHKNLNLQVEEFKTLNPTAENICWLIWKILKEHLDPKFKIGVRLYETPRNYVEYEEQA

SEQ ID NO: 25405 - protein, 138 aa, Saprospira grandis; identical to SEQ ID NO: 25404
  REGION 1..138: note = tr|J0P6Y6|J0P6Y6_9BACT 6-carboxy-5,6,7,8-tetrahydropterin synthase OS=Saprospira grandis DSM 2844 OX=694433 GN=SapgrDRAFT_1551 PE=3 SV=1

SEQ ID NO: 25406 - protein, 153 aa, unidentified
  source 1..153: note = Saprospiraceae bacterium
  REGION 1..153: note = tr|A0A521UQ30|A0A521UQ30_9BACT 6-carboxytetrahydropterin synthase OS=Saprospiraceae bacterium OX=2202734 GN=EPO28_16735 PE=4 SV=1
MKSPTKIRLTKSFSFEMAHALPGYDGACKNIHGHSYRLKVTIAGSPMRQSGHPKDGMVMDFKVLKNIVKVQIEDVFDHALVLPESSSGELVSMLQERFENVVLTPFQPTCENLLLHFIGKIRPELSPEVELKVVRLYETAASYAEWNAEDNEQ

SEQ ID NO: 25407 - protein, 136 aa, unidentified
  source 1..136: note = Saprospiraceae bacterium
  REGION 1..136: note = tr|A0A521UJL7|A0A521UJL7_9BACT 6-carboxytetrahydropterin synthase OS=Saprospiraceae bacterium OX=2202734 GN=EPO28_17940 PE=4 SV=1
MVYLTRRERFNAAHKLWVESWSEEENLATFGKCANRNWHGHNYELFVTVKGIPNPVTGFVMDVKLLSRIINRTIIDKVDHSNLNLDVDFIPKNVQPTTEMLAMFFWQQLEPHIEDCVLHCIRLCETENIFAEYFGE

SEQ ID NO: 25408 - protein, 158 aa, unidentified
  source 1..158: note = Saprospirales bacterium
  REGION 1..158: note = tr|A0A1Z9N6Z9|A0A1Z9N6Z9_9BACT Uncharacterized protein OS=Saprospirales bacterium TMED214 OX=1986670; GN = CBD74_14330 PE=4 SV=1
MAYYSTKTYNHSIGLSAVFRQPHADHSHCKYLHGYSLAFKFTFGASTLDNKNWAVDFGGLKPLKKWLEDTFDHKTLIDSNDPHLQDFKDLEDKGLCQLTILDGVGAEKFAEHAWRFADTLVREATDNRCWCESAECSEHGSNSAIYTPFQVQKLKFDE

SEQ ID NO: 25409 - protein, 145 aa, unidentified
  source 1..145: note = Saprospirales bacterium
  REGION 1..145: note = tr|A0A2E0VRS8|A0A2E0VRS8_9BACT 6-carboxy-5,6,7,8-tetrahydropterin synthase; OS = Saprospirales bacterium OX=2026790 GN=CMN32_06775 PE=3; SV = 1
MKIRLTKIFTFDMAHGLPGYDGACRNIHGHTYQLEVTVIGEPLNQPGHPKNGMVMDFKVLKAIVKEKILEVFDHALVLPEASSEALLSALRNDGQKLVTVPFQPTCENLLIYMVEAIRPELPAGVELHSVKLYETPTSYAEWERN

SEQ ID NO: 25410 - protein, 118 aa, unidentified
  source 1..118: note = Unknown
  REGION 1..118: note = tr|A0A2E0K0R2|A0A2E0K0R2_9PROT 6-carboxy-5,6,7,8-tetrahydropterin synthase OS=SAR116 cluster bacterium OX=2024888 GN=queD PE=3 SV=1
MELYTDFRFEAAHRLPMVPAGHPCERLHGHSYFVRLTIDGEVNPDTGWVMDFDDINTAFAPILAKLDHYYLNEVEGLENPTSENLARWIWTRLKPALPSLVAVEIRETCTVGCIYRGE

SEQ ID NO: 25411 - protein, 139 aa, unidentified
  source 1..139: note = Unknown
  REGION 1..139: note = tr|A0A2A4SD88|A0A2A4SD88_9CHLR 6-pyruvoyl tetrahydrobiopterin synthase OS=SAR202 cluster bacterium; OX = 2030829 GN=COB68_05045 PE=4 SV=1
  VARIANT 130: note = Xaa can be any naturally occurring amino acid
MYLVRIETTFDSGHRLLDYDGKCAFPHGHTYRAEVFLQSDTLDSQGLVFDFTELKHRVKAWIDDNWDHSFLVNSRDIELIEGLTPASKGRIYQFHEENPSCEVLSRELYNKVVELCGVSPVKVRLWESLXQYAEFSGGQ

SEQ ID NO: 25412 - protein, 139 aa, unidentified
  source 1..139: note = Unknown
  REGION 1..139: note = tr|A0A2N0LIE5|A0A2N0LIE5_9CHLR Uncharacterized protein OS=SAR202 cluster bacterium Io17-Chloro-G5; OX = 1926614 GN=BZY77_02950 PE=4 SV=1
MYQIRIEFTFDSGHRLLDYNGKCAYPHGHTYRAEVFLESHSLDRLGLVYDFTDLKDRIKTWVDENWDHAFLLNSMDSELIDGLGSASLVRLYKFQEENPSCEVMSRALYEKTAELCGIAPAKVRLWESVNQFAEYHGEG

SEQ ID NO: 25413 - protein, 152 aa, unidentified
  source 1..152: note = Unknown
  REGION 1..152: note = tr|A0A2D6YM02|A0A2D6YM02_9DELT 6-pyruvoyl tetrahydropterin synthase OS=SAR324 cluster bacterium; OX = 2024889 GN=CMN54_12255 PE=4 SV=1
  VARIANT 148: note = Xaa can be any naturally occurring amino acid
  VARIANT 150: note = Xaa can be any naturally occurring amino acid
MGQYIYTCTKQYFNLPCAHRQHAHQGHCSHIHGYSRSFKFYFACKELDTNHFVFDFGELKELKEHLEYMCDHTLLINKQDPYLETFEDMHEKGLCKLRVVENCGAEGMARYFLEFADELARRKSDSRAWCYKVIQWENDKNSGIAEYXPXQR

SEQ ID NO: 25414 - protein, 155 aa, unidentified
  source 1..155: note = Unknown
  REGION 1..155: note = tr|A0A2A4TCA7|A0A2A4TCA7_9DELT Uncharacterized protein OS=SAR324 cluster bacterium OX=2024889; GN = COB67_01260 PE=4 SV=1
MIIRKSFRAEAAHRLKYSYTKRCHGLHGHSYVFDIYLQGQTQDKAQMLMDFSLLSDKFRGFLDSFDHSILVWKEDKDLMELAPKLNPRYIFLPYNTTAEQLSRHIYYQGKKIGLPIHKVRVSETVTACAEYMGDDSITIDLDDVTFSQAVMDSWK

SEQ ID NO: 25415 - protein, 118 aa, unidentified
  source 1..118: note = Unknown
  REGION 1..118: note = tr|A0A0R2P861|A0A0R2P861_9GAMM 6-carboxy-5,6,7,8-tetrahydropterin synthase OS=SAR86 cluster bacterium BACL1 MAG-120507-bin14 OX=1655567; GN = ABR59_06925 PE=3 SV=1
MKVIIYKDFTFEAAHKLPLVPETHKCSKLHGHSFKVRISVEDELNDLGWVIDYADIKSACEPVIEVLDHSYLNEVPGLDNPTSENIAVWLWNEIQPKLAILSEIEVKETCNTGCIYRG

SEQ ID NO: 25416 - protein, 128 aa, unidentified
  source 1..128: note = Unknown
  REGION 1..128: note = tr|A0A2A5CIY2|A0A2A5CIY2_9GAMM 6-pyruvoyl tetrahydropterin synthase OS=SAR86 cluster bacterium; OX = 2030880 GN=COA71_02245 PE=4 SV=1
MYSIAVMKDFIAQHFLIGGDWGEENHPHSHHYVIELIIEHDELDQHGYLVDIVDIEAALEQTAAYFKDKMLNELPEFEGLNPSLEHFSRIIWQQIINQINPPGNGKLEIKLWENENCWAAYKKDYLSS

SEQ ID NO: 25417 - protein, 118 aa, unidentified
  source 1..118: note = Unknown
  REGION 1..118: note = tr|A0A0R2W2R8|A0A0R2W2R8_9GAMM 6-carboxy-5,6,7,8-tetrahydropterin synthase OS=SAR92 bacterium BACL16 MAG-120619-bin48 OX=1655625; GN = ABS23_08770 PE=3 SV=1
MQIYKEFSIEAAHRLPNVPEGHKCARLHGHSFMVSIHVEGAVGDDSGWVMDFGDIKTAFAPIYAQLDHHYLNDIDGLENPTSENLALWIWRKLKPDLPLLSAITIKETCTSGCVYRGD

SEQ ID NO: 25418 - protein, 119 aa, unidentified
  source 1..119: note = Unknown
  REGION 1..119: note = tr|A0A520MF94|A0A520MF94_9GAMM 6-carboxy-5,6,7,8-tetrahydropterin synthase OS=SAR92 clade bacterium OX=2315479 GN=queD PE=3 SV=1
MQIYKEFSIEAAHRLPNVPEGHKCARLHGHSFQVTIYVEGPVGAETGWIMDFGDIKAAFAPVFDRLDHHYLNDIEGLENPTSENLAAWIWAQLKPNLPLLSCIQIKETCTSGCIYRGES

SEQ ID NO: 25419 - protein, 123 aa, Schlegelella thermodepolymerans
  REGION 1..123: note = tr|A0A2S5T505|A0A2S5T505_9BURK 6-carboxy-5,6,7,8-tetrahydropterin synthase; OS = Schlegelella thermodepolymerans OX=215580; GN = C1702_08880 PE=3 SV=1
MQYELTQRFYFEAAHTLERTVDAEPSRRIHGHTYHCEVALRGAPDERGMVMDLGHLRRALEPLRDALDHRLLDEVPGLERPTLEGLCAYVAQRLAPRLPQLAWVRVWREASGDGCTLTLAPRG

SEQ ID NO: 25420 - protein, 149 aa, Schleiferia sp.
  REGION 1..149: note = tr|A0A401XK35|A0A401XK35_9FLAO 6-carboxy-5,6,7,8-tetrahydropterin synthase OS=Schleiferia sp. LA OX=2173829 GN=JCM31826_08610 PE=3 SV=1
MNSSFVLHRRFYFEAAHFLPDYLGDCRNIHGHSYVLEIGVSGKIQISGSERGMIIDLKRLKALVQTSVLDVLDHALIVEKAEFSNGNSIPADMKLVVLRETPTVENLLKWIITRLTEDLPEGIRLEFSKLHETRDSWVEWRAGSAVFSR

SEQ ID NO: 25421 - protein, 139 aa, Schleiferia sp.
  REGION 1..139: note = tr|A0A401XNL2|A0A401XNL2_9FLAO 6-carboxy-5,6,7,8-tetrahydropterin synthase OS=Schleiferia sp. LA OX=2173829 GN=ygcM PE=4 SV=1
MKLVTVSRHAHFNAAHRLHNPSWNAEQNEKVFGLCNNEYFHGHNYELIVSVTGPVDPDTGYVMDMKELSDLIKKHVEARLDHKNLNLQVEEFKHLIPSAENIAIVIYDWLRPHISPSLKLKITLYETPRNYVEYSGEEA

SEQ ID NO: 25422 - protein, 137 aa, Schleiferia thermophila
  REGION 1..137: note = tr|A0A369AAI6|A0A369AAI6_9FLAO 6-carboxy-5,6,7,8-tetrahydropterin synthase OS=Schleiferia thermophila OX=884107 GN=DES35_101377 PE=3 SV=1
MIYIQRKERFSAAHQLYNPSWSEEKNDEVFGKCANRNFHGHNFTLTVTVKGGINPDTGFVMNLTELKHIIREHVTDKLDHKNLNLDVDFLRGKMCSTEVIAMEIWKILEPLIAERGAKLHCVRLDETENNAVEYYGE

SEQ ID NO: 25423 - protein, 137 aa, Schleiferia thermophila
  REGION 1..137: note = tr|A0A085L014|A0A085L014_9FLAO 6-carboxy-5,6,7,8-tetrahydropterin synthase OS=Schleiferia thermophila str. Yellowstone OX=1453500 GN=AT05_10610 PE=3; SV = 1
MVYIQRKERFSAAHQLYNPSWSEEKNDEVFGKCANRNFHGHNFTLTVTVKGEINPDTGFVMNLTELKHIIREHVTDKLDHKNLNLDVDFLRGKMCSTEVIAMEIWKILEPLIAERGAKLHCVRLDETENNAVEYYGE

SEQ ID NO: 25424 - protein, 125 aa, Schwartzia succinivorans
  REGION 1..125: note = tr|A0A1M4WCB3|A0A1M4WCB3_9FIRM 6-carboxy-5,6,7,8-tetrahydropterin synthase OS=Schwartzia succinivorans DSM 10502 OX=1123243 GN=SAMN02745190_01180; PE = 3 SV=1
MYELEVFDTFDAAHRVVGYPGKCDRLHGHTWKVAVHVAGTELDSIGMLVDFKKLKEILKGITEEFDHTFLNEHEAFKGKNPTAENIARYIYQVYAEKLRAENPSVRLSDIRVWESPGSSVTYRED

SEQ ID NO: 25425 - protein, 158 aa, unidentified
  source 1..158: note = Scopulibacillus darangshiensis
  REGION 1..158: note = tr|A0A4R2P6J1|A0A4R2P6J1_9BACL PreQ(0) biosynthesis protein QueD OS=Scopulibacillus darangshiensis OX=442528; GN = EV207_108142 PE=4 SV=1
MFQIPKDVQKLDIDIKRDQLKYHQKRVAVTKHFTFDAAHHLHCYEGKCKSLHGHTYKLAVTISGFVNEIGIAVDFSDIKALFKKVIEEKLDHRYLNEVLPPMNTTAENMIVWMWESLDERMADIGLKSQGNRLEELTLFETPTSSATLKREWMMIDED

SEQ ID NO: 25426 - protein, 289 aa, Scytonema hofmannii
  REGION 1..289: note = tr|A0A139WX04|A0A139WX04_9CYAN 6-pyruvoyl tetrahydropterin synthase OS=Scytonema hofmannii PCC 7110; OX = 128403 GN=WA1_45845 PE=4 SV=1
MKCIVNRRAQFSASHRYWLPELSDAENLEKFGACSKFPGHGHNYVLFVSLAGELDKYGMVLNLSDVKHVIKREVTSQLDFSYLNDVWSEFQQTLPTTENIARVIWHKLAPYLPVVRVQLFEHPELWADYLGNAMEAYLTLSTHFSAAHRLAHPDISNEANFEIYGKCARPNGHGHNYHLEVTVVGEINPRTGMIADLVALNQAIEDYVVEPFDHTFLNKDIPYFAEVVPTAENIALHISHLLRSPIQELGAKLYKVKLIESPNNSCEIYCTEYELSTNIVHNESVLVRV

SEQ ID NO: 25427 - protein, 132 aa, Scytonema hofmannii
  REGION 1..132: note = tr|A0A139X7F1|A0A139X7F1_9CYAN 6-carboxy-5,6,7,8-tetrahydropterin synthase OS=Scytonema hofmannii PCC 7110 OX=128403 GN=WA1_25925 PE=3 SV=1
MPKWKLVTEFTFDSAHYIRDYNGPCGRLHGHTYKVKIEATSSKLHSSQYCPHEVMVADFRTLRWAKQDVKKGGLDHGVLNEVMPPEYETTAEMIAKYIYDETKKRVPPGVQLKVAVSETPNSWAEYEDECEN

SEQ ID NO: 25428 - protein, 288 aa, unidentified
  source 1..288: note = Scytonema millei
  REGION 1..288: note = tr|A0A4R4IYB7|A0A4R4IYB7_9CYAN 6-pyruvoyl tetrahydropterin synthase OS=Scytonema millei VB511283; OX = 1245923 GN=DYY89_01665 PE=4 SV=1
MQCIVNRRAQFSASHRYWLPELSETENQQQFGLCSRFPGHGHNYVLFVSLLGELDEYGMVLNLSDVKHVIKREVTSQLDFSYLNDVWQEFQQTLPTTENIARVIWQKLASHLPIVKIQLFEHPQLWAEYQGNGMEAYLTISTHFSAAHRLAHPDLNQQENTEIYGKCARPNGHGHNYHLEVTVKGEIHPRTGMIVDLSALNQAIEDLVIEPLDHTFLNKDIAYFAKVVPTAENIAVYISNVLQQPVRELGAELHKVKLIESPNNSCEVYCTSDDSIKSATREPALAEV

SEQ ID NO: 25429 - protein, 290 aa, Scytonema sp.
  REGION 1..290: note = tr|A0A1Z4J2D3|A0A1Z4J2D3_9CYAN Putative 6-pyruvoyl tetrahydropterin synthase OS=Scytonema sp. HK-05; OX = 1137095 GN=SAMD00079811_60860 PE=4 SV=1
MQCIVNRRAQFSASHRYWLPELSEAENIEKFDACSKFPGHGHNYVLFVSLIGELDEYGMVLNLSDVKHVIKREVTSQLDFSYLNDVWSEFQQTLPTTESIARVIWQRLAPHLPLVRIQLFEHPQLWADYLGNGMEAYLTVSTHFSAAHRLAHPRLSSEENFEIYGKCARPNGHGHNYHLEVTVKGEIDPRTGMIVDLGALNKVIEDYVVEPFDHTFLNKDIPHFAEVVPTAENIALHISHLLRSPIQELGAKLYKVKLIESPNNSCEIYCTESDPNSVNAAQNEPVLVRV

SEQ ID NO: 25430 - protein, 290 aa, Scytonema sp.
  REGION 1..290: note = tr|A0A1Z4PWZ3|A0A1Z4PWZ3_9CYAN 6-pyruvoyl-tetrahydropterin synthase homolog OS=Scytonema sp. NIES-4073 OX=2005464 GN=NIES4073_33710 PE=4 SV=1
MQCIVNRRAQFSASHRYWLPELSEAENIEKFDACSRFPGHGHNYVLFVSLIGELDEYGMVLNLSDVKHVIKREVTSQLDFSYLNDVWSEFQQTLPTTESIARVIWQRLAPHLPLVRIQLFEHPQLWADYLGNGMEAYLTVSTHFSAAHRLAHPRLSSEENFEIYGKCARPNGHGHNYHLEVTVKGEIDPRTGMIIDLGALNKAIEDYVVEPFDHTFLNKDIPYFAEVVPTAENIALHISHLLRSPIQELGAKLYKVKLIESPNNSCEIYCTESDPNSVNAAQNEPVLVRV

SEQ ID NO: 25431 - protein, 290 aa, Scytonema tolypothrichoides
  REGION 1..290: note = tr|A0A0C2QYI8|A0A0C2QYI8_9CYAN 6-pyruvoyl tetrahydropterin synthase OS=Scytonema tolypothrichoides VB-61278 OX=1233231 GN=SD80_01240 PE=4 SV=1
MQCIISRRTQFSATHRYWLPELSEAENIEKFGACSRFPGYGHNYVLFVSLVGELDEYGMILNLSNVKHVINRKVISQLDFSYLNDVWSEFQQTLPTTENIARVIWQRLAPDLPLARVQLFEHPELWADYLGNGMEAYLTVSTYFSAAHQLAHPRLSSEENFKIYGKCANPNGHGHNYHLEVTVKGEIDPRTGMIVDLGALNQAIKEYVIELFDHSFLNKDVPYFAEVVPTAENIALCISQLLTSPIQELGATLYKVKLMETPNNSCEIYCTESDFNSVNAAQNKPVLVRV

SEQ ID NO: 25432 - protein, 120 aa, unidentified
  source 1..120: note = Unknown
  REGION 1..120: note = tr|J3TWY3|J3TWY3_9ENTR 6-carboxy-5,6,7,8-tetrahydropterin synthase OS=secondary endosymbiont of Ctenarytaina eucalypti OX=1199245; GN = A359_01520 PE=3 SV=1
MIATLYKDFIFESAHRLPHAPPGHKCSQLHGHSFLIRLEVTGEVDPNTGWIMDFADLKAAFNPVLNQLDHHYLNDIPGLKNPTSEVLAQWVWGQLKPNLPILSAVTIKETCTAGCIYRGQ

SEQ ID NO: 25433 - protein, 120 aa, unidentified
  source 1..120: note = Unknown
  REGION 1..120: note = tr|J3VUA9|J3VUA9_9ENTR 6-carboxy-5,6,7,8-tetrahydropterin synthase OS=secondary endosymbiont of Heteropsylla cubana OX=134287; GN = A35E_00417 PE=3 SV=1
MVTTLYKDFTFESAHHLPYVPLGHKCARLHGHSFRVRLEVTGPIDPHKGWIIDFSDLKIAFQPILNRLDHYYLNDIPGLENPTSEVLARWIWEQLKPQFSLLKSVSLKETCTSGCIYQGS

SEQ ID NO: 25434 - protein, 143 aa, Sedimentibacter sp.
  REGION 1..143: note = tr|A0A252CIY5|A0A252CIY5_9FIRM 6-carboxy-5,6,7,8-tetrahydropterin synthase; OS = Sedimentibacter sp. SX930 OX=1955060 GN=B0533_10765; PE = 3 SV=1
MYILKTEHSFDSAHFLAGYAGKCANIHGHRWRVEIEVQAEELVSSGQLDGMVVDFGDLKKDLKAAVDHLDHALIIEQGTMREQTLQCIKEDGFAVIEFPFRPTAENFAAHFYRTMADLGYDVKRATVYETPTNSAAYEESGVS

SEQ ID NO: 25435 - protein, 283 aa, Sedimenticola selenatireducens
  REGION 1..283: note = tr|A0A557SLS7|A0A557SLS7_9GAMM Uncharacterized protein OS=Sedimenticola selenatireducens OX=191960; GN = FHP88_01530 PE=4 SV=1
MTTLFVNRLTVIDFSYLDPVHGLLGESWLVDIELDGSLDHQGMVLDFSEVKKQVKQTIDREYDHCLLIPTQYPQCQIQQLEHRCDIQFQLASGEIIRHSSPYSAIALIAAPAITEAILIRVISEKLQSVLPDNVQALRIRLYPEMASDAWYQYSHGLKHHAGNCQRIAHGHRSRIVIYRNNDRDQSLEADWATRWKAIYIGTQSDLLETFQENGIECHRFGYTANQGLFKLEIPSDRCYLIETDSTVENLAQHIAATLKSEHPEDDFRIEAYEGVDKGAIGLA

SEQ ID NO: 25436 - protein, 283 aa, Sedimenticola selenatireducens
  REGION 1..283: note = tr|A0A2N6CSP2|A0A2N6CSP2_9GAMM Uncharacterized protein OS=Sedimenticola selenatireducens OX=191960; GN = C0630_17090 PE=4 SV=1
MTTLFVNRLTAIDFSYLDPAAGMLGESWLVDIELDGSLDHQGMVLDFSEVKKQVKRCIDQEFDHRLLVPARYAHCRVQQQEHRCDIRFQLTSGETLVHSGPNSAVTLIQAENITEESLIKAIIDRLQPLLPDNIQGLRLRLYAESITGAWYRYSHGLKHHAGNCQRIAHGHRSRIIIYRNGVRDQQLEANWANRWRDIYIGTSSDLHDSVQQDDQVFYHFGYTANQGLFKLEIPSHRCYLVDSDTTVENLAQHIADTLKREHPDDAFRVEAFEGVDKGAVGHS

SEQ ID NO: 25437 - protein, 283 aa, Sedimenticola sp.
  REGION 1..283: note = tr|A0A2N6GIP8|A0A2N6GIP8_9GAMM Uncharacterized protein OS=Sedimenticola sp. OX=1940285 GN=C0631_07125; PE = 4 SV=1
MTTLFVNALTVIDASYLHPVRGLLGASWLVDIELDGTLDHQGMVLDFSSVKKQVKRIIDESFDHKLLLPGQYPGLNLEQQEHRCDLSFTTESGETFRHSSPLSAVTLIDSGEITGEALSAAIIREVKPALPDNVQAIRLTLRDEQIEGSHYQYSHGLKHHDGNCQRIAHGHRSRIEVYRDGVRNPQLETNWAERWRDIYIGTRTDLLDSFEQAGILYHRFGYTANQGLFQLELQAARVYLIDTDSTVENLAQHIADTLKTEQPTASFRVRAYEGVDKGAIGTA

SEQ ID NO: 25438 - protein, 283 aa, unidentified
  source 1..283: note = Sedimenticola thiotaurini
  REGION 1..283: note = tr|A0A558D714|A0A558D714_9GAMM Uncharacterized protein OS=Sedimenticola thiotaurini OX=1543721; GN = FHK82_06865 PE=4 SV=1
MTTLFVNRLTVIDFSYLDPIAGLLGESWQVDIELDGSLDHQGMVLDFGDVKKQVKQIIDSEFDHCLLVPAQHPHCQIQQLEHRCDIQFQLDSGDIIRHSGPYSAICLINADRINEAALISAISEKLLALLPDNVQALRIRLYPEQITGAWYRYSHGLKHHAGNCQRIAHGHRSRIVIYRNGTRDPNLETDWAKRWADIYIGTLSDQQETFQELGKAYFRFGYTAKQGLFKLEIPSDRCYLIDTDSTVENLAQHIADTLKQENPADTFRVEAYEGVDKGAVGLA

SEQ ID NO: 25439 - protein, 408 aa, unidentified
  source 1..408: note = Sedimenticola thiotaurini
  REGION 1..408: note = tr|A0A558D8T1|A0A558D8T1_9GAMM 6-carboxytetrahydropterin synthase OS=Sedimenticola thiotaurini OX=1543721 GN=FHK82_06195 PE=4 SV=1
MQCLECGETIYQLDNGHLLNCSSLTLQEYAIRHHLPLDMILHSDQINLPDHVDNYSRPVARPTEAARQTLLGLRWSGLLQERDAFVEVPGEVRRLDLLLWALDYLSDYGFQFHQDYEYRADSHRVVAKNRLRVPLRNLVNEWATPEPPPAFLGALAVYMAHVAEWHAGYLFMAFSRPIYAESVREQLARDFNIQCQQLKLSDSSDELLLRTQTLADGIKLLDLLKSRLIAIPTAWERFKAETPQASVTKELVFDSAHFITDHPAKCSNLHGGRYVLQVEVTGRIDPVTGCVVDYGYLKQVVNQLIIERFDHHHLNYAAEELAWRSSTEMLCVYIWEQLIDYLPGLSGIRLYETTNSWCDYQGRTLAEQQAAGSDPVLHPFKNLPAQAANRKRLLNKFGQSTVAACQVN

SEQ ID NO: 25440 - protein, 267 aa, unidentified
  source 1..267: note = Sedimentisphaera cyanobacteriorum
  REGION 1..267: note = tr|A0A1Q2HNG2|A0A1Q2HNG2_9BACT 6-pyruvoyl tetrahydropterin synthase/QueD family protein; OS = Sedimentisphaera cyanobacteriorum OX=1940790; GN = L21SP3_00664 PE=4 SV=1
MHRLTRQIRFSVDPFGNEGDAEGFNSYCSKPAGHGLGFFICLNVELQGSVQADTGFLINLAEIDAKARTEAVNIYKKRIQQMISAGKNVTLEKNAEILMECWEGLRRSFNPQKLSSLEQLVNPYKKITISGDSNMLLYSEKFEFAATHKLWNENFSEHKNFEQFGKCANPQGHGHNYVVEITAEPENWKDFDRFDFQKKVKKLFIDKLDHKNLSKDLEYYKQHNPTVENITVHCWQTLSGKLKGARLESVRIWENDRAYCTYRGEQE

SEQ ID NO: 25441 - protein, 119 aa, unidentified
  source 1..119: note = Sedimentisphaera cyanobacteriorum
  REGION 1..119: note = tr|A0A1Q2HPF8|A0A1Q2HPF8_9BACT Queuosine biosynthesis protein QueD OS=Sedimentisphaera cyanobacteriorum OX=1940790 GN=L21SP3_01153 PE=4 SV=1
MYKVTVEDTFYAEHAVKMPGGEIEPSHGHDWRVRVCAAARELDEYGFAFEFKDFRKALNIVISNIGQNLNELELNGQHPTTELVCKHFYDKMQQELSSVELDYVEIEEEKGCLVRYSRD

SEQ ID NO: 25442 - protein, 119 aa, unidentified
  source 1..119: note = Sedimentisphaera salicampi
  REGION 1..119: note = tr|A0A1W6LM47|A0A1W6LM47_9BACT Queuosine biosynthesis protein QueD OS=Sedimentisphaera salicampi; OX = 1941349 GN=STSP1_01206 PE=4 SV=1
MYKVTVEDTFYAEHAVKMPGGEIEPSHGHDWRVRVCAAAKELDEYGFAFEFKDFRKALNIVISNIGQNLNELELNGQHPTTELVCKHFYDKMQVLLNSAELEYVEIEEEKGCLVRYSKD

SEQ ID NO: 25443 - protein, 266 aa, unidentified
  source 1..266: note = Sedimentisphaera salicampi
  REGION 1..266: note = tr|A0A1W6LJJ5|A0A1W6LJJ5_9BACT 6-pyruvoyl tetrahydropterin synthase/QueD family protein; OS = Sedimentisphaera salicampi OX=1941349 GN=STSP1_00292; PE = 4 SV=1
MHRLTRQIRFSVDPFPNGGDAEGFNSYCSKPAGHGFGFFICLNVEVEGSVQPDTGFLINLAEIDAKARRVAVNIYKKRIRQLIAEGKNVNLQRTCEILRECWGGLRSSFTPQKLSSLEQLVNPYKKITISGDNMLLYSEKFEFAATHKLWNDNFSEEQNFDHFGKCANPEGHGHNYVVEITAEPENWKDFDRFDFQKKVNELFIDKLDHKNLSRDLDYYKKLNPTVENITVHCWNTLSDKLKGAKLKSVRIWENDRAYCTYKGEQG

SEQ ID NO: 25444 - protein, 118 aa, unidentified
  source 1..118: note = Sedimentitalea sp.
  REGION 1..118: note = tr|A0A3T0N1Z7|A0A3T0N1Z7_9RHOB 6-carboxy-5,6,7,8-tetrahydropterin synthase; OS = Sedimentitalea sp. W43 OX=2483033 GN=EBB79_09170 PE=3; SV = 1
MYRITKEFHFSASHQLCALPSDHPCSRMHGHNYIAEVELAANELDQNGFVLDYRELTPLKSWIDDELDHRHLNEAFDHDMVTSEFLAKKIYEFCQARWPQTSAVRISETPKTWAEYRP

SEQ ID NO: 25445 - protein, 158 aa, Sediminibacillus albus
  REGION 1..158: note = tr|A0A1G8X0Z3|A0A1G8X0Z3_9BACI 6-pyruvoyltetrahydropterin/6-carboxytetrahydropterin synthase OS=Sediminibacillus albus OX=407036; GN = SAMN05216243_1090 PE=4 SV=1
MEGYGFTIVEKLEKLGEDIQKEQLKYHTKRVLVSKEFTFDSAHHLHCYEGKCKNLHGHTYRVVFGISGYTDEIGMVIDFGDIKVLWKEEIEVYLDHRYLNETLPAMNTTAENIVVWIYEKMAAALRERIDSNLRLEYIKLYETPGSFAEVRREWMEDE

SEQ ID NO: 25446 - protein, 159 aa, Sediminibacillus halophilus
  REGION 1..159: note = tr|A0A1G9P3E9|A0A1G9P3E9_9BACI 6-pyruvoyltetrahydropterin/6-carboxytetrahydropterin synthase OS=Sediminibacillus halophilus OX=482461; GN = SAMN05216244_1269 PE=4 SV=1
MMEGFGFTIVEKLEKLGDDIQKEELKYHQKRVLISKEFTFDAAHHLHAYEGKCKNLHGHTYRVVFGISGFTDDIGLVLDFGDIKKLWKEKIEVKLDHRYLNEMLPAMNTTAENIVVWVYQQMDFALKDLDNRSLRVEYVKLYETPSSFAEARREWMEDV

SEQ ID NO: 25447 - protein, 135 aa, unidentified
  source 1..135: note = Sediminibacterium ginsengisoli
  REGION 1..135: note = tr|A0A1T4MYS0|A0A1T4MYS0_9BACT 6-pyruvoyltetrahydropterin/6-carboxytetrahydropterin synthase OS=Sediminibacterium ginsengisoli OX=413434; GN = SAMN04488132_10417 PE=4 S V=1
MVYLTRQEHFNAAHKLFNPKWSKEQNDAVFGVCANENWHGHNYDLFVTIKGTPDPDTGFLYDVKKLSVLIKEKVIDKLDHKNLNLDVDFMKDQLCSTENLAVGIWKQLEPHLPAQVQLHCIKLYETARIYVEYFG

SEQ ID NO: 25448 - protein, 138 aa, unidentified
  source 1..138: note = Sediminibacterium ginsengisoli
  REGION 1..138: note = tr|A0A1T4MYQ2|A0A1T4MYQ2_9BACT 6-pyruvoyltetrahydropterin/6-carboxytetrahydropterin synthase OS=Sediminibacterium ginsengisoli OX=413434; GN = SAMN04488132_10416 PE=4 S V=1
MNDRKVAVFRKEHFNSAHRLHNPAWDEERNNAVFGLCNNPNYHGHNYELVVKVTGVPDPQTGYVMDLKLLSDLVKEEVLDRFDHRNLNLDTKEFATLNPTAENIAVVIYDLLRKRIDASLDLSIRLYETERNFVEYPA

SEQ ID NO: 25449 - protein, 135 aa, unidentified
  source 1..135: note = Sediminibacterium goheungense
  REGION 1..135: note = tr|A0A4R6IWR5|A0A4R6IWR5_9BACT 6-pyruvoyltetrahydropterin/6-carboxytetrahydropterin synthase OS=Sediminibacterium goheungense OX=1086393; GN = BC659_2479 PE=4 SV=1
MVYLTRQEHFNAAHKLYNPRWSKEQNEAVFGVCANENWHGHNYDLFVTIKGNPDPDTGFLYDVKKLSKLIKEHVIDKLDHKNLNLDVDFMKDQLCSTENLAIAIWQQLQPHLPQQVELHCIKLYETPRIYVEYFG

SEQ ID NO: 25450 - protein, 136 aa, unidentified
  source 1..136: note = Sediminibacterium goheungense
  REGION 1..136: note = tr|A0A4R6IXM6|A0A4R6IXM6_9BACT 6-pyruvoyltetrahydropterin/6-carboxytetrahydropterin synthase OS=Sediminibacterium goheungense OX=1086393; GN = BC659_2480 PE=4 SV=1
MEKVAVFRKEHFNAAHRLHNPDWSDEMNKKVFGLCNNPNYHGHNYELIVQLTGVPDAQTGYVYDMKLLSDIIQEEIIKRFDHKNLNLDTVEFATLNPTAENIAIVIYRLLRARLDKALDLKIRLYETERNFVEYPA

SEQ ID NO: 25451 - protein, 144 aa, Sediminibacterium sp.
  REGION 1..144: note = tr|A0A2M8JZF7|A0A2M8JZF7_9BACT 6-carboxy-5,6,7,8-tetrahydropterin synthase; OS = Sediminibacterium sp. FEMGT703S OX=2080766; GN = CUR34_01495 PE=3 SV=1
MIQVTKIFRFETAHAIHGYNGHCRNIHGHSYVLHVTVGSDADDMAYLPKPGFVIDFKDLKKIVNRIIVDELDHRLILSQDFLAEHPHAAASENLIIWEMEPTAENILLYIRNVLLAELPTEIRLRKLKIYETSDSYAEWESTAR

SEQ ID NO: 25452 - protein, 136 aa, Sediminibacterium sp.
  REGION 1..136: note = tr|A0A2M8JYV7|A0A2M8JYV7_9BACT 6-pyruvoyl tetrahydrobiopterin synthase OS=Sediminibacterium sp. FEMGT703S OX=2080766 GN=CUR34_00300 PE=4 SV=1
MVYLTRQEHFNAAHKLFNPAWSKERNEQVFGVCANENWHGHNYDLYITIKGTPDPDTGFLFDVKALSKLIKTQVIDHLDHKNLNMDVPFMAGKMCSTENLALAIWNQLAPHLPSPVKLHCVKLYETPRIYVEYFGD

SEQ ID NO: 25453 - protein, 135 aa, Sediminicola luteus
  REGION 1..135: note = tr|A0A2A4G6C0|A0A2A4G6C0_9FLAO 6-carboxy-5,6,7,8-tetrahydropterin synthase; OS = Sediminicola luteus OX=319238 GN=B7P33_15130 PE=3 SV=1
MKVKVSRKAHFNAAHRLHRPDWDDAKNKAVFGKCSNPNYHGHNYDLVVSVRGEIDETTGFVMDMKVLKELIYTHIEQAFDHKNLNLEVPEFKNLNPTAEHIAVVIWNKLRPFIATDKELEVVLYETPRNFVTYSG

SEQ ID NO: 25454 - protein, 136 aa, Sediminicola luteus
  REGION 1..136: note = tr|A0A2A4GA06|A0A2A4GA06_9FLAO 6-pyruvoyl tetrahydrobiopterin synthase OS=Sediminicola luteus; OX = 319238 GN=B7P33_06455 PE=4 SV=1
MEKVAIVRCEHFNAAHRLHNKHWSEEKNKSIFGKCNNPNYHGHNYDLEVKVIGTVDPHTGYVIDTKILSDLIKERVLDRFDHKNLNLDTEEFRELNPTAENMAMVIYKLLRSELQERLELKVKLFETPRNYVEYPY

SEQ ID NO: 25455 - protein, 135 aa, Sediminicola sp.
  REGION 1..135: note = tr|A0A0S1S7Z0|A0A0S1S7Z0_9FLAO 6-carboxy-5,6,7,8-tetrahydropterin synthase; OS = Sediminicola sp. YIK13 OX=1453352 GN=SB49_01050 PE=3; SV = 1
MKVKVSRKAHFNAAHRLYRKDWSFEKNDSIFGKCNNPNFHGHNYELIVSVTGEIDPETGFVIDVKILKDLIKAEVEDSFDHKNLNVEVPEFKELNPTAENIAVVIWQKLRPHIDAANALEVVLYETPRNFVTFSG

SEQ ID NO: 25456 - protein, 150 aa, Sediminicola sp.
  REGION 1..150: note = tr|A0A0S1SDN4|A0A0S1SDN4_9FLAO 6-pyruvoyl tetrahydropterin synthase OS=Sediminicola sp. YIK13; OX = 1453352 GN=SB49_12595 PE=4 SV=1
MGNIRITKQFSFETGHALFGYDGKCRNVHGHSYKLSVTVIGKPITDTSHVKLGMVIDFTDLKNIVKEEIVDQFDHATVFNKNTPHLELAKELMERGHNVILAEYQPTSENMVLDFADKIKLRLPENILLHSLKLQETDSSFAEWYASDNL

SEQ ID NO: 25457 - protein, 138 aa, Sediminitomix flava
  REGION 1..138: note = tr|A0A315ZB31|A0A315ZB31_9BACT 6-pyruvoyltetrahydropterin/6-carboxytetrahydropterin synthase OS=Sediminitomix flava OX=379075 GN=BC781_103278; PE = 4 SV=1
MVQICRKEHFNAAHKLYNPKWTKEENEAFFGPCANENWHGHNFEMTVIVEGEPDPDTGYVMNMKHLGKLVKEHIINKVDHKNLNMDVDFLEGKMTSCETLVMEFWKILAPKIEEIAPNAHLHCIELWETNKNFVRYFG

SEQ ID NO: 25458 - protein, 126 aa, Sediminitomix flava
  REGION 1..126: note = tr|A0A315ZB63|A0A315ZB63_9BACT 6-carboxy-5,6,7,8-tetrahydropterin synthase; OS = Sediminitomix flava OX=379075 GN=BC781_102372 PE=3 SV=1
MGLDLYLAMEIFKEFTFEAAHHLPNMPEGHPCGRLHGHSWKAVIYLKDEIKQPYGWVMDFGDIAKKFEPIREQLDHNYLNNIEGLENPTSEVIAKWVWDKLKPELEALSRVTIYETVDCAATYTGE

SEQ ID NO: 25459 - protein, 136 aa, Segetibacter aerophilus
  REGION 1..136: note = tr|A0A512BBF1|A0A512BBF1_9BACT 6-carboxy-5,6,7,8-tetrahydropterin synthase; OS = Segetibacter aerophilus OX=670293 GN=SAE01_17940 PE=4; SV = 1
MVYLTRLEHFNAAHKLYNPAWSKEKNEELFGVCANENWHGHNFDLYVTIKGHINPETGFLFDVKKLSKLIQEHVIKKLDHKNLNLDVDFLQDKMCSTEILAMEIWKQLQRHLPMHVKLHCIKLYETPRIYVEYFGD

SEQ ID NO: 25460 - protein, 158 aa, Segetibacter aerophilus
  REGION 1..158: note = tr|A0A512BBS9|A0A512BBS9_9BACT 6-carboxy-5,6,7,8-tetrahydropterin synthase; OS = Segetibacter aerophilus OX=670293 GN=ygcM PE=4 SV=1
MSSILVISNGKIESNNFSKFYMSNKVAVYRKEHFNAAHRLNNPSWDGDKNASVFGKCNNPNYHGHNYELIVKVVGEPAADTGFVIDLGGLSQLIEENVLNRFDHKNLNMDCKEFEHLNPTAENITIVIYRILREKLDPKLDLQVRLYETERNFVEYPA

SEQ ID NO: 25461 - protein, 147 aa, Segniliparus rugosus
  REGION 1..147: note = tr|E5XN45|E5XN45_9ACTN 6-carboxy-5,6,7,8-tetrahydropterin synthase; OS = Segniliparus rugosus ATCC BAA-974 OX=679197; GN = HMPREF9336_00915 PE=3 SV=2
MTSITVRHNFETAHRLPLVGGKCVNLHGHSWWADVTVAGELDERGIVLDFGALKAELRAWIDERLDHGAMLGRADSLVPALLEEGVKLFRFGLDEPSAGLEWPTVENVAELLARVAQACLAGLGATGAAVARVRVSETHVNAAEVVW

SEQ ID NO: 25462 - protein, 128 aa, Seinonella peptonophila
  REGION 1..128: note = tr|A0A1M4XIZ8|A0A1M4XIZ8_9BACL 6-carboxy-5,6,7,8-tetrahydropterin synthase OS=Seinonella peptonophila OX=112248 GN=SAMN05444392_10529 PE=3 SV=1
MSKQYQLVKTFSISCAHYIPGADKCGQLHGHNYQVTFCIEGKELDQSDMLIDFREIKHALVKRYDHQLLNHFPEFDREQGGVFPTAERIAEVCFQRIAQLCSQKENQPRLRWVEIRETAEAYARYGEI

SEQ ID NO: 25463 - protein, 130 aa, Selenihalanaerobacter shriftii
  REGION 1..130: note = tr|A0A1T4K6A9|A0A1T4K6A9_9FIRM 6-carboxy-5,6,7,8-tetrahydropterin synthase; OS = Selenihalanaerobacter shriftii OX=142842; GN = SAMN02745118_00638 PE=3 SV=1
MKRPIVITREFEFDAAHNLKNYDGDCSNLHGHRYKLEVSVLGYVGEEKYLAIDFKDLKSLGKELILDKLDHQYLNEVLDFNTSCEKLAYWIWERLEGKFIEYDCELYEIKLWETPKSYVTLNRNIMNEGL

SEQ ID NO: 25464 - protein, 120 aa, unidentified
  source 1..120: note = Seleniivibrio woodruffii
  REGION 1..120: note = tr|A0A4R1K9T1|A0A4R1K9T1_9BACT 6-carboxy-5,6,7,8-tetrahydropterin synthase; OS = Seleniivibrio woodruffii OX=1078050 GN=C8D98_1669 PE=3; SV = 1
MFRVRVIQQFNGAHNLRNYNGKCENLHGHNWRVEAYLQGDKLNGTEMLVDFTVLKKRLKDILEELDHKYLNEQVEFFVTHNPTSENIARFIYGRLKETFGTLTERVVVWETDVQAAEYFE

SEQ ID NO: 25465 - protein, 126 aa, Selenomonas artemidis
  REGION 1..126: note = tr|E7N2W2|E7N2W2_9FIRM 6-carboxy-5,6,7,8-tetrahydropterin synthase OS=Selenomonas artemidis F0399 OX=749551 GN=queD PE=3 SV=1
MYTLRVEGAFEAAHRVVDYPGKCDRLHGHNWVVEAAFRGTQLDDLGMLIDFKVAKKALAAVLDDYDHYYLNDIPPFSEGVNPTAENLARIIYERLAAREELAGTGAELAALTVWESPKSSVTYTKD

SEQ ID NO: 25466 - protein, 126 aa, Selenomonas flueggei
  REGION 1..126: note = tr|C4V0R8|C4V0R8_9FIRM 6-carboxy-5,6,7,8-tetrahydropterin synthase OS=Selenomonas flueggei ATCC 43531 OX=638302 GN=queD PE=3 SV=1
MYTLRVEGAFEAAHRVVGYPGKCDRLHGHNWVVEAVFRGTELDGLGMLIDFKTAKAALMAVLDAFDHRYINELPPFDGEVNPTAENLACIIYERLAARTEVMESSAHLAALTVWESPKSSVTYERN

SEQ ID NO: 25467 - protein, 126 aa, Selenomonas infelix
  REGION 1..126: note = tr|G5GS60|G5GS60_9FIRM 6-carboxy-5,6,7,8-tetrahydropterin synthase OS=Selenomonas infelix ATCC 43532 OX=679201 GN=HMPREF9334_02092 PE=3 SV=1
MYTLRVEGAFEAAHRVVNYPGKCDRLHGHNWVLEATFQGTQLDELGMLIDFKIAKKALAEILDEFDHYYLNDLPPFHDGVNPTAENLARIIFERLAACEAVVASPAELTALTVWESPKSSVTYTKD

SEQ ID NO: 25468 - protein, 126 aa, Selenomonas noxia
  REGION 1..126: note = tr|D4S496|D4S496_9FIRM 6-carboxy-5,6,7,8-tetrahydropterin synthase OS=Selenomonas noxia ATCC 43541 OX=585503 GN=queD PE=3 SV=1
MYTLRIEGAFEAAHRVVNYPGKCDRLHGHNWAVEATFQGTELDELGMLIDFKIAKKALAAVLDDFDHYYLNDFPPFSEGINPTAENLARIIFERLAARAEVQTSPAELTALTVWESPKSSVTYTKD

SEQ ID NO: 25469 - protein, 126 aa, Selenomonas noxia
  REGION 1..126: note = tr|G5H498|G5H498_9FIRM 6-carboxy-5,6,7,8-tetrahydropterin synthase OS=Selenomonas noxia F0398 OX=702437 GN=HMPREF9432_01745 PE=3 SV=1
MYTLRIEGAFEAAHRVVNYPGKCDRLHGHNWGVEATFQGTKLDELGMLIDFKIAKKALAAVLDDFDHYYLNDFPPFSEGINPTAENLARIIFERLAARAEVQTSPAELTALTVWESPKSSVTYTKD

SEQ ID NO: 25470 - protein, 125 aa, Selenomonas ruminantium
  REGION 1..125: note = tr|A0A1H3YVK4|A0A1H3YVK4_SELRU 6-carboxy-5,6,7,8-tetrahydropterin synthase OS=Selenomonas ruminantium OX=971 GN=SAMN05660648_02145 PE=3 SV=1
MYTLKVEGAFEAAHHVNGYPGKCARLHGHNWVVEAVVKGKELDELGMLVDFKIIKQTLKDTLERFDHRYLNELEPFKNGVNPTAENLARIIFEELSGHEIFQRDSKLAAITVFESPKSSVTYTED

SEQ ID NO: 25471 - protein, 125 aa, Selenomonas ruminantium
  REGION 1..125: note = tr|A0A1G7WUG0|A0A1G7WUG0_SELRU 6-carboxy-5,6,7,8-tetrahydropterin synthase OS=Selenomonas ruminantium OX=971 GN=SAMN05216584_11137 PE=3 SV=1
MYTLKIEGAFEAAHHVAGYPGKCARLHGHNWVVEAVVKGKELDELGMLIDFKVMKKELADVLERFDHRYLNELKPFADGLNPTAENLARIIFEELACRKVFERDSVLYAITVFESPKSSVTYTKD

SEQ ID NO: 25472 - protein, 126 aa, Selenomonas sp.
  REGION 1..126: note = tr|J4TYH3|J4TYH3_9FIRM 6-carboxy-5,6,7,8-tetrahydropterin synthase OS=Selenomonas sp. FOBRC9 OX=936573 GN=queD PE=3 SV=1
MYTLRVEGAFEAAHRVVDYPGKCDRLHGHNWVVEAAFRGTQLDDLGMLIDFKIAKKALAAVLDDYDHYYLNDIPPFSEGLNPTAENLARIIYERLAAREELAGTGAELAALTVWESPKSSVTYTKD

SEQ ID NO: 25473 - protein, 125 aa, Selenomonas sp.
  REGION 1..125: note = tr|A0A5D6WDV1|A0A5D6WDV1_9FIRM 6-carboxy-5,6,7,8-tetrahydropterin synthase OS=Selenomonas sp. mPRGC5 OX=2593411 GN=queD PE=3 SV=1
MYTLKIEGAFEAAHHVEGYPGKCARLHGHNWVVEAVVKGKELDELGMLIDFKVMKKELAAVLERFDHRYLNELEPFVQGVNPTAENLARIIFEELAGRDVFKRDSVLHAITVFESPKSSVTYTKD

SEQ ID NO: 25474 - protein, 125 aa, Selenomonas sputigena
  REGION 1..125: note = tr|C9LTT9|C9LTT9_SELS3 6-carboxy-5,6,7,8-tetrahydropterin synthase OS=Selenomonas sputigena (strain ATCC 35185 / DSM 20758 / VPI D19B-28); OX = 546271 GN=queD PE=3 SV=1
MFEIKVEEEFEAAHRIVNYPGKCDRLHGHNWKVELKISGSRLDELGMLIDFKAAKAMLQEVVNSLDHRFLNELEPFSEINPTAENIARYIYQELKQREIFCNDSVHLAAVCVWESPRACATYTED

SEQ ID NO: 25475 - protein, 139 aa, unidentified
  source 1..139: note = Senegalimassilia anaerobia
  REGION 1..139: note = tr|A0A369LAL7|A0A369LAL7_9ACTN 6-carboxy-5,6,7,8-tetrahydropterin synthase; OS = Senegalimassilia anaerobia OX=1473216 GN=C1880_02595; PE = 3 SV=1
MYGLKTESSFDAAHFLTDYHGKCENLHGHRWRVVAYLEQADLQTEGTHKDMVIDFADFKHALRDLTEELDHSFVVEEGSLMPKTLDCLREEGFTLSMMPFRTTAENLARYFFGKLAEQGFPVSQVDVYETPNNCAIYRA

SEQ ID NO: 25476 - protein, 139 aa, unidentified
  source 1..139: note = Senegalimassilia sp.
  REGION 1..139: note = tr|A0A4Q2JWZ6|A0A4Q2JWZ6_9ACTN 6-carboxy-5,6,7,8-tetrahydropterin synthase; OS = Senegalimassilia sp. KGMB04484 OX=2509433; GN = ET524_02935 PE=3 SV=1
MYGLKTESSFDAAHFLTDYHGKCENLHGHRWRVVAYLEQAELQTEGTHKDMVIDFAEFKRALRDLTEELDHSFVVEEGSLMPETLECLHKEGFTLSMMPFRTTAENLARYFFDKLAAKGFPVSQVDVYETPNNCAIYRA

SEQ ID NO: 25477 - protein, 151 aa, unidentified
  source 1..151: note = Seonamhaeicola algicola
  REGION 1..151: note = tr|A0A5C7AXU2|A0A5C7AXU2_9FLAO 6-carboxytetrahydropterin synthase OS=Seonamhaeicola algicola OX=1719036 GN=FUA26_03625 PE=4 SV=1
MKHNIRITKRFSFETGHALYGYDGKCKNIHGHSYHLDVTVIGSPITDTANPKHGMVIDFGDLKKIVKEEIEDVFDHATVFNKNTPHVNLAKDLMNLGHKVLLVNYQPTSEMMVIDFADKIQKRLPENIKLHALKLQETATSFAEWFAADQQ

SEQ ID NO: 25478 - protein, 136 aa, unidentified
  source 1..136: note = Seonamhaeicola algicola
  REGION 1..136: note = tr|A0A5C7B0A6|A0A5C7B0A6_9FLAO 6-carboxy-5,6,7,8-tetrahydropterin synthase; OS = Seonamhaeicola algicola OX=1719036 GN=FUA26_08465 PE=3; SV = 1
MKVTVSRKAHFNAAHRLYRKDWSDEKNNQVFDKCSNQYFHGHNYELIVSVTGEINKETGYVVDMKVLKDIIKAEVEEAFDHKNLNLQVPEFKNLNPTAENIAVVIYNKIKPKIEPNLELEITLYETPRNFVTYAGN

SEQ ID NO: 25479 - protein, 151 aa, unidentified
  source 1..151: note = Seonamhaeicola aphaedonensis
  REGION 1..151: note = tr|A0A3D9HM86|A0A3D9HM86_9FLAO 6-pyruvoyltetrahydropterin/6-carboxytetrahydropterin synthase OS=Seonamhaeicola aphaedonensis OX=1461338; GN = DFQ02_101643 PE=4 SV=1
MGNNIRITKQFSFETGHALYGYDGKCKNVHGHSYRLDVTVIGRPISDKNNVKYGMVIDFGDLKKIVEEEIVDVFDHATVFNKNTPHIELAKELDARGHNILLVDYQPTSEMMVIDFAQKIKPRLPANIKLHSLKLQETATSFAEWFAYDNN

SEQ ID NO: 25480 - protein, 136 aa, unidentified
  source 1..136: note = Seonamhaeicola aphaedonensis
  REGION 1..136: note = tr|A0A3D9HFK7|A0A3D9HFK7_9FLAO 6-carboxy-5,6,7,8-tetrahydropterin synthase; OS = Seonamhaeicola aphaedonensis OX=1461338 GN=DFQ02_104100; PE = 3 SV=1
MRVTVSRKAHFNAAHRLYRKDWSNEKNELVFDKCNNPNFHGHNYELIVSVTGEIDKETGYVIDMKVLKSLIKEEVEDAFDHKNLNIEVPEFKNLNPTAENISVVIYNKMRPKIDGNLDLEITLYETPRNFVTYSGK

SEQ ID NO: 25481 - protein, 151 aa, unidentified
  source 1..151: note = Seonamhaeicola marinus
  REGION 1..151: note = tr|A0A5D0HXU2|A0A5D0HXU2_9FLAO 6-carboxytetrahydropterin synthase OS=Seonamhaeicola marinus OX=1912246 GN=FUA24_13145 PE=4 SV=1
MGNKIRITKQFSFEAGHALYGYDGKCKNLHGHSYHLNVTVIGEPISDNSNVKYGMVLDFGDLKKIVNEEIVDVFDHSMVFNKNTPHLDLAEDLKERGHYVIMVDYQPTTEMMILDFAEKIKNRLPKHIKLHSLRLQETATSFAEWFASDQG

SEQ ID NO: 25482 - protein, 136 aa, unidentified
  source 1..136: note = Seonamhaeicola marinus
  REGION 1..136: note = tr|A0A5D0HJ83|A0A5D0HJ83_9FLAO 6-carboxy-5,6,7,8-tetrahydropterin synthase; OS = Seonamhaeicola marinus OX=1912246 GN=FUA24_17340 PE=3; SV = 1
MRVTVSRKAHFNAAHRLYRKDWSDEKNELIFDKCSNPYFHGHNYELIVSVTGEIDPETGYVVDMKLLKEIIKEEVEDAFDHKNLNLEVPEFKDLNPTAENIVVVIYNKVRPKIESNLDLEITLYETPRNFVSYSGK

SEQ ID NO: 25483 - protein, 136 aa, unidentified
  source 1..136: note = Seonamhaeicola sp.
  REGION 1..136: note = tr|A0A562YGT1|A0A562YGT1_9FLAO 6-carboxy-5,6,7,8-tetrahydropterin synthase; OS = Seonamhaeicola sp. W255 OX=2528206 GN=E1J38_000010 PE=3; SV = 1
MRVTVSRKAHFNAAHRLYRKEWSNEKNELIFDKCNNPNFHGHNYELIVSVTGEIDKETGYVIDMKVLKSIIKDEVEDAFDHKNLNIEVPEFENLNPTAENISVVIYNKMRPKIDANLDLEITLYETPRNFVTYSGK

SEQ ID NO: 25484 - protein, 136 aa, unidentified
  source 1..136: note = Seonamhaeicola sp.
  REGION 1..136: note = tr|A0A1U7DNH8|A0A1U7DNH8_9FLAO 6-carboxy-5,6,7,8-tetrahydropterin synthase; OS = Seonamhaeicola sp. S2-3 OX=1936081 GN=BWZ22_01815 PE=3; SV = 1
MKVTVSRKGHFNAAHRLYRKDWSDEKNHEVFDKCSNPNFHGHNYEIIVSVTGEVDKETGYVIDIKTLKDIIKEEVEDAFDHKNLNLEVKEFKNLNPTAENISIVIYNKIKPRIKSGLDLEITLYETPRNFVSYSGK

SEQ ID NO: 25485 - protein, 126 aa, Serinicoccus chungangensis
  REGION 1..126: note = tr|A0A0W8IBC1|A0A0W8IBC1_9MICO 6-pyruvoyl tetrahydrobiopterin synthase OS=Serinicoccus chungangensis; OX = 767452 GN=AVL62_15540 PE=4 SV=1
MFGLTVTDHVMIAHSLPDPFFGPAQGLHGATLVVEATWRRRELDEHGVVVDIGEAGGHLAAVLDPLRYQNLDEHPDFAGRLSTTEAVAAHVAHALAARAEPAIDGIGVVVREHPQAWVTYDLDLRS

SEQ ID NO: 25486 - protein, 130 aa, Serinicoccus sp.
  REGION 1..130: note = tr|A0A1B1N8Y2|A0A1B1N8Y2_9MICO PTPS-like type 4; OS = Serinicoccus sp. JLT9 OX=1758689 GN=SGUI_0501 PE=4 SV=1
MFGLTVTDHVMVAHSLPDPFFGPAQGLHGATLVVEATWRRRELDAHGVVVDIGAASQALSEVLDPLRYANLDEHPDFAGRLSTTEAVAAHVAHALAERVRADPDADLDGLGVVVREHPGAWVTYDLDLRA

SEQ ID NO: 25487 - protein, 130 aa, Serinicoccus sp.; identical to SEQ ID NO: 25486
  REGION 1..130: note = tr|A0A1Q9T495|A0A1Q9T495_9MICO 6-pyruvoyl tetrahydrobiopterin synthase OS=Serinicoccus sp. CUA-874; OX = 1517939 GN=BJF80_16475 PE=4 SV=1

SEQ ID NO: 25488 - protein, 143 aa, unidentified
  source 1..143: note = Serpentinicella alkaliphila
  REGION 1..143: note = tr|A0A4R2UAA5|A0A4R2UAA5_9CLOT 6-carboxy-5,6,7,8-tetrahydropterin synthase; OS = Serpentinicella alkaliphila OX=1734049 GN=EDD79_100626; PE = 3 SV=1
MFILKTEHHFDSAHFLHNYEGKCSNIHGHRWNVVIEVQSEALVAGGQLDGMVVDFGDLKRDVKEMVDYFDHALIIQSGTMREETLLCLKEDGFTIIEVDFRPTAENFSLFFYNSMKDKGYNVKRSTVYETPTNSATYEESRGN

SEQ ID NO: 25489 - protein, 359 aa, unidentified
  source 1..359: note = Serpentinomonas mccroryi
  REGION 1..359: note = tr|A0A060NRI4|A0A060NRI4_9BURK 6-pyruvoyl-tetrahydropterin synthase OS=Serpentinomonas mccroryi OX=1458426 GN=SMCB_2109 PE=4 SV=1
MLNIHHCAQAGFEAARQLLGRPAPHPQARLHGHSFVSRLRAHAAPGWALCPGTEVEQLQQHLEAVTAALDHRLLNDCLPEPDDAALARWLQQRLHHDGLQGAQVGLQSTPRSGCTLDAGGGAHIWRRYRFEAAHQLPRVPAGHKCGRMHGHGFEALLHVRADGGEAATGVADAIERAWAPLQQRLHRQCLNDIPGLENPTSEVLSAWLWQQLVPALPALSRVTVYETASCGARYDGQRYRIWKDLTLDSARRLRQAPAEHPLAALYGHTYTLRLHLGGELDAVQGWTLDFGDVKRLFDPIFKALDHQPLHELAERAALPDCDCASLAGWILQQGRRELAALERVDLYQTPGCGAQVRLP

SEQ ID NO: 25490 - protein, 366 aa, unidentified
  source 1..366: note = Serpentinomonas raichei
  REGION 1..366: note = tr|A0A060NSR9|A0A060NSR9_9BURK 6-pyruvoyl-tetrahydropterin synthase OS=Serpentinomonas raichei OX=1458425 GN=SRAA_2085 PE=4 SV=1
MLSLYHCAQAGFEAARQLQRRAPQHPQARLHGHSFEARLRARVEPGWAAVAGTEVEQLQQHLADVTAALDHRLLNDCLPEPDDTALARWLQQRLPSAGLQLVQIGVQSTPRSGCELDATGHAHTWRRYRFEAAHQLPRVPAGHKCGRMHGHGFEVLLHARPDGLFDELGAADRLDHAWAPLQQRLHRHCLNDIAGLENPTSEVLSAWLWQQLVAALPGLSRVTVFETASCGASFDGQRYRIWKDLTLDSARRLRHAPPDHPLAALYGHTYTLRLGLGGALDAVQGWVLDFGDVKRLFDPLFKALDHQPLHELAATAGLPDCDCASLAGWILQQGRRELAALERVDLYQTPGCGALVMAADPGLSPI

SEQ ID NO: 25491 - protein, 119 aa, Serratia ficaria
  REGION 1..119: note = tr|A0A240AZS1|A0A240AZS1_SERFI 6-carboxy-5,6,7,8-tetrahydropterin synthase OS=Serratia ficaria OX=61651 GN=queD PE=3 SV=1
MATTLFKDFQFEAAHRLPHVPEGHKCGRLHGHSFMVRLEVTGEVDAHTGWVMDFAELKAVFSPIWERLDHHYLNDIPGLENPTSEVLAAWIWQQLKPQLPELTAVMVKETCTAGCVYKG

SEQ ID NO: 25492 - protein, 119 aa, Serratia fonticola
  REGION 1..119: note = tr|A0A0F7HCM6|A0A0F7HCM6_SERFO 6-carboxy-5,6,7,8-tetrahydropterin synthase OS=Serratia fonticola OX=47917 GN=queD PE=3 SV=1
MATTLFKDFQFEAAHHLPNVPEGHKCGRLHGHSFMVRIEVTGEVDAHTGWVMDFAELKAAFKPIWQRLDHYNLNDIPGLENPTSEVLAAWIWQQLKPQLPELSAVMVKETCTAGCVYKG

SEQ ID NO: 25493 - protein, 68 aa, Serratia fonticola
  REGION 1..68: note = tr|A0A4U9WG04|A0A4U9WG04_SERFO 6-carboxy-5,6,7,8-tetrahydropterin synthase OS=Serratia fonticola OX=47917 GN=queD PE=4 SV=1
MATTLFKDFQFEAAHHLPNVPEGHKCGRLHGHSFMVRIEVTGEVDAHTGWVMDFAELKARLQADLAAP

SEQ ID NO: 25494 - protein, 119 aa, Serratia liquefaciens; identical to SEQ ID NO: 25491
  REGION 1..119: note = tr|A0A515D048|A0A515D048_SERLI 6-carboxy-5,6,7,8-tetrahydropterin synthase OS=Serratia liquefaciens OX=614 GN=queD PE=3 SV=1

SEQ ID NO: 25495 - protein, 121 aa, Serratia liquefaciens; identical to SEQ ID NO: 21434
  REGION 1..121: note = tr|A0A484XWQ4|A0A484XWQ4_SERLI 6-carboxy-5,6,7,8-tetrahydropterin synthase OS=Serratia liquefaciens OX=614 GN=queD PE=3 SV=1

SEQ ID NO: 25496 - protein, 119 aa, Serratia marcescens
  REGION 1..119: note = tr|A0A3E2EE53|A0A3E2EE53_SERMA 6-carboxy-5,6,7,8-tetrahydropterin synthase OS=Serratia marcescens subsp. sakuensis OX=211760 GN=queD PE=3 SV=1
MATTLFKDFQFEAAHRLPHVPEGHKCGRLHGHSFMVRLEVTGEVDPHTGWVMDFAELKAVFSPIWERLDHHYLNDIPGLENPTSEVLAAWIWQQLKPQLPELTAVMVKETCTAGCVYKG

SEQ ID NO: 25497 - protein, 119 aa, Serratia marcescens
  REGION 1..119: note = tr|A0A542C5A1|A0A542C5A1_SERMA 6-carboxy-5,6,7,8-tetrahydropterin synthase OS=Serratia marcescens OX=615 GN=FHU12_3613 PE=3 SV=1
MATTLFKDFQFEAAHRLPHVPEGHKCGRLHGHSFMVRLEVTGEVNPHTGWVMDFAELKAVFSPIWERLDHHYLNDIPGLENPTSEVLAAWIWQQLKPQLPELTAVMVKETCTAGCVYKG

SEQ ID NO: 25498 - protein, 119 aa, Serratia nematodiphila; identical to SEQ ID NO: 25496
  REGION 1..119: note = tr|A0A086G8B4|A0A086G8B4_9GAMM 6-carboxy-5,6,7,8-tetrahydropterin synthase OS=Serratia nematodiphila DZ0503SBS1 OX=1449981 GN=AK51_02390 PE=3 SV=1

SEQ ID NO: 25499 - protein, 119 aa, Serratia nematodiphila; identical to SEQ ID NO: 25496
  REGION 1..119: note = tr|A0A5C7D9N5|A0A5C7D9N5_9GAMM 6-carboxy-5,6,7,8-tetrahydropterin synthase OS=Serratia nematodiphila OX=458197 GN=queD PE=3 SV=1

SEQ ID NO: 25500 - protein, 119 aa, Serratia odorifera
  REGION 1..119: note = tr|D4DX09|D4DX09_SEROD 6-carboxy-5,6,7,8-tetrahydropterin synthase OS=Serratia odorifera DSM 4582 OX=667129 GN=queD PE=3 SV=1
MATTLFKDFQFEAAHRLPHVPEGHKCGRLHGHSFMVRLEVTGEVDAYTGWVMDFAELKAVFTPVWERLDHHYLNDIPGLENPTSEVLAAWIWQQLKPQLPELSAVMVKETCTAGCVYKG

SEQ ID NO: 25501 - protein, 119 aa, Serratia odorifera; identical to SEQ ID NO: 25500
  REGION 1..119: note = tr|A0A447KLQ1|A0A447KLQ1_SEROD 6-carboxy-5,6,7,8-tetrahydropterin synthase OS=Serratia odorifera OX=618 GN=queD PE=3 SV=1

SEQ ID NO: 25502 - protein, 119 aa, unidentified
  source 1..119: note = Serratia oryzae
  REGION 1..119: note = tr|A0A1S8CIJ4|A0A1S8CIJ4_9GAMM 6-carboxy-5,6,7,8-tetrahydropterin synthase OS=Serratia oryzae OX=2034155 GN=BMI79_12250 PE=3 SV=1
MATTLFKDFLFEAAHRLPHVPEGHKCGRLHGHSFMVRLEVTGEVDAHTGWVMDFAELKAAFEPIWQRLDHHYLNDIPGLENPTSEVLAAWIWQQLKPQLPELTAVMVKETCTAGCVYKG

SEQ ID NO: 25503 - protein, 119 aa, Serratia plymuthica
  REGION 1..119: note = tr|A0A1B1KL84|A0A1B1KL84_SERPL 6-carboxy-5,6,7,8-tetrahydropterin synthase OS=Serratia plymuthica PRI-2C OX=1154756 GN=queD PE=3 SV=1
MATTLFKDFQFEAAHRLPHVPEGHKCGRLHGHSFMVRLEVTGEVDAHTGWVMDFAELKAVFSPIWERLDHHYLNDIPGLENPTSEVLAAWIWQQLKPQLPELSAVMVKETCSAGCVYKG

SEQ ID NO: 25504 - protein, 119 aa, Serratia plymuthica; identical to SEQ ID NO: 25503
  REGION 1..119: note = tr|A0A2X4TWW0|A0A2X4TWW0_SERPL 6-carboxy-5,6,7,8-tetrahydropterin synthase OS=Serratia plymuthica OX=82996 GN=queD PE=3 SV=1

SEQ ID NO: 25505 - protein, 119 aa, Serratia proteamaculans
  REGION 1..119: note = tr|A0A1W5DTY5|A0A1W5DTY5_9GAMM 6-carboxy-5,6,7,8-tetrahydropterin synthase OS=Serratia proteamaculans OX=28151 GN=ygcM PE=3 SV=1
MATTLFKDFQFEAAHRLPNVAEGHKCGRLHGHSFMVRLEVTGEVDAHTGWVMDFAELKAVFSPIWERLDHNYLNDIPGLENPTSEVLAAWIWQQLKPQLPELTAVMVKETCTAGCVYKG

SEQ ID NO: 25506 - protein, 119 aa, Serratia proteamaculans; identical to SEQ ID NO: 25505
  REGION 1..119: note = tr|A8G9X5|A8G9X5_SERP5 6-carboxy-5,6,7,8-tetrahydropterin synthase OS=Serratia proteamaculans (strain 568) OX=399741 GN=Spro_0809 PE=3; SV = 1

SEQ ID NO: 25507 - protein, 119 aa, Serratia quinivorans; identical to SEQ ID NO: 25505
  REGION 1..119: note = tr|A0A2X2G923|A0A2X2G923_9GAMM 6-carboxy-5,6,7,8-tetrahydropterin synthase OS=Serratia quinivorans OX=137545 GN=queD PE=3 SV=1

SEQ ID NO: 25508 - protein, 119 aa, Serratia rubidaea
  REGION 1..119: note = tr|A0A2X5BRH2|A0A2X5BRH2_SERRU 6-carboxy-5,6,7,8-tetrahydropterin synthase OS=Serratia rubidaea OX=61652 GN=queD PE=3 SV=1
MATTLFKDFQFEAAHRLPHVPEGHKCGRLHGHSFMVRLEITGEVDPHTGWVMDFAELKAAFKPVWERLDHHYLNDIPGLENPTSEVLAAWIWQQMKPLLPELSAVMVKETCTAGCVYKG

SEQ ID NO: 25509 - protein, 119 aa, Serratia rubidaea
  REGION 1..119: note = tr|A0A447QPH3|A0A447QPH3_SERRU 6-carboxy-5,6,7,8-tetrahydropterin synthase OS=Serratia rubidaea OX=61652 GN=queD PE=3 SV=1
MATTLFKDFQFEAAHRLPHVPEGHKCGRLHGHSFMVRLEVTGEVDAHTGWVMDFAELKAVFKPVWERLDHHYLNDIPGLENPTSEVLAAWIWQQLKPQLPELSAVMVKETCTAGCVYKG

SEQ ID NO: 25510 - protein, 119 aa, Serratia sp.; identical to SEQ ID NO: 25496
  REGION 1..119: note = tr|A0A1B3F7R1|A0A1B3F7R1_9GAMM 6-carboxy-5,6,7,8-tetrahydropterin synthase OS=Serratia sp. YD25 OX=1759437 GN=ATE40_000605 PE=3 SV=1

SEQ ID NO: 25511 - protein, 119 aa, Serratia sp.; identical to SEQ ID NO: 25496
  REGION 1..119: note = tr|A0A5C7DKC9|A0A5C7DKC9_9GAMM 6-carboxy-5,6,7,8-tetrahydropterin synthase OS=Serratia sp. S9 OX=2596922 GN=queD PE=3 SV=1

SEQ ID NO: 25512 - protein, 119 aa, Serratia symbiotica
  REGION 1..119: note = tr|A0A455VRR5|A0A455VRR5_9GAMM 6-carboxy-5,6,7,8-tetrahydropterin synthase OS=Serratia symbiotica OX=138074 GN=queD PE=3 SV=1
MATTLFKDFQFEAAHRLPHVPEGHKCARLHGHSFMVRLEVTGEVTPHTGWVMDFAELKAVFTPIWERLDHHYLNDIPGLENPTSEVLAAWIWQQLKPQLPELTAVRVKETCTAGCVYKG

SEQ ID NO: 25513 - protein, 120 aa, Serratia symbiotica
  REGION 1..120: note = tr|A0A068RC93|A0A068RC93_9GAMM 6-carboxy-5,6,7,8-tetrahydropterin synthase OS=Serratia symbiotica SCt-VLC OX=1347341 GN=queD PE=3 SV=1
MMATTLFKDFQFEAAHRLPHVPEGHKCARLHGHSFMVRLEVTGEVNPHTGWVMDFAELKAVFTPIWERLDHHYLNDIPGLENPTSEVLAAGIWQQLKPQLPELTAVRVKETCTAGCVYKG

SEQ ID NO: 25514 - protein, 119 aa, Serratia ureilytica; identical to SEQ ID NO: 25496
  REGION 1..119: note = tr|A0A5C7C6L2|A0A5C7C6L2_9GAMM 6-carboxy-5,6,7,8-tetrahydropterin synthase OS=Serratia ureilytica OX=300181 GN=queD PE=3 SV=1

SEQ ID NO: 25515 - protein, 294 aa, Shewanella algae
  REGION 1..294: note = tr|A0A1S2TLM1|A0A1S2TLM1_9GAMM Uncharacterized protein OS=Shewanella algae OX=38313 GN=BFS86_15885 PE=4; SV = 1
MQLFVKDLTVVDFSYLCPFRGMVGESWIVDVLLDGGLDEQNMLLDFSKVKRTIKQTIDEVADHRLLVPTACSQVRWQQQGDKVWMDFHSLRGSIHLACPAQAFALIPSEIIDFDSVNQFLHKALTDALPDNVQGISLTLRNEVLETPYYHYSHGLRKHDGNCQRIAHGHRSPVNVFADGIAAPKWDEYWAKRWKDIYLGSEEDVVGVSELELSPQTKIDDKSHIGFRYQAPQGDFQLAMPRDCCDLIPHDTTVELLAHFMADSMAGFEPGKHFKVVAFEGIGKGAIASAQHQGD

SEQ ID NO: 25516 - protein, 294 aa, Shewanella algae
  REGION 1..294: note = tr|A0A3G4UNZ8|A0A3G4UNZ8_9GAMM Uncharacterized protein OS=Shewanella algae OX=38313 GN=EEY24_15245 PE=4; SV = 1
MQLFVKDLTVVDFSYLCPFRGMVGESWIVDVLLDGGLDEQNMLLDFSKVKRTIKQTIDEVADHRLLVPTACSQVRWQQQGDKVWMDFHSLRGSIHLACPAQAFALIPSEIIDFDSVNQFLHKALTDALPDNVKGISLTLRNEVLETPYYHYSHGLRKHDGNCQRIAHGHRSPVNVFADGIAAPKWDEYWAKRWKDIYLGSEEDVVTVSELELSPQTKIDDKSHIGFRYQAPQGDFQLAMPRDCCDLIPHDTTVELLAHFMADSMAGFEPGKHFKVVAFEGIGKGAIASAQHQGD

SEQ ID NO: 25517 - protein, 294 aa, Shewanella amazonensis
  REGION 1..294: note = tr|A1S5W0|A1S5W0_SHEAM Uncharacterized protein; OS = Shewanella amazonensis (strain ATCC BAA-1098 / SB2B); OX = 326297 GN=Sama_1559 PE=4 SV=1
MQLFVKDLTVLDFSYLCAKRGMVGESWIVDVVLEGGLDSQNMVLDFAKVKRTIKDTIDRVADHRLLIPTASSNVRWQQQGDRVWMDFHSDVGNIHLACPSQAFALIPAEHVDFEAVNAFLRKALREALPDNVDGIHLTLRTESLSGPFYHYSHGLKKHDGNCQRIAHGHRSPVQIFENGESAPDWDAYWAKRWKDIYLGTEEDVVPVAELELSAQCRIDDNSHIGFRYEAPQGDFQLAMPRAICDIIPHDTTVELLADFMAKTLADKVPGSHFKVIAYEGIGKGAIAAAEIASS

SEQ ID NO: 25518 - protein, 293 aa, Shewanella atlantica
  REGION 1..293: note = tr|A0A431VSY5|A0A431VSY5_9GAMM Uncharacterized protein OS=Shewanella atlantica OX=271099 GN=EKG39_22015; PE = 4 SV=1
MQLFVRDLTVIDFSYLCPIRGMVGESWTVDVLLDGGLDEQNMVLDFSKVKRTIKDTIDDIADHRLLIPTAYSEVRWQQQGDRVWMDFNSLQGDIHLACPQQAFALIPSEIIDFDSVNTFLQKALKEALPDNVDGIALTLRNEIHDAPYYHYSHGLRKHDGNCQRIAHGHRSPVNVFENGMAAPKWDEYWAERWKDIYLGSEEDVVSVGDLTLSPQAKVSDKTHFGFRYQAPQGDFQLAMPKGRCEIIPHDTTVELLAEFMAGTLLEKSPQSEFKVIAYEGIGKGAISVKGNQA

SEQ ID NO: 25519 - protein, 290 aa, Shewanella baltica
  REGION 1..290: note = tr|A3D5L2|A3D5L2_SHEB5 Isocitrate dehydrogenase (NADP(+  )) OS=Shewanella baltica (strain OS155 / ATCC BAA-1091) OX=325240 GN=Sbal_2532 PE=4 SV=1
MQLFVKDLTVIDFSYLCPKRGMVGESWIVDVLLEGGLDEQNMVLDFAKVKRTIKQTIDAVADHRLLVPTACSSVRWQQQGDRVWMDFDSQLGEIHLACPSQAFALVPTEQIDIPSVNAFLQKALREALPKNVEGITLTLRHEILDTPYYHYSHGLRKHDGNCQRIAHGHRSPIHVFENGSPAPKWDEYWAKRWHDIYLGSEEDLVSVDTLNLSSQTRITDDSHYGFHYQAPQGDFQLAMPKEGCDLIPHDTTVELLADYIATTLVAKVPGSQFKVVAFEGVGKGAIVSKG

SEQ ID NO: 25520 - protein, 162 aa, Shewanella baltica
  REGION 1..162: note = tr|A0A165J034|A0A165J034_9GAMM QueD-like protein; OS = Shewanella baltica OX=62322 GN=A1L58_04780 PE=4 SV=1
MQIDVPLVNEAQIGTRLNAAIENDRRGEFALLLSLLSVDARDMAQFQWQNELDMAQKLQRQFELPPQQSLMADLSCAEPVVDNSSIFMAQGPRAFQLQQALRPEALVIRGGESVAMAEALSNCDHVTQLRQRGQLSAPKVEIMHFADQLAIQRNLVPLLASA

SEQ ID NO: 25521 - protein, 270 aa, Shewanella benthica
  REGION 1..270: note = tr|A9EIA0|A9EIA0_9GAMM Uncharacterized protein; OS = Shewanella benthica KT99 OX=314608 GN=KT99_14214 PE=4; SV = 1
MVGESWIVDVLLDGDLDEQNMVLDFAKVKRTIKNTIDEVADHRLLIPTACSEVRWQQQGDKVWMDFSSLQGDIHLACPSQAFALIPCEIIDFDSVNAFLQKALRAVLPDNVEGIALTLRNEIHEAPFYHYSHGLKKHDGNCQRIAHGHRSTINIFENGIAAPKWDEYWAKRWKDIYLGTEEDVVNLSELTLSPQAKVSEETHYGFCYQAPQGEFQLAMPKSRCEIIPHDTTVELLAEFIANTLVEKTPQSEFKVIAYEGVGKGAISVKHI

SEQ ID NO: 25522 - protein, 291 aa, Shewanella benthica
  REGION 1..291: note = tr|A0A330M256|A0A330M256_9GAMM Uncharacterized protein OS=Shewanella benthica OX=43661 GN=SHEWBE_2298; PE = 4 SV=1
MQLFVKDLTVIDFSYLCPIRGMVGESWIVDVLLDGDLDEQNMVLDFAKVKRTIKNTIDEVADHRLLIPTACSDVRWQQQGDKVWMDFSSQQGDIHLACPSQAFALIPSEIIDFDSVNAFLQKALRAVLPDNVEGIALTLRNEIHEAPFYHYSHGLKKHDGNCQRIAHGHRSTINIFENGIAAPKWDEYWAKRWKDIYLGTEEDVVNLSELTLSPQAKVSEETHYGFCYQAPQGEFQLAMPKSRCEIIPHDTTVELLAEFIANTLVEKTPQSEFKVIAYEGVGKGAISVKHI

SEQ ID NO: 25523 - protein, 162 aa, unidentified
  source 1..162: note = Shewanella bicestrii
  REGION 1..162: note = tr|A0A220UMM6|A0A220UMM6_9GAMM QueD-like protein; OS = Shewanella bicestrii OX=2018305 GN=CF168_09950 PE=4 SV=1
MQIDVPLINEAQIGSRLNAAIEHNRRGEFALLLSLLSADARDMAQFQWQKELDNAEKLQRQFELPPKQALVADLSTDNKVTDNSAVFAEQGARAFQLQQALRPEALVIRGGEPIAMAEALSNCDLTTRLRQRGQLPSPKMDVMHFADQLAIQRNLVPLLASA

SEQ ID NO: 25524 - protein, 291 aa, unidentified
  source 1..291: note = Shewanella bicestrii
  REGION 1..291: note = tr|A0A220ULD5|A0A220ULD5_9GAMM Uncharacterized protein OS=Shewanella bicestrii OX=2018305 GN=CF168_08885; PE = 4 SV=1
MQLFVKDLTVIDFSYLCPKRGMVGESWIVDVVLEGGLDEQNMVLDFAKVKRTIKQTIDAVADHRLLVPTAYSGVRWQQQGDRVWMDFDSALGEIHLACPSQAFALVPSEQIDIPSVNAFLQKALRETLPDNVEGISLTLRHEILNSPYYHYSHGLRKHDGNCQRIAHGHRSPVQVFENGIPAPKWDEYWAKRWHDIYLGSEEDLVSVKTLNLSPQTRISDDSHYGFHYQAPQGDFQLAMPKECCDLIPHDTTVELLADYMATTLVAKVPSSQFTVIAYEGVGKGAIVSKGN

SEQ ID NO: 25525 - protein, 293 aa, Shewanella canadensis
  REGION 1..293: note = tr|A0A431WM00|A0A431WM00_9GAMM Uncharacterized protein OS=Shewanella canadensis OX=271096 GN=EKG38_23860; PE = 4 SV=1
MQLFVRDLTVIDFSYLCPIRGMVGESWTVDVLLDGALDEQNMVLDFSKVKRTIKDTIDDIADHRLLIPTAYSDVRWQQQGDRVWMDFNSLQGDIHLACPQQAFALIPSEIIDFDSVNTFLQKALKEALPDNVDGIALTLRNEIHDAPFYHYSHGLRKHDGNCQRIAHGHRSPINVFENGMAAPKWDEYWAERWKDIYLGSEEDVVSVGELTLSPQAKVSDDTHFGFHYQAPQGDFQLAMPKARCEIIPHDTTVELLAEFMASTLVEKSPQSEFKVIAYEGIGKGAISVKGNQA

SEQ ID NO: 25526 - protein, 294 aa, Shewanella chilikensis; identical to SEQ ID NO: 25515
  REGION 1..294: note = tr|A0A2V4WAB7|A0A2V4WAB7_9GAMM 6-pyruvoyl tetrahydropterin synthase-like protein OS=Shewanella chilikensis OX=558541 GN=C8J23_101221 PE=4 SV=1

SEQ ID NO: 25527 - protein, 296 aa, Shewanella colwelliana
  REGION 1..296: note = tr|A0A1E5IT34|A0A1E5IT34_SHECO Uncharacterized protein OS=Shewanella colwelliana OX=23 GN=BEL05_00345; PE = 4 SV=1
MQLFVRDLTVIDFSYLCPIRGMVGESWIVDVLLDGGLDDQNMVLDFAKVKRTIKNTIDDVADHRLLIPTACSEVRWQQQGDRVWMDFKSLSGNIHLACPAQAFALIPTEIIDFDSVNAFLQKALKEVLPDNVNGIALTLRNELHETPFYHYSHGLRKHDGNCQRIAHGHRSPINVFENGVSAPQWDEYWARRWKDIYLGSVEDLVEVDELDLSVQTLVSDDTHYGFHYVSPQGDFQLAMPKKRCEIIPHDTTVELLAEFIANTLVTEVPDSEFKVIAFEGVGKGAISVKGKQTDSE

SEQ ID NO: 25528 - protein, 162 aa, Shewanella decolorationis
  REGION 1..162: note = tr|V1DJ46|V1DJ46_9GAMM Qued-like protein; OS = Shewanella decolorationis S12 OX=1353536 GN=SHD_2225; PE = 4 SV=1
MQIDVPLINEAQIGSRLNAAIEHNRRGEFALLLSLLSADARDMAQFQWQKELDNAEKFQRQFELPPKQALLADLSTDKNVIDNSAVFAEQGARAFQLQQALRPEALVIRGGEPIAMAEALSNCDLTTRLRQRGQLPSPKVDVMHFADQLAIQRNLVPLLASA

SEQ ID NO: 25529 - protein, 291 aa, Shewanella decolorationis
  REGION 1..291: note = tr|V1DGS0|V1DGS0_9GAMM Isocitrate dehydrogenase (Nadp(+  )) OS=Shewanella decolorationis S12 OX=1353536; GN = SHD_3344 PE=4 SV=1
MQLFVKDLTVIDFSYLCPKRGMVGESWIVDVVLEGGLDEQNMVLDFAKVKRTIKQTIDAVADHRLLVPTAYSGVRWQQQGDRVWMDFDSALGEIHLACPSQAFALVPSEQIDIPSVNAFLQKALRETLPDNVEGISLTLRHEILNSPYYHYSHGLRKHDGNCQRIAHGHRSPVQVFENGTPAPKWDEYWAKRWHDIYLGSEEDLVSVKTLNLSPQTRISDDSHYGFHYQAPQGDFQLAMPKECCDLIPHDTTVELLADYMATTLVAKVPSSQFTVIAYEGVGKGAIVSKGN

SEQ ID NO: 25530 - protein, 295 aa, Shewanella denitrificans
  REGION 1..295: note = tr|Q12LL7|Q12LL7_SHEDO Uncharacterized protein; OS = Shewanella denitrificans (strain OS217 / ATCC BAA-1090 / DSM 15013) OX=318161 GN=Sden_2379 PE=4 SV=1
MQLFVKDLTVIDFSYLCPIRGMVGESWIVDVMLEGGLDDQNMVLDFAKVKRTIKNTIDDVADHRLLIPTACSEVRWQQQGDRVWMDFSCQKGDIHLACPSQAFALIPTEVIDFDSVNSFLQKALREALPDNVQGINLTLRNEVLDTPYYHYSHGLRKHDGNCQRIAHGHRSPITVFENGVAEPKWDEYWAERWHDIYLGTEEDLVDVTDLELSQQSHANDETHYGFHYIAPQGDFQLAMPKGLCEIIPHDTTVELLAEFMANTLANKVPDSHFKVIAYEGIGKGAIAQKGVQRDA

SEQ ID NO: 25531 - protein, 293 aa, Shewanella fodinae
  REGION 1..293: note = tr|A0A4R2FE65|A0A4R2FE65_9GAMM 6-pyruvoyl tetrahydropterin synthase-like protein OS=Shewanella fodinae OX=552357 GN=EDC91_1107 PE=4 SV=1
MQLFVKDLTVIDFSYLCPFRGMVGESWIVDVLLDGGLDQQNMVLDFGKVKRTIKRVIDDVADHRLLVPTACGDLRWQQQSDTVWIDFASRKGSIHLGCPAQAFALLPCELIDFDSVTDFLINALRDALPDNVDNISLTLRNELLDGPFYHYSHGLKKHDGNCQRIAHGHRSPVNVFENGVAAPEWDRYWAERWQDVYLGSEADRVPVDQLTMSPQCRISDDSHYGFRYTAPQGEFQLAMPKGCCDLLPDDTTIELLAQFMADTLAAKVPGRHYRVMAFEGIGKGAIAVAGQLL

SEQ ID NO: 25532 - protein, 165 aa, Shewanella frigidimarina
  REGION 1..165: note = tr|A0A106BZ40|A0A106BZ40_SHEFR QueD-like protein; OS = Shewanella frigidimarina OX=56812 GN=AWJ07_18725 PE=4; SV = 1
MQIESTLVNELQIGSRLNVAIENNRRGEFGLLLAMLSIDARDMAQFQLDNDVESTQKLRQRFSVPQPQLLVDDISVHPDTIDNAMIFQQQGARQFQLQQALTPEALVIRGSQPDSMVEVLSNCDYLTKNKAINVYQQHTPLEDMHFLEQLSTQRKISNTLSLQLA

SEQ ID NO: 25533 - protein, 290 aa, Shewanella frigidimarina
  REGION 1..290: note = tr|Q083Z0|Q083Z0_SHEFN Uncharacterized protein; OS = Shewanella frigidimarina (strain NCIMB 400) OX=318167; GN = Sfri_1574 PE=4 SV=1
MQLFVKDLTVIDFSYLCPVRGMVGESWIVDVLLDGGLDEQNMVLDFGKVKRIIKNTIDDVADHRLLIPTACSEVRWQQKGDRVWMDFSSEKGDIHLACPSQAFALIPTEVIDYQSVNDFLKKALREVLPENVQGISLTLRNEVLDTPFYHYSHGLRKHDGNCQRIAHGHRSPVTVFENGIAEPKWDQYWAERWHDIYLGTEEDLVSVKTLELSKQTKISDETHFGFHYVAPQGDFQLAMPKHCCDLIPHDTTVEMLAEYMAKTLASQAPESHFKVIAYEGIGKGAIAVRG

SEQ ID NO: 25534 - protein, 296 aa, Shewanella halifaxensis
  REGION 1..296: note = tr|B0TK48|B0TK48_SHEHH Uncharacterized protein; OS = Shewanella halifaxensis (strain HAW-EB4) OX=458817; GN = Shal_2510 PE=4 SV=1
MQLFVKDLTVIDFSYLCPIRGMVGESWIVDVLLDGDLDEQNMVLDFAKVKRTIKRTIDDVADHRLLIPTACGEARWQQQGDRVWMDFSSQQGDIHLACPSQAFALIPSEIIDFESVNKFLQQALKQTLPANVEGISLTLRNEMHDAPYYHYSHGLKKHDGNCQRIAHGHRSPVTVFENGVAAPKWDEYWAKRWNDIYLATVEDQVVVGSLSLSPQTVVSDETHFGFHYQTPQGDFQLAMPKECCDILPHDTTVELLADYMAQTLSEKVPSSGFKVIAYEGVGKGAIASRTAYNTAD

SEQ ID NO: 25535 - protein, 293 aa, Shewanella hanedai
  REGION 1..293: note = tr|A0A553JGR1|A0A553JGR1_SHEHA Uncharacterized protein OS=Shewanella hanedai OX=25 GN=FN961_23455 PE=4; SV = 1
MQLFVRDLTVIDFSYLCPIRGMVGESWIVDVLLDGGLDDQNMVLDFSKVKRTIKDTIDNIADHRLLIPTACSEIRWQQQGDTVWMDFNSLKGDIHLACPAQAFALIPSELIDFESVNTFLQKALKAVLPDNVDGIALTLRNELHEAPYYHYTHGLKKHDGNCQRIAHGHRSPINVFENGIAAPKWDEYWAKRWKDIYLGTLEDVVKVDELTLSPQAKVSDDTHFGFHYQAPQGDFQLAMPKSSCEIIPHDTTVELLAEFIAHTLVEMSPGNQFKVIAYEGVGKGAISVKGHQV

SEQ ID NO: 25536 - protein, 290 aa, Shewanella livingstonensis
  REGION 1..290: note = tr|A0A3G8LVK6|A0A3G8LVK6_9GAMM Uncharacterized protein OS=Shewanella livingstonensis OX=150120; GN = EGC82_09250 PE=4 SV=1
MQLFVKDLTVIDFSYLCPLRGMVGESWIVDVLLDGGLDEQNMVLDFAKVKRTIKNTIDAVADHRLLIPTACSEVRWQQKGDRVWMDFSSQKGDIHLACPSQAFALIPTEVIDYESVNDFLKKALREVLPENVQGISLTLRSEVLDTPFYHYSHGLRKHDGNCQRIAHGHRSPVTIFENGIAEPKWDHYWAERWHDIYLGTEEDLVSVKTLELSKQTIITDETHFGFHYVAPQGDFQLAMPKHCCDLIPHDTTVELLAEYMAKTLASKEPKSHFKVIAYEGIGKGAIAVRG

SEQ ID NO: 25537 - protein, 165 aa, Shewanella livingstonensis
  REGION 1..165: note = tr|A0A3G8LV16|A0A3G8LV16_9GAMM QueD-like protein; OS = Shewanella livingstonensis OX=150120 GN=EGC82_12155; PE = 4 SV=1
MQIESTLVNELQIGSRLNVAIEHNRRGEFGLLLAMLSVDARDMAQFQLENDVDSTQKLRNKFALPQPQLLVDDISVHPNTIDNAIVFQQCGARQFQLQQALTPEALVIRGSQSDAMVEVLSNCDYLTKNKAINAYQQHTPIEDMHFLDQLSTQRKISNTLSLQLA

SEQ ID NO: 25538 - protein, 294 aa, Shewanella loihica
  REGION 1..294: note = tr|A3QCZ2|A3QCZ2_SHELP Uncharacterized protein; OS = Shewanella loihica (strain ATCC BAA-1088 / PV-4); OX = 323850 GN=Shew_1473 PE=4 SV=1
MQLFVRDLTVIDFSYLCPIRGMVGESWIVDVLLDGGLDDQNMVLDFAKVKRTIKNTIDDVADHRLLIPTACAEVRWQQQGDRVWMDFNSLQGDIHLACPAQAFALIPTEIIDFDSVNAFLQKALKEVLPDNVQGIALTLRNELHETPYYHYSHGLKKHDGNCQRIAHGHRSPINVFENGIAAPKWDEYWARRWKDIYLGSEDDLVEVDELDLSPQTSVSDETHYGFHYVAPQGDFQLAMPKKRCEIIPHDTTVELLADFIATTLASENPESEFKVIAYEGVGKGAIASKGERNV

SEQ ID NO: 25539 - protein, 294 aa, unidentified
  source 1..294: note = Shewanella mangrovi
  REGION 1..294: note = tr|A0A094JKG3|A0A094JKG3_9GAMM 6-pyruvoyl tetrahydropterin synthase OS=Shewanella mangrovi; OX = 1515746 GN=HR45_03750 PE=4 SV=1
MQLFVKDLTVIDFSYLCPIRGMVGESWIVDVLLEGGLDQQNMVLDFGKVKRLIKQVIDDVADHRLLVPTACSKVRWQQQGERVWMDFDSQRGAIHLACPTEAFALVPAEIIDFETVNDFLFKALRDALPDNVDGISLTLRNEMLDGPFYHYSHGLKKHDGNCQRIAHGHRSPINVFEDGVAAPEWDRYWAERWRDIYLGSEDDLVMLESLQLSPQTKVSEASHYGFHYQAPQGDFQLAMPKACCDLIPHDTTIELLADFMAKTLADKVPGKHFRVVAFEGIGKGSIANAYVERS

SEQ ID NO: 25540 - protein, 293 aa, Shewanella marisflavi
  REGION 1..293: note = tr|A0A4Y6J3B1|A0A4Y6J3B1_9GAMM Uncharacterized protein OS=Shewanella marisflavi OX=260364 GN=FGA12_11810; PE = 4 SV=1
MQLFVRDLTVIDFSYLCPIRGMVGESWIVDVLLDGGLDEQNMVLDFAKVKHTIKNTIDDVADHRLLIPTACAEVRWQQQGDRVWMDFNSLQGDIHLACPAQAFALIPTEIIDFESVNAFLQKALKEVLPENVQGIALTLRNELHETPYYHYSHGLKKHDGNCQRIAHGHRSPINVFENGIAAPKWDEYWARRWKDIYLGSEEDLVEVDELELSPQTTVSDETHYGFHYVAPQGDFQLAMPKKRCEIIPHDTTVELLADFIATTLATENPESDFKVIAYEGVGKGAIVSKGMKR

SEQ ID NO: 25541 - protein, 290 aa, Shewanella morhuae
  REGION 1..290: note = tr|A0A1N6XZE2|A0A1N6XZE2_9GAMM 6-pyruvoyl tetrahydropterin synthase OS=Shewanella morhuae OX=365591; GN = SAMN05421840_10892 PE=4 SV=1
MQLFVKDLTVIDFSYLCTKRGMVGESWIVDVLLEGGLDEQNMLLDFAKVKRTIKQTIDMVADHRLLVPTACSNVRWQQQGDRVWMDFDSLLGPMHLACPSQAFALVPSEQIDLSSVNAFLQKALRETLPKNVEGITLTLRHEILDTPYYHYSHGLRKHDGNCQRIAHGHRSPIHIFENGHPALKWDQYWAKRWHDIYLGSEEDLVSVDSLSLSAQTRVCDDTHYGFHYQAPQGDFQLAIPKNCCDLIPHDTTVELLADFIATTLVAKVPTSQFKVVAFEGVGKGAIVTKG

SEQ ID NO: 25542 - protein, 291 aa, Shewanella oneidensis
  REGION 1..291: note = tr|A0A2W5E766|A0A2W5E766_SHEOE Uncharacterized protein OS=Shewanella oneidensis OX=70863 GN=DI594_01395; PE = 4 SV=1
MQLFVKDLTVIDFSYLCPKRGMVGESWIVDVVLEGGLDEQNMVLDFAKVKRAIKHTIDAVADHRLLVPTACSGVRWQQQGDRVWMDFESALGEIHLACPSQAFALVPSEQIDIPSVNAFLQKALRETLPDNVEGISLTLRHEILNAPYYHYSHGLRKHDGNCQRIAHGHRSPVQVFENGVSAPKWDEYWAKRWHDIYLGSEEDLVSVKTLNLSSQTRISDDSHYGFHYQAPQGDFQLAMPKECCDLIPHDTTVELLADYMATTLATKVPSSQFTVIAYEGVGKGAIVTKGN

SEQ ID NO: 25543 - protein, 291 aa, Shewanella oneidensis
  REGION 1..291: note = tr|Q8EF23|Q8EF23_SHEON Queosine biosynthesis protein QueD OS=Shewanella oneidensis (strain MR-1) OX=211586; GN = queD PE=4 SV=1
MQLFVKDLTVIDFSYLCPKRGMVGESWIVDVVLEGGLDEQNMVLDFAKVKRTIKHTIDAVADHRLLVPTACSGVRWQQLGDRVWLDFESLQGEIHLACPSQAFALVPSEQIDIPSVSAFLQKALRETLPNNVEGIHLTLRHEVLNSPYYHYSHGLRKHDGNCQRIAHGHRSPVQVFENGVPALKWDEYWAKRWHDIYLGSEEDLVSVKSLTLSPQTQVSDESHYGFYYQAPQGNFQLAMPKECCDLIPHDTTVELLADYMATTLATKVPSSQFTVIAYEGVGKGAIVTKGN

SEQ ID NO: 25544 - protein, 291 aa, Shewanella pealeana
  REGION 1..291: note = tr|A8H3F2|A8H3F2_SHEPA Uncharacterized protein; OS = Shewanella pealeana (strain ATCC 700345 / ANG-SQ1); OX = 398579 GN=Spea_1766 PE=4 SV=1
MQLFVKDLTVIDFSYLCPIRGMVGESWIVDVLLDGGLDEQNMVLDFAKVKRTIKSTIDNVADHRLLIPTACSEVRWQQQGDRVWMDFNSQQGDIHLACPSEAFALIPSELIDFESVNKFLQQALKQALPANVEGISLTLRNEIHEAPYYHYSHGLKKHDGNCQRIAHGHRSPVTVFENGVAAPKWDEYWAKRWQDIYLATVEDVVSVSSLSLSPQASINDGSHYGFHYQAPQGDFQLAMPKGRCDILPHDTTVELLADYMAQTLFEKVPSSDFKVIAYEGVGKGAIASRNA

SEQ ID NO: 25545 - protein, 293 aa, Shewanella piezotolerans
  REGION 1..293: note = tr|B8CNQ0|B8CNQ0_SHEPW Uncharacterized protein; OS = Shewanella piezotolerans (strain WP3 / JCM 13877); OX = 225849 GN=swp_2273 PE=4 SV=1
MQLFVKDLTVIDFSYLCPIRGMVGESWIVDVLLDGGLDEQNMVLDFAKVKRTIKNTIDDVADHRLLIPTACSEVRWQQQGDRVWMDFDSQQGSMHLACPSQAFALIPSEIIDFDSVNKFLQKALKEALPANVEGISLTLRNEIHDAPFYHYTHGLKKHDGNCQRIAHGHRSPVTVFENGVAAPKWDEYWAKRWHDIYLGSDEDCVSVQTLTLSPQTQVNDNTHLGFHYQAPQGDFQLAMPKGCCDVLPHDTTVELLADYMAQTLSEKVPSSDFKVIAYEGIGKGAIASRQSRS

SEQ ID NO: 25546 - protein, 293 aa, Shewanella psychrophila
  REGION 1..293: note = tr|A0A1S6HJF1|A0A1S6HJF1_9GAMM 6-pyruvoyl tetrahydropterin synthase OS=Shewanella psychrophila; OX = 225848 GN=Sps_00447 PE=4 SV=1
MQLFVRDLTVIDFSYLCPIRGMVGESWIVDVLLDGGLDEQNMVLDFSKVKRTIKNTIDEVADHRLLIPTACSEVRWQQQGDKVFMDFNSLQGDIHLACPAQAFALIPSEIIDFDSVNAFLQKALRAVLPDNVEGIALTLRNEMHEAPFYHYSHGLKKHDGNCQRIAHGHRSPINIFENGISAPKWDEYWAKRWKDIYLGTEEDVVNLSELTLSPQAKVSEDTHYGFCYQAPQGEFQLAMPKTRCEIIPHDTTVELLAEFIANTLVDKLPQSEFKVIAYEGIGKGAISVKGNIN

SEQ ID NO: 25547 - protein, 293 aa, Shewanella putrefaciens
  REGION 1..293: note = tr|A4Y7S4|A4Y7S4_SHEPC Uncharacterized protein; OS = Shewanella putrefaciens (strain CN-32 / ATCC BAA-453); OX = 319224 GN=Sputcn32_2286 PE=4 SV=1
MQLFVKELTVIDFSYLCPKRGMVGESWIVDVLLEGGLDEQNMVLDFAKVKRTIKQTIDAVADHRLLVPTACSHVRWQQQGDRVWMDFDSALGEIHLACPSQAFALVPTEQIDIQSVNTFLQKALRESLPANVEAITLTLRHEVLNSPYYHYSHGLRKHDGNCQRIAHGHRSPVNVFENGVPAPKWDEYWAKRWHDIYLGSEEDVVSVNTLNLSPQTRISNRSHYGFHYQAPQGDFQLAMPKECCDLIPHDTTVELLADYMATTLAAKVPTSQFTVVAYEGVGKGAIVTKGVST

SEQ ID NO: 25548 - protein, 291 aa, Shewanella putrefaciens; identical to SEQ ID NO: 25524
  REGION 1..291: note = tr|A0A252ER83|A0A252ER83_SHEPU Queuosine biosynthesis protein QueD OS=Shewanella putrefaciens OX=24; GN = B7D78_16530 PE=4 SV=1

SEQ ID NO: 25549 - protein, 293 aa, Shewanella sediminis
  REGION 1..293: note = tr|A8FU99|A8FU99_SHESH Uncharacterized protein; OS = Shewanella sediminis (strain HAW-EB3) OX=425104; GN = Ssed_1811 PE=4 SV=1
MQLFVRDLTVIDFSYLCPIRGMVGESWTVDVLLDGGLDEQNMVLDFSKVKRTIKDTIDDIADHRLLIPTAYSEVRWQQQGDRVWMDFNSLQGDIHLACPQQAFALIPSEIIDFDSVNTFLQKALKEALPDNVDGIALTLRNEIHDAPYYHYSHGLRKHDGNCQRIAHGHRSPVNVFENGMAAPKWDEYWAERWKDIYLGSEEDVVSVGELTLSPQAKVSDKTHFGFHYQAPQGDFQLAMPKTRCEIIPHDTTVELLAEFMASTLVEKSPQSEFKVIAYEGIGKGAISVKGNKA

SEQ ID NO: 25550 - protein, 291 aa, Shewanella sp.
  REGION 1..291: note = tr|A0A501XVH0|A0A501XVH0_9GAMM Uncharacterized protein OS=Shewanella sp. LC6 OX=2589790 GN=FJD32_11425; PE = 4 SV=1
MQLFVKDLTVIDFSYLCPKRGMVGESWIVDVVLEGGLDEQNMVLDFAKVKRAIKHTIDAVADHRLLVPTAYSGVRWQQQGDRVWMDFDSALGEIHLACPSQAFALVPSEQIDIPSVNAFLQKALRETLPDNVEGISLTLRHEILNAPYYHYSHGLRKHDGNCQRIAHGHRSPVQVFENGVSAPKWNEYWAKRWHDIYLGSEEDLVSVKTLNLSPQTRISDDSHYGFHYQAPQGDFQLAMPKECCDLIPHDTTVELLADYMATTLATKVPSSQFTVIAYEGVGKGAIVTKGN

SEQ ID NO: 25551 - protein, 293 aa, Shewanella sp.
  REGION 1..293: note = tr|A0A2G1ZM30|A0A2G1ZM30_9GAMM Uncharacterized protein OS=Shewanella sp. OX=50422 GN=COB74_00280 PE=4 SV=1
MQLFVRDLTVIDFSYLCPIRGMVGESWIVDVLLDGGLDEQNMVLDFSKVKRTIKNTIDEVADHRLLIPTACSDVRWQQKGDKVWMDFSSLQGDIHLACPSQAFALIPSEIIDFDSVNAFLQKALRAVLPENVEGIALTLRNEMHEAPFYHYSHGLKKHDGNCQRIAHGHRSPINIFENGIAAPKWDEYWAKRWKDIYLGTEEDVVNLSELTLSPQAKVSEDTHYGFCYQAPQGEFQLAMPKSRCEIIPHDTTVELLAEFIANTLVEKAPQSEFKVIAYEGVGKGAISVKGNLS

SEQ ID NO: 25552 - protein, 293 aa, Shewanella violacea
  REGION 1..293: note = tr|D4ZJ75|D4ZJ75_SHEVD Uncharacterized protein; OS = Shewanella violacea (strain JCM 10179 / CIP 106290 / LMG 19151 / DSS12) OX=637905 GN=SVI_1753 PE=4 SV=1
MQLFVRDLTVIDFSYLCPIRGMVGESWIVDVLLDGGLDEQNMVLDFSKVKRTIKNTIDEVADHRLLIPTACSEVRWQQQGDKVWMDFSSLQGDIHLACPAQAFALIPSEIIDFDSVNAFLQKALRAVLPDNVEGITLTLRNEMHETPFYHYSHGLKKHDGNCQRIAHGHRSPINIFENGIAAPKWDEYWAKRWKDIYLGTKEDVVNLSSLTLSPQAKVSEDTHYGFCYQAPQGEFQLAMPKSRCEIIPHDTTVELLAEFIANTLIEKTPKSEFKVIAYEGVGKGAISVKGNSI

SEQ ID NO: 25553 - protein, 293 aa, Shewanella woodyi
  REGION 1..293: note = tr|B1KJ40|B1KJ40_SHEWM Uncharacterized protein; OS = Shewanella woodyi (strain ATCC 51908 / MS32) OX=392500; GN = Swoo_2784 PE=4 SV=1
MQLFVRDLTVIDFSYLCPIRGMVGESWIVDVLLDGGLDEQNMVLDFSKVKRTIKDTIDNVADHRLLIPTACSEVRWQQQGDRVWMDFNSLKGDIHLACPEQAFALIPSELIDFESVNTFLQKALKEVLPDNVDGIALTLRNELHETPFYHYSHGLKKHDGNCQRIAHGHRSPINIFENGISAPKWDEYWAERWKDIYLGTVEDVVKIDELTLSPQAKVSDDTHFGFHYQAPQGDFQLAMPKPMCEIIPHDTTVELLAEFVANTLVEKSPHSQFKVIAYEGVGKGAISVKGHQA

SEQ ID NO: 25554 - protein, 291 aa, Shewanella xiamenensis
  REGION 1..291: note = tr|A0A073KME7|A0A073KME7_9GAMM Uncharacterized protein OS=Shewanella xiamenensis OX=332186 GN=SXM_1877; PE = 4 SV=1
MQLFVKDLTVIDFSYLCPKRGMVGESWIVDVVLEGGLDEQNMVLDFAKVKRAIKHTIDAVADHRLLVPTACSGVRWQQQGDRVWMDFESALGEIHLACPSQAFALVPSEQIDIQSVNAFLQKALRETLPDNVEGISLTLRHEILNAPYYHYSHGLRKHDGNCQRIAHGHRSPVQVFENGVSAPKWDEYWAKRWHDIYLGSEEDLVSVKTLNLSPQTRISDDSHYGFHYQAPQGDFQLAMPKECCDLIPHDTTVELLADYMATTLATKVPSSQFTVIAYEGVGKGAIVTKGN

SEQ ID NO: 25555 - protein, 162 aa, Shewanella xiamenensis
  REGION 1..162: note = tr|A0A073KLR9|A0A073KLR9_9GAMM QueD-like protein; OS = Shewanella xiamenensis OX=332186 GN=ABT47_19445 PE=4; SV = 1
MQIDVPLINEAQIGSRLNAAIEHNRRGEFALLLSLLSADARDMAQFQWQKELDTAEKLQRQFELPPKQTLVADLSSDNHIIDNSAVFMQQGARAFQLQQALRPEALVIRGGEPIAIAEALSNCEFTTRLRQRGQLPSPQVEIMHFADQLAIQRNLIPRLASA

SEQ ID NO: 25556 - protein, 121 aa, Shigella boydii; identical to SEQ ID NO: 16827
  REGION 1..121: note = tr|A0A1Q8MTJ4|A0A1Q8MTJ4_SHIBO 6-carboxy-5,6,7,8-tetrahydropterin synthase OS=Shigella boydii OX=621 GN=queD PE=3 SV=1

SEQ ID NO: 25557 - protein, 120 aa, Shigella boydii
  REGION 1..120: note = tr|E7SWX0|E7SWX0_9ENTR 6-carboxy-5,6,7,8-tetrahydropterin synthase OS=Shigella boydii ATCC 9905 OX=932676 GN=SGB_01919 PE=3 SV=1
MSTTLFKDFTFEAAHRLPHVPEGHKCGRLHGHSFMVRLEITGEVDPHTGWIIDFAELKAAFKPTYERLDHHYLNDIPGLENPTSEVLAKWIWDQVKPVVPLLSAVMVKETCTAGCIYRGE

SEQ ID NO: 25558 - protein, 121 aa, Shigella dysenteriae; identical to SEQ ID NO: 16827
  REGION 1..121: note = tr|A0A2S8DAB0|A0A2S8DAB0_SHIDY 6-carboxy-5,6,7,8-tetrahydropterin synthase OS=Shigella dysenteriae OX=622 GN=queD PE=3 SV=1

SEQ ID NO: 25559 - protein, 149 aa, Shigella dysenteriae
  REGION 1..149: note = tr|A0A090NHA1|A0A090NHA1_SHIDY 6-carboxy-5,6,7,8-tetrahydropterin synthase OS=Shigella dysenteriae WRSd3 OX=1401327 GN=WRSd3_02219 PE=3 SV=1
MRNKVVLDNAKKQPFRYSTAVLSSCREIMMSTTLFKDFTFEAAHRLPHVPEGHKCGRLHGHSFMVRLEITGEVDPHTGWIIDFAELKAAFKPTYERLDHHYLNDIPGLENPTSEVLAKWIWDQVKPIVPLLSAVMVKETCTAGCIYRGE

SEQ ID NO: 25560 - protein, 121 aa, Shigella flexneri; identical to SEQ ID NO: 16827
  REGION 1..121: note = tr|A0A2Y4Y4F4|A0A2Y4Y4F4_SHIFL 6-carboxy-5,6,7,8-tetrahydropterin synthase OS=Shigella flexneri OX=623 GN=sscR PE=3 SV=1

SEQ ID NO: 25561 - protein, 120 aa, Shigella flexneri
  REGION 1..120: note = tr|A0A3Z1W133|A0A3Z1W133_SHIFL 6-carboxytetrahydropterin synthase QueD (Fragment); OS = Shigella flexneri OX=623 GN=queD PE=4 SV=1
MMSTTLFKDFTFEAAHRLPHVPEGHKCGRLHGHSFMVRLEITGEVDPHTGWIIDFAELKAAFKPTYERLDHHYLNDIPGLENPTSEVLAKWIWDQVKPVVPLLSAVMVKETCTAGCIYRG

SEQ ID NO: 25562 - protein, 121 aa, Shigella sonnei; identical to SEQ ID NO: 16827
  REGION 1..121: note = tr|A0A0I5FHQ6|A0A0I5FHQ6_SHISO 6-carboxy-5,6,7,8-tetrahydropterin synthase OS=Shigella sonnei OX=624 GN=sscR PE=3 SV=1

SEQ ID NO: 25563 - protein, 121 aa, Shigella sonnei
  REGION 1..121: note = tr|A0A3Z4LJK8|A0A3Z4LJK8_SHISO 6-carboxy-5,6,7,8-tetrahydropterin synthase OS=Shigella sonnei OX=624 GN=queD PE=3 SV=1
MMSTTLFKDFTFEAAHRLPHVPEGHKCGRLHGHSFMVRLEITGEVDPHTGWIIDFAELKEAFKPTYERLDHHYLNDIPGLENPTSEVLAKWIWDQVKPVVPLLSAVMVKETCTAGCIYRGE

SEQ ID NO: 25564 - protein, 120 aa, Shigella sp.; identical to SEQ ID NO: 24282
  REGION 1..120: note = tr|A0A1D3DKB6|A0A1D3DKB6_9ENTR 6-carboxy-5,6,7,8-tetrahydropterin synthase OS=Shigella sp. FC1655 OX=1898038 GN=BHE86_13155 PE=3 SV=1

SEQ ID NO: 25565 - protein, 120 aa, Shigella sp.
  REGION 1..120: note = tr|A0A1E2VI51|A0A1E2VI51_9ENTR 6-carboxy-5,6,7,8-tetrahydropterin synthase OS=Shigella sp. FC2928 OX=1886517 GN=BFF50_21425 PE=3 SV=1
MSTTLFKDFTFEAAHRLPHVPEGHKCGRLHGHSFMVRLEITGEVDPHTGWIIDFAELKAAFKPTYDRLDHYYLNDIPGLENPTSEVLAKWIWDQVKPVVPLLSAVMVKETCTAGCIYRGE

SEQ ID NO: 25566 - protein, 117 aa, Shimia marina
  REGION 1..117: note = tr|A0A0P1FFX5|A0A0P1FFX5_9RHOB 6-carboxy-5,6,7,8-tetrahydropterin synthase OS=Shimia marina OX=321267 GN=queD PE=3 SV=1
MFRISKEFHFSASHQLAHLPDDHQCARLHGHNYIVVVELAAAELNADGFVRDYHELKPLKSYIDDHFDHRHLNDLLNVPSTAENLAKHFYDWCKSRWSEVAMVKVSETPKTWAEYRP

SEQ ID NO: 25567 - protein, 142 aa, Shimwellia blattae
  REGION 1..142: note = tr|I2B623|I2B623_SHIBC 6-carboxy-5,6,7,8-tetrahydropterin synthase OS=Shimwellia blattae (strain ATCC 29907 / DSM 4481 / JCM 1650 / NBRC 105725 / CDC 9005-74) OX=630 626 GN=queD PE=3 SV=1
MQKSARSCTMRRFFCMTENRKMATTLFKDFTFEAAHRLPHVPEGHKCGRLHGHSFMVRLEITGEVDPYTGWVVDFAELKAAFKPTLDRLDHYYLNEIPGLENPTSEVLAKWIWDRLQPVMPLLSAVMVKETCTAGCIYRGES

SEQ ID NO: 25568 - protein, 118 aa, Shinella sp.
  REGION 1..118: note = tr|A0A372NA98|A0A372NA98_9RHIZ 6-carboxy-5,6,7,8-tetrahydropterin synthase OS=Shinella sp. WSJ-2 OX=2303749 GN=queD PE=3 SV=1
MKITQAFTFEAAHRLPNVPATHKCHRMHGHSYRVELQLDGKVNPDTGFVIDFFDLEKAFGPLLEQLDHHTLNEIEGLENPTAENIATWIWTRVRPLLPELSSVKVFETPMCWAEFDGN

SEQ ID NO: 25569 - protein, 136 aa, unidentified
  source 1..136: note = Siansivirga zeaxanthinifaciens
  REGION 1..136: note = tr|A0A0C5WDS0|A0A0C5WDS0_9FLAO 6-carboxy-5,6,7,8-tetrahydropterin synthase OS=Siansivirga zeaxanthinifaciens CC-SAMT-1 OX=1454006 GN=AW14_06925 PE=3; SV = 1
MKVTVSRKAHFNAAHRLYRPDWSFEKNDLVFGKCNNPNYHGHNYELIVSVKGEIDPETGYVIDMKVLKDIIKDEVEDAFDHKNLNLEVSDFKTLNPTAENISVVIYNKIKPKLSQHLDLEITLFETPRNFVTYSGE

SEQ ID NO: 25570 - protein, 150 aa, unidentified
  source 1..150: note = Siansivirga zeaxanthinifaciens
  REGION 1..150: note = tr|A0A0C5VV94|A0A0C5VV94_9FLAO 6-pyruvoyl tetrahydropterin synthase OS=Siansivirga zeaxanthinifaciens CC-SAMT-1 OX=1454006 GN=AW14_04820 PE=4; SV = 1
MSFIRITKQFSFETGHALYGYDGKCKNVHGHSYKLSVTVIGKPISDTTNVKFGMVIDFSDLKKIVKEEIVDVFDHATVFNKNTPHVELAKELQERDHNVLLVDYQPTSEMMVIDFAKKIKKRLPEHIALHSLKLQETDTSFAEWYDYDNI

SEQ ID NO: 25571 - protein, 137 aa, unidentified
  source 1..137: note = Siccationidurans arizonensis
  REGION 1..137: note = tr|A0A1I6ARE0|A0A1I6ARE0_9BACT 6-pyruvoyltetrahydropterin/6-carboxytetrahydropterin synthase OS=Siccationidurans arizonensis OX=1227077; GN = SAMN04515668_3814 PE=4 SV= 1
MIYVSRQEHFNAAHKLHNPKWSDERNREVFGPCANTNWHGHNYDLIVTVKGQPDPETGFVVDLKALSDLLRTHITEQVDHKNLNLDVPFMAGQMASTENLVLAFWQILERELPTITEAKLHCVKLYETPRNFVEYYG

SEQ ID NO: 25572 - protein, 135 aa, unidentified
  source 1..135: note = Siccationidurans arizonensis
  REGION 1..135: note = tr|A0A1I6B0G6|A0A1I6B0G6_9BACT 6-carboxy-5,6,7,8-tetrahydropterin synthase; OS = Siccationidurans arizonensis OX=1227077; GN = SAMN04515668_4130 PE=3 SV=1
MQVTICRAEHFNAAHRLHNPAWDAEHNQRVFGKCNNPNYHGHNYNLIVRLTGQVDPETGYVYDTKRLSNLIKREVLDRYDHQNLNLDTEEFRTLNPTAENIAVVIWQRLRPHLAAELALSVTLYETDRNFVEYHG

SEQ ID NO: 25573 - protein, 120 aa, unidentified
  source 1..120: note = Siccibacter turicensis
  REGION 1..120: note = tr|A0A2P8VM54|A0A2P8VM54_9ENTR 6-carboxy-5,6,7,8-tetrahydropterin synthase OS=Siccibacter turicensis OX=357233 GN=queD PE=3 SV=1
MPTTLFKDFTFEAAHHLPNVPEGHKCGRLHGHSFMVRLEITGEVDAHTGWVMDFAELKAAFKPVYNRLDHYYLNEIPGLENPTSEVLAAWIWNEMKPVLPLLSAVMVKETCTAGCVYRGE

SEQ ID NO: 25574 - protein, 133 aa, unidentified
  source 1..133: note = Siculibacillus lacustris
  REGION 1..133: note = tr|A0A4Q9VSW6|A0A4Q9VSW6_9RHIZ 6-carboxytetrahydropterin synthase OS=Siculibacillus lacustris OX=1549641 GN=EYW49_07595 PE=4 SV=1
MYCVEVRDRIMIAHSLPDPFFGPAQGLHGATYVVDVAFYRETLTSKNVVVDIGAALDVLGATLKPLAYQNLDALPVFAGQLTTTEFLARHVFDALAAAARAGALGEDGRGLSKIRVTLHETDLARASYEASPT

SEQ ID NO: 25575 - protein, 146 aa, unidentified
  source 1..146: note = Sideroxydans lithotrophicus
  REGION 1..146: note = tr|D5CUR5|D5CUR5_SIDLE 6-carboxy-5,6,7,8-tetrahydropterin synthase; OS = Sideroxydans lithotrophicus (strain ES-1) OX=580332; GN = Slit_2224 PE=3 SV=1
MQITRRLEFDAGHRIPNHNSQCKHLHGHRYAIEITLSGDIITTEGVSEQGMVMDFSDVKRIAKEQVVDKWDHAFLVYRNDKVVLDFLDTLPEHKTVVMDVIPTAENLARVAFDLLRGAYHDTYGNHLRLERVRLFETPNNWADHTR

SEQ ID NO: 25576 - protein, 117 aa, unidentified
  source 1..117: note = Silicibacter sp.
  REGION 1..117: note = tr|C9D359|C9D359_9RHOB 6-carboxy-5,6,7,8-tetrahydropterin synthase; OS = Silicibacter sp. TrichCH4B OX=644076 GN=queD PE=3 SV=1
MFRIRKEFHFSASHQLSHLPDDHQCARLHGHNYIVVVELAAETLNPEGFVRDYHDLKPLKTYIDDTFDHRHLNDVLEGPSTAENMAKHFHDWCAARWPETRAVLVSETPKTWAEYRP

SEQ ID NO: 25577 - protein, 310 aa, unidentified
  source 1..310: note = Silvanigrella aquatica
  REGION 1..310: note = tr|A0A1L4CXY6|A0A1L4CXY6_9PROT Uncharacterized protein OS=Silvanigrella aquatica OX=1915309; GN = AXG55_02245 PE=4 SV=1
MQTHSLSTTKIFIQDVTLLDCAILYPSFGPKGKSWYVDVIWEGNKDKNGVLFDFSLAKKSAKSTIDHEYDHKLLVKPSLIRFQSNSQIIVIGNYKNSDNNLLFAINTYNNSIKRISRETLIALDNDDVTLLEKEIAQSILRNSPENVTNISVKLREHEHKLKPNYYSYTHSLCYHYGNCQRFHGHSSVIEVFKKGKFDLRKSSYAAKKLDNAYIISQNYVVKDWNTKLIQELIDHCPEITDLKEHHIAAQYKGTQGEVAVIIPKDHVFTLEQESTVENLAEFIRAQFPPDEKDIEIRAYEGLSKGSICNI

SEQ ID NO: 25578 - protein, 140 aa, unidentified
  source 1..140: note = Silvanigrella aquatica
  REGION 1..140: note = tr|A0A1L4D1M1|A0A1L4D1M1_9PROT 6-carboxy-5,6,7,8-tetrahydropterin synthase; OS = Silvanigrella aquatica OX=1915309 GN=AXG55_09360 PE=3; SV = 1
MLILKGLFSFCASHRLYNPTFSDDKNKLIFGKCAGKNGHGHNFKMEVEITGNVDPETGMVFNLTTLKELVNQNIIEDVDHKHLNFDVPWLEGKIPTTEVFVEAVWERLEKLIQKIDNKNVKLHSVTIWETETHAVQKTRD

SEQ ID NO: 25579 - protein, 140 aa, unidentified
  source 1..140: note = Silvanigrellales bacterium
  REGION 1..140: note = tr|A0A4V0P2K1|A0A4V0P2K1_9PROT 6-carboxytetrahydropterin synthase OS=Silvanigrellales bacterium RF1110005 OX=2493639 GN=JCM31447_19510 PE=4 SV=1
MLILKHNFSFCASHRLFNPTFSDDKNKEIYGKCAGKNGHGHNYKLEVAITGQVDPETSMLFNLQDLSDIVYENIINDVDHKHLNFDVLWLEGKIPTIEIFIEEIWKRLDKSIVSKQKNKLELYSVTLWETETNFATRLRN

SEQ ID NO: 25580 - protein, 308 aa, unidentified
  source 1..308: note = Silvanigrellales bacterium
  REGION 1..308: note = tr|A0A4P2VGI4|A0A4P2VGI4_9PROT 6-pyruvoyltetrahydropterin synthase OS=Silvanigrellales bacterium RF1110005 OX=2493639 GN=JCM31447_04150 PE=4 SV=1
MQIKNRNLTKIFIQNVTLLDCALFIPEKGPKGKSWYVDIVWEGEKDATGVLFDFSLAKKSAKSTIDHEFDHKLLVTASHIRFQSNSQIIVIGNNKSDTKESLFAINTYNNSVKKIARETLKALESDDVSELEKEIANAILRNSPSNVKNVKVTLREDEKKKKENYFNYTHSLCHHYGNCQRFHGHSNIIEIFHKGKFDLARSAKAAKKLNNSYIISRNYLAEKWDSRLITELVEHCPEISDFKSELIAAQYKGTQGEVAVIMPKINTLALDCESTVENLAEYIRNQFVDDTDIEVRAYEGLAKGSICI

SEQ ID NO: 25581 - protein, 281 aa, Simiduia agarivorans
  REGION 1..281: note = tr|K4KEB8|K4KEB8_SIMAS Uncharacterized protein; OS = Simiduia agarivorans (strain DSM 21679 / JCM 13881 / BCRC 17597 / SA1) OX=1117647 GN=M5M_00050 PE=4 SV=1
MLLFVDQLTNADFSYLHPERGLLGETWLASIQLEGQLDDQSMVCDFGRVKKQVRTFLDDRIDHCLLVPTRSPNLTWAEQDGQIKLEWRFGDTQLRCRSPKSAIALIDADQITPSTVAHWCEQQLRHAFGDGVARLTMAFEEEAISGAFYHYSHGLKKHDGNCQRIAHGHRSRIQIWRNGVKDSGLEQYWADLWKDIYIGTRDDIIGQPDPLIDFRYQAQQGDFFLSMPAKHCYLVDSDTTVECLAEHIASSLAEQNPGDSIRVQAYEGVNKGAIVQKKAGA

SEQ ID NO: 25582 - protein, 166 aa, Simiduia agarivorans
  REGION 1..166: note = tr|R9S518|R9S518_SIMAS 6-pyruvoyl tetrahydrobiopterin synthase OS=Simiduia agarivorans (strain DSM 21679 / JCM 13881 / BCRC 17597 / SA1); OX = 1117647 GN=M5M_01823 PE=4SV=1
MSSLITIEVNKEDMKFSAAHFTIFSATERERLHGHNFRVSMSISSPANRNGLAFSYKILKDKMRALCDELDEYTLLPAQSQYLALKHEGDAIVAHFNGETLWFAKSDCKLLPIPNTTVEAFATYLLDRFLHDDDFVSRYDIAQVEMKVSSGPGQWGSCIWREASDI

SEQ ID NO: 25583 - protein, 139 aa, Simonsiella muelleri
  REGION 1..139: note = tr|V9HDV6|V9HDV6_9NEIS 6-carboxy-5,6,7,8-tetrahydropterin synthase OS=Simonsiella muelleri ATCC 29453 OX=641147 GN=HMPREF9021_00197 PE=3 SV=1
MFKTAKEFTFDMAHMLDGHDGKCQNLHGHTYILQVEISGSLKESGAKKGMVMDFSDLKNIVKTHILDKMDHAFIYDTSSQRETQVADLLNQLNSKTYGINTRSTAEEMARHIFQILQEHIPISLVRLWETPSSYCEYSE

SEQ ID NO: 25584 - protein, 126 aa, Simplicispira metamorpha
  REGION 1..126: note = tr|A0A4R2NFA7|A0A4R2NFA7_9BURK 6-carboxy-5,6,7,8-tetrahydropterin synthase; OS = Simplicispira metamorpha OX=80881 GN=EV674_10388 PE=3; SV = 1
MTVPASPVMCVSQRFFFDAAHTLQRQIEAEGSRRIHGHTYHAEVTLRGPLDPATGMVIDLGYLRLRLQSVREQLDHHLLDEVPGLAPPTLENLCLFIARALADMQPAPWRVRVWREALGDSCTLEW

SEQ ID NO: 25585 - protein, 147 aa, Simplicispira sp.
  REGION 1..147: note = tr|A0A398CEE9|A0A398CEE9_9BURK 6-carboxytetrahydropterin synthase QueD OS=Simplicispira sp. NY-02 OX=2315688 GN=queD PE=4 SV=1
MLTITRKMEFDAGHRIPDHNSQCRNLHGHRYTLLITLTGDVVQKDGASDNGMVMDFGDIKALAKAHLVDLWDHAFIVHEKDTAVRAFLDSMPGHKTVVIDRVPTVENLAQAAFDILKDVYHDRFGRHLSLTKVTLYETPNCWAEVDG

SEQ ID NO: 25586 - protein, 135 aa, Singulisphaera acidiphila
  REGION 1..135: note = tr|L0DL64|L0DL64_SINAD 6-pyruvoyl-tetrahydropterin synthase OS=Singulisphaera acidiphila (strain ATCC BAA-1392 / DSM 18658 / VKM B-2454 / MOB10) OX=886293; GN = Sinac_5 864 PE=4 SV=1
MYRVTREIAFCYGHRLLNYEGKCKHLHGHNGRAVIVLEAQSLDARGMLVDFVEIKQKVQRWIDENLDHNMLLCRDDPILPVLVEQGERVFVMDANPTAENIARLIFERTADEGLPVVEVILWETEKCYAAYSSPA

SEQ ID NO: 25587 - protein, 163 aa, Singulisphaera acidiphila
  REGION 1..163: note = tr|L0D8Q8|L0D8Q8_SINAD 6-pyruvoyl-tetrahydropterin synthase OS=Singulisphaera acidiphila (strain ATCC BAA-1392 / DSM 18658 / VKM B-2454 / MOB10) OX=886293; GN = Sinac_1 233 PE=4 SV=1
MSDSRYKVRVSKDYLVFCSGHFITYLGDQCERIHGHNYRVAVEVEDDLDQNHYVFDFIALKDLTHAITDELDHRMLLPTESTQILLEDDGPNWRVRYQDRYWSFPRNECALLPIANTTAELLANYIAGRLREALTSRGLALPRVMRVEVEESFGQSAEVEWRK

SEQ ID NO: 25588 - protein, 163 aa, Singulisphaera sp.
  REGION 1..163: note = tr|A0A1N6LB03|A0A1N6LB03_9BACT 6-pyruvoyltetrahydropterin/6-carboxytetrahydropterin synthase OS=Singulisphaera sp. GP187 OX=1882752; GN = SAMN05444166_7916 PE=4 SV=1
MSDSRYKVRVSKDYLVFCSGHFITYLGDQCERIHGHNYRVAVEVEDDLDQNHYVFDFIALKDLTRAITDELDHRMLLPTESTQILLEDEGPNWRVRYQDRYWSFPRNECALLPIANTTAELLANYIAGRLRDALTARGLDLPRIMRVEVEESFGQSAEVEWQR

SEQ ID NO: 25589 - protein, 135 aa, Singulisphaera sp.
  REGION 1..135: note = tr|A0A1N6FB25|A0A1N6FB25_9BACT 6-carboxy-5,6,7,8-tetrahydropterin synthase; OS = Singulisphaera sp. GP187 OX=1882752; GN = SAMN05444166_1637 PE=3 SV=1
MYRVTREIAFCYGHRLLNYEGKCKHLHGHNGRAVIVLEANALDSRGMLVDFVEIKQKVQRWIDENLDHNMLLCRDDPILPVLIEQGERVFVMDANPTAENIARLIFERTADEGLPVVEVILWETEKCYAAYSASG

SEQ ID NO: 25590 - protein, 280 aa, unidentified
  source 1..280: note = Sinimarinibacterium flocculans
  REGION 1..280: note = tr|A0A318E4T8|A0A318E4T8_9GAMM 6-pyruvoyl tetrahydropterin synthase-like protein; OS = Sinimarinibacterium flocculans OX=985250; GN = C8D93_108142 PE=4 SV=1
MTTLFVEQLTVIDCAYLDVARGLVGESWIVDVELEGALDEQSMVLDFGEVKRRLKRAVDTHADHRLLVPGRAPEAQWIEDGDAAHLLFRSDIGAIEHRSPGAAVLRIDTDEITPEAVATDLLPRLRAVLPSSVGGVRLGLRSERIDGAYYHYVHGLKKHDGACQRIAHGHRSRIEIRVDGRRDTALEHGVASRWLDIYLGTRADIVAHGSGRVRFAYTSREGHYQLAMPETHVDLLDDDSTVECIAGHLARGLAPQHPGREIQVRAYEGVMKGAVATARA

SEQ ID NO: 25591 - protein, 140 aa, unidentified
  source 1..140: note = Sinimarinibacterium flocculans
  REGION 1..140: note = tr|A0A318E1C7|A0A318E1C7_9GAMM 6-pyruvoyltetrahydropterin/6-carboxytetrahydropterin synthase OS=Sinimarinibacterium flocculans OX=985250; GN = C8D93_11390 PE=4 SV=1
MTTEAPQICLTRRETFAAAHRLWSDALTEAENRALFGKCAYDHGHGHNYVIEVTLRGPIDARTGILVNVTELRDTIRRLILDDVDHRHLNHDSKLCRGINPTVENLTVLFFKVLRAHYGELLYEVCLHETEKNWARYRGE

SEQ ID NO: 25592 - protein, 280 aa, unidentified
  source 1..280: note = Sinimarinibacterium sp.
  REGION 1..280: note = tr|A0A4U0GDY5|A0A4U0GDY5_9GAMM Uncharacterized protein OS=Sinimarinibacterium sp. CAU 1509 OX=2562283; GN = E4T66_18750 PE=4 SV=1
MSRLFVEQLTVIDCAFLDAARGLVGESWIVDIELDGDLDDQSMVLDFGEVKKRCKQLIDQSVDHSLLVPAQATELMVQNGDDSLHLLFRSDLGAIEHISPAASVTLIDTDEIDAEAVCAHLRPLLHAQLPESVRAVNLQLRTEVIPGAYYHYAHGLKKHAGACQRIAHGHRSKIEIRVDGERDAALEMRVASGWLDVYLGSREDLVARGNGRMRFAYTAPQGHYQLALPESHVDLFDGDTTVERIAEHLARLLAPLRPGRTVQVRAYEGVMKGAVAEQRG

SEQ ID NO: 25593 - protein, 149 aa, unidentified
  source 1..149: note = Sinimarinibacterium sp.
  REGION 1..149: note = tr|A0A4U0H051|A0A4U0H051_9GAMM 6-carboxytetrahydropterin synthase OS=Sinimarinibacterium sp. CAU 1509 OX=2562283 GN=E4T66_01335 PE=4 SV=1
MTTDTRPVVYLTRRETFCAAHRLWSDQLSDAENHALFGHCAREFGHGHNYVLEVTVRGAIDPKTGVVVNVTQIRDATRDLLLDDVDHRHLNHDSVLCRGLNPTVENLAVLFWTVLKEHFGELLYEIKLHETEKNWVVYRGETTTWGHDG

SEQ ID NO: 25594 - protein, 147 aa, Sinobaca qinghaiensis
  REGION 1..147: note = tr|A0A419V6S1|A0A419V6S1_9BACL PreQ(0) biosynthesis protein QueD OS=Sinobaca qinghaiensis OX=342944; GN = ATL39_1339 PE=4 SV=1
MLHQFYPQVPHEYRYELNKDMHLAAAHFIPSEAAGKCQDIHGHTYVINITVAGDQLDSSGFLIDFKILKSLIHRPFDHTLLNDHELFSNEEDSWSFPTTEVIAGKFWKLIQSELNELAHQPKCVQLLVRETPTSYVVFRPKKEDFAI

SEQ ID NO: 25595 - protein, 141 aa, unidentified
  source 1..141: note = Sinobacteraceae bacterium
  REGION 1..141: note = tr|A0A2T5MCN8|A0A2T5MCN8_9GAMM 6-pyruvoyl tetrahydrobiopterin synthase OS=Sinobacteraceae bacterium GT1R17 OX=2029166 GN=CJD38_15445 PE=4 SV=1
MTTKKAPLVYLTRRETFSAAHRLWADDLSEQENRDLFGPCAYDHGHGHNYVLEVTLRGPIDPKTGILINLKEIRDVVHELIVGDVDHRHLNHDAPLTRGINPTAENLVVLFWTVLHKHFNEMLYEVRLRETEKNWVTYYGE

SEQ ID NO: 25596 - protein, 281 aa, unidentified
  source 1..281: note = Sinobacteraceae bacterium
  REGION 1..281: note = tr|A0A522K1A7|A0A522K1A7_9GAMM Uncharacterized protein OS=Sinobacteraceae bacterium OX=1969813; GN = EPN60_18035 PE=4 SV=1
MTTLFVEQLTVIDASYLCPRRGLVGESWIVDLELDGTLDEQAMVLDFGSVKKQLKRAIDDGPDHTLIVPLHYPGQQTTTLADGRLQTLFMSQAGGYAHRAPACALTLLEAPEVSAEALVAHLTPQLAGIVPANVASIRLSLRHEHIDGASYHYSHGLSKHRGACQRIAHGHRSRLAIFLDGVRDAGLEAAWAERFRDIYLLTGRHVQRDDGERLCLAYTAPEGLFELELPRRRSYLLGQDTDSTVEEIAEHLAGRVAAEHPGRRVEVRAYEGVMKGALARR

SEQ ID NO: 25597 - protein, 118 aa, unidentified
  source 1..118: note = Sinobacterium caligoides
  REGION 1..118: note = tr|A0A3N2DND1|A0A3N2DND1_9GAMM 6-carboxy-5,6,7,8-tetrahydropterin synthase; OS = Sinobacterium caligoides OX=933926 GN=EDC56_1752 PE=3; SV = 1
MEIYKDFIFEAAHLLPNVPAGHKCGRLHGHSFHVRLYISGEIGEKSGWIMDFGDIKGIFKPIYDRLDHYYLNDIPGLENPTSEVLAKWIWQQLKPELPQLSCIEIKETCTSGCIYRGE

SEQ ID NO: 25598 - protein, 152 aa, unidentified
  source 1..152: note = Sinomicrobium oceani
  REGION 1..152: note = tr|A0A1K1N4X7|A0A1K1N4X7_9FLAO 6-pyruvoyltetrahydropterin/6-carboxytetrahydropterin synthase OS=Sinomicrobium oceani OX=1150368; GN = SAMN02927921_01011 PE=4 SV=1
MSNIRLTKMFGFETGHALYGYDGKCKNVHGHSYKLAVTVIGKPITDRSNVKYGMVIDFGDLKKIVREEIVDKFDHATVFNKNTPHAELAGDLKRHGHNVLLVDYQPTSENMVIDFAAKIKPRLPENVVLHSLKLHETETSYAEWYAEDNPVS

SEQ ID NO: 25599 - protein, 136 aa, unidentified
  source 1..136: note = Sinomicrobium oceani
  REGION 1..136: note = tr|A0A1K1PN93|A0A1K1PN93_9FLAO 6-carboxy-5,6,7,8-tetrahydropterin synthase; OS = Sinomicrobium oceani OX=1150368 GN=SAMN02927921_01871; PE = 3 SV=1
MRVKVSRKAHFNAAHKLHNPKWNEQKNAEVYGKCSSPNYHGHNYELIVSVTGEIDPETGFVMDIKNLKDLIAVEIEDAFDHKNLNLDVPEFRELNPTAEHIAVVIWNKLRKSVKPELDLEVVLYETPRNFVTYTGI

SEQ ID NO: 25600 - protein, 150 aa, unidentified
  source 1..150: note = Sinomicrobium pectinilyticum
  REGION 1..150: note = tr|A0A3N0F0E8|A0A3N0F0E8_9FLAO 6-carboxytetrahydropterin synthase OS=Sinomicrobium pectinilyticum OX=1084421 GN=ED312_02090 PE=4 SV=1
MSNIRLTKLFGFETGHALYGYDGKCKNVHGHSYKLAVTVIGKPITDPSHVKCGMVIDFGDLKKIVKEEIVDKFDHATVFNKNTPHAELAEELKKHGHNVLLVDYQPTSENMVIDFSEKIKARLPEDVVLHSLKLHETETSYAEWYAEDNR

SEQ ID NO: 25601 - protein, 136 aa, unidentified
  source 1..136: note = Sinomicrobium pectinilyticum
  REGION 1..136: note = tr|A0A3N0F4I3|A0A3N0F4I3_9FLAO 6-carboxy-5,6,7,8-tetrahydropterin synthase; OS = Sinomicrobium pectinilyticum OX=1084421 GN=ED312_00045; PE = 3 SV=1
MRVKVSRKAHFNAAHKLHNPKWSNEKNEEVYGKCSSPNYHGHNYELIVSVTGEVDPETGFVMDIKDLKDLIAVEIEDVFDHKNLNLDIPDFEELNPTAEHIAVVIWNKLRKFIKPDLDLEVVLYETPRNFVTYTGT

SEQ ID NO: 25602 - protein, 149 aa, unidentified
  source 1..149: note = Sinomicrobium sp.
  REGION 1..149: note = tr|A0A329MU94|A0A329MU94_9FLAO 6-carboxy-5,6,7,8-tetrahydropterin synthase; OS = Sinomicrobium sp. N-1-3-6 OX=2219864 GN=DN748_17915; PE = 3 SV=1
MSNIRLTKLFGFETGHALYGYDGKCKNVHGHSYKLAVTVTGTPITDTSDVKYGMVIDFGDLKKIVKEEIVDRFDHATVFNKNTPHAQLAEELIRHGHHVLLVDYQPTSENMVIDFAKKIGPRLPEGVALHSLKLHETETSYAEWYASDQ

SEQ ID NO: 25603 - protein, 136 aa, unidentified
  source 1..136: note = Sinomicrobium sp.
  REGION 1..136: note = tr|A0A329N132|A0A329N132_9FLAO 6-carboxy-5,6,7,8-tetrahydropterin synthase; OS = Sinomicrobium sp. N-1-3-6 OX=2219864 GN=DN748_05535; PE = 3 SV=1
MRVKVSRKAHFNAAHKLYNRNWTSEKNEEVFGKCSSPNYHGHNYELIVSVTGEIDPETGFVMDIKILKDLIADKIEALFDHKNLNLDVPDFKGLNPTAENIAVVIWNKLRPFIKKEHDLEVTLYETARNFVTYSGT

SEQ ID NO: 25604 - protein, 132 aa, Sinomonas atrocyanea
  REGION 1..132: note = tr|A0A126ZUS2|A0A126ZUS2_9MICC 6-pyruvoyl tetrahydrobiopterin synthase OS=Sinomonas atrocyanea; OX = 37927 GN=SA2016_0197 PE=4 SV=1
MFSLTVRDHVMIAHSLPRPAFGPAQGLHGATFVVELTVRAEALDANSTVMDIGEASELLSSILDGLRYRNLDEHPDFTGRLTTTEMLAQHIAVGAAEDLRRLGHLTAVEVTLRENPDAWASCTVDLASDRAR

SEQ ID NO: 25605 - protein, 145 aa, unidentified
  source 1..145: note = Sinomonas humi
  REGION 1..145: note = tr|A0A0B2AH65|A0A0B2AH65_9MICC 6-pyruvoyl tetrahydrobiopterin synthase OS=Sinomonas humi OX=1338436; GN = LK10_12085 PE=4 SV=1
MYSLTVRDHVMIAHSLPRAAFGPAQGLHGATFVVELTVRARELDENATVMDIGALSGVLGEALEGLRYQNLDEHPAFEGKLSTTEAVARHLAEDVAGRLTGAGAGGAGAGAGGTAAGGTADRLVGLSVVLREHPDAWAGYSLDLP

SEQ ID NO: 25606 - protein, 134 aa, Sinomonas sp.
  REGION 1..134: note = tr|A0A221RBD1|A0A221RBD1_9MICC 6-pyruvoyl tetrahydrobiopterin synthase OS=Sinomonas sp. R1AF57; OX = 2020377 GN=CGQ25_17540 PE=4 SV=1
MFSLTVRDHAMIAHSLPRPAFGPAQGLHGATFVVELTVRADALDANSTVMDIGEASQLLGAILDGIRYRNLDEHPDFAGRLTTTEVLAQHVAVAAAENLRHLDHLSAVEVTLRENPDAWASCTMDLARGRGTGA

SEQ ID NO: 25607 - protein, 85 aa, Sinorhizobium americanum
  REGION 1..85: note = tr|A0A1L3LA75|A0A1L3LA75_9RHIZ 6-carboxy-5,6,7,8-tetrahydropterin synthase; OS = Sinorhizobium americanum CCGM7 OX=1408224 GN=queD PE=4; SV = 1
MEVQLSGKVDPHTGFVIDFFDVEHAFKPLLEQLDHHTLNDIDGLENPTAENIAIWIWERAKPLLMQLSSVKVFETPFCWAEYDGD

SEQ ID NO: 25608 - protein, 118 aa, Sinorhizobium americanum
  REGION 1..118: note = tr|A0A1L3LY19|A0A1L3LY19_9RHIZ 6-carboxy-5,6,7,8-tetrahydropterin synthase; OS = Sinorhizobium americanum OX=194963 GN=SAMCFNEI73_pC1243; PE = 3 SV=1
MFRITKEFHFSASHQLTSLPPEHQCARLHGHNYVVEVELSAEMLNEHGFVRDYHELAPLKHYIDEAFDHRHLNDVLGHDRVTAECLAQHFYEWCKARLPETSAVRVSETAKTWAEYRP

SEQ ID NO: 25609 - protein, 118 aa, unidentified
  source 1..118: note = Sinorhizobium fredii
  REGION 1..118: note = tr|I3WZI4|I3WZI4_RHIFR 6-carboxy-5,6,7,8-tetrahydropterin synthase; OS = Sinorhizobium fredii USDA 257 OX=1185652 GN=queD PE=3; SV = 1
MKITQAFTFEAAHRLPHVPATHKCHRMHGHSYRVELQLDGRVNPDTGFVIDFFDVEKVFGPLLGQLDHHTLNDIAGLENPTAENIAAWIWERVKPLLGELSSVRVFETPSCWAEYDGN

SEQ ID NO: 25610 - protein, 118 aa, unidentified
  source 1..118: note = Sinorhizobium fredii
  REGION 1..118: note = tr|Q6W2G4|Q6W2G4_SINFN 6-carboxy-5,6,7,8-tetrahydropterin synthase; OS = Sinorhizobium fredii (strain NBRC 101917 / NGR234); OX = 394 GN=NGR_b18170 PE=3 SV=1
MFRITKEFHFSASHQLTSLPPEHQCARLHGHNYVVEVELSAETLNEHGFVRDYHELAPLKQYIDESFDHRHLNDVLGHDRVTAECLAQHFYVWCQARLPETSAVRVSETAKTWAEYRP

SEQ ID NO: 25611 - protein, 118 aa, unidentified
  source 1..118: note = Sinorhizobium medicae
  REGION 1..118: note = tr|A0A508X403|A0A508X403_9RHIZ 6-carboxy-5,6,7,8-tetrahydropterin synthase; OS = Sinorhizobium medicae OX=110321 GN=queD PE=3 SV=1
MFRITKEFHFSASHQLKSLPPEHQCARLHGHNYIVEVELSGETLNEHGFVRDYHELAPLKTYIDETFDHRHLNDVLGHDRVTAECLARHFYEWCKARLPETTAVRVSETAKTWAEYRP

SEQ ID NO: 25612 - protein, 118 aa, unidentified
  source 1..118: note = Sinorhizobium medicae
  REGION 1..118: note = tr|A6UJ90|A6UJ90_SINMW 6-carboxy-5,6,7,8-tetrahydropterin synthase; OS = Sinorhizobium medicae (strain WSM419) OX=366394; GN = Smed_4938 PE=3 SV=1
MFRITKEFHFSASHQLKNLPPEHQCARLHGHNYIVEVELSGETLNEHGFVRDYHELAPLKTYIDEAFDHRHLNDVLGHDRVTAECLARHFYEWCKARLFETTAVRVSETAKTWAEYRP

SEQ ID NO: 25613 - protein, 118 aa, unidentified
  source 1..118: note = Sinorhizobium meliloti
  REGION 1..118: note = tr|H0FYF7|H0FYF7_RHIML 6-carboxy-5,6,7,8-tetrahydropterin synthase; OS = Sinorhizobium meliloti CCNWSX0020 OX=1107881; GN = SM0020_11205 PE=3 SV=1
MFRITKEFHFSASHQLKSLPAEHQCARLHGHNYIVEVELSGETLNEHGFVRDYHELAPLKQYIDECFDHRHLNDVLGHDRVTAECLAQHFYEWCQARLPETTAVRVSETAKTWAEYRP

SEQ ID NO: 25614 - protein, 118 aa, unidentified; identical to SEQ ID NO: 25613
  source 1..118: note = Sinorhizobium meliloti
  REGION 1..118: note = tr|A0A0E0UN73|A0A0E0UN73_SINMB 6-carboxy-5,6,7,8-tetrahydropterin synthase; OS = Sinorhizobium meliloti (strain BL225C) OX=698936; GN = SinmeB_3607 PE=3 SV=1

SEQ ID NO: 25615 - protein, 118 aa, unidentified
  source 1..118: note = Sinorhizobium saheli
  REGION 1..118: note = tr|A0A178YIP8|A0A178YIP8_SINSA 6-carboxy-5,6,7,8-tetrahydropterin synthase; OS = Sinorhizobium saheli OX=36856 GN=ATB98_22040 PE=3 SV=1
MFRITKEFHFSASHQLKSLPPEHQCARLHGHNYVVEVELSAETLNEHGFVRDYHELAPLKHYIDETFDHRHLNEVLGHDRVTAECLARHFYEWCKARLPETTAVRVSETAKTWAEYRP

SEQ ID NO: 25616 - protein, 118 aa, Sinorhizobium sp.
  REGION 1..118: note = tr|A0A249P1F5|A0A249P1F5_9RHIZ 6-carboxy-5,6,7,8-tetrahydropterin synthase; OS = Sinorhizobium sp. CCBAU 05631 OX=794846; GN = SS05631_b55630 PE=3 SV=1
MFRITKEFHFSASHQLTSLPPEHQCARLHGHNYVVEVELSAETLNEHGFVRDYHELAPLKHYIDEAFDHRHLNDVLGHDRVTAECLAQHFYEWCKARLPETTAVRVSETEKTWAEYRP

SEQ ID NO: 25617 - protein, 118 aa, Sinorhizobium sp.; identical to SEQ ID NO: 24852
  REGION 1..118: note = tr|A0A2A6MEM3|A0A2A6MEM3_9RHIZ 6-carboxy-5,6,7,8-tetrahydropterin synthase; OS = Sinorhizobium sp. NG07B OX=1538174 GN=queD PE=3 SV=1

SEQ ID NO: 25618 - protein, 161 aa, Sinosporangium album
  REGION 1..161: note = tr|A0A1G8EJW0|A0A1G8EJW0_9ACTN 6-pyruvoyltetrahydropterin/6-carboxytetrahydropterin synthase OS=Sinosporangium album OX=504805; GN = SAMN05421505_120127 PE=4 SV=1
MYQAHLTHTFHAAHRLPHLGGKCANLHGHTWTTTVTITTPQLTEDGTIIEFGAFKTRMRTWIDNNLDHAALLGTDDPLTPSLREQGCRVAEFGRAPYGPHPWPTVEAVAELIAYHAQTWLAQAENHADEHGTWYSDTPTRCRITQVTVQETPTNTATWTES

SEQ ID NO: 25619 - protein, 140 aa, Siphonobacter aquaeclarae
  REGION 1..140: note = tr|A0A1G9THI0|A0A1G9THI0_9BACT 6-pyruvoyltetrahydropterin/6-carboxytetrahydropterin synthase OS=Siphonobacter aquaeclarae OX=563176; GN = SAMN04488090_3565 PE=4 SV=1
MVYISRKEHFNAAHRVYNPNWSDERNQEVFGPCANPYYHGHNFELIVTVKGKPDPETGFVVDMKQLGDLVKREIVDKVDHRNLNIEVPFLEGKIPTCEVMIMEFWTILAPQVTALTNGRSTLHSLRLIETPKNFVDYFGE

SEQ ID NO: 25620 - protein, 139 aa, Siphonobacter aquaeclarae
  REGION 1..139: note = tr|A0A1G9RVT2|A0A1G9RVT2_9BACT 6-pyruvoyltetrahydropterin/6-carboxytetrahydropterin synthase OS=Siphonobacter aquaeclarae OX=563176; GN = SAMN04488090_3059 PE=4 SV=1
MESKRVAVYRKEHFNAAHRLYNPRWSDEKNREVFGLCSNANYHGHNYELIAEVIGPVDPETGFVIDLKYLSDLIRKEILDRFDHRNLNLDTEEFRDLNPTAENIAIVIYEKLRQYLDPRLALKIRLYETERNFVEYPVG

SEQ ID NO: 25621 - protein, 140 aa, unidentified
  source 1..140: note = Siphonobacter curvatus
  REGION 1..140: note = tr|A0A2S7IPN4|A0A2S7IPN4_9BACT 6-carboxytetrahydropterin synthase QueD OS=Siphonobacter curvatus OX=2094562 GN=C5O19_07800 PE=4 SV=1
MVYVSRVEHFNAAHRVYNPSWSDEQNFEVFGPCANPYYHGHNFELTVTVKGIPHSDTGFVMDMKHLGKIVKEQIVERVDHRNLNLEVDFLKDKIPTCEIFIMEIWKILAPVVAESTQGRSQLHSLKLIETPKNFVEYFGE

SEQ ID NO: 25622 - protein, 140 aa, unidentified
  source 1..140: note = Siphonobacter curvatus
  REGION 1..140: note = tr|A0A2S7IQJ9|A0A2S7IQJ9_9BACT 6-carboxy-5,6,7,8-tetrahydropterin synthase; OS = Siphonobacter curvatus OX=2094562 GN=C5O19_09670 PE=3; SV = 1
MQEKRVAVFRKEHFNAAHRLHNPNWSDEQNKAVFGLCNNPNYHGHNYELIVQVTGPIDPETGYVVDLKYLSDLIKTHVTDRFDHKNLNLDTEEFAQLNPTAEHIAIVIYEKLKAKLAPQLDLKIRLYETERNFVEYPVVG

SEQ ID NO: 25623 - protein, 140 aa, Siphonobacter sp.
  REGION 1..140: note = tr|A0A2N7BG97|A0A2N7BG97_9BACT 6-carboxy-5,6,7,8-tetrahydropterin synthase; OS = Siphonobacter sp. BAB-5405 OX=1864825 GN=BWI97_01115; PE = 3 SV=1
MEEKRVAVFRKEHFNAAHRLHNPNWSDEQNKAVFGLCNNPNYHGHNYELIVQVTGPIDPETGYVVDLKYLSDLIKTHVTDRFDHKNLNLDTEEFAQLNPTAEHIAIVIYEKLKANLAPQLDLKIRLYETERNFVEYPVVG

SEQ ID NO: 25624 - protein, 139 aa, Siphonobacter sp.
  REGION 1..139: note = tr|A0A261Q5I9|A0A261Q5I9_9BACT 6-carboxytetrahydropterin synthase QueD OS=Siphonobacter sp. BAB-5385 OX=1864822 GN=BWI93_11015 PE=4 SV=1
MVYVSRVEHFNAAHRVYNPSWSDEQNFEVFGPCANPYYHGHNFELIVTVKGIPHPDTGFVMDMKQLGKIVKEQIVERVDHRNLNLEVDFLKDKIPTCEVFIMEIWKILAPVVAEFTQGRSQLHSLKLIETPKNFVEYFG

SEQ ID NO: 25625 - protein, 190 aa, Skermanella aerolata
  REGION 1..190: note = tr|A0A512E4H9|A0A512E4H9_9PROT Uncharacterized protein OS=Skermanella aerolata OX=393310 GN=SAE02_77650; PE = 4 SV=1
MFSLIFSRRYSMAHRLLSGGSPKCAVPHGHNETVTVKLKSTRPQRLDGGANMVEPFERAKKQWHSWIDNHVDHAFQVSDRDPLIEVFARIEPEILPRLMVMPGDPTTELLAACFMAKLNAFLTADGGRLTCVEVSIEETPTNTVAFDGDPVQVIPAGTGDDSWWWRADNSINDLMLGSDPVADTCASANA

SEQ ID NO: 25626 - protein, 139 aa, Skermanella aerolata
  REGION 1..139: note = tr|A0A0D2W2L0|A0A0D2W2L0_9PROT 6-pyruvoyl tetrahydropterin synthase OS=Skermanella aerolata KACC 11604 OX=1385368 GN=N826_40675 PE=4 SV=1
MYSLTVRDHIMIAHSFKGAVFGPAQKLHGATFICDLEMRRRSLDADGLIVDIGMASALLSEVLKPLNYRNLDEVPELTGSNTTTEFLCGEIHRRLSARIMDGALGEGGKELDSLKITLHESHLAWATYEAPLTPVEAGK

SEQ ID NO: 25627 - protein, 142 aa, Skermanella stibiiresistens
  REGION 1..142: note = tr|W9H361|W9H361_9PROT 6-pyruvoyl tetrahydropterin synthase OS=Skermanella stibiiresistens SB22 OX=1385369; GN = N825_35720 PE=4 SV=1
MYSLTVRDHIMIAHSFKGAVFGPAQKLHGATFVCDLEMRRRHLDGDGLVVDIGMAADLLKDVLKPLNYRNLDEVEEFAGVNTTTEFLCGEIHRRISDRILHGALGEGGRGLESLKVTLGESHLAWATFEGPLSAEQSAEQGA

SEQ ID NO: 25628 - protein, 180 aa, Skermanella stibiiresistens
  REGION 1..180: note = tr|W9GPE1|W9GPE1_9PROT 6-pyruvoyl tetrahydropterin synthase OS=Skermanella stibiiresistens SB22 OX=1385369; GN = N825_35835 PE=4 SV=1
MGFTITRQIGIDAGHRIASHGSKCRHLHGHRYLVEACCRTSTGKLRDQGEQAGMVLDFGFLKEEMMAHVDAPCDHGLILDLADHPVLSLFTPTGMAFEDWLERLSVEVREQGHVETSETLLDQKLYIVPFPPTAEWLAKHWFERLAPAVRRRSDGLAILDHVTVWETPNCQATYRDTGAA

SEQ ID NO: 25629 - protein, 119 aa, Smithella sp.
  REGION 1..119: note = tr|A0A1V5DV76|A0A1V5DV76_9DELT 6-carboxy-5,6,7,8-tetrahydropterin synthase OS=Smithella sp. PtaU1.Bin162 OX=1811697 GN=queD_2 PE=3 SV=1
MEIFKVFHINSAHRLPNVPPGHKCANLHGHSFRIEVHIKGPVHPRLGWVIDFADIAKAFQPLHDRLDHKYLNDIEGLANPTSENLAKWLWQNLQPALPQLSKIVVQESPESGCVYEGEQ

SEQ ID NO: 25630 - protein, 124 aa, Smithella sp.
  REGION 1..124: note = tr|A0A0Q0W8D8|A0A0Q0W8D8_9DELT 6-carboxy-5,6,7,8-tetrahydropterin synthase OS=Smithella sp. SDB OX=1735324 GN=APR62_11150 PE=3 SV=1
MYEVTIIKSFSSAHLLAQIGGKCEELHGHNFKVEVTVYARELKESGLLIDFRIAKQWLVEILDQMDHKHLNELPFFSGINPSAENIAKYICESMEQKVRASGVNVARVKIWESENAAVTYIPAQ

SEQ ID NO: 25631 - protein, 142 aa, unidentified
  source 1..142: note = Snodgrassella alvi
  REGION 1..142: note = tr|A0A2N9X0X3|A0A2N9X0X3_9NEIS 6-carboxy-5,6,7,8-tetrahydropterin synthase; OS = Snodgrassella alvi OX=1196083 GN=BGI37_04645 PE=3 SV=1
MFKIAKEFQFDACHMLDGHQGKCHNLHGHTYRLIVEVSNQLHSQGSSKEMVMDFADIKTIINQHIISQLDHAYLYDQTNSNECRIATLLQQMQRKVFAFPCRTTAEGISRFIFNQLTAHLPVSKITLWETPTSYCEYQNTKP

SEQ ID NO: 25632 - protein, 142 aa, unidentified
  source 1..142: note = Snodgrassella alvi
  REGION 1..142: note = tr|A0A2N9WQV2|A0A2N9WQV2_9NEIS 6-carboxy-5,6,7,8-tetrahydropterin synthase; OS = Snodgrassella alvi OX=1196083 GN=BGI32_09670 PE=3 SV=1
MFKIAKEFQFDACHMLDGHQGKCHNLHGHTYRLIVEVSSSLHSQGSSKEMVMDFADIKTIINQHIISQLDHAYLYDETNSNECKIAALLEQMQRKVFAFPCRTTAEGMSRFIFNQLTPYLPVSKIILWETPTSYCEYQNTKP

SEQ ID NO: 25633 - protein, 142 aa, unidentified
  source 1..142: note = Snodgrassella sp.
  REGION 1..142: note = tr|A0A1C4AX68|A0A1C4AX68_9NEIS 6-carboxy-5,6,7,8-tetrahydropterin synthase; OS = Snodgrassella sp. R-53583 OX=1798181; GN = GA0061082_105112 PE=3 SV=1
MFKIAKEFQFDACHMLDGHQGKCHNLHGHTYRLIVEVSSPLQPQGSSKEMVMDFADIKTIINQHIISQLDHAYLYDETNNNERKIAALLKQMQRKVFAFPCRTTAEGISRFIFNQLTAYLPVSKITLWETPTSYCEYQNTKP

SEQ ID NO: 25634 - protein, 291 aa, unidentified
  source 1..291: note = Snowella sp.
  REGION 1..291: note = tr|A0A2W7B5R8|A0A2W7B5R8_9CYAN 6-pyruvoyl tetrahydropterin synthase OS=Snowella sp. OX=2164131; GN = DCF12_19805 PE=4 SV=1
MQCIINRRATFSASHRYWFSELTEQENKEKFGASSRFPGHGHNYVLFVSLIGELDRYGMVENLSTVKRVIKQEVTSQLNYFHLNDTWPEFQQILPTTEHIAKAIWDRLSPHLPLVKIRLFEHPELWADYQGNSMEATLSLKTHFSAAHRLALPELTLEQNSEIYGKCARVNGHGHNYHLEVAVTGEIDARTGMIVDLGSLQKVIDDYVVEPFDHTFLNKDIPYFAEVVPTAENIAFHIAQLLQQPIRELGVELEKVTLIESPNNSCEINCRHLDLSALLSVQQEPALVGAC

SEQ ID NO: 25635 - protein, 120 aa, Sodalis glossinidius
  REGION 1..120: note = tr|Q2NVN5|Q2NVN5_SODGM 6-carboxy-5,6,7,8-tetrahydropterin synthase OS=Sodalis glossinidius (strain morsitans) OX=343509 GN=queD PE=3 SV=1
MITTLYKDFTFESAHRLPHVPAGHKCGRLHGHSFLVRLEVTGEVDPHTGWIMDFAELKAAFQPILDRLDHYYINEIPGLENPTSEVLAQWIWQQLKPQLPLLSAVTLKETCTAGCVYRGQ

SEQ ID NO: 25636 - protein, 120 aa, unidentified
  source 1..120: note = Sodalis praecaptivus
  REGION 1..120: note = tr|W0HWL5|W0HWL5_9GAMM 6-carboxy-5,6,7,8-tetrahydropterin synthase OS=Sodalis praecaptivus OX=1239307 GN=queD PE=3 SV=1
MITTLYKDFTFESAHRLPHVPAGHKCGRLHGHSFLVRLEVTGEVDPHTGWIMDFADLKAAFKPILNRLDHYYLNDIPGLENPTSEVLAQWIWQQLKPQLPLLSAVTVKETCTAGCVYRGQ

SEQ ID NO: 25637 - protein, 120 aa, Sodalis sp.; identical to SEQ ID NO: 25636
  REGION 1..120: note = tr|A0A1J7C550|A0A1J7C550_9GAMM 6-carboxy-5,6,7,8-tetrahydropterin synthase OS=Sodalis sp. TME1 OX=1912097 GN=BK025_14590 PE=3 SV=1

SEQ ID NO: 25638 - protein, 121 aa, Sodalis sp.
  REGION 1..121: note = tr|A0A4R1NPF2|A0A4R1NPF2_9GAMM 6-carboxy-5,6,7,8-tetrahydropterin synthase OS=Sodalis sp. 159R OX=2529856 GN=EZJ58_4863 PE=3 SV=1
MVTTLFKDFTFEAAHRLPHVPDGHKCGRLHGHSFMVRVEITGPVDPHSGWVMDFGELKTLFSPVLEQLDHYYLNDIPGLENPTSEILARWIWRQLKPRLPLLSAIMVKETCTAGCIYRGEE

SEQ ID NO: 25639 - protein, 119 aa, unidentified
  source 1..119: note = Unknown
  REGION 1..119: note = tr|A0A151UKL3|A0A151UKL3_9GAMM 6-carboxy-5,6,7,8-tetrahydropterin synthase; OS = Sodalis-like endosymbiont of Proechinophthirus fluctus; OX = 1462730 GN=BG74_04940 PE=3 SV =1
MITTLYKNFTFESAHRLPYVPTGHKCSRLHGHSFLVRLEVTGEVDPHTGWIMDFANLKASFKPILNRLDHYYLNDIPGLENPTSEVLAQWIWQQLKPQLPLLSAVAVKETCTAGCIYRG

SEQ ID NO: 25640 - protein, 120 aa, unidentified
  source 1..120: note = Unknown
  REGION 1..120: note = tr|A0A261QNU5|A0A261QNU5_9GAMM 6-carboxy-5,6,7,8-tetrahydropterin synthase; OS = Sodalis-like symbiont of Philaenus spumarius OX=1189304; GN = queD PE=3 SV=1
MITTLYKDFTFESAHRLPHVPAGHKCGRLHGHSFLVRLEVTGEVDPRTGWIMDFAELKAAFQPILDRLDHYYLNEIPGLENPTSEVLAQWIWQQLKTQLPLLSAVTLKETCTAGCVYRGQ

SEQ ID NO: 25641 - protein, 126 aa, unidentified
  source 1..126: note = Solemya pervernicosa
  REGION 1..126: note = tr|A0A1T2L154|A0A1T2L154_9GAMM 6-carboxy-5,6,7,8-tetrahydropterin synthase OS=Solemya pervernicosa gill symbiont OX=642797 GN=BOW53_14075 PE=3; SV = 1
MTPRYTLKVLTEFASAHSLRDYPGDCRRLHGHNWKVEVEVVAHALDSVGMGIDFKVIKRAAAEVGDRLDHHYLNEVEPFDRINPTAENLAAYFFQELATLINDDRVKISAVTLWETDRASVRYTED

SEQ ID NO: 25642 - protein, 279 aa, Solemya velum
  REGION 1..279: note = tr|A0A0B0HB04|A0A0B0HB04_SOVGS Uncharacterized protein OS=Solemya velum gill symbiont OX=2340; GN = BOV88_11985 PE=4 SV=1
MSVLFVNDLTSIDFSYLHNQRGLLGESLSLGIRLSGSLDEQGMVLDFADVKRQVKQLVDEHFDHKLIAPARSSQLSTDTWDNRIELKFRWGDNMQLKHVSPAEAVSLLDVSDVTPGTLATAIAEMLQERLPENVSEIEINLSEEVIDESSYQYSHGLKHHAGNCQRIAHGHRSRIIIYRNGTRSIELEEEWADRWDDIYIGSLEDLADASDECHHYAYSSSQGNFELTLPAVCCDLINADSTVENIAEHIAEQLKSSHPESRFEVHAYEGMDKGAIATS

SEQ ID NO: 25643 - protein, 141 aa, unidentified
  source 1..141: note = Solibacter usitatus
  REGION 1..141: note = tr|Q028J7|Q028J7_SOLUE Uncharacterized protein; OS = Solibacter usitatus (strain Ellin6076) OX=234267; GN = Acid_1564 PE=4 SV=1
MTRRYQFAASHRLHSDQLSAEENRSLYGKCNNPYGHGHNYVVEVSVRGPVDEATGRTVDIVLLDELVRREVVQPFDHRNLNAEVDAFTKAVATSENLGFEICRRLKRNWKEVFPGEWPKLEKIRIGETARNIFEVGADEIE

SEQ ID NO: 25644 - protein, 124 aa, unidentified
  source 1..124: note = Solibacter usitatus
  REGION 1..124: note = tr|Q02A87|Q02A87_SOLUE 6-carboxy-5,6,7,8-tetrahydropterin synthase OS=Solibacter usitatus (strain Ellin6076) OX=234267 GN=Acid_1041 PE=3; SV = 1
MFEVTIEETFAAGHALRNYKGKCENVHGHNYRCQVTLEGEQLDSIGLLVDFVELKRVVHSVLDRMDHQWLNEFPPFDVLNPSAENMAKYIYDEVKGGLKTAEGVRIAMVRLWETDTAHATYRER

SEQ ID NO: 25645 - protein, 152 aa, unidentified
  source 1..152: note = Solimicrobium silvestre
  REGION 1..152: note = tr|A0A2S9GZI4|A0A2S9GZI4_9BURK Queuosine biosynthesis protein QueD OS=Solimicrobium silvestre; OX = 2099400 GN=S2091_2203 PE=4 SV=1
MLTITRKIEFDAGHRIPDHNSQCRNLHGHRYTLLITLVGEVVKQDGASDNGMIMDFSDIKALAHEHLVSLWDHAFLVYEKDAVVKDFLHTLPGHKTVVVDRVPTVENLAQIAFDMLKEVYHNRYGRALALQKVTLYETPNCWAEINDSSIRD

SEQ ID NO: 25646 - protein, 138 aa, Solimonas aquatica
  REGION 1..138: note = tr|A0A1H9J845|A0A1H9J845_9GAMM 6-pyruvoyltetrahydropterin/6-carboxytetrahydropterin synthase OS=Solimonas aquatica OX=489703; GN = SAMN04488038_11155 PE=4 SV=1
MSEPVVYLTRRETFAAAHRLWSAELSEAENRELFGPCARDYGHGHNYVLEVTLRGGIDAKTGVVVNITELRDVIRERILADVDHRHLNHDSQLMHGINPTVENIAVVFWRVLHERFGALLYEVCLHETEKNWVRYRGE

SEQ ID NO: 25647 - protein, 276 aa, Solimonas aquatica
  REGION 1..276: note = tr|A0A1H9CIF9|A0A1H9CIF9_9GAMM 6-pyruvoyl tetrahydropterin synthase OS=Solimonas aquatica OX=489703; GN = SAMN04488038_10361 PE=4 SV=1
MASLFVDNLSVIDCAYLDAQRGLVGESFLVDVVLDGPLDAQSMVLDFSQTKRRLKAGIDASLDHRLLVPRQLPGLRIQEDGAQLHLQLDAAPGRYEHRSPASAVCLLDAARIDTETVAAALQRQLQPLLPPAIRLHLNLRHEAIEGAYYHYAHGLKKHAGLCRHIAHGHRSRVELRVDGVRDRALEAQLAARWRDIYLGTQADLLDRGDGQLHFAYQACDGAYELRLPESRVQLLDCDSTVEEIAAWLHRELAPLRAGHRLQVRAYEGWGKGAIAG

SEQ ID NO: 25648 - protein, 142 aa, unidentified
  source 1..142: note = Solimonas fluminis
  REGION 1..142: note = tr|A0A2S5TCE4|A0A2S5TCE4_9GAMM 6-pyruvoyl tetrahydrobiopterin synthase OS=Solimonas fluminis; OX = 2086571 GN=C3942_16605 PE=4 SV=1
MADSRPIVTLSRRESFCASHRLWEPTLSREENFALYGKCARDNGHGHNYVLQVTLRGGVDPATGMVVNLADLKNFLREEIIARVDHYHLNHDVEMFRGVNPTSENVALVFWKVCHARFGELLSEVRVEETPDNIVCYRGESG

SEQ ID NO: 25649 - protein, 280 aa, unidentified
  source 1..280: note = Solimonas fluminis
  REGION 1..280: note = tr|A0A2S5TBK2|A0A2S5TBK2_9GAMM Uncharacterized protein OS=Solimonas fluminis OX=2086571 GN=C3942_18905; PE = 4 SV=1
MIRLFVEQLTVLDCAFLDPLRGLVGESWIVDVELAGDLDQQSMVLDFGEVKKRLKKVIDGIGDHKLLVPHRHAGLKLQHNGHGSELFFSGPADGPIEHRSPADAVCVIDAPAVTTESLTAHLQPLVAQQVPSNVAEVRLTLRHEVVDGAYYHYAHGLKKHTGHCQRIAHGHRSRIEIRLDDRREPALEQAWAGRWKDIYLGTQEDIVVDGAERVRFEYTSVDGDFALELPAQRCELLDGDTTVEKLARYIAQAVHAEHPGRQVEVRAYEGVLKGAVARAG

SEQ ID NO: 25650 - protein, 142 aa, Solimonas sp.
  REGION 1..142: note = tr|A0A346N1A1|A0A346N1A1_9GAMM 6-carboxytetrahydropterin synthase OS=Solimonas sp. K1W22B-7 OX=2303331 GN=D0B54_11830 PE=4 SV=1
MADPRPVVTLSRRESFCASHRLWEPTLSREDNFALYGKCARDNGHGHNYVLQVTLRGGVDPATGMVVNLADLKNFLREEIIARVDHYHLNFDVEMFKGINPTSENVALVFWKVCHARFGALLSEVRVEETPDNIVCYRGETA

SEQ ID NO: 25651 - protein, 280 aa, Solimonas sp.
  REGION 1..280: note = tr|A0A346N2E9|A0A346N2E9_9GAMM Uncharacterized protein OS=Solimonas sp. K1W22B-7 OX=2303331; GN = D0B54_14105 PE=4 SV=1
MIRLFVEQLTVLDCAFLDPIRGLVGESWIVDVELAGDLDQQSMVLDFGEVKKRLKKVVDGIGDHKLLVPHRHAGLRLQHNGHGSELHFSGPADGPIEHHSPADAICVIDAPAITTEALTAHLQPLVAQQVPSNVAEVRLTLRTEVVDGPYYHYAHGLKKHTGHCQRIAHGHRSRIEIRLDGQRDAAMEQAWAGRWKDIYLGTQEDIVLDGAERVRFEYTSVDGDFALELPAQRCELLDGDTTVERLAAYIARTIHAENPGRQVEVRAYEGVLKGAVARAG

SEQ ID NO: 25652 - protein, 139 aa, unidentified
  source 1..139: note = Solirubrum puertoriconensis
  REGION 1..139: note = tr|A0A0W8EE67|A0A0W8EE67_9BACT 6-pyruvoyl tetrahydrobiopterin synthase OS=Solirubrum puertoriconensis OX=1751427 GN=ASU33_06775 PE=4 SV=1
MIYLSRQEHFNAAHKLYNPSWSEERNKEVFGPCANTNWHGHNYDLIVTVKGQPDPETGFVVDLKALSVLIREHIVRHVDHKNLNLDVPFMAGKLASTENLALAFWEILQRELPSITSTAQLHCVKIYETPRNFVEYYGE

SEQ ID NO: 25653 - protein, 135 aa, unidentified
  source 1..135: note = Solirubrum puertoriconensis
  REGION 1..135: note = tr|A0A0W8EDM0|A0A0W8EDM0_9BACT 6-pyruvoyl tetrahydrobiopterin synthase OS=Solirubrum puertoriconensis OX=1751427 GN=ASU33_05005 PE=4 SV=1
MKVTVGRTEHFNAAHRLFNPSWSDEENDRVFGLCNNPNYHGHNYVLTVRLTGEPNPDTGYVYDLKELSDLIKREILNTFDHRNLNLDTEDFRQLNPTAENIARVCWQRLRPHLANNLALSVTLHETDRNFVEYHG

SEQ ID NO: 25654 - protein, 136 aa, Solitalea canadensis
  REGION 1..136: note = tr|H8KM93|H8KM93_SOLCM 6-pyruvoyl-tetrahydropterin synthase OS=Solitalea canadensis (strain ATCC 29591 / DSM 3403 / NBRC 15130 / NCIMB 12057 / USAM 9D) OX=929556 GN= Solca_4285 PE=4 SV=1
MIYITRRERFNAAHKLFREEWSAEKNAEVFGKCSNPNWHGHNYELFVTVKGEVNPVTGFVIDLKDLRDIINTQVISKLDHRNVNLDVDFMKGKMASTEVLAVEIFNQLKQPITEQGALLHSVKLYETENNFVEYFG

SEQ ID NO: 25655 - protein, 153 aa, Solitalea canadensis
  REGION 1..153: note = tr|H8KVK9|H8KVK9_SOLCM 6-pyruvoyl-tetrahydropterin synthase OS=Solitalea canadensis (strain ATCC 29591 / DSM 3403 / NBRC 15130 / NCIMB 12057 / USAM 9D) OX=929556 GN= Solca_1428 PE=4 SV=1
MARIRITKYFNFETAHALYGYDGKCRNVHGHSYELYVTVVGDAINDATHVKNGMVMDFGDLKKIVKTEIVDIFDHATVLNKNSPHIKLAGQLMEHMERVLLTDYQPTCENMLADFANRIMKRLPDNVKLYSLKLHETPTSFAEWFASDNGITV

SEQ ID NO: 25656 - protein, 149 aa, Solitalea koreensis
  REGION 1..149: note = tr|A0A521BEV9|A0A521BEV9_9SPHI 6-carboxy-5,6,7,8-tetrahydropterin synthase OS=Solitalea koreensis OX=543615 GN=SAMN06265350_102123 PE=3 SV=1
MANIRLTKYFNFEAAHALFGYDGKCRNVHGHSYELYVTIVGPIINDPNHVKNGMVMDFGDLKEIVKSEIVDIFDHATILNQNSPHIKLAAQLREHMERVLLTDYQPTCENMLADFAQKIQRRLPDGIKLHSLKLHETPTSFAEWFAEDN

SEQ ID NO: 25657 - protein, 149 aa, Solitalea koreensis
  REGION 1..149: note = tr|A0A521AYP4|A0A521AYP4_9SPHI 6-carboxy-5,6,7,8-tetrahydropterin synthase OS=Solitalea koreensis OX=543615 GN=SAMN06265350_101529 PE=3 SV=1
MDYGHQFFYDICAMIYITRKEHFNAAHKLFREEWSNDKNAEMFGKCSNPNWHGHNYDLFVTVKGEVNPETGFVIDLKDLKQIINSRVIDKLDHKNINLDVDFMKGKMASTEMLAMEIFNQLKGEIESKGAALHSIKLFETENNFVEYFG

SEQ ID NO: 25658 - protein, 137 aa, unidentified
  source 1..137: note = Solitalea longa
  REGION 1..137: note = tr|A0A2S5AAC2|A0A2S5AAC2_9SPHI 6-pyruvoyl tetrahydrobiopterin synthase OS=Solitalea longa OX=2079460; GN = C3K47_01620 PE=4 SV=1
MIYITRRERFNAAHKLYREEWSLDKNAEVFGKCSNPNWHGHNYELFITVKGNVNPETGFVIDLKELRDIINARVIHKLDHKNVNMDVDFMKGKMASTEVLAIEIFKQLNEPIKARGAMLHAVKLYETENNFVEYFGE

SEQ ID NO: 25659 - protein, 150 aa, unidentified
  source 1..150: note = Solitalea longa
  REGION 1..150: note = tr|A0A2S4ZY41|A0A2S4ZY41_9SPHI 6-carboxytetrahydropterin synthase QueD OS=Solitalea longa; OX = 2079460 GN=C3K47_18030 PE=4 SV=1
MAKIRLTKYFNFETAHALYGYDGKCRNVHGHSYELYVTVVGDAIEDANHVKNGMVMDFGDLKKIVKSEIVDVFDHATVLNKNSPHIKLASQLMEHMERVLLTEYQPTCENMLADFAQRIKKRLPDNIKLHSLKLHETPTSFAEWFASDNE

SEQ ID NO: 25660 - protein, 164 aa, Soonwooa buanensis
  REGION 1..164: note = tr|A0A1T5ETS4|A0A1T5ETS4_9FLAO 6-pyruvoyltetrahydropterin/6-carboxytetrahydropterin synthase OS=Soonwooa buanensis OX=619805; GN = SAMN05660477_01557 PE=4 SV=1
MQQNSNILETKNAYLCNMIRITKIFTFETAHVLYNYDGKCKNMHGHSYKLFVTVKGNPINNLDNVKNGMVVDFGDIKKIVKEEVVDVWDHAVLVNGASPHKNLGQKLEDEGHKVIFCDYQPTCENMLYDIAAKIKNKLPNTIELAYLKLHETENSYGEWLAEEN

SEQ ID NO: 25661 - protein, 184 aa, unidentified
  source 1..184: note = Sorangiineae bacterium
  REGION 1..184: note = tr|A0A1W9QHP2|A0A1W9QHP2_9DELT Uncharacterized protein OS=Sorangiineae bacterium NIC37A_2 OX=1970199; GN = B6A08_01345 PE=4 SV=1
MSVYRVTDGIFIHFAHHVRGHLGPCISLHGHTWLFQVTLEAKTLDHQGFVIDFDVLHDRLLTPCHRLLDHSLALGQESFDESREALANLGSILFASREKVQGTQGERQPGFGEDERGLAGARNHWPANIKVAVFPFTPTSERLAEWLAAAAAETVGDERVRVVSARVVETLHPTESAAEYFVPR

SEQ ID NO: 25662 - protein, 132 aa, Sorangium cellulosum
  REGION 1..132: note = tr|A0A2L0F1P9|A0A2L0F1P9_SORCE 6-pyruvoyl tetrahydropterin synthase OS=Sorangium cellulosum OX=56; GN = SOCE26_070000 PE=4 SV=1
MFFLGVSDHVMIAHSFSDPFFGPATRMHGATYTVDVEIHAKALGPHHVIMDIGALRDALRRALDTLDYQNLDEHPAFPGRTSTTERVAEHVAGLLAETIAKLPVDEAPLPGASLRVLVRESPTAYAGFERAL

SEQ ID NO: 25663 - protein, 106 aa, Sorangium cellulosum
  REGION 1..106: note = tr|A9G7Q3|A9G7Q3_SORC5 6-pyruvoyltetrahydropterin synthase OS=Sorangium cellulosum (strain So ce56); OX = 448385 GN=ygcM1 PE=4 SV=1
MHGATYSVEIEIRAKALGPHHVVMDIGALHASLRRVLDTIDYTNLDEHPAFPGRTSTTERVAEHVAGLLAEEIARLPAAEAPLPGSTLRVLVRESPSAYAGFERDL

SEQ ID NO: 25664 - protein, 120 aa, unidentified
  source 1..120: note = Spartobacteria bacterium
  REGION 1..120: note = tr|A0A2A2XWG2|A0A2A2XWG2_9BACT 6-carboxy-5,6,7,8-tetrahydropterin synthase; OS = Spartobacteria bacterium AMD-G4 OX=1982325; GN = CAK90_03950 PE=3 SV=1
MKVRLTKDFILEAAQSLTKVPAGHKCARLHGHTFTIEISVEGEVDPDTGWLYDHALISAAMKPIIEELDHSYLNDVPGLENPTIEMMAGWLWNRLSPQLPGLAEIVIHETPFARCSYRGE

SEQ ID NO: 25665 - protein, 120 aa, unidentified
  source 1..120: note = Spartobacteria bacterium
  REGION 1..120: note = tr|A0A3C0R708|A0A3C0R708_9BACT 6-carboxy-5,6,7,8-tetrahydropterin synthase; OS = Spartobacteria bacterium OX=2052183 GN=queD PE=3 SV=1
MRARLTKDFTFEAAQTLPRAPEGHKCRRMHGHSFKIEVSVEGDVDPMSGWVYDHAEIGAAMKPLIDMLDHSYLNEIEGLENPTIEKMAMWFWQKLQPQCRGLCEIVVHETPTARCVYRGE

SEQ ID NO: 25666 - protein, 126 aa, Sphaerisporangium sp.
  REGION 1..126: note = tr|A0A366LXI6|A0A366LXI6_9ACTN 6-carboxy-5,6,7,8-tetrahydropterin synthase; OS = Sphaerisporangium sp. LHW63015 OX=2248750; GN = DP939_22155 PE=3 SV=1
MGTFEIAKRFRFEAAHRIGGLPKGHPCGRVHGHSYQVEVRLAAERLTAPGFVTDFGELAPLGKYLQATFDHQLLNDVLDVEPTSENLAVHLACWFLDNLQPGLPGRLVAVRVAETATSWAEYRVEP

SEQ ID NO: 25667 - protein, 121 aa, Sphaerisporangium sp.
  REGION 1..121: note = tr|A0A2W2G898|A0A2W2G898_9ACTN 6-carboxy-5,6,7,8-tetrahydropterin synthase; OS = Sphaerisporangium sp. 7K107 OX=2070365 GN=C1I98_17050; PE = 3 SV=1
MYVIAKRFAFSASHRLDLLPEGHPCRRDHGHNYVVEIRLTAQELDPYGFVADFSELTPVRDHLADTYDHRCLNDVLEQPTCERLARRLYRWCSDNLPVAHLLRAVRVSETPSTWAEYREEP

SEQ ID NO: 25668 - protein, 125 aa, Sphaerobacter thermophilus
  REGION 1..125: note = tr|D1CA69|D1CA69_SPHTD Uncharacterized protein; OS = Sphaerobacter thermophilus (strain DSM 20745 / S 6022); OX = 479434 GN=Sthe_3312 PE=4 SV=1
MFAIGVVAQFEAAHRLRGDFGPASRLHGHTYRVEVEVAGPQLNDDGTLFDLGLLKAWVDEAVGELNYQNLDVLPAFAQRNSTAEEVARFLRETLAPRLHGKGLRMLTVRVWESPQAYAACQWELL

SEQ ID NO: 25669 - protein, 159 aa, unidentified
  source 1..159: note = Sphaerospermopsis kisseleviana
  REGION 1..159: note = tr|A0A1Z4UNM0|A0A1Z4UNM0_9CYAN Queuosine biosynthesis protein QueD OS=Sphaerospermopsis kisseleviana NIES-73 OX=1973480 GN=NIES73_20900 PE=4 SV=1
MTNNQWLIGKEFRFEAAHKLPYHDGKCARLHGHSWRGVVYISANTLVQEGAKQGMVMDYSDLKKYLQPLLDNYLDHYYLNESTGLESPTSEAIAAWIYEKLEEAGLPGLTAVRIDETCTSICLYSKNRRSGWLNSGESLNLLLSRESDDDGDINLTTII

SEQ ID NO: 25670 - protein, 424 aa, unidentified
  source 1..424: note = Sphaerospermopsis kisseleviana
  REGION 1..424: note = tr|A0A1Z4UMM2|A0A1Z4UMM2_9CYAN Uncharacterized protein OS=Sphaerospermopsis kisseleviana NIES-73; OX = 1973480 GN=NIES73_17420 PE=4 SV=1
MECIINRRAQFSATHRYWLPELSETENLEKFGPFSKFPGQGHNYVLFISMSGELDEYGMVLNLSDVKHTIKNEATGQLDFSYLNDVWPEFKQTLPTTENIAKVIWERLTPHLPIVKVQLLEHPQMWAEYQGEGKKASLTIRSHFSAAHRLAPNLSAEKYGKCTRTHGHNYHLEVTVEGEMDSRTGMIVDVHALKKVVEDHVLELFDHSCINEDIPYFAESQIVPTTENISRYISDLLQSPIQKLGVKLSQVKLFESDQLWVEYKGNGSETFFNVATDFSAAHRLAHPDLSLEKNKQIYGKCARINGHGHNYHLEVTVKGEIDPVTGMGVDLGGLNQIIKNSVIEPMDHGFLNKDVSFFAQVVPTAENIAFYISNTLRSPIQQLGAELYKIKLVESPNNSCEIYAADLDQTSVNAAVKQLELAAV

SEQ ID NO: 25671 - protein, 159 aa, unidentified
  source 1..159: note = Sphaerospermopsis reniformis
  REGION 1..159: note = tr|A0A480A709|A0A480A709_9CYAN Queuosine biosynthesis protein QueD OS=Sphaerospermopsis reniformis; OX = 531300 GN=SR1949_46190 PE=4 SV=1
MTNNQWLIGKEFRFEAAHKLPYHDGKCARLHGHSWRGVVYISANTLVQEGAKQGMVMDYSDLKKYLQPLLDNYLDHYYLNESTGLESPTSEAIAAWIYEKLEEAGLPGLTAVRIDETCTSICLYSKNRRSGWLNSGESLNLLLSRESDDDGDVNLTTII

SEQ ID NO: 25672 - protein, 424 aa, unidentified
  source 1..424: note = Sphaerospermopsis reniformis
  REGION 1..424: note = tr|A0A480A222|A0A480A222_9CYAN Uncharacterized protein OS=Sphaerospermopsis reniformis OX=531300; GN = SR1949_40160 PE=4 SV=1
MECIINRRAQFSATHRYWLPELSETENLEKFGPFSKFPGQGHNYVLFISMSGELDEYGMVLNLSDVKHTIKNEATGQLDFSYLNDVWPEFKQTLPTTENIAKVIWERLTPHLPIVKVQLLEHPQMWAEYQGEGKKASLTIRSHFSAAHRLAPNLSAEKYGKCTRTHGHNYHLEVTVEGEMDSRTGMIVDVRALKKVVEDHVLELFDHSCINEDIPYFAESQIVPTTENISRYISDLLQSPIQKLGVKLSQVKLFESDQLWVEYKGNGSETFFNVATDFSAAHRLAHPDLSLEKNKQIYGKCARINGHGHNYHLEVTVKGEIDPVTGMGVDLGGLNQIIKNSVIEPMDHGFLNKDVSFFAQVVPTAENIAFYISNTLRSPIQQLGAELYKIKLVESPNNSCEIYAADLDQTSVNAAVKQLELAAV

SEQ ID NO: 25673 - protein, 121 aa, Sphaerotilus hippei
  REGION 1..121: note = tr|A0A318H6R0|A0A318H6R0_9BURK 6-carboxy-5,6,7,8-tetrahydropterin synthase; OS = Sphaerotilus hippei OX=744406 GN=C7444_101251 PE=3 SV=1
MKYALSQRFFFEAAHTLRRQVDAEPSRRIHGHTYLAEVTLSATPDPESGMVVDLGHLRREIETVRERLDHRFLDEVDGIGPATLENLCTYLWRAFEAIYGTTLAAIEVRREASGDACRLTR

SEQ ID NO: 25674 - protein, 371 aa, Sphaerotilus natans
  REGION 1..371: note = tr|A0A059KL79|A0A059KL79_9BURK Uncharacterized protein OS=Sphaerotilus natans subsp. natans DSM 6575; OX = 1286631 GN=X805_25050 PE=4 SV=1
MSPRSFHSASAGFEAALHVDLLPEGHRSRRLHGHSFFATVRAELPAGWAPFAGGEVAELQRRMEACCAPLDYALLNAVEGLGAPTDENIARWIRRRLEAEFGVPGIEQVGVQSTAHTGVDLDRAGHAHLWRRYRFQAAHRLPNVPAGHKCGRMHGHGFEVILHADQDIGERAYGLDYDRIDDIWAPLHFELNYQCLNEIAGLENPTSEVISAWLWRRLKPLLPELSWVTVYETGSCGANFDGQNYRIWKEMTFDSAIRLKHAPEGSPLRGIHGYTWALRLHLNAPLDAVMGWTVDFGDVKTLFDPVFKAIDHRPLFENTAIDDGDALSLARWVLAEGRAVLPQLDRIDVYETRGNGAIVLASARADELVPV

SEQ ID NO: 25675 - protein, 371 aa, Sphaerotilus natans
  REGION 1..371: note = tr|A0A5C1PXN1|A0A5C1PXN1_9BURK 6-pyruvoyl tetrahydropterin synthase OS=Sphaerotilus natans subsp. sulfidivorans OX=639200 GN=EWH46_00625 PE=4 SV=1
MSPRSFHSASAGFEAALHVDLLPEGHRSRRLHGHSFFAAVRAELPAGWAPFAGGEVAELQRRMEACCAPLDYALLNQVEGLGAPTDENIARWIRRRLEGEFGVPGIEQVGVQSTAHTGVDLDRAGHAHLWRRYRFQAAHRLPNVPAGHKCGRMHGHGFEVILHADQDIGESDYGLDYDRIDDIWAPLHFELNYQCLNEIEGLENPTSEVISAWLWHRLKPLLPELSWVTVYETGSCGANFDGQNYRIWKEMTFDSAIRLKHAPEGSPLRGIHGHTWALRLHLNAPLDAVMGWTVDFGDVKALFDPVFKAIDHRPLFENEAIDDGDSLSLARWVLAQGRAVLPQLDRIDVYETRGNGAIVLASARADELVPV

SEQ ID NO: 25676 - protein, 121 aa, unidentified
  source 1..121: note = Sphingobacteriaceae bacterium
  REGION 1..121: note = tr|A0A3D3P8A2|A0A3D3P8A2_9SPHI 6-pyruvoyl tetrahydrobiopterin synthase (Fragment); OS = Sphingobacteriaceae bacterium OX=2021370 GN=DIT07_01765; PE = 4 SV=1
YRDDWSDERNMETFGKCSNPNWHGHNYELFVTVKGEIDPETGFVMDLKELKTIIHTYVTDKLDHKNVNLDVDFMKGKMSSTEVLGTEIFKQLQAPIELHGVKLHKIRLCETENNFVEYFGE

SEQ ID NO: 25677 - protein, 136 aa, unidentified; identical to SEQ ID NO: 23779
  source 1..136: note = Sphingobacteriaceae bacterium
  REGION 1..136: note = tr|A0A1X9ZAX2|A0A1X9ZAX2_9SPHI 6-pyruvoyl tetrahydrobiopterin synthase OS=Sphingobacteriaceae bacterium GW460-11-11-14-LB5 OX=1986952 GN=CA265_21885; PE = 4 SV=1

SEQ ID NO: 25678 - protein, 136 aa, unidentified
  source 1..136: note = Sphingobacteriales bacterium
  REGION 1..136: note = tr|A0A1M3QUM6|A0A1M3QUM6_9SPHI 6-pyruvoyl tetrahydrobiopterin synthase OS=Sphingobacteriales bacterium 40-81 OX=1895835 GN=BGP13_03230 PE=4 SV=1
MVYLTRIEHFNAAHKLYNEAWSVEKNEEVFGKCANENWHGHNYDLYVTVKGNPDQDTGFIMDVKKLSLLINEFVLEKLDHLNLNEDVDFMKGQFCSTENLAVGIWNQLVNRLPAGVQLHCIKLYETPQIYVEYYGE

SEQ ID NO: 25679 - protein, 142 aa, unidentified
  source 1..142: note = Sphingobacteriales bacterium
  REGION 1..142: note = tr|A0A1M3HCP6|A0A1M3HCP6_9SPHI 6-carboxy-5,6,7,8-tetrahydropterin synthase; OS = Sphingobacteriales bacterium 50-39 OX=1895841; GN = BGO55_25620 PE=3 SV=1
MLQVTKIFRFETAHAIHGYPGQCSNLHGHSYILHVTVSAEPVGEDYLPPPGFILDFKELKRIVKSVIEARFDHHTLLSEDYLAAHPPLAILPNIWVWQAEPTAENILLYIRNTLKNELPADVVLRKLKIYETSESYAEWEEK

SEQ ID NO: 25680 - protein, 135 aa, unidentified
  source 1..135: note = Sphingobacteriia bacterium
  REGION 1..135: note = tr|A0A259HNR8|A0A259HNR8_9BACT 6-pyruvoyl tetrahydrobiopterin synthase OS=Sphingobacteriia bacterium 39-39-8 OX=1970578 GN=B7X72_09335 PE=4 SV=1
MLYLTRLEHFNAAHKLFNPSWTREQNDAVFGVCANENWHGHNFDLFVTIKGEPDPETGFVFDVKKLSQLMKKHVIDKLDHKNLNLDVDFMKDKICSTENLTVAIWEQLAPHLPAHVQLHCVKLYETARIYVEYFG

SEQ ID NO: 25681 - protein, 138 aa, unidentified
  source 1..138: note = Sphingobacteriia bacterium
  REGION 1..138: note = tr|A0A1G3J4I9|A0A1G3J4I9_9BACT 6-pyruvoyl tetrahydrobiopterin synthase OS=Sphingobacteriia bacterium RIFOXYD2_FULL_35_12 OX=1802167 GN=A2546_08220 PE=4 SV=1
MVYLTRQEHFNAAHKLFNPAWSKERNEQVFGVCANENWHGHNYDLYVTIKGIPDPDTGFLFDVKALSKIIKTHVIDLLDHKNLNMDVPFMAGKMCSTENLALAIWNQLAPHLPNPVKLHCVKLYETPRIYVEYFGEEV

SEQ ID NO: 25682 - protein, 146 aa, unidentified
  source 1..146: note = Sphingobacterium alimentarium
  REGION 1..146: note = tr|A0A4R3VYD7|A0A4R3VYD7_9SPHI 6-pyruvoyltetrahydropterin/6-carboxytetrahydropterin synthase OS=Sphingobacterium alimentarium OX=797292; GN = EDC17_102130 PE=4 SV=1
MLFCGIFVVMVHITRRERFCAAHKLYREEWTPEQNEEVFGYCSNPNWHGHNYELYVTVKGDINPQTGFVMDIKIMKEIIHTYVIGKLDHKNINLDVDFMAGKMASTEVIAQEIFHQLKPHFDQRGVILHSVKLFETENNSVEYFGQ

SEQ ID NO: 25683 - protein, 139 aa, unidentified
  source 1..139: note = Sphingobacterium alimentarium
  REGION 1..139: note = tr|A0A4V2VU96|A0A4V2VU96_9SPHI 6-pyruvoyltetrahydropterin/6-carboxytetrahydropterin synthase OS=Sphingobacterium alimentarium OX=797292; GN = EDC17_101733 PE=4 SV=1
MITAERYHDISCGHRVVGHEGKCRFLHGHNYRIHFEVAAEELDEIGRVLDFSVIKEKLCMWLEDHYDHKFLIWSNDPMLEELQKLTAESLVIVPFNPTAENIAKHLVEVVAPQQLQGTSCRLIRCKVEETQKCSATYKK

SEQ ID NO: 25684 - protein, 140 aa, unidentified
  source 1..140: note = Sphingobacterium alkalisoli
  REGION 1..140: note = tr|A0A4V5LYX7|A0A4V5LYX7_9SPHI 6-carboxytetrahydropterin synthase OS=Sphingobacterium alkalisoli OX=1874115 GN=FAZ19_03210 PE=4 SV=1
MIIAERYHDISCGHRVVGHEGKCRFLHGHNYRIHFTITASKLDPVGRVLDFSIIKSHLCEWLEHHFDHKFLMWEQDELLEQLLEIQKESLVVVPFNPTAENIAKYLVEVVGPNQLADTTAKLISCKVEETSKCSASYSID

SEQ ID NO: 25685 - protein, 137 aa, unidentified
  source 1..137: note = Sphingobacterium alkalisoli
  REGION 1..137: note = tr|A0A4U0H885|A0A4U0H885_9SPHI 6-carboxytetrahydropterin synthase OS=Sphingobacterium alkalisoli OX=1874115 GN=FAZ19_01465 PE=4 SV=1
MVYITRRERFSAAHKLHREEWSLEKNEETFGNCSNPNWHGHNYELFVTVKGEINPKTGFLIDLKVMKKIINLYVIEKLDHKNVNLDVDFMQGKMASTEVIAMEIFHVLKPLFEKEKVQLHCVRLHETENNAVEYYGE

SEQ ID NO: 25686 - protein, 137 aa, unidentified
  source 1..137: note = Sphingobacterium cellulitidis
  REGION 1..137: note = tr|A0A235DVI7|A0A235DVI7_9SPHI 6-pyruvoyl tetrahydrobiopterin synthase OS=Sphingobacterium cellulitidis OX=1768011 GN=CHT99_17415 PE=4 SV=1
MIYITRRERFNAAHKLYREDWSLEENERVFGNCSNPNWHGHNYDLYVTVKGLVNPETGFLIDLKLMKDIIIREVIDKLDHKNVNLDVDFMEGKMASTEVIAMEIFHILKPFFEKEKVFLHAVRLHETENNYVEYFGE

SEQ ID NO: 25687 - protein, 137 aa, Sphingobacterium daejeonense
  REGION 1..137: note = tr|A0A4V6JU21|A0A4V6JU21_9SPHI 6-pyruvoyl tetrahydropterin synthase/QueD family protein; OS = Sphingobacterium daejeonense OX=371142; GN = NCTC13534_05578 PE=4 SV=1
MIYITRRERFNAAHKLYREDWSAEENERIFGNCSNPNWHGHNYDLFVTVKGHINPETGFLIDLKVMKDIIIREVIDKLDHKNVNLDVDFMKDKMASTEVIAVEIFNILKPLFEKENVILHVVRLHETENNYVEYFGE

SEQ ID NO: 25688 - protein, 136 aa, unidentified
  source 1..136: note = Sphingobacterium deserti
  REGION 1..136: note = tr|A0A0B8T4E2|A0A0B8T4E2_9SPHI Uncharacterized protein OS=Sphingobacterium deserti OX=1229276; GN = DI53_1552 PE=4 SV=1
MIHITRRERFCAAHKLYREDWSQEKNEAIFGKCSNPNWHGHNYELFVTVKGEVDPETGFLIDLKKMKQIILKQVIDKLDHKNINLDVDFMAGKRASTEIIAISIFEVLKPYFEEESVVLHAVKLYETENNFVEYFG

SEQ ID NO: 25689 - protein, 168 aa, unidentified
  source 1..168: note = Sphingobacterium deserti
  REGION 1..168: note = tr|A0A0B8T4K2|A0A0B8T4K2_9SPHI Uncharacterized protein OS=Sphingobacterium deserti OX=1229276; GN = DI53_1323 PE=4 SV=1
MYANDDISYTCCFFVSPPLKIYLYLCTMIVAERYHDISCGHRVVGHEGKCRFLHGHNYRIHFTVAAEKLDEVGRVVDFSVIKSTLCAWLEEHFDHKFLIWQEDELLPQLQALTEDSLVIVPFNPTAENIARYLVEEIGPQQLQPHAVTLLSCKVEETAKCSATYTRSL

SEQ ID NO: 25690 - protein, 150 aa, unidentified
  source 1..150: note = Sphingobacterium detergens
  REGION 1..150: note = tr|A0A420AMB5|A0A420AMB5_9SPHI 6-pyruvoyltetrahydropterin/6-carboxytetrahydropterin synthase OS=Sphingobacterium detergens OX=1145106; GN = DFQ12_4655 PE=4 SV=1
MLKLGLKPYLCIIMIFITRRERFCAAHKLYREDWSNEQNEQVFGLCSNPNWHGHNYDLFVTVKGEVNPETGFLIDLKIMKEIINRSIIDKVDHRNFNLDVDFMKGVMASTENIAIEIFKILKPLFEEQRVALHSVRLHETENNYVEYFGD

SEQ ID NO: 25691 - protein, 137 aa, Sphingobacterium faecium
  REGION 1..137: note = tr|A0A2T5Y4V9|A0A2T5Y4V9_9SPHI 6-pyruvoyltetrahydropterin/6-carboxytetrahydropterin synthase OS=Sphingobacterium faecium OX=34087; GN = C8N37_104452 PE=4 SV=1
MVYITRRERFCAAHKLYREDWSIEKNENVFGNCSNVNWHGHNYDLFVTVKGDVNPTTGFLIDLKLMKTIILEHVVNKVDHKNINLDVDFMKDKMASTENIAIAIFEVLQPLFEAEHVQLHSIRLHETENNYVEYFGD

SEQ ID NO: 25692 - protein, 137 aa, unidentified
  source 1..137: note = Sphingobacterium gobiense
  REGION 1..137: note = tr|A0A2S9JKS8|A0A2S9JKS8_9SPHI 6-pyruvoyl tetrahydrobiopterin synthase OS=Sphingobacterium gobiense; OX = 1382456 GN=C5749_09565 PE=4 SV=1
MIYITRRERFSAAHKLYREDWSLEQNEAVFGNCSNPNWHGHNYELFVTVKGEINPETGFLIDLKKMKSIILQHVIRKLDHKNVNLDVDFMKGKKASTEVIAVAIFQVLKPFFDQENVELHAVKLYETENNFVEYFGE

SEQ ID NO: 25693 - protein, 139 aa, unidentified
  source 1..139: note = Sphingobacterium gobiense
  REGION 1..139: note = tr|A0A2S9JD17|A0A2S9JD17_9SPHI 6-pyruvoyl tetrahydrobiopterin synthase OS=Sphingobacterium gobiense; OX = 1382456 GN=C5749_18875 PE=4 SV=1
MILAERYHDISCGHRVVGHEGKCRFLHGHNYRIHFTVAADQLDEVGRVLDFSVIKTALCQWLEEHFDHKFLIWEKDELLPQLQEVSGESLVIVPFNPTAENIAQYLVEHIGPQQLKEYPVRLVSCKVEETAKCSAIYSL

SEQ ID NO: 25694 - protein, 137 aa, unidentified
  source 1..137: note = Sphingobacterium haloxyli
  REGION 1..137: note = tr|A0A2S9J107|A0A2S9J107_9SPHI 6-pyruvoyl tetrahydrobiopterin synthase OS=Sphingobacterium haloxyli; OX = 2100533 GN=C5745_14945 PE=4 SV=1
MIYITRRERFSAAHKLYREDWSLEQNEAVFGNCSNPNWHGHNYELFVTVKGEINPETGFLIDLKKMKSIILQHVISKLDHKNVNLDVDFMQGKKASTEVIAVAIFQVLKPFFDQENVQLHAVKLYETENNFVEYFGE

SEQ ID NO: 25695 - protein, 139 aa, unidentified
  source 1..139: note = Sphingobacterium haloxyli
  REGION 1..139: note = tr|A0A2S9IZS2|A0A2S9IZS2_9SPHI 6-pyruvoyl tetrahydrobiopterin synthase OS=Sphingobacterium haloxyli; OX = 2100533 GN=C5745_17345 PE=4 SV=1
MMLVERYHDISCGHRVVGHEGKCRLLHGHNYRIHFTVTADQLDEIGRVVDFSVIKTALCQWLEDHFDHKFLVWEKDELLPQLQEVSGESLVIVPFNPTAENIAKYLVEHIGPQQLKDYPVRLVSCKIEETAKCSATYSL

SEQ ID NO: 25696 - protein, 137 aa, unidentified
  source 1..137: note = Sphingobacterium lactis
  REGION 1..137: note = tr|A0A1H5ZST0|A0A1H5ZST0_9SPHI 6-pyruvoyltetrahydropterin/6-carboxytetrahydropterin synthase OS=Sphingobacterium lactis OX=797291; GN = SAMN05421877_107125 PE=4 SV=1
MIYITRRERFNAAHKLYREDWSLEENEKVFGNCSNPNWHGHNYDLFVTVKGHINPETGFLIDLKVMKDIIIREVIDKLDHKNVNLDVDFMKGKMASTEVIAVEIFNILKPFFDKENVILHVVRLHETENNYVEYFGE

SEQ ID NO: 25697 - protein, 137 aa, Sphingobacterium mizutaii
  REGION 1..137: note = tr|A0A239Z4V0|A0A239Z4V0_9SPHI 6-pyruvoyltetrahydropterin/6-carboxytetrahydropterin synthase OS=Sphingobacterium mizutaii OX=1010; GN = SAMN05192578_105128 PE=4 SV=1
MIYITRRERFNAAHKLYREDWSLEENERVFGNCSNPNWHGHNYDLFVTVKGLVNPETGFLIDLKLMKDIITREVIDKLDHKNVNLDVDFMQGKMASTEVIAMEIFHILKPFFAKEKVFLHAVRLHETENNYVEYFGE

SEQ ID NO: 25698 - protein, 144 aa, Sphingobacterium multivorum
  REGION 1..144: note = tr|A0A2X2J2Z8|A0A2X2J2Z8_SPHMU 6-pyruvoyl tetrahydropterin synthase/QueD family protein; OS = Sphingobacterium multivorum OX=28454 GN=NCTC11034_00393; PE = 4 SV=1
MPYLCIIMVFITRRERFCAAHKLYREDWSKEQNEQVFGLCSNPNWHGHNYDLYVTVKGKVNPETGFLIDLKIMKEIINRSIIDKVDHRNFNLDVDFMKGVMASTENIAIEIFKILKPLFDEQGVILHSVRLHETENNYVEYFGD

SEQ ID NO: 25699 - protein, 137 aa, unidentified
  source 1..137: note = Sphingobacterium nematocida
  REGION 1..137: note = tr|A0A1T5G7F7|A0A1T5G7F7_9SPHI 6-pyruvoyltetrahydropterin/6-carboxytetrahydropterin synthase OS=Sphingobacterium nematocida OX=1513896; GN = SAMN05660841_03814 PE=4 SV= 1
MIYITRRERFCAAHKLHREDWSDEKNEATFGYCSNPNWHGHNYELYVTVKGEVNPETGFLIDLKLMKRIINTYIITPMDHKNINLDVDFMHGKMASTEVIAMEIFKVLKPHFEQEHVQLHSVKLFETENNSVEYFGD

SEQ ID NO: 25700 - protein, 140 aa, unidentified
  source 1..140: note = Sphingobacterium nematocida
  REGION 1..140: note = tr|A0A1T5EPW1|A0A1T5EPW1_9SPHI 6-pyruvoyltetrahydropterin/6-carboxytetrahydropterin synthase OS=Sphingobacterium nematocida OX=1513896; GN = SAMN05660841_02695 PE=4 SV= 1
MITAERYHDISCGHRVVGHEGKCRYLHGHNYRIHFIVQSEELDTVGRVIDFSVIKEKLCMWLEDNFDHKFLIWNEDPLLTALMDISKESLVLVPFNPTAENIAKYLVEEIGPQQLSEYGCRLIQCKVEETRKCAASYTLV

SEQ ID NO: 25701 - protein, 141 aa, unidentified
  source 1..141: note = Sphingobacterium paludis
  REGION 1..141: note = tr|A0A4R7D4C3|A0A4R7D4C3_9SPHI 6-pyruvoyltetrahydropterin/6-carboxytetrahydropterin synthase OS=Sphingobacterium paludis OX=1476465; GN = B0I21_1038 PE=4 SV=1
MIVAERYHDISCGHRVVGHEGKCRFLHGHNYRIHFTIAAEQLDEIGRVVDFSVIKSTLCAWLEEHFDHKFLIWEADELLPQLQAITEDSLVIVPFNPTAENIARYLVEEIGPQQLQAHAVTLLSCKVEETAKCSATFTRTS

SEQ ID NO: 25702 - protein, 136 aa, unidentified
  source 1..136: note = Sphingobacterium paludis
  REGION 1..136: note = tr|A0A4R7D3V3|A0A4R7D3V3_9SPHI 6-pyruvoyltetrahydropterin/6-carboxytetrahydropterin synthase OS=Sphingobacterium paludis OX=1476465; GN = B0I21_103311 PE=4 SV=1
MIHITRRERFCAAHKLYREDWSPEKNEAVFGKCSNPNWHGHNYELFVTVKGEVDPETGFVIDLKKMKQLILQHVIDKLDHKNINLDVDFMAGKRASTEMIAISIFDVLKPYFEEESVILHAVKLYETENNFVEYFG

SEQ ID NO: 25703 - protein, 137 aa, unidentified
  source 1..137: note = Sphingobacterium paucimobilis
  REGION 1..137: note = tr|U2J030|U2J030_9SPHI 6-pyruvoyl tetrahydrobiopterin synthase OS=Sphingobacterium paucimobilis HER1398 OX=1346330 GN=M472_06005 PE=4 SV=1
MIYITRRERFCAAHKLHREDWSEEKNEAVFGYCSNPNWHGHNYELYVTVKGTVNPETGFLIDLKLMKSIINTEVIDKMDHKNINLDVDFMQGKMASTEIIAMEIFHVLKPHFEKENVQLHSVKLYETENNSVEYFGD

SEQ ID NO: 25704 - protein, 140 aa, unidentified
  source 1..140: note = Sphingobacterium paucimobilis
  REGION 1..140: note = tr|U2H9S3|U2H9S3_9SPHI Uncharacterized protein; OS = Sphingobacterium paucimobilis HER1398 OX=1346330; GN = M472_06925 PE=4 SV=1
MITAERYHDISCGHRVVGHEGKCRYLHGHNYRIHFIVQAEELDTVGRVVDFSVIKEKLCMWLEENFDHKFLIWNEDPLLSGLTDIAADSLVLVPFNPTAENIAKYLVEQIGPQQLAQYGCRLIKCKVEETQKCAASYTLI

SEQ ID NO: 25705 - protein, 136 aa, unidentified
  source 1..136: note = Sphingobacterium psychroaquaticum
  REGION 1..136: note = tr|A0A1X7KCE7|A0A1X7KCE7_9SPHI 6-pyruvoyltetrahydropterin/6-carboxytetrahydropterin synthase OS=Sphingobacterium psychroaquaticum OX=561061; GN = SAMN05660862_2711 PE=4SV=1
MIYITRRERFSAAHRLFREEWSQEQNEQVFGNCSNPNWHGHNYELFVTVKGDVNPETGFVIDLKVMKRIILEHVVDKLDHKNVNLDVDFMAGKKASTEVIAIAIFDVLKPWFAKENVVLHCVKLHETENNYVEYFG

SEQ ID NO: 25706 - protein, 139 aa, unidentified
  source 1..139: note = Sphingobacterium psychroaquaticum
  REGION 1..139: note = tr|A0A1X7L330|A0A1X7L330_9SPHI 6-pyruvoyltetrahydropterin/6-carboxytetrahydropterin synthase OS=Sphingobacterium psychroaquaticum OX=561061; GN = SAMN05660862_3463 PE=4SV=1
MIIAERYHDISCGHRVVGHEGKCRFLHGHNYRIHFTIASTALDEIGRVIDFSVIKSQLCMWLEDNFDHKFLIWEKDELLEQLKLVASESLVIVPFNPTAENIAQYMVEKIGPQQLEGLGVELVSCKVEETAKCSASFSR

SEQ ID NO: 25707 - protein, 137 aa, Sphingobacterium siyangense
  REGION 1..137: note = tr|A0A420FH96|A0A420FH96_9SPHI 6-pyruvoyl tetrahydrobiopterin synthase OS=Sphingobacterium siyangense OX=459529 GN=BCY89_14075 PE=4 SV=1
MVFITRRERFCAAHKLYREDWSKEQNEQVFGLCSNPNWHGHNYDLYVTVKGKVNPETGFLIDLKIMKEIINRSIIDKVDHRNFNLDVDFMKGVMASTENIAIEIFKILKPLFDEQGVILHSVRLHETENNYVEYFGD

SEQ ID NO: 25708 - protein, 137 aa, Sphingobacterium sp.; identical to SEQ ID NO: 25707
  REGION 1..137: note = tr|A0A354KBP7|A0A354KBP7_9SPHI 6-carboxytetrahydropterin synthase OS=Sphingobacterium sp.; OX = 341027 GN=DCG88_22075 PE=4 SV=1

SEQ ID NO: 25709 - protein, 137 aa, Sphingobacterium sp.
  REGION 1..137: note = tr|A0A088EV53|A0A088EV53_9SPHI 6-pyruvoyl tetrahydrobiopterin synthase OS=Sphingobacterium sp. ML3W; OX = 1538644 GN=KO02_00755 PE=4 SV=1
MVYITRRERFCAAHKLYREDWSIEKNENVFGNCSNVNWHGHNYDLFVTVKGDVNPTTGFLIDLKLMKTIILEHIVNKVDHKNINLDVDFMKDKMASTENIAIAIFEVLKPLFEEEQVQLHCIRLHETENNYVEYFGD

SEQ ID NO: 25710 - protein, 137 aa, Sphingobacterium spiritivorum
  REGION 1..137: note = tr|D7VIY8|D7VIY8_9SPHI 6-pyruvoyl tetrahydropterin synthase/QueD family protein OS=Sphingobacterium spiritivorum ATCC 33861 OX=525373 GN=queD PE=4 SV=1
MIFITRRERFSAAHKLYREDWSSEQNENVFGKCSNPNWHGHNYELFVTVKGEVNPETGFLIDLKKMKEIILHHIIEKLDHRNVNLDVDFMKGKLASTEYMAIEIFNVLNPLFEEHNVILHSVKLVETENNYVEYFGN

SEQ ID NO: 25711 - protein, 137 aa, Sphingobacterium spiritivorum; identical to SEQ ID NO: 25710
  REGION 1..137: note = tr|A0A380C9M0|A0A380C9M0_9SPHI 6-pyruvoyl tetrahydropterin synthase/QueD family protein; OS = Sphingobacterium spiritivorum OX=258 GN=NCTC11388_02523; PE = 4 SV=1

SEQ ID NO: 25712 - protein, 150 aa, Sphingobacterium thalpophilum
  REGION 1..150: note = tr|A0A4U9US44|A0A4U9US44_9SPHI 6-pyruvoyl tetrahydropterin synthase/QueD family protein; OS = Sphingobacterium thalpophilum OX=259 GN=NCTC11429_01602; PE = 4 SV=1
MLKLSVNPYLCTIMVFITRRERFCAAHKLYREDWSDEQNEQVFGLCSNPNWHGHNYDLFVTVKGNVNPETGFLIDLKVMKEIINRSIIDKVDHRNFNLDVDFMQGVMASTENIAIEIFNILKPLFEQQCVSLHCVRLHETENNYVEYFGD

SEQ ID NO: 25713 - protein, 140 aa, Sphingobacterium wenxiniae
  REGION 1..140: note = tr|A0A1I6S0L1|A0A1I6S0L1_9SPHI 6-pyruvoyltetrahydropterin/6-carboxytetrahydropterin synthase OS=Sphingobacterium wenxiniae OX=683125; GN = SAMN05660206_10454 PE=4 SV=1
MILAERYHDISCGHRVVGHEGKCRFLHGHNYRVHFTVAAEQLDSVGRVVDFSVIKSTLCQWIEENLDHKFLIWEQDPLLQALQEINTESLVVVPFNPTAENIARYLVEDIGPEQLKDYSVRLIRCKVEETAKCSATYSLV

SEQ ID NO: 25714 - protein, 137 aa, Sphingobacterium wenxiniae
  REGION 1..137: note = tr|A0A1I6SEC8|A0A1I6SEC8_9SPHI 6-pyruvoyltetrahydropterin/6-carboxytetrahydropterin synthase OS=Sphingobacterium wenxiniae OX=683125; GN = SAMN05660206_104248 PE=4 SV=1
MVYITRRERFSAAHKLFREDWSQEQNEAVFGNCSNPNWHGHNYELFVTVKGKINPETGFVIDLKRMKQIMLIHVIDKLDHKNINLDVDFMQGKKASTEVIAVEIFKVLKEEFTKENVQLHAVKLYETENNYVEYFGD

SEQ ID NO: 25715 - protein, 137 aa, unidentified
  source 1..137: note = Sphingobacterium yanglingense
  REGION 1..137: note = tr|A0A4R6WDG5|A0A4R6WDG5_9SPHI 6-pyruvoyltetrahydropterin/6-carboxytetrahydropterin synthase OS=Sphingobacterium yanglingense OX=1437280; GN = CLV99_3726 PE=4 SV=1
MIYITRRERFCAAHKLHREDWSEEKNEAIFGYCSNPNWHGHNYELYVTVKGTVNPETGFLIDLKLMKSIINTQVIDKMDHKNINLDVDFMQGKMASTEIIAMEIYHVLKPHFEQENVQLHSVKLYETENNSVEYFGD

SEQ ID NO: 25716 - protein, 140 aa, unidentified
  source 1..140: note = Sphingobacterium yanglingense
  REGION 1..140: note = tr|A0A4R6W9H8|A0A4R6W9H8_9SPHI 6-pyruvoyltetrahydropterin/6-carboxytetrahydropterin synthase OS=Sphingobacterium yanglingense OX=1437280; GN = CLV99_3525 PE=4 SV=1
MITAERYHDISCGHRVVGHEGKCRYLHGHNYRIHFIVQADELDNVGRVVDFSVIKEKLCMWLEDNFDHKFLIWNEDPLLASLMEIAADSLVLVPFNPTAENIAKYLVEQIGPQQLAEHGCHLIKCKVEETQKCAASYTLA

SEQ ID NO: 25717 - protein, 122 aa, Sphingobium chlorophenolicum
  REGION 1..122: note = tr|F6EUE9|F6EUE9_SPHCR 6-carboxy-5,6,7,8-tetrahydropterin synthase OS=Sphingobium chlorophenolicum L-1 OX=690566 GN=Sphch_1925 PE=3 SV=1
MWELTKTFWFESAHTLHRSVETESSLRIHGHSYRAQVTVSGTPNPDTGMLIDLTLFEQSLAVARSALDHRMLDDVSGLGPPTLENLCAWIWRALSDNVPGLYRVEVFRDSQGDRCSYQEGSG

SEQ ID NO: 25718 - protein, 124 aa, Sphingobium fuliginis
  REGION 1..124: note = tr|A0A4V1W8M7|A0A4V1W8M7_SPHSA 6-carboxy-5,6,7,8-tetrahydropterin synthase OS=Sphingobium fuliginis (strain ATCC 27551) OX=336203 GN=EWH10_17835; PE = 3 SV=1
MFELSKQFRFDAAHTLDRVIETETSRRIHGHSYRAEVFVRGLPDPTTGMVVDLGLLQRTMEGARDALDHRFLDEINDLGPATMENLSRWIWNRLSPVIGNLHKVTVYRDSSGEACSYWGEEVVA

SEQ ID NO: 25719 - protein, 124 aa, Sphingobium lactosutens
  REGION 1..124: note = tr|T0HRK3|T0HRK3_9SPHN 6-carboxy-5,6,7,8-tetrahydropterin synthase OS=Sphingobium lactosutens DS20 OX=1331060 GN=RLDS_01010 PE=3 SV=1
MFELSKQFRFDAAHTLDRVIETESSRRIHGHSYRAEVFVRGLPDPTTGMVVDLGLLQRTMEGARDALDHRFLDEINDLGPATMENLSRWIWKRLSPVIGNLHKVTVYRDSSGEACSYWGEEVVA

SEQ ID NO: 25720 - protein, 156 aa, Sphingobium sp.
  REGION 1..156: note = tr|A0A2E9CUY2|A0A2E9CUY2_9SPHN 6-pyruvoyl tetrahydrobiopterin synthase OS=Sphingobium sp. OX=1912891; GN = CMN64_24715 PE=4 SV=1
MYSVTKTYDHNLGLAATFRQPKALSHCCNPHGYPLSFKLTFSAHTLDRDNWVIDFGGLKPIKQWLVDNFDHRMILAEHDPFLADFQALYEKCGFTPILVLPFVGCEGFAKFVYDRVDTWLGDAMPLECDIRGLRLVSVEVREHGANSAIYYGENNG

SEQ ID NO: 25721 - protein, 124 aa, unidentified
  source 1..124: note = Sphingomonadales bacterium
  REGION 1..124: note = tr|A0A1M3HP11|A0A1M3HP11_9SPHN 6-carboxy-5,6,7,8-tetrahydropterin synthase; OS = Sphingomonadales bacterium 63-6 OX=1895846; GN = BGO57_13620 PE=3 SV=1
MFELSKQFRFDAAHTLDRVIETESSRRIHGHSYRAEVFVRGRPDPATGMVVDLGLLQRTMEGARDALDHRFLDEINDLGPATMENLSRWIWNRLSPVIGNLHKVTVYRDSSGEACSFWGEEVAA

SEQ ID NO: 25722 - protein, 126 aa, unidentified
  source 1..126: note = Sphingomonadales bacterium
  REGION 1..126: note = tr|A0A5C7JVG9|A0A5C7JVG9_9SPHN 6-carboxy-5,6,7,8-tetrahydropterin synthase; OS = Sphingomonadales bacterium OX=1978525 GN=E6R12_02160; PE = 3 SV=1
MPFEITKSFSFDAAHQLGANVAPGHRYATVHGHSFEAELAFAGTPDPATGWIRDFDEINALVATLRATLDHSYLNDVPGLERPTLERLCQWLWERVKPQMPELVRVSVRRGSCREGCSYTGPDARA

SEQ ID NO: 25723 - protein, 184 aa, unidentified
  source 1..184: note = Sphingomonas ginsenosidivorax
  REGION 1..184: note = tr|A0A5C6UJJ4|A0A5C6UJJ4_9SPHN 6-carboxytetrahydropterin synthase OS=Sphingomonas ginsenosidivorax OX=862135 GN=FSB78_11280 PE=4 SV=1
MPRTTNAHDATTWHLISREIGIDAGHRVMDHGSKCHNLHGHRYRIEAWCRGPLFAAGEQNGMVLDFGFLKDEMMHAIDARFDHAFMLCVDDPLCRAMFGLDDGALSHRVAAAVSEDGLFLGHGRDGMQICVLAVVPTAENLAKLWFDLLAPRVVARTSGQASLVCLKVWETPNCWASYGPVIPG

SEQ ID NO: 25724 - protein, 122 aa, Sphingomonas koreensis
  REGION 1..122: note = tr|A0A1L6J8I0|A0A1L6J8I0_9SPHN 6-carboxy-5,6,7,8-tetrahydropterin synthase; OS = Sphingomonas koreensis OX=93064 GN=BRX40_06540 PE=3 SV=1
MLELSKQFRFDAAHTLDREIQAESSRRIHGHSYRAEITIRGWPDPRTGMILDLGEFERALEGARDALDHRFLDEINDLGPATMENLCLWIWRRLKPDIVALARVAVHRDSSGETCTFDGVEG

SEQ ID NO: 25725 - protein, 124 aa, Sphingomonas parapaucimobilis
  REGION 1..124: note = tr|A0A0A1W597|A0A0A1W597_9SPHN 6-carboxy-5,6,7,8-tetrahydropterin synthase; OS = Sphingomonas parapaucimobilis NBRC 15100 OX=1219049; GN = SP5_030_00040 PE=3 SV=1
MFELSKQFRFDAAHTLERVIDTESSRRIHGHSYRAEVTVRGRPDPVTGMIVDLGILEREMEDARDALDHRFLDEINDLGPATMENLCRWIWDRLRPTISNLSRVSVHRDSSGETCSYWGEEVAA

SEQ ID NO: 25726 - protein, 124 aa, Sphingomonas sanxanigenens
  REGION 1..124: note = tr|W0AEA4|W0AEA4_9SPHN 6-carboxy-5,6,7,8-tetrahydropterin synthase; OS = Sphingomonas sanxanigenens DSM 19645 = NX02 OX=1123269; GN = NX02_23060 PE=3 SV=1
MFELSKQFRFEAAHTLNRMIEAESSRRIHGHSYRAEVAVRGRPDPATGMIVDLGLLERAIAEAREALDHRFLDEVEDLGPATMENLSRWIWDRLRPSVASLTRVTVYRDSSGDACSYWGDAAAA

SEQ ID NO: 25727 - protein, 124 aa, Sphingomonas sp.
  REGION 1..124: note = tr|A0A1I3VQU5|A0A1I3VQU5_9SPHN 6-carboxy-5,6,7,8-tetrahydropterin synthase; OS = Sphingomonas sp. NFR04 OX=1566283 GN=SAMN03159338_2811; PE = 3 SV=1
MFELSKQFRFDAAHTLERSIDTESSRRIHGHSYRAEVTVRGRPDPFTGMIVDLGLLERSMEDARDALDHRFLDEINDLGPATMENLSRWIWDRLHPVVHNLHRVSVHRDSNGETCSYWGEEASA

SEQ ID NO: 25728 - protein, 79 aa, Sphingomonas sp.
  REGION 1..79: note = tr|A0A520HVX3|A0A520HVX3_SPHSX 6-carboxytetrahydropterin synthase (Fragment); OS = Sphingomonas sp. OX=28214 GN=EOP67_68170 PE=4 SV=1
MDHGSKCHNLHGHRYRIEAWCRGPLFAAGEQTGMVLDFGFLKDEMMRTIDARFDHAFMLCVDRAHHLVLQEPEIEHHPG

SEQ ID NO: 25729 - protein, 124 aa, unidentified
  source 1..124: note = Sphingomonas spermidinifaciens
  REGION 1..124: note = tr|A0A2A4B6V7|A0A2A4B6V7_9SPHN 6-carboxy-5,6,7,8-tetrahydropterin synthase; OS = Sphingomonas spermidinifaciens OX=1141889; GN = COC42_02980 PE=3 SV=1
MFELSKQFRFDAAHTLERSIDTESSRRIHGHSYRAEVAVRGRPDPVTGMIVDLGLLERSMEDARDALDHRFLDEINDLGPATMENLSRWIWDRLHPVVHNLHRVSVHRDSSGETCSYWGEEASA

SEQ ID NO: 25730 - protein, 124 aa, Sphingopyxis alaskensis
  REGION 1..124: note = tr|Q1GPS3|Q1GPS3_SPHAL 6-carboxy-5,6,7,8-tetrahydropterin synthase; OS = Sphingopyxis alaskensis (strain DSM 13593 / LMG 18877 / RB2256) OX=317655 GN=Sala_2644 PE=3 SV= 1
MFELSKQFRFDAAHTLERSIDTESSRRIHGHSYRAEVTVRGRPDPATGMIVDLGLLERSMEDARDALDHRFLDEINDLGPATMENLSRWIWNRLSPELDNLFKVSVYRDSSGDACTYWGEEVAA

SEQ ID NO: 25731 - protein, 124 aa, Sphingopyxis sp.
  REGION 1..124: note = tr|A0A0M8JFK4|A0A0M8JFK4_9SPHN 6-carboxy-5,6,7,8-tetrahydropterin synthase; OS = Sphingopyxis sp. C-1 OX=262667 GN=SC1_01431 PE=3 SV=1
MFELSKQFRFDAAHTLDRSIQTESSRRIHGHSYRAEVTVRGRPDPVTGMVVDLGVLEQMIENARDALDHRFLDEINDLGPATMENLSRWIWDRLHPAIANLHRVSVFRDSSGETCTFWGEEVAA

SEQ ID NO: 25732 - protein, 134 aa, unidentified
  source 1..134: note = Spiribacter aquaticus
  REGION 1..134: note = tr|A0A557RHF2|A0A557RHF2_9GAMM 6-carboxytetrahydropterin synthase OS=Spiribacter aquaticus OX=1935996 GN=FPL11_08130 PE=4 SV=1
MYSVNVRDHFMIAHSFQGETFGPAQALHGATYVTDATFFRDGLDDDNVVVDIARASTVLHDILSRYNLVNLDGLPEFEGVNTTTEFLARHIADALATAIHAGELGETARTLDRLRITLHESHIASAAYERSLQL

SEQ ID NO: 25733 - protein, 134 aa, unidentified
  source 1..134: note = Spiribacter curvatus
  REGION 1..134: note = tr|U5T4W1|U5T4W1_9GAMM Uncharacterized protein; OS = Spiribacter curvatus OX=1335757 GN=SPICUR_06785 PE=4; SV = 1
MYSVNVRDHFMIAHSFQGETFGPAQALHGATYVTDATFFRDRLDADNVVVDIARATDVLHRILGRYNLTNLDTLPAFEGVNTTTEHLARHIADTLAGAIHDGELGETARTLDRIRITLHESHIASAAYERPLQP

SEQ ID NO: 25734 - protein, 134 aa, unidentified
  source 1..134: note = Spiribacter salinus
  REGION 1..134: note = tr|A0A540VW92|A0A540VW92_9GAMM 6-carboxytetrahydropterin synthase OS=Spiribacter salinus; OX = 1335746 GN=FKY71_00190 PE=4 SV=1
MYSINVRDHFMIAHSFRGETFGPAQALHGATYVTDATFYREALDADGVVIDIALATEVLRATLGRYNLKNLDELPEFAGENTTTEFLARHIADALAQAIDRGELGESARTLDRLRITLHESHVASAAYERSLKG

SEQ ID NO: 25735 - protein, 155 aa, unidentified
  source 1..155: note = Spiribacter salinus
  REGION 1..155: note = tr|A0A540VPN2|A0A540VPN2_9GAMM 6-pyruvoyl tetrahydrobiopterin synthase OS=Spiribacter salinus; OX = 1335746 GN=FKY71_15380 PE=4 SV=1
MTYRSSKTYGHDVGLSACFRQHRADSHCNLLHGYALAVHLEFEADELDVRNWVVDFGSLKSFKQTLKDTFDHKLLVAEDDPMAWALQHLEKLELAEVIIVPATGCEAFAKLIYQYGEVWLKDYGYAPRVRMHSVTVREHGANAATYTGGQNDGQV

SEQ ID NO: 25736 - protein, 132 aa, unidentified
  source 1..132: note = Spiribacter sp.
  REGION 1..132: note = tr|A0A2U2N4Z9|A0A2U2N4Z9_9GAMM Uncharacterized protein OS=Spiribacter sp. E85 OX=2182432 GN=DEM34_05205; PE = 4 SV=1
MFSVNVRDHFMIAHSFRGEAFGPAQQLHGATYVVDATFQRAELDANGMVVDIARATDLLRGTLGALNLRNLDDEPAFAGHNTTTEFLARHVADRLADAVRAGQLGDGAQGLERIRVTLHESHVAWAAYERPL

SEQ ID NO: 25737 - protein, 140 aa, unidentified
  source 1..140: note = Spirobacillus cienkowskii
  REGION 1..140: note = tr|A0A369KQY7|A0A369KQY7_9PROT 6-carboxytetrahydropterin synthase OS=Spirobacillus cienkowskii OX=495820 GN=DCC88_01920 PE=4 SV=1
MLILKRYFSFCTSHRLYNPKFSDEKNFLIYGKCAGIHGHGHNYKLEVAITGKVDQETSMVFNLDLLKELVDKNIIEDVDHKHLNFDVPWLEGKIPTAEVFVDSIWERLNTAVERCNVNDIKLYAITLWETEFDAVTKTRD

SEQ ID NO: 25738 - protein, 306 aa, unidentified
  source 1..306: note = Spirobacillus cienkowskii
  REGION 1..306: note = tr|A0A369KR83|A0A369KR83_9PROT Uncharacterized protein OS=Spirobacillus cienkowskii OX=495820; GN = DCC88_01125 PE=4 SV=1
MQTKNLNTTKIFIQDVTLLDCAILYPSAGPKGKSWYVDITWEGFKDNNGVIFDFSLAKKSAKNTIDHEFDHKLLVNGNSIRFQSNTQTIVIENYKENLFFAINTYNNSVTRISKDTLAALDNNDFSLLEKEIAQSILRNSPKNVKSVTITLREHEHNKNPNYFSYTHSLCHHYGNCQRFHGHSNIIEVFENGNLNLEKSTFAAKKLNNSYIISRNYVVDSWNTKLIQDLVDYCPELLELKETVIAAQYKGTQGEVAIILPKENVFTLEQESTVENLAEFVYQLFSPQEQQIEIRAYEGLSKGAICF

SEQ ID NO: 25739 - protein, 130 aa, Spirochaeta perfilievii
  REGION 1..130: note = tr|A0A5C1Q9H0|A0A5C1Q9H0_9SPIO 6-carboxy-5,6,7,8-tetrahydropterin synthase OS=Spirochaeta perfilievii OX=252967 GN=EW093_05250 PE=3 SV=1
MINSASEVYMYFLKVESEFSAALYLSNCDDSYKGMHGHDFDVIVTLYSKELKDGMVYDYTQIKSSLNELAQSLDLVLLNDKPPFSELNPTVESIAKYFYDNLIEELEDLPIYEVEVIQTKGLSASFRPNV

SEQ ID NO: 25740 - protein, 143 aa, Spirochaeta sp.
  REGION 1..143: note = tr|A0A1W9N7V7|A0A1W9N7V7_9SPIO Uncharacterized protein OS=Spirochaeta sp. LUC14_002_19_P3 OX=1940821; GN = B0D92_05470 PE=4 SV=1
MYKVGVVGRFSAIHTLAGDVPEEEKHPHAHNYKLEWDIEVSQLDERGFSLDISMLEKIRDALFITVEGVNLNEHEYFKNKPVSLENLCEFVYKKLCTGLMQRLSGADLAKITAMEIRIWENSQAWAGTRREGEQIAERLQRSI

SEQ ID NO: 25741 - protein, 137 aa, Spirochaeta sp.
  REGION 1..137: note = tr|A0A2D7DKQ7|A0A2D7DKQ7_9SPIO 6-pyruvoyl tetrahydrobiopterin synthase OS=Spirochaeta sp. OX=28185; GN = CMN75_01030 PE=4 SV=1
MLVLRVTRTIHFSTSLRYWLEDESEEENRKRFGREADRHGHNYRLEITVAGEPDPQTGMVINLVDLKNVAEREIMSRFDHKDLNLDTDYFVSIPPTPEHFASLIFDLLNAALPEGLLDRIRLHVAHDYFVDVIGSGA

SEQ ID NO: 25742 - protein, 142 aa, Spirochaeta thermophila
  REGION 1..142: note = tr|E0RP28|E0RP28_SPITD 6-carboxy-5,6,7,8-tetrahydropterin synthase OS=Spirochaeta thermophila (strain ATCC 49972 / DSM 6192 / RI 19.B1); OX = 665571 GN=STHERM_c17560 PE =3 SV=1
MAPSYQGDERADKAVYVVRAEGTFAAAHYLSSYHGKCETLHGHNYRVRAYAAGRKLDEGGMVLDFGILKKALREVLARLDHTNLNDHPFFQENPSAERIATYVYEEMVKKLPGTPIWKVEVFETDENLAIYLPYGDTFPPLP

SEQ ID NO: 25743 - protein, 142 aa, Spirochaeta thermophila
  REGION 1..142: note = tr|G0GCL9|G0GCL9_SPITZ 6-carboxy-5,6,7,8-tetrahydropterin synthase OS=Spirochaeta thermophila (strain ATCC 700085 / DSM 6578 / Z-1203); OX = 869211 GN=Spith_1826 PE=3 S V=1
MAPSYQGDERADKAVYVVRAEGTFAAAHYLASYHGKCETLHGHNYRVRAYAAGRKLDEGGMVLDFGILKKALREVLARLDHTNLNDHPFFQDNPSAERIATYVYEEMVKKLPGTPIWKVEVFETDENLAVYLPYGDTLPPLP

SEQ ID NO: 25744 - protein, 126 aa, unidentified
  source 1..126: note = Spirochaetaceae bacterium
  REGION 1..126: note = tr|A0A2E9Q8E5|A0A2E9Q8E5_9SPIO 6-carboxy-5,6,7,8-tetrahydropterin synthase; OS = Spirochaetaceae bacterium OX=1898206 GN=queD PE=3 SV=1
MSQEVEIVKKYRFEAAHYLPNVPEGHKCRRMHGHSFRFELVLRGPVEPDTGWLIDFGDISKVVKPLIENHLDHYLLNEVEGLENPTSEQISIWLWNRIKPHLSALSEVVVHETCTARCIYRGPGDS

SEQ ID NO: 25745 - protein, 122 aa, unidentified
  source 1..122: note = Spirochaetaceae bacterium
  REGION 1..122: note = tr|A0A352ZDW7|A0A352ZDW7_9SPIO 6-carboxy-5,6,7,8-tetrahydropterin synthase; OS = Spirochaetaceae bacterium OX=1898206 GN=queD PE=3 SV=1
MYHIRVEAEFAAAHRIVHYNGKCERLHGHNYKVRVWVSGATLGDGGMLIDFAVVKNALKSLIAEKLDHRDLNEIREFEDDPSAERIAKYIFEQLSKALPDVPLSAIDVFETDASMARYVPDR

SEQ ID NO: 25746 - protein, 124 aa, unidentified
  source 1..124: note = Spirochaetae bacterium
  REGION 1..124: note = tr|A0A2N1TA96|A0A2N1TA96_9SPIR 6-carboxy-5,6,7,8-tetrahydropterin synthase; OS = Spirochaetae bacterium HGW-Spirochaetae-1 OX=2013832; GN = queD PE=3 SV=1
MYLLTIEDSFASAHQLRGYRGKCENLHGHNWKVELTVKGETLNGIGLLIDFHDLKKMLKEILSILDHKNINDVPPFDKENPSSENLAEFIAGLILEKLAEISPPIQLHSLTVWESDTSRCTYIP

SEQ ID NO: 25747 - protein, 117 aa, unidentified
  source 1..117: note = Spirochaetae bacterium
  REGION 1..117: note = tr|A0A2N1SZX3|A0A2N1SZX3_9SPIR 6-carboxy-5,6,7,8-tetrahydropterin synthase; OS = Spirochaetae bacterium HGW-Spirochaetae-10 OX=2013833; GN = queD PE=3 SV=1
MEIIKSFRFEAAHYLPKLPETHKCRRMHGHSFKFDVHVEGPLDPELGWVMDFGDISRLVKPLVEELDHYLLNEIPGLENPTSEVIAVWIWNRLKPDLSGLSRIVVYETCTARCEYRG

SEQ ID NO: 25748 - protein, 126 aa, unidentified
  source 1..126: note = Spirochaetales bacterium
  REGION 1..126: note = tr|A0A3N5S750|A0A3N5S750_9SPIR 6-carboxytetrahydropterin synthase QueD OS=Spirochaetales bacterium OX=2026792 GN=queD PE=4 SV=1
MYILTVEDSFASAHQLRGYSGKCENLHGHNWKVVVSVRGDTLNETGLLVDFGELKKILRIIIGDLDHRNLNEHPGFLSPNPSSENIAAYIARRFDIELAALPGPVALDSLTVWESDTSRCTYIPQR

SEQ ID NO: 25749 - protein, 126 aa, unidentified
  source 1..126: note = Spirochaetales bacterium
  REGION 1..126: note = tr|A0A524I9F7|A0A524I9F7_9SPIR 6-carboxytetrahydropterin synthase OS=Spirochaetales bacterium OX=2026792 GN=E4H36_14980 PE=4 SV=1
MHSLMVKKDFIASHFLIGGDWGNENKPHAHHYVLELILEGETLDHNNYLVDIVEVEAAMNELILGYKNRLLNDLEDFVGRNPSIELFSKILCTAMSGRIKDPRISALKAVLWENESAWAGYGIRRS

SEQ ID NO: 25750 - protein, 172 aa, unidentified
  source 1..172: note = Spirochaetes bacterium
  REGION 1..172: note = tr|A0A1G3Q470|A0A1G3Q470_9SPIR 6-carboxytetrahydropterin synthase QueD OS=Spirochaetes bacterium GWF1_49_6 OX=1802189 GN=A2014_07900 PE=4 SV=1
MPLFLSKDFKFDAAHSLVNYHGQCENLHGHTYKLRVTIQARSLPENGMILDFVDLSRIVKDEVVNKLDHHFINEIVSQSTAENIVLWIRDRLIGKLETDNYLLYEILLWETETSFATWRTDDAAGAQDGLEAGDAHGRASSAGAKDGLEAGDAHGRASSAGAKDGKEAADNG

SEQ ID NO: 25751 - protein, 129 aa, unidentified
  source 1..129: note = Spirochaetes bacterium
  REGION 1..129: note = tr|A0A1G3KS83|A0A1G3KS83_9SPIR Uncharacterized protein OS=Spirochaetes bacterium GWB1_27_13 OX=1802173; GN = A2Z98_10285 PE=4 SV=1
MFKTSVKRNFIAKHSLKGDFGKESKPHKHNYSVEWICVVEKLDDNDFGVDIALMEKILQGVSKKISNVFLNDMDFFKDKQTSIENMAIFFFNNLKNSLISQNYQFNRIKQMEIKIFENKNTYSSYIIDL

SEQ ID NO: 25752 - protein, 122 aa, unidentified
  source 1..122: note = Spirochaetia bacterium
  REGION 1..122: note = tr|A0A354G7M5|A0A354G7M5_9SPIR 6-carboxy-5,6,7,8-tetrahydropterin synthase; OS = Spirochaetia bacterium OX=2053615 GN=DC057_18985 PE=3; SV = 1
MDLTLYTEGFFDAAHFIKNHEGQCALLHGHTWKVSVWIRGTRDMLDSKGILWDFGNLKKIIQFFDHHNLNEILPVNPTAENLVIYIYEQLKKEYSYLLFKVRVYESVVSKQSYCDGGDSFVV

SEQ ID NO: 25753 - protein, 132 aa, unidentified
  source 1..132: note = Spirochaetia bacterium
  REGION 1..132: note = tr|A0A3D3ANZ2|A0A3D3ANZ2_9SPIR 6-carboxy-5,6,7,8-tetrahydropterin synthase; OS = Spirochaetia bacterium OX=2053615 GN=queD PE=3 SV=1
MYFLSVENHFSSAHQLREYKGKCENLHGHNWLVKLTVMGKELGHAGMLIDFKDLKAALKTVMEYLDHGFLNEIKPFDKINPSAENIACYIFEEMKTALSKKSSIITVYKVDIWESEKSCATYINPEAGFYHV

SEQ ID NO: 25754 - protein, 138 aa, unidentified
  source 1..138: note = Spirosoma endophyticum
  REGION 1..138: note = tr|A0A1I1LA62|A0A1I1LA62_9BACT 6-pyruvoyltetrahydropterin/6-carboxytetrahydropterin synthase OS=Spirosoma endophyticum OX=662367; GN = SAMN05216167_102168 PE=4 SV=1
MVYINRIEHFNAAHRLYNPAWSEERNKEVFGPCANANWHGHNFELIVTVKGEPDPDTGFVIDLKVLGEIIKNEVIEKVDHKNLNLDVDFMQGKMASCEIFIMEIWKILERALEPITEAHLHQLRLYETPKNFVDFFGE

SEQ ID NO: 25755 - protein, 143 aa, unidentified
  source 1..143: note = Spirosoma endophyticum
  REGION 1..143: note = tr|A0A1I2A3Q6|A0A1I2A3Q6_9BACT 6-carboxy-5,6,7,8-tetrahydropterin synthase OS=Spirosoma endophyticum OX=662367 GN=SAMN05216167_11359 PE=3 SV=1
MENTRADAPRVAVFRKEHFNAAHRLNNPNWSDEKNTRVYGKCNNPNYHGHNYELIVQVNGPIDPETGYVMDMKQLGEIVKEHVTDRFDHKNLNLDTEEFADLNPSAENIAIVIYNILRNQLSEGLDLKIRLYETERNFVEYPI

SEQ ID NO: 25756 - protein, 143 aa, unidentified
  source 1..143: note = Spirosoma fluviale
  REGION 1..143: note = tr|A0A286F7K3|A0A286F7K3_9BACT 6-pyruvoyltetrahydropterin/6-carboxytetrahydropterin synthase OS=Spirosoma fluviale OX=1597977; GN = SAMN06269250_0830 PE=4 SV=1
MDNFRASAPRVAVFRKEHFNAAHRLNNPNWSDEKNTRVYGKCNNPNYHGHNYELIVQVIGPVDDETGYVIDMKLLGDLIKEHVTDRFDHKNLNLDTEEFADLNPSAENIAIVIYNILRNQLNEGLDLKIRLYETERNFVEYPV

SEQ ID NO: 25757 - protein, 138 aa, unidentified
  source 1..138: note = Spirosoma fluviale
  REGION 1..138: note = tr|A0A286GDR9|A0A286GDR9_9BACT 6-pyruvoyltetrahydropterin/6-carboxytetrahydropterin synthase OS=Spirosoma fluviale OX=1597977; GN = SAMN06269250_4567 PE=4 SV=1
MVYINRIEHFNAAHRLYNPAWSEERNKEVFGPCANINWHGHNFELIVTVKGEPDPDTGFVIDLKLLGDIVRREVIEKVDHKNLNLDVDFMQGKMASCEIFIMEIWKILERALEPVTDAHLHQLRLYETPKNFVDYFGE

SEQ ID NO: 25758 - protein, 138 aa, Spirosoma linguale
  REGION 1..138: note = tr|D2QPF0|D2QPF0_SPILD Uncharacterized protein; OS = Spirosoma linguale (strain ATCC 33905 / DSM 74 / LMG 10896) OX=504472 GN=Slin_3450 PE=4 SV=1
MVYINRIEHFNAAHRLYNPAWSEERNKEVFGPCANINWHGHNFELIVTVKGEPDPNTGFVIDLKVLGDIIRREVIEKVDHKNLNLDVDFMQGKMASCEIFIMEIWKILERALEPVTDAHLHQLRLYETPKNFVDYFGE

SEQ ID NO: 25759 - protein, 143 aa, Spirosoma linguale
  REGION 1..143: note = tr|D2QJ42|D2QJ42_SPILD Uncharacterized protein; OS = Spirosoma linguale (strain ATCC 33905 / DSM 74 / LMG 10896) OX=504472 GN=Slin_1005 PE=4 SV=1
MDNSRASAPRVAVFRKEHFNAAHRLNNPNWSDEKNTRVYGKCNNPNYHGHNYELIVQVIGPIDDETGYVIDMKLLSDLIKEHVTDRFDHKNLNLDTEEFADLNPSAENIAIVIYNILRNQLSEGLDLKIRLYETERNFVEYPV

SEQ ID NO: 25760 - protein, 143 aa, unidentified
  source 1..143: note = Spirosoma montaniterrae
  REGION 1..143: note = tr|A0A1P9WXI4|A0A1P9WXI4_9BACT 6-pyruvoyl tetrahydrobiopterin synthase OS=Spirosoma montaniterrae; OX = 1178516 GN=AWR27_12395 PE=4 SV=1
MTTSWADAPRVAVFRKEHFNAAHRLNNPNWSDEKNARVYGKCNNPNYHGHNYELIVQVTGPVDPETGYVVDMKVLSDLIKEHVTDRFDHKNLNMDTEEFADLNPSAENIAIVIYNILRNQLSEGLDLKVKLYETERNFVEYPA

SEQ ID NO: 25761 - protein, 143 aa, unidentified
  source 1..143: note = Spirosoma montaniterrae
  REGION 1..143: note = tr|A0A1P9WT45|A0A1P9WT45_9BACT 6-pyruvoyl tetrahydrobiopterin synthase OS=Spirosoma montaniterrae; OX = 1178516 GN=AWR27_03590 PE=4 SV=1
MVYINRIEHFNAAHRLYNPAWSDERNREVFGPCANMNWHGHNFELIVTVKGQPNPDTGFVIDLKVLGDIIRREVIEKVDHKNLNLDVDFMQGKMASCEIFVMEIWKILDRALAEVSEAHGPTVGLHQLRLYETPKNFVDYFGE

SEQ ID NO: 25762 - protein, 138 aa, unidentified
  source 1..138: note = Spirosoma oryzae
  REGION 1..138: note = tr|A0A2T0SMU0|A0A2T0SMU0_9BACT 6-pyruvoyltetrahydropterin/6-carboxytetrahydropterin synthase OS=Spirosoma oryzae OX=1469603 GN=CLV58_116112; PE = 4 SV=1
MVYINRIEHFNAAHRLYNPNWSEEKNKEVFGPCANINWHGHNFELIVTVKGEPDPDTGFVIDLKVLGDIIKREVIEKVDHKNLNLDVEFMRGKMASCEIFIMEIWKILERALRDVSEAHLHQLRLYETPKNFVDYYGE

SEQ ID NO: 25763 - protein, 167 aa, unidentified
  source 1..167: note = Spirosoma oryzae
  REGION 1..167: note = tr|A0A2T0SM37|A0A2T0SM37_9BACT 6-pyruvoyltetrahydropterin/6-carboxytetrahydropterin synthase OS=Spirosoma oryzae OX=1469603 GN=CLV58_11791; PE = 4 SV=1
MTEIDVLIMTDAPPVDNTTVDAPQAATVRAEMPRVAVFRKEHFNAAHRLHNPNWSDEKNTRVYGKCNNPNYHGHNYELIVRVVGPIDAETGYVLDMKVLGDLIKAQVTDRFDHKNLNLDTAEFADLNPSAENIAIVIYNRLRSHLPETLDLSIKLYETERNFVEYPA

SEQ ID NO: 25764 - protein, 143 aa, unidentified
  source 1..143: note = Spirosoma pollinicola
  REGION 1..143: note = tr|A0A2K8YSU8|A0A2K8YSU8_9BACT 6-carboxy-5,6,7,8-tetrahydropterin synthase OS=Spirosoma pollinicola OX=2057025 GN=CWM47_02040 PE=3 SV=1
MDNSRASAPRVAVFRKEHFNAAHRLNNPNWSDEKNTRVYGKCNNPNYHGHNYELIVQVNGPIDPETGYVIDMKQLGSIIQEHVTDRFDHKNLNLDTEEFADLNPSAENIAIIIYNILRNKISEGLDLKIRLYETERNFVEYPI

SEQ ID NO: 25765 - protein, 138 aa, unidentified
  source 1..138: note = Spirosoma pollinicola
  REGION 1..138: note = tr|A0A2K8YW99|A0A2K8YW99_9BACT 6-carboxytetrahydropterin synthase QueD OS=Spirosoma pollinicola OX=2057025 GN=CWM47_08555 PE=4 SV=1
MVYINRVEHFNAAHRLYNPAWSEERNKEVFGPCANVNWHGHNFELIVTVKGQPDPDTGFVIDLKLLGDIVKREVIEKVDHKNLNLDVDFMQGKMASCEIFVMEIWKILERALEPVTDAHLHQLRLIETPKNFVDYFGE

SEQ ID NO: 25766 - protein, 144 aa, unidentified
  source 1..144: note = Spirosoma radiotolerans
  REGION 1..144: note = tr|A0A0E3ZY14|A0A0E3ZY14_9BACT 6-pyruvoyl tetrahydrobiopterin synthase OS=Spirosoma radiotolerans; OX = 1379870 GN=SD10_18215 PE=4 SV=1
MIDSRANAPRVAVFRKEHFNAAHRLNNPNWSDEKNTRVYGKCNNPNYHGHNYELIVQVTGPIDPETGYVIDMKLLGNLIQEHVTDRFDHKNLNLDTEEFADLNPSAENIAIVIYNLLRNQLSEGLDLKIRLYETERNFVEYPVY

SEQ ID NO: 25767 - protein, 138 aa, unidentified
  source 1..138: note = Spirosoma radiotolerans
  REGION 1..138: note = tr|A0A0E3V906|A0A0E3V906_9BACT 6-pyruvoyl tetrahydrobiopterin synthase OS=Spirosoma radiotolerans; OX = 1379870 GN=SD10_19315 PE=4 SV=1
MVYINRIEHFNAAHRLYNPAWSEERNKEVFGPCANLNWHGHNFELIVTVKGEPDPGTGFVIDLKLLGDIVKREVIEKVDHKNLNLDVDFMQGKMASCEIFIMEIWKILERALEPVTEAHLHQLRLYETPKNFVDYFGE

SEQ ID NO: 25768 - protein, 153 aa, Spirosoma sp.
  REGION 1..153: note = tr|A0A327NNG8|A0A327NNG8_9BACT 6-carboxytetrahydropterin synthase OS=Spirosoma sp. HMF3257 OX=2183553 GN=HMF3257_07160 PE=4 SV=1
MDTSGTDVPPPITLRANSPRVAVFRKEHFNAAHRLNNPNWSDEKNTRVYGKCNNPNYHGHNYELIVQVVGPIDPETGYVIDMKHLGDLMQKHVIDRFDHKNLNLDTDEFADLNPSAENIAIVIYTILRNQLSEGLDLKIRLYETERNFVEYPV

SEQ ID NO: 25769 - protein, 138 aa, Spirosoma sp.
  REGION 1..138: note = tr|A0A327NMF5|A0A327NMF5_9BACT 6-carboxytetrahydropterin synthase OS=Spirosoma sp. HMF3257 OX=2183553 GN=HMF3257_15205 PE=4 SV=1
MVYINRIEHFNAAHRLYNPAWSEERNKEVFGPCANINWHGHNFELIVTVKGEPDPDTGFVIDLKVLGDIIKREVIEKVDHKNLNLDVDFMQGKMASCEIFIMEIWKILERALEPITDAHLHQLRLIETPKNFVDYFGE

SEQ ID NO: 25770 - protein, 165 aa, Spongiibacter sp.
  REGION 1..165: note = tr|A0A2E9SRE3|A0A2E9SRE3_9GAMM 6-pyruvoyl tetrahydropterin synthase OS=Spongiibacter sp. OX=2024860; GN = CMN81_15735 PE=4 SV=1
  VARIANT 122: note = Xaa can be any naturally occurring amino acid
  VARIANT 138: note = Xaa can be any naturally occurring amino acid
MPIKRHTCIEISKEDLKFSAAHFTIFSASDRERLHGHNFRVSLDLTAEVGDDGMCFSYVEIKKRLRKLCATLDEYVLLPGQSPYLTIAEQGNYYCAHFNGEEMLFIKADTLVLPLRNTTVEXFARYLLERLLEDAPFXDGNEISSLVMKVSSGPGQWGSASWTRD

SEQ ID NO: 25771 - protein, 120 aa, Spongiibacter sp.
  REGION 1..120: note = tr|A0A2E2KDG9|A0A2E2KDG9_9GAMM 6-carboxy-5,6,7,8-tetrahydropterin synthase; OS = Spongiibacter sp. OX=2024860 GN=queD PE=3 SV=1
MEIFKEFSFEAAHRLPNVPEGHKCARLHGHSFQLRVVVGGEPDSHTGWIMDFGDIKQAIAPILDQLDHYYLNDIPGLENPTSENLSIWIWRALKPSLPALKRIEMRETCTSGCSYSGPEN

SEQ ID NO: 25772 - protein, 119 aa, unidentified
  source 1..119: note = Spongiibacteraceae bacterium
  REGION 1..119: note = tr|A0A2E7INN6|A0A2E7INN6_9GAMM 6-carboxy-5,6,7,8-tetrahydropterin synthase; OS = Spongiibacteraceae bacterium OX=2026793 GN=queD PE=3; SV = 1
MLVEVFKEFSFEAAHRLPQVPADHKCSRLHGHTFYVRLSVSGELNPDMGWLMDFADIKSAFQPIYDRLDHYYLNDIPGLENPTSENLAVWIWQELKPRLPQLSAVEIRETCTSGCIFRG

SEQ ID NO: 25773 - protein, 165 aa, unidentified
  source 1..165: note = Spongiibacteraceae bacterium
  REGION 1..165: note = tr|A0A2E7IMN5|A0A2E7IMN5_9GAMM 6-pyruvoyl tetrahydropterin synthase OS=Spongiibacteraceae bacterium; OX = 2026793 GN=CMN85_08795 PE=4 SV=1
MPVDTLTTIEISKEDLKFSAAHFTIFSATERERLHGHNFKVSLDITAEVGPNGLCFSYVEIKQRLRSLVAEYDEYMILPADSPYLRIEQDKTCYRAHFNGEELQFPLADTLLLPIRNTTVEEFARLLLERLLGDAEFIDGNGVRKLIMKVSSGPGQSGSASWEQD

SEQ ID NO: 25774 - protein, 138 aa, Sporocytophaga myxococcoides
  REGION 1..138: note = tr|A0A098LKB7|A0A098LKB7_9BACT 6-pyruvoyl tetrahydrobiopterin synthase OS=Sporocytophaga myxococcoides OX=153721 GN=MYP_4645 PE=4 SV=1
MIYVSRKEHFNAAHKLYNPNWSEEKNKEVFGPCANSNWHGHNFDLTVTVKGTPDPDTGFVIDLKKLSKIIRTEVVEKLDHKNLNLDVDFMLGKMASTEILAMEIWKILDKEIKSISKARLHCITLYETPRNFVEYYGE

SEQ ID NO: 25775 - protein, 136 aa, Sporocytophaga myxococcoides
  REGION 1..136: note = tr|A0A098LF51|A0A098LF51_9BACT 6-carboxy-5,6,7,8-tetrahydropterin synthase; OS = Sporocytophaga myxococcoides OX=153721 GN=MYP_2302 PE=3; SV = 1
MKTAVYRKEHFNAAHRLFVPEWSEEDNDALFGKCNNPNFHGHNYEVILKVTGETNPITGYVIDMKFLSDLVQEHVIKKFDHKNLNLDTEEFKNLNPTAENIAMVIWTKLRDKIDKKYDLKVILYETERNFVEYPAD

SEQ ID NO: 25776 - protein, 149 aa, Sporolactobacillus sp.
  REGION 1..149: note = tr|A0A4Q4IPD8|A0A4Q4IPD8_9BACL 6-carboxy-5,6,7,8-tetrahydropterin synthase; OS = Sporolactobacillus sp. THM7-4 OX=2511170 GN=queD PE=3; SV = 1
MDQEEPGSLKYHNKRVAVTKSFTFDAAHRLERYEGKCKNLHGHTYRLVVTISGYLNEIGMAMDFGDIKALFQSVIKAKLDHQYLNEVLPEMNTTAENMIVWIWQQLEMAMADRGYTAQGHRLEALRLFETPTSSAEIRREWMVDDENDR

SEQ ID NO: 25777 - protein, 163 aa, Sporolactobacillus sp.
  REGION 1..163: note = tr|A0A4Q4J6A7|A0A4Q4J6A7_9BACL 6-carboxytetrahydropterin synthase QueD; OS = Sporolactobacillus sp. THM7-7 OX=2511172 GN=queD PE=4; SV = 1
MDSKGGFFLKKESTAKHRGEATLAYHNKRVAVTKSFTFDAAHNLERYEGKCKNLHGHTYQLEITVSGYLNDIGMAVDFGEIKEMFRENIQAKLDHRYLNEVLPGMNTTAENVIVWIWEQLDRAMDARGLHDQGHRLESLRLYETPTSWATIHREWMIDHENDR

SEQ ID NO: 25778 - protein, 130 aa, Sporolituus thermophilus
  REGION 1..130: note = tr|A0A1G7NX02|A0A1G7NX02_9FIRM 6-carboxy-5,6,7,8-tetrahydropterin synthase OS=Sporolituus thermophilus DSM 23256 OX=1123285 GN=SAMN05660235_02755; PE = 3 SV=1
MRQPTVRTTKIFTFDAAHFLPGHQGKCANMHGHTYRLEVTVERKAGGVASGGPEDGMVIDFGRLNAIIKEQIIEKLDHKILNECFPFRPTSENMALYIFDYLNTALASDDVKVVRVVLWETPTSYAEVSV

SEQ ID NO: 25779 - protein, 125 aa, Sporomusa acidovorans
  REGION 1..125: note = tr|A0A259UQ03|A0A259UQ03_9FIRM 6-carboxy-5,6,7,8-tetrahydropterin synthase OS=Sporomusa acidovorans DSM 3132 OX=1123286 GN=queD PE=3 SV=1
MYELTIITEFEAAHQLPDYPGKCSRLHGHNWKVEVTVCGQELNHLGMVMDFKDLKAEVGKVVDTLDHYYLNDLPAFKSTNPTAEYIAKYIYDTLANNSVFQQGISIRCVQVWESPRSAVKYCPQE

SEQ ID NO: 25780 - protein, 125 aa, Sporomusa malonica
  REGION 1..125: note = tr|A0A1W2A4X1|A0A1W2A4X1_9FIRM 6-carboxy-5,6,7,8-tetrahydropterin synthase OS=Sporomusa malonica OX=112901 GN=SAMN04488500_10530 PE=3 SV=1
MYDLTIIAEFEAAHQLPDYPGKCCRLHGHNWKVEVTVTGHELNHLGMVMDFKELKTEVGKVIDNLDHYYLNDLPAFKTIPPTAENIAKYIYDTLANEPVFQKNITVRCVQVWESPRSAVKYCPHG

SEQ ID NO: 25781 - protein, 125 aa, Sporomusa silvacetica
  REGION 1..125: note = tr|A0A259UY32|A0A259UY32_9FIRM 6-carboxy-5,6,7,8-tetrahydropterin synthase OS=Sporomusa silvacetica DSM 10669 OX=1123289 GN=queD PE=3 SV=1
MYELTILAEFEAAHQLPDYPGKCCRLHGHNWKVEVTVAGHELNHLGMVMDFKDLKAEVGKVIDMLDHYFLNDLPAFKTMNPTAENIAKYIYDSLAEQSIFQQAIKIRCVQVWESPRSAVKYCPQG

SEQ ID NO: 25782 - protein, 125 aa, Sporomusa sp.
  REGION 1..125: note = tr|A0A0U1L4D5|A0A0U1L4D5_9FIRM 6-carboxy-5,6,7,8-tetrahydropterin synthase OS=Sporomusa sp. An4 OX=411922 GN=SpAn4DRAFT_0992 PE=3 SV=1
MYELTILAEFEAAHQLPDYPGKCSRLHGHNWKVEVTVAGHELNHLGMVMDFKDLKAEVGKVIDKLDHYYLNDLPAFKAMNPTAENIAKYIYDSLAKQSIFQQTIKIRCVQVWESPRSAVKYYPQN

SEQ ID NO: 25783 - protein, 125 aa, Sporomusa sp.
  REGION 1..125: note = tr|A0A562GRH6|A0A562GRH6_9FIRM 6-carboxy-5,6,7,8-tetrahydropterin synthase OS=Sporomusa sp. KB1 OX=943346 GN=Salpa_5323 PE=3 SV=1
MYELTILAEFEAAHQLPDYPGKCSRLHGHNWKVEVTVAGHELNHLGMVMDFKDLKAEVGKVIDKLDHYYLNDLPAFKAMNPTAENIAKYIYDSLAKQSSFQQTIKICCVQVWESPRSAVKYCPQG

SEQ ID NO: 25784 - protein, 125 aa, Sporomusa sphaeroides
  REGION 1..125: note = tr|A0A1U7MLZ6|A0A1U7MLZ6_9FIRM 6-carboxy-5,6,7,8-tetrahydropterin synthase OS=Sporomusa sphaeroides DSM 2875 OX=1337886 GN=queD PE=3 SV=1
MYDLTIIAEFEAAHQLPDYPGKCRRLHGHNWKVEVTVTGHELNHLGMVMDFKDLKAEVNKVIDSLDHYYLNDLPVFKTINPTAENIAKYIYDTLAENPVFQQNVKVRCIQVWESPRSAVKYCPQG

SEQ ID NO: 25785 - protein, 125 aa, Sporomusa termitida
  REGION 1..125: note = tr|A0A517DTG4|A0A517DTG4_9FIRM 6-carboxy-5,6,7,8-tetrahydropterin synthase OS=Sporomusa termitida OX=2377 GN=SPTER_19720 PE=3 SV=1
MYDLTIIAEFEAAHQLPDYPGKCCRLHGHNWKVEVTVYGHELNQLGMVMDFKELKAEVGKVIDNLDHYFLNDLPEFESVPPTAEHIAKYIYDTLAANPAFQHSIKVRSVQIWESPRSAVKYWPQG

SEQ ID NO: 25786 - protein, 131 aa, unidentified
  source 1..131: note = Sporomusaceae bacterium
  REGION 1..131: note = tr|A0A402BQC1|A0A402BQC1_9FIRM 6-carboxy-5,6,7,8-tetrahydropterin synthase; OS = Sporomusaceae bacterium OX=1917525 GN=SPFL3102_01418; PE = 3 SV=1
MYEITVVVEFEAAHRIVDYPGKCNRLHGHNWSIEVTVAGKQLNELGMLIDFRELKNEVNQVIGKLDHIYLNELEEFRVQNPTAENIACYIYSELKKKQIFGNAIIIRSVKVWESPKSAVTYSEDSIDDKCN

SEQ ID NO: 25787 - protein, 125 aa, unidentified
  source 1..125: note = Sporomusaceae bacterium
  REGION 1..125: note = tr|A0A3C0UDE3|A0A3C0UDE3_9FIRM 6-carboxy-5,6,7,8-tetrahydropterin synthase; OS = Sporomusaceae bacterium OX=1917525 GN=queD PE=3 SV=1
MSITKIFTFDSAHSLPGHKGNCANLHGHTYRLEVTVSTQNGGLVTGGSSEGMVMDFGDLKSIVNTEIIEQADHKLLNDVYDFRTTSENLADHYYHVLEEKLSPLGVEVCRIRLWESPTSYVEVGQ

SEQ ID NO: 25788 - protein, 158 aa, Sporosarcina globispora
  REGION 1..158: note = tr|A0A0M0GEP8|A0A0M0GEP8_SPOGL 6-pyruvoyl tetrahydrobiopterin synthase OS=Sporosarcina globispora; OX = 1459 GN=AF332_17330 PE=4 SV=1
MYGFRIVEKLQKINEDIKPEELKYHHKRVLVSKEFTFDSAHHLHCYEGKCKNLHGHTYKVIFGISGFVDERGLMIDFGDIKEIWKNEIEIFLDHKYLNETLPPMNTTAENMVVWIYEKMSESLRNRKEQYIGARVEFVRLFETPTSYAEARREWMEVE

SEQ ID NO: 25789 - protein, 145 aa, Sporosarcina pasteurii
  REGION 1..145: note = tr|A0A380C0D2|A0A380C0D2_SPOPA 6-carboxy-5,6,7,8-tetrahydropterin synthase; OS = Sporosarcina pasteurii OX=1474 GN=queD PE=3 SV=1
MMQQIYPVVPHDYAYEINKDFHFAAAHYVPSTDAGKCQHIHGHTYFANITIVGDTLDHSGFLVNFKTIKDLVHRRFDHRVLNKDAAFSDEDPSYFPTSEVIARTIYEIVQAHLDTLDNQPKCVQVFLRETPTSYCVYRPKEASSQ

SEQ ID NO: 25790 - protein, 141 aa, Sporosarcina psychrophila
  REGION 1..141: note = tr|A0A127VXR1|A0A127VXR1_SPOPS 6-carboxy-5,6,7,8-tetrahydropterin synthase; OS = Sporosarcina psychrophila OX=1476 GN=AZE41_09595 PE=3; SV = 1
MMQQFYPQVQHSYRFELNKDMHFSAAHFIPSEDAGKCQVMHGHTYYLNITIGGNELDSIGFLIDFKELKNLIHDKYDHSVLNDHPEFKNNFPTTEKLAEQVCKSIQEVLLTRNNKPVCLQVIVRETPTSYVIYRPEQEVVL

SEQ ID NO: 25791 - protein, 141 aa, Sporosarcina sp.
  REGION 1..141: note = tr|A0A135WAH2|A0A135WAH2_9BACL 6-carboxy-5,6,7,8-tetrahydropterin synthase; OS = Sporosarcina sp. HYO08 OX=1759557 GN=AU377_06690 PE=3; SV = 1
MMQQFYPQVQHNYRFELNKDMHFSAAHFIPNENAGKCQVMHGHTYFINVTIGGNELDELGFLIDFKQLKDLIHKKYDHSVLNDHPEFQQLYPTTERLAEQIWTSIQSVLRTKDNRPDCLQVIVRETPTSYVVYRPRQEELA

SEQ ID NO: 25792 - protein, 141 aa, Sporosarcina sp.
  REGION 1..141: note = tr|A0A5B0DJ39|A0A5B0DJ39_9BACL 6-carboxy-5,6,7,8-tetrahydropterin synthase; OS = Sporosarcina sp. ANT_H38 OX=2597358 GN=queD PE=3 SV=1
MMQQFYPQVQHSYRFELNKDIHFSAAHFIPSEDAGKCQVMHGHTYYLNITIGGNELDSIGFLIDFKELKNLIHDKYDHSVLNDHPEFTNNFPTTEKLAEQIGTSVQEVLQTRNNKPVCLQVIVRETPTSYVIYRPEQEVIL

SEQ ID NO: 25793 - protein, 289 aa, unidentified
  source 1..289: note = Stanieria cyanosphaera
  REGION 1..289: note = tr|K9Y0D5|K9Y0D5_STAC7 Uncharacterized protein; OS = Stanieria cyanosphaera (strain ATCC 29371 / PCC 7437); OX = 111780 GN=Sta7437_3920 PE=4 SV=1
MICIINRRAKFSASHRYWLPELNPEENQRLFGACSRFPGHGHNYVLYVSLKGELDRYGMVQNLSHVKQVIKKEVTSQLDYAYLNEVWSEFQQTLPTTENIARVIWQKLAPYLPLVNIQLFEHPELWADYQGNDMEASLTVKTHFSAAHRLALPNLSFEENTEIYGKCARPNGHGHNYHLEVTVTGEIDQRTGMLVDLGALQKIIDDYVIEPFDHTFLNKDIPYFAEVVPTAENIAVYITQLLQQPIQTLGAELDKVKLIESPNNSCEIYCRRSQQNVTFLQQQEPVVAV

SEQ ID NO: 25794 - protein, 289 aa, unidentified
  source 1..289: note = Stanieria sp.
  REGION 1..289: note = tr|A0A140K6H6|A0A140K6H6_9CYAN Uncharacterized protein OS=Stanieria sp. NIES-3757 OX=1807358; GN = STA3757_23310 PE=4 SV=1
MICIINRRAKFSASHRYWLPELNKEENQRLFGACSRFPGHGHNYVLYVSLIGELDHYGMVQNLSHVKQVIKQEVTSQLDYAYLNETWSEFQQTLPTTENIARVIWQKLSPYLPLVNIQLFEHPELWADYQGNDMEASLTVKTHFSAAHRLALPSLSFEENTEIYGKCARPNGHGHNYHLEVTVTGEIDSRTGMLVDLGALQTIIDDYVVEPFDHTFLNKDIPYFAEVVPTAENIAVYIAQVLQQPIQTLGAQLDKVKLIESPNNSCEIYCRRSQQNVTSLKQQEPVVTV

SEQ ID NO: 25795 - protein, 127 aa, unidentified
  source 1..127: note = Stanieria sp.
  REGION 1..127: note = tr|A0A140K477|A0A140K477_9CYAN 6-carboxy-5,6,7,8-tetrahydropterin synthase OS=Stanieria sp. NIES-3757 OX=1807358 GN=STA3757_15240 PE=3 SV=1
MEEWLIYKEFYFEAAHQLPHHDGKCRRLHGHSWVGRVYVKGDRLITNGSKQGMVIDYGDIKKYLQPLLDNFLDHYYLNETLSLESPTSEMVARWIFEKLETAGLPGLYAVEIRETCTSGCTYQKSNL

SEQ ID NO: 25796 - protein, 143 aa, Staphylococcus agnetis
  REGION 1..143: note = tr|A0A085UEZ8|A0A085UEZ8_9STAP 6-carboxy-5,6,7,8-tetrahydropterin synthase; OS = Staphylococcus agnetis OX=985762 GN=queD PE=3 SV=1
MLHQMYPQVSHNYIYELNKDFNFSAAHAICDKRAGKCERVHGHTYFVNLTIAGDVLDDLGFLVNFSTLKQLVHDQFDHHLLNDLPLFKGKSPSTEIVAETIYGIVSSHLATLPHQPQCVQVFLRETPSSYVVYRPKKKETPHG

SEQ ID NO: 25797 - protein, 142 aa, Staphylococcus agnetis
  REGION 1..142: note = tr|A0A2T4MID5|A0A2T4MID5_9STAP 6-pyruvoyl tetrahydrobiopterin synthase OS=Staphylococcus agnetis; OX = 985762 GN=BU590_06935 PE=4 SV=1
MSKFDNVTPPKQFAQHHKTILVLRHYEFTADARIFLSETAHHDLKDNRYLIDIELWSKTDDLGMAVDFRIIDNIYKTHLKPKLDGQLLNETLPDMNITLENLIYWFWDTLSAHLPEDVSLNAITMYETPEQGVRFTRDIMAQ

SEQ ID NO: 25798 - protein, 140 aa, unidentified
  source 1..140: note = Staphylococcus argensis
  REGION 1..140: note = tr|A0A2K4FB47|A0A2K4FB47_9STAP 6-pyruvoyl tetrahydropterin synthase OS=Staphylococcus argensis; OX = 1607738 GN=CD039_10505 PE=4 SV=1
MTKEMNHLNPPSQFQYRERNVILNLKYDFICDNRIYFTPTVHKDLLEHAYELAVHVQSPVNEMGLALDFNEVDAIFNQHVKPYLHQQLINETLPEMNTTAENIAMWIWDQFEAHLPDGNTLNQLELWETKDHSVILRKED

SEQ ID NO: 25799 - protein, 141 aa, unidentified
  source 1..141: note = Staphylococcus argensis
  REGION 1..141: note = tr|A0A2K4FDF6|A0A2K4FDF6_9STAP 6-carboxy-5,6,7,8-tetrahydropterin synthase; OS = Staphylococcus argensis OX=1607738 GN=queD PE=3 SV=1
MFQQMYPSINHKYSFELNKDFNFSAAHYIPSEDAGKCMRTHGHTYFVNLTIVGDELDHNGFLVNFSELKQLVHGQFDHHLLNDLPAFEGTSPSTEIVAQTVYEMVQEHLDQRDNQPKCAQVFVRETPTSYVRYIAKEFRHG

SEQ ID NO: 25800 - protein, 139 aa, unidentified
  source 1..139: note = Staphylococcus argenteus
  REGION 1..139: note = tr|A0A348B967|A0A348B967_9STAP 6-carboxy-5,6,7,8-tetrahydropterin synthase; OS = Staphylococcus argenteus OX=985002 GN=queD PE=3 SV=1
MLQQIYPSTTHPYQFELNKDFNFSAAHHIPCEEAGICQNVHGHTYFVNLTIVGDKLDDTGFLVNFSHLKKMIHGKFDHQLLNNLPAFKNKIPSTEIVAETIYQIVKEKLDMLEHQPKCIQVFVRETPTSYVVYRPKEQV

SEQ ID NO: 25801 - protein, 139 aa, unidentified
  source 1..139: note = Staphylococcus argenteus
  REGION 1..139: note = tr|A0A5B8L8G3|A0A5B8L8G3_9STAP 6-carboxy-5,6,7,8-tetrahydropterin synthase; OS = Staphylococcus argenteus OX=985002 GN=queD PE=3 SV=1
MLQQIYPSTTHPYQFELNKDFNFSAAHHIPCEEAGICQNVHGHTYFVNLTIVGDKLDDTGFLVNFSHLKKMIHGKFDHQLLNNLPAFKNKIPSTEIVAETIYQIVKENLDLLEHQPKCIQVFVRETPTSYVVYRPKEQV

SEQ ID NO: 25802 - protein, 141 aa, Staphylococcus arlettae
  REGION 1..141: note = tr|A0A2T7BWH0|A0A2T7BWH0_9STAP 6-carboxy-5,6,7,8-tetrahydropterin synthase; OS = Staphylococcus arlettae OX=29378 GN=queD PE=3 SV=1
MFQQNYPNVAHDYMYELNKDFNFSAAHYIPSEDAGKCMRTHGHTYFVNLTIAGDTLDHNGFLVNFSDLKQLVHGKFDHQLLNELPEFQGKSPSTEVVAHTIYELIQNALNQRTNQPQCLQVYVRETPTSYVVFRPKEHRNG

SEQ ID NO: 25803 - protein, 138 aa, Staphylococcus arlettae
  REGION 1..138: note = tr|A0A2T7BSF7|A0A2T7BSF7_9STAP 6-pyruvoyl tetrahydrobiopterin synthase OS=Staphylococcus arlettae; OX = 29378 GN=E4T73_09915 PE=4 SV=1
MNKFNNVQPPKQFQYKNQSVRIKNYYEFKCDNRIYFSQTKHIDLAMHTYKFDIEILSPIDDYGLALDFNVVDKIYKQYLAPYLDKQLLNETLPEMNTTAENIAFWIWEQFELNLPTGNTLKKLNFYENATQGLVLTNE

SEQ ID NO: 25804 - protein, 139 aa, Staphylococcus aureus
  REGION 1..139: note = tr|W8USN0|W8USN0_STAAU 6-carboxy-5,6,7,8-tetrahydropterin synthase; OS = Staphylococcus aureus OX=1280 GN=queD PE=3 SV=1
MLQQIYPSTTHPYQFELNKDFNFSAAHHIPCEEAGICQNVHGHTYFVNLTIVGDKLDDTGFLVNFSHLKKMIHGKFDHQLLNNLPAFKNKIPSTEIVAETIYQIVKENLASLEHQPKCIQVFVRETPTSYVVFRPKEQV

SEQ ID NO: 25805 - protein, 123 aa, Staphylococcus aureus
  REGION 1..123: note = tr|A0A5C8X2R9|A0A5C8X2R9_STAAU 6-carboxytetrahydropterin synthase QueD (Fragment); OS = Staphylococcus aureus OX=1280 GN=queD PE=4 SV=1
MLQQIYPSTTHPYQFELNKDFNFSAAHHIPCEEAGICQNVHGHTYFVNLTIVGDKLDDTGFLVNFSHLKKMIHGKFDHQLLNNLPAFKNKIPSTEIVAETIYQIVKENLASLEHQPKCIQVFV

SEQ ID NO: 25806 - protein, 141 aa, Staphylococcus auricularis
  REGION 1..141: note = tr|A0A2T4MEQ3|A0A2T4MEQ3_9STAP 6-carboxy-5,6,7,8-tetrahydropterin synthase; OS = Staphylococcus auricularis OX=29379 GN=queD PE=3 SV=1
MFQQMYPSVAHPYAFELNKDFNFSAAHYIPSEDAGKCMRTHGHTYFVNLTIAGDELDHNGFLVNFAELKSLVHGQFDHQLLNELPQFKDKSPSTEIVAQTIYHMVQSSLDQRDNQPHCVQVFVRETPSSYVVYRPKEQQHG

SEQ ID NO: 25807 - protein, 141 aa, Staphylococcus auricularis
  REGION 1..141: note = tr|A0A2T4MD22|A0A2T4MD22_9STAP 6-pyruvoyl tetrahydropterin synthase OS=Staphylococcus auricularis; OX = 29379 GN=BU607_00530 PE=4 SV=1
MDFKEIQPPKTMQYRQGHIVLKQQYNFTADNRIYFTETQHKDLHHHEYYLYVDVLSPINASGMGMDFNEIDAIYSQYVQPKLHQQLLNETLPDFNTTAENLALWLWDTFEQHLPNDNHVYRLQLYETPEHGVELNASLISD

SEQ ID NO: 25808 - protein, 139 aa, Staphylococcus capitis
  REGION 1..139: note = tr|A0A0S4MD60|A0A0S4MD60_STACP 6-carboxy-5,6,7,8-tetrahydropterin synthase; OS = Staphylococcus capitis OX=29388 GN=queD PE=3 SV=1
MLQQIYPSVEHPYQFELNKDFNFSAAHYIPCEDAGKCMRTHGHTYFVNITIAGDELDHNGFLVNFADLKKLIHNQFDHHLLNDLEPFKGKNPSTEIVAQTIYTMVKDYLSKRDNQPKCVQVFLRETPTSYVVYRPKDAQ

SEQ ID NO: 25809 - protein, 139 aa, Staphylococcus capitis
  REGION 1..139: note = tr|A0A4U9TF86|A0A4U9TF86_STACP 6-carboxy-5,6,7,8-tetrahydropterin synthase; OS = Staphylococcus capitis OX=29388 GN=queD PE=3 SV=1
MLQQIYPSVEHPYQFELNKDFNFSAAHYIPSKDAGKCMRTHGHTYFVNITIAGDKLDHNGFLVNFSDLKQLIHDQFDHYLLNDLEPFKGKSPSTEIVAQTIYTMVQDYLSNRDNQPKCVQVFLRETPTSYVVYRPKDAQ

SEQ ID NO: 25810 - protein, 139 aa, Staphylococcus caprae
  REGION 1..139: note = tr|C5QQ80|C5QQ80_9STAP 6-carboxy-5,6,7,8-tetrahydropterin synthase; OS = Staphylococcus caprae M23864:W1 OX=525378 GN=queD PE=3; SV = 1
MMQQIYPSVTHPYQFELNKDFNFSAAHYIPSEDAGKCMRTHGHTYFINITIAGDTLDHNGFLVNFSDLKKLIHDQFDHYLLNDLTPFKGKSPSTEIVAQTIYNMVQDYLSDRDNQPQCVQVYLRETPTSYVVYRPKEAK

SEQ ID NO: 25811 - protein, 145 aa, Staphylococcus carnosus
  REGION 1..145: note = tr|A0A3S0L429|A0A3S0L429_STACA 6-pyruvoyl tetrahydropterin synthase OS=Staphylococcus carnosus subsp. carnosus OX=147448 GN=CD154_01360 PE=4 SV=1
MNKDLSHIQPPTHFKYKESQTILKQSYEFKCDNRIYFSESAHQDLFDHSYRLYVDVLSPIGKFGLGLDFNEVDAIYNQFIKPKVDHQILNETLPDMNTTAENIAMWIWDEFEQHLPENHHMYELQLFETDRHGVSLNQDTMNIKK

SEQ ID NO: 25812 - protein, 141 aa, Staphylococcus carnosus
  REGION 1..141: note = tr|B9DK40|B9DK40_STACT 6-carboxy-5,6,7,8-tetrahydropterin synthase; OS = Staphylococcus carnosus (strain TM300) OX=396513; GN = Sca_0359 PE=3 SV=1
MLQQIYPSVSHPYAFELNKDFHFAAAHYIPCEDAGKCVRTHGHTYFVNLTIVGNELDHSGFLINFAYLKKQIHEQFDHYLLNDLPQFKDKMPSTEIVAQTIYKMTEEILEKQPNHPKCAQVYLRETPSSYVVYKGKEFRYG

SEQ ID NO: 25813 - protein, 142 aa, Staphylococcus chromogenes
  REGION 1..142: note = tr|A0A2T4LXW7|A0A2T4LXW7_STACR 6-pyruvoyl tetrahydrobiopterin synthase OS=Staphylococcus chromogenes; OX = 46126 GN=BU676_09395 PE=4 SV=1
MSKFDHVQAPKQFARHQKTILVLKHYEFTADARIFFNETAHHDLKDNRYLLDIELWSKTDELGMGVDFRVIDKIYKTHLAPHLEGQLLNDTLPDMNITLENMIHWIWEVFSTHLPDDLSLNAITMYETPEQGIRFTRDIMAQ

SEQ ID NO: 25814 - protein, 143 aa, Staphylococcus chromogenes
  REGION 1..143: note = tr|A0A2T4M0L1|A0A2T4M0L1_STACR 6-carboxy-5,6,7,8-tetrahydropterin synthase; OS = Staphylococcus chromogenes OX=46126 GN=queD PE=3 SV=1
MMHQTYPQVSHDYVFELNKDFNFSAAHAIPDARAGKCQRIHGHTYFVNLTIAGDQLDDLGFLVNFSTLKQLVHDQFDHYLLNDLAHFEGKSPSTEVVAQTIYEMVEAHLATLKHNPTCVQVFLRETPSSYVVYRPRKKEHQHG

SEQ ID NO: 25815 - protein, 141 aa, Staphylococcus cohnii
  REGION 1..141: note = tr|A0A3N0HTV9|A0A3N0HTV9_9STAP 6-carboxy-5,6,7,8-tetrahydropterin synthase; OS = Staphylococcus cohnii OX=29382 GN=queD PE=3 SV=1
MFQQNYPSVNHNYQFELNKDFNFSAAHYIPSEDAGKCMRTHGHTYFVNLTIGGDTVDHNGFLVNFSELKQLVHGQFDHQLLNDLPQFKGKSPSTEIVAQTIYEMVQSSLNQRPNKPQCLQVYVRETPTSYVIYRPKEPNHE

SEQ ID NO: 25816 - protein, 141 aa, Staphylococcus cohnii; identical to SEQ ID NO: 18092
  REGION 1..141: note = tr|A0A0M2P4V8|A0A0M2P4V8_STACC 6-carboxy-5,6,7,8-tetrahydropterin synthase; OS = Staphylococcus cohnii subsp. cohnii OX=74704; GN = UF66_2136 PE=3 SV=1

SEQ ID NO: 25817 - protein, 141 aa, Staphylococcus condimenti
  REGION 1..141: note = tr|A0A143PB47|A0A143PB47_9STAP 6-carboxy-5,6,7,8-tetrahydropterin synthase; OS = Staphylococcus condimenti OX=70255 GN=queD PE=3 SV=1
MLQQIYPSVSHPYAFELNKDFHFAAAHYIPCEDAGKCVRTHGHTYFVNLTIVGDDLDHSGFLINFAYLKKQIHEQFDHYLLNDLPQFKDEIPSTEIVAQTIYKMTEEILDKQPNHPKCAQVYLRETPSSYVVYKGKEFRNG

SEQ ID NO: 25818 - protein, 142 aa, Staphylococcus delphini
  REGION 1..142: note = tr|A0A2A4HE43|A0A2A4HE43_9STAP 6-pyruvoyl tetrahydrobiopterin synthase OS=Staphylococcus delphini; OX = 53344 GN=B4W69_01650 PE=4 SV=1
MSKFDHVQPPKHFARHHKTLIVTTRYQFTSDNRIYFSNTEHVDLENHTYTLEVELWSKTDEHGMAVDFKDIDKVYREHLEPLLDGQLINDTLPDMNTTVENIAHWIWLRFNEYLPEGVSLNTIALYETPEQGIKLTRNIMAQ

SEQ ID NO: 25819 - protein, 143 aa, Staphylococcus delphini
  REGION 1..143: note = tr|A0A2A4HDE1|A0A2A4HDE1_9STAP 6-carboxy-5,6,7,8-tetrahydropterin synthase; OS = Staphylococcus delphini OX=53344 GN=queD PE=3 SV=1
MMQQMYPQVDHDYMFELNKDFNFSAAHFIPDERAGKCTRVHGHTYFVNLTIGGDELDSMGFLINFSELKSLIHDQFDHYLLNDLVPFQGKSPSTEIVAQTIYDIVSARLAELPNAPKCLQVFLRETPTSYVVYRPKNKEQRHG

SEQ ID NO: 25820 - protein, 143 aa, Staphylococcus devriesei
  REGION 1..143: note = tr|A0A2K4DMC0|A0A2K4DMC0_9STAP 6-pyruvoyl tetrahydrobiopterin synthase OS=Staphylococcus devriesei; OX = 586733 GN=BUY42_10795 PE=4 SV=1
MTRDFSHIEAPKHFQYRSGDTILKQSYDFICDNRIYFSEEVYRDLSQHPYRLYVDILSPIGKYGLGLDFNDVDATYKQHIEPKLHHQLLNDTLPHMNTTAENIAMWIWDEFESQLPEGCQMYNLELFETERHGVSLNRSIMNN

SEQ ID NO: 25821 - protein, 139 aa, Staphylococcus devriesei
  REGION 1..139: note = tr|A0A2T4KB12|A0A2T4KB12_9STAP 6-carboxy-5,6,7,8-tetrahydropterin synthase; OS = Staphylococcus devriesei OX=586733 GN=queD PE=3 SV=1
MMQQIYPSVSHPYIFELNKDFNFSAAHYIPSEDAGKCMRTHGHTYFVNLTIAGDTLDHNGFLINFSELKKLIHDQFDHYLLNDLPHFKGKSPSTEIVAQTIYELVQSHLETYDNQPQCVQVYLRETPTSYVVYRPKEFK

SEQ ID NO: 25822 - protein, 141 aa, unidentified
  source 1..141: note = Staphylococcus edaphicus
  REGION 1..141: note = tr|A0A2C6WRK8|A0A2C6WRK8_9STAP 6-carboxy-5,6,7,8-tetrahydropterin synthase; OS = Staphylococcus edaphicus OX=1955013 GN=queD PE=3 SV=1
MFQQNYPSVQHPYQFELNKDFNFSAAHYIPSEDAGKCMRTHGHTYFVNLTIAGDTLDHNGFLVNFSELKQLVHGQFDHYLLNDLPQFEGKSPSTEIVAQTIYEMVQTSLDQRNNRPKCLQVYVRETPTSYVVYRPKEQHHE

SEQ ID NO: 25823 - protein, 142 aa, unidentified
  source 1..142: note = Staphylococcus edaphicus
  REGION 1..142: note = tr|A0A2C6WHE8|A0A2C6WHE8_9STAP 6-pyruvoyl tetrahydrobiopterin synthase OS=Staphylococcus edaphicus; OX = 1955013 GN=BTJ66_13075 PE=4 SV=1
MSKLDHIQPPQRFRYRESEVLIKNYYEFTCDNRIYFTQTVHKDLENQKYKFNIEILSSINKYGLALDFNEVDKLYKKEIAPYIEGQIVNETLPDINTTAENIAIWIWDQFNQHLPENNTLQKLEFFETETQGLVLTADLMNR

SEQ ID NO: 25824 - protein, 139 aa, Staphylococcus epidermidis
  REGION 1..139: note = tr|D4FNE1|D4FNE1_STAEP 6-carboxy-5,6,7,8-tetrahydropterin synthase; OS = Staphylococcus epidermidis M23864:W2(grey) OX=525375; GN = queD PE=3 SV=1
MQQIYPSVTHPYQFELNKDFNFSAAHYIPFEEAGKCIRTHGHTYYVNLTIAGNTLDKCGFLVNFRDLKKLVHEQFDHYLLNDLPAFKDKSPSTEIVAQTIYHIIQKELNQRENQPKCVQVYLRETPSSYVVYRPKEDQV

SEQ ID NO: 25825 - protein, 139 aa, Staphylococcus epidermidis
  REGION 1..139: note = tr|A0A3S4K4K7|A0A3S4K4K7_STAEP 6-carboxy-5,6,7,8-tetrahydropterin synthase; OS = Staphylococcus epidermidis OX=1282 GN=queD PE=3 SV=1
MIQQIYPTVNHPYQFELNKDFNFSAAHYIPSEDAGKCMRTHGHTYFVNITIAGDELDHNGFLVNFSDLKKLIHDQFDHYLLNDLVQFKGKSPSTEIVAQTIYQMVQSYLKDQKNQPKCVQVYLRETPTSYVVYRPKGDQ

SEQ ID NO: 25826 - protein, 142 aa, Staphylococcus equorum
  REGION 1..142: note = tr|A0A1E5THK7|A0A1E5THK7_9STAP 6-pyruvoyl tetrahydrobiopterin synthase OS=Staphylococcus equorum; OX = 246432 GN=ASS94_10040 PE=4 SV=1
MTNFDNVQPPQQFKYRDNDVCIKNYYEFTCNNRIYFTEKFHKDLENHLYKFNIEILSAIDDYGLAMDFNEVDKLYKKEIAPYLDGKLVNETLPDMNTTAENIAFWIWEQFDRLLPENNKLQKLEFFETETQGLVITSELMEK

SEQ ID NO: 25827 - protein, 141 aa, Staphylococcus equorum
  REGION 1..141: note = tr|A0A1B1G4R4|A0A1B1G4R4_9STAP 6-carboxy-5,6,7,8-tetrahydropterin synthase; OS = Staphylococcus equorum OX=246432 GN=ASS94_08545 PE=3; SV = 1
MFQQNYPNVQHPYSFELNKDFNFSAAHYIPSEDAGKCMRTHGHTYFVNLTIGGDTLDHNGFLVNFSDLKKLVHDQFDHHLLNDLPQFKGKSPSTEIVAQTIYEMVQTSLNERDNQPKCLQVYVRETPTSYVVYRPKESKYE

SEQ ID NO: 25828 - protein, 142 aa, Staphylococcus felis
  REGION 1..142: note = tr|A0A3E0INQ3|A0A3E0INQ3_9STAP 6-pyruvoyl tetrahydrobiopterin synthase OS=Staphylococcus felis; OX = 46127 GN=DOS83_08220 PE=4 SV=1
MAKFDHVRPPQHFARHHKTLLVIKHFTFICDNRIYFSETSYTDLENHKYRLEMEIWSKTDEHGLAVDFNMIDDIYNQHLRPLLDHQLLNDTLPDMNTTVENIAHWIWLRFNEQLPDNISLNSISLYETKNQGIKLTRNIMAQ

SEQ ID NO: 25829 - protein, 143 aa, Staphylococcus felis
  REGION 1..143: note = tr|A0A2K3Z2P4|A0A2K3Z2P4_9STAP 6-carboxy-5,6,7,8-tetrahydropterin synthase; OS = Staphylococcus felis OX=46127 GN=queD PE=3 SV=1
MMQQIYPSVDHDYMFELNKDFNFSAAHFIPDERAGKCQRVHGHTYFVNLTIAGDQLDELGFLINFSTLKSMIHDQFDHYLLNDLTAFKGKSPSTEVVAQTIYHIIEAHLSKLPNAPKCLQVFLRETPTSYVVYRPKHKEHPNG

SEQ ID NO: 25830 - protein, 143 aa, Staphylococcus fleurettii
  REGION 1..143: note = tr|A0A380FTD5|A0A380FTD5_9STAP 6-carboxy-5,6,7,8-tetrahydropterin synthase; OS = Staphylococcus fleurettii OX=150056 GN=queD PE=3 SV=1
MLQQIYPSVQHPYAFELNKDFNFSSAHYIPYEEAGKCENIHGHTYFVNLTIAGNELDKMGFLVNFSELKTLIHKRYDHRLLNDFEEFKDNSPSTEQVAQTIYNIVQESLDKRVNKPKCVQVFVRETPTSYVVYRPLKNGDNNA

SEQ ID NO: 25831 - protein, 81 aa, Staphylococcus fleurettii
  REGION 1..81: note = tr|A0A3A0HPF2|A0A3A0HPF2_9STAP 6-pyruvoyl tetrahydropterin synthase family protein (Fragment); OS = Staphylococcus fleurettii OX=150056 GN=BUY93_15785 PE=4; SV = 1
MFQLNYHNVQHPYSFELNKDFNFSAAHYISSEDAGKCMRTHGHTYFVNLTIGGDTLDHNGFLVNFSDLKKLVHDQFDHHLL

SEQ ID NO: 25832 - protein, 141 aa, Staphylococcus gallinarum
  REGION 1..141: note = tr|A0A3A0HBN4|A0A3A0HBN4_STAGA 6-pyruvoyl tetrahydrobiopterin synthase OS=Staphylococcus gallinarum; OX = 1293 GN=BUY97_01710 PE=4 SV=1
MNKFDHVQPPKTYQYRTNNVLIRNSFQFQCDNRIYFSETLHKDLKNQLYRFNVEILSPIDDYGLALDFNVVDKLYDEHIAPFLADQLLNDTLPAMNTTAENIAFWIWEQFEQYLPKGNTLYKLEFYENDRQGLVLTEAFMQ

SEQ ID NO: 25833 - protein, 141 aa, Staphylococcus gallinarum
  REGION 1..141: note = tr|A0A3A0VNZ3|A0A3A0VNZ3_STAGA 6-pyruvoyl tetrahydrobiopterin synthase OS=Staphylococcus gallinarum; OX = 1293 GN=BUZ14_01045 PE=4 SV=1
MSEFNHIQPPKTYQYRNNRVLIKNHFQFECDNRIYFSETFHKDLKNQQYRFNVEILSPIDDFGLALDFNIVDKLYDAHIAPFVAGQLLNDTLPTMNTTAENIAFWIWEQFEHSLPEDNKLYRMEFYENDRQGLVLTADLMQ

SEQ ID NO: 25834 - protein, 143 aa, Staphylococcus haemolyticus
  REGION 1..143: note = tr|A0A2S6DZ02|A0A2S6DZ02_STAHA 6-pyruvoyl tetrahydropterin synthase OS=Staphylococcus haemolyticus; OX = 1283 GN=CV015_04250 PE=4 SV=1
MSNRFNHIQPPNQFKYREGRTVLKQQYDFKCDNRIYFSEDIFRDLHNHSYRLYVDVLSPIGDYGLGLDFNEVDAIYNKVIEPKLNHQLINETLPDMNTTAENIAMWIWDEFEQHLPGEHCMYALQLFETDRHGVSLNRSIMKL

SEQ ID NO: 25835 - protein, 139 aa, Staphylococcus haemolyticus
  REGION 1..139: note = tr|A0A2A1K458|A0A2A1K458_STAHA 6-carboxy-5,6,7,8-tetrahydropterin synthase; OS = Staphylococcus haemolyticus OX=1283 GN=queD PE=3 SV=1
MIQQLYPSVAHPYSFELNKDFNFSAAHYIPSEDAGKCMRTHGHTYFVNLTIAGDKLDHNGFLINFSDLKKLIHDQFDHYLLNDLPQFKDKSPSTEVVAQTIYKMVQTHLQNCDNQPECVQVYLRETPTSYVVYRPKEYK

SEQ ID NO: 25836 - protein, 139 aa, Staphylococcus hominis
  REGION 1..139: note = tr|A0A533IWI7|A0A533IWI7_STAHO 6-carboxytetrahydropterin synthase QueD OS=Staphylococcus hominis OX=1290 GN=queD PE=4 SV=1
MIQQVYPTVNHPYTFELNKDFNFSAAHFIPSEDAGKCMRTHGHTYFVNLTIVGDALDHNGFLINFSELKRLVHDQFDHYLLNELPQFKDKSPSTEIVAQTIFEIVQAHLNEYDNKPKCVQVYLRETPSSYVVYRPKEIK

SEQ ID NO: 25837 - protein, 139 aa, Staphylococcus hominis
  REGION 1..139: note = tr|A0A1L8Y4R7|A0A1L8Y4R7_STAHO 6-carboxy-5,6,7,8-tetrahydropterin synthase; OS = Staphylococcus hominis OX=1290 GN=queD PE=3 SV=1
MIQQVYPTVNHPYTFELNKDFNFSAAHFIPSEDAGKCMRTHGHTYFVNLTIVGDTLDHNGFLINFSELKRLVHDQFDHYLLNDLPQFKDKSPSTEIVAQTIFEIVQAHLNEYDNKPKCVQVYLRETPSSYVVYRPKENK

SEQ ID NO: 25838 - protein, 142 aa, Staphylococcus hyicus
  REGION 1..142: note = tr|A0A0A8HMF4|A0A0A8HMF4_STAHY 6-pyruvoyl tetrahydrobiopterin synthase OS=Staphylococcus hyicus; OX = 1284 GN=BUZ57_00080 PE=4 SV=1
MAKFDNVKPPKKFARHHKTILVLRHYEFTADARIFLSETTFHDLKDNRYLIDIELWSKTDDLGMAVDFRIIDNIYKTHLQPKLDGQLLNETLPDMNITLENLIHWMWETLSVHLPEDVSLNAIAMYETPEQGVRFTRDIMAQ

SEQ ID NO: 25839 - protein, 139 aa, Staphylococcus hyicus
  REGION 1..139: note = tr|A0A4U9ZLQ4|A0A4U9ZLQ4_STAHY 6-carboxy-5,6,7,8-tetrahydropterin synthase; OS = Staphylococcus hyicus OX=1284 GN=queD PE=3 SV=1
MLQQIYPNTTHPYQFELNKDFNFSAAHHIPCEEAGICQNVHGHTYFVNLTIVGDKLDDTGFLVNFSHLKKMIHGKFDHQLLNNLPAFKNKIPSTEIVAETIYQIVKENLASLEHQPKCIQVFVRETPTSYVVFRPKEQV

SEQ ID NO: 25840 - protein, 139 aa, Staphylococcus intermedius
  REGION 1..139: note = tr|A0A380G8H3|A0A380G8H3_STAIN 6-carboxy-5,6,7,8-tetrahydropterin synthase; OS = Staphylococcus intermedius NCTC 11048 OX=1141106; GN = queD_1 PE=3 SV=1
MLQQFYPVAPHNFKYELNKDMQFAAAHFIDHVSAGKCQNVHGHTYFVNVTIVGNELMENGFLVNFQLLKQAVHGRYDHTLMNNHDEFRFNQEEPSTENVAKAIYKTLQEELKNYNNNPQVLQVIVRETPTSYVTYKEGY

SEQ ID NO: 25841 - protein, 143 aa, Staphylococcus intermedius
  REGION 1..143: note = tr|A0A380GAI6|A0A380GAI6_STAIN 6-carboxy-5,6,7,8-tetrahydropterin synthase; OS = Staphylococcus intermedius NCTC 11048 OX=1141106; GN = queD_2 PE=3 SV=1
MMQQMYPQVDHDYMFELNKDFNFSAAHFIPDERAGKCTRVHGHTYFVNLTIAGDELDSMGFLINFSELKSLIHDQFDHYLLNDLAPFQGKSPSTEFVAQTIYDIVSTRLAELPNAPKCLQVFLRETPTSYVVYRPKNKEQRHG

SEQ ID NO: 25842 - protein, 141 aa, Staphylococcus kloosii
  REGION 1..141: note = tr|A0A151A6Z1|A0A151A6Z1_9STAP 6-carboxy-5,6,7,8-tetrahydropterin synthase; OS = Staphylococcus kloosii OX=29384 GN=A0131_10175 PE=3 SV=1
MFQQNYPQVNHNYVFELNKDFNFSAAHYIPSEDAGKCMRTHGHTYFVNLTIAGNELDHNGFLVNFSDLKKLVHGSFDHQLLNELPMFKGKSPSTEVVAQTIYEIIQNNLDARSNKPHCLQVYVRETPTSYVVYRPKEHQNG

SEQ ID NO: 25843 - protein, 141 aa, Staphylococcus kloosii
  REGION 1..141: note = tr|A0A512QED3|A0A512QED3_9STAP Uncharacterized protein OS=Staphylococcus kloosii OX=29384 GN=SKL01_09830; PE = 4 SV=1
MSDIKNVHPPEQFKYKNSAVRIKNYFQFTCDNRIYFSKVKYIDLTNHLYKFDVEILSPIDELGLALDFNEVNKIYNEHIAPYLDKQLVNETLPTMNTTAENIALWIWDQFARALPKGNKLEKLTFFENETQGLVLTADDME

SEQ ID NO: 25844 - protein, 143 aa, Staphylococcus lentus
  REGION 1..143: note = tr|A0A178PF42|A0A178PF42_STALE 6-carboxy-5,6,7,8-tetrahydropterin synthase; OS = Staphylococcus lentus OX=42858 GN=queD PE=3 SV=1
MLQQIYPSVQHPYAFELNKDFNFSSAHYIPYEEAGKCHNVHGHTYFINLTIAGDELDKMGFLVNFSELKSLIHKRYDHRLLNDFEEFKDNSPSTEQVAQTIYNIVQESLDNRDNKPKCVQVFVRETPTSYVVYRPVKQGENNA

SEQ ID NO: 25845 - protein, 139 aa, Staphylococcus lugdunensis
  REGION 1..139: note = tr|A0A133Q1E0|A0A133Q1E0_STALU 6-carboxy-5,6,7,8-tetrahydropterin synthase; OS = Staphylococcus lugdunensis OX=28035 GN=queD PE=3 SV=1
MLQQIYPSVSHPYQFELNKDFNFSAAHFIPCKDAGKCVRTHGHTYFVNLTIAGDTLDHNGFLINFQELKALIHDQFDHYLLNDLPHFKDQSPSTEIVAQTIYNMIENHLMQYTNRPHCVQVYLRETPTSYVVYRPKVQH

SEQ ID NO: 25846 - protein, 146 aa, Staphylococcus lugdunensis
  REGION 1..146: note = tr|A0A133Q4X8|A0A133Q4X8_STALU Uncharacterized protein OS=Staphylococcus lugdunensis OX=28035; GN = HMPREF3225_01424 PE=4 SV=1
MYNDISEVQLPQQFKYGSQQDIVVRSYYQFTADNRIYFDAHHYRDLIDHEYRLTIDIQSPVNAYGLAIDFFDIDEIYYQYIHPKLDGQLINNTLILMNTTAENIANWLWEQFKHHLPSGHHICRLELAETAQHSVILDSRLNYKRV

SEQ ID NO: 25847 - protein, 143 aa, Staphylococcus lutrae
  REGION 1..143: note = tr|A0A1W6BN97|A0A1W6BN97_9STAP 6-carboxy-5,6,7,8-tetrahydropterin synthase; OS = Staphylococcus lutrae OX=155085 GN=queD PE=3 SV=1
MMQQIYPQVAHDYIYELNKDFNFSAAHFIPDERAGKCMRVHGHTYFVNLTIGGDKLNSMGFLINFSTLKSLIHDRFDHYLLNDLVDFQGKSPSTEVVAHTIYEIVAAHLEQLPNAPQCLQVFLRETPTSYVVYRPKRQEHHHG

SEQ ID NO: 25848 - protein, 137 aa, Staphylococcus massiliensis
  REGION 1..137: note = tr|K9B8D2|K9B8D2_9STAP 6-pyruvoyl tetrahydrobiopterin synthase OS=Staphylococcus massiliensis S46 OX=1229783 GN=C273_01988 PE=4 SV=1
MSRLDGIKAPSQFEIHAEPVTVEQHFTFHADNRIFFSDTAYKDLFHHEYTFVLSLKALTSKLGIAVDFHEIDRIYRDYLEPKLNDVCLNTTLPEMNTTVENIGYWIREQFKQYLPDGVGIEQLTIYETPKHAVILKG

SEQ ID NO: 25849 - protein, 141 aa, Staphylococcus massiliensis
  REGION 1..141: note = tr|K9B156|K9B156_9STAP 6-carboxy-5,6,7,8-tetrahydropterin synthase; OS = Staphylococcus massiliensis S46 OX=1229783; GN = C273_05080 PE=3 SV=1
MFQQMYPSTNHPYQFELNKDFNFSSAHYIPSEDAGKCMRTHGHTYFVNLTIAGDELDDTGFLVNFSALKALVHDQFDHQLLNDLDIFHGKSPSTEMVAKTIYDMVAEYLRKRPNQPKCVQVFVRETPTSYVIYRPKDVEHG

SEQ ID NO: 25850 - protein, 142 aa, Staphylococcus microti
  REGION 1..142: note = tr|A0A0D6XSA1|A0A0D6XSA1_9STAP 6-carboxy-5,6,7,8-tetrahydropterin synthase; OS = Staphylococcus microti OX=569857 GN=queD PE=3 SV=1
MMQQIYPSVDHPYTFELNKDFNFSAAHYIPAPEAGKCMRTHGHTYFVNLTIGGDALDETGFLINFSHLKALIHDQFDHYLLNDLPLFEGKSPSTEVVAQTIYEIVADHLKDLPHAPKCLQVFLRETPSSYVVYRPKHKKEQL

SEQ ID NO: 25851 - protein, 141 aa, Staphylococcus muscae
  REGION 1..141: note = tr|A0A240CB73|A0A240CB73_9STAP 6-pyruvoyl tetrahydrobiopterin synthase OS=Staphylococcus muscae; OX = 1294 GN=SAMEA4412661_01938 PE=4 SV=1
MSQFDHLQAPRTFAYRQSSVHVIKHYQFTCDNRIYFTETAHVDLSNHTYHLELSLQATTNAQGIAVDFHHIDKLYHTHLSPYLDGQLLNETLPEMSTTAENIAYWIWEQLTGVLPHDVSLHTLVLYEKPEQGVKLTHDMLS

SEQ ID NO: 25852 - protein, 142 aa, Staphylococcus muscae
  REGION 1..142: note = tr|A0A240BX07|A0A240BX07_9STAP 6-carboxy-5,6,7,8-tetrahydropterin synthase; OS = Staphylococcus muscae OX=1294 GN=queD PE=3 SV=1
MMQQIYPSIDHPYTFELNKDFNFSAAHYIPAPEAGKCMRTHGHTYFVNLTIGGDALDDTGFLINFSHLKALIHDQFDHYLLNDLPLFEGKSPSTEVVAQTIYEIVENHLAELPHNPKCLQVFLRETPSSYVVYRPKRVKEHK

SEQ ID NO: 25853 - protein, 143 aa, Staphylococcus nepalensis
  REGION 1..143: note = tr|A0A291JNY2|A0A291JNY2_9STAP 6-pyruvoyl tetrahydrobiopterin synthase OS=Staphylococcus nepalensis; OX = 214473 GN=BJD96_01900 PE=4 SV=1
MTNFENVQPPKQFKYRSNAVLIKNYYEFTCDNRIYFTQTVHKDLANQRSQFNIEILSQIDDYGLALDFNEVDKIYKSKIATYLDGQLINEALPPMNTTAENIAFWIWEQFEQFLPENNTLQKLEFFENETQGLVLTRERMEAN

SEQ ID NO: 25854 - protein, 141 aa, Staphylococcus nepalensis; identical to SEQ ID NO: 19382
  REGION 1..141: note = tr|A0A291JN84|A0A291JN84_9STAP 6-carboxy-5,6,7,8-tetrahydropterin synthase; OS = Staphylococcus nepalensis OX=214473 GN=queD PE=3 SV=1

SEQ ID NO: 25855 - protein, 139 aa, Staphylococcus pasteuri
  REGION 1..139: note = tr|A0A0M2NNW7|A0A0M2NNW7_9STAP 6-carboxy-5,6,7,8-tetrahydropterin synthase; OS = Staphylococcus pasteuri OX=45972 GN=UF70_0400 PE=3 SV=1
MLQQIYPSVSHPYQFELNKDFNFSAAHYIPSEDAGKCMRTHGHTYFVDITIVGDELDHNGFLVNFSDLKQLIHGQFDHYLLNDLVEFKGKSPSTEIVAQTIYQMVQSYLNEQDNNPKCVQVYLRETPTSYVVFRPKDEQ

SEQ ID NO: 25856 - protein, 139 aa, Staphylococcus pasteuri; identical to SEQ ID NO: 25825
  REGION 1..139: note = tr|A0A269XJI3|A0A269XJI3_9STAP 6-carboxy-5,6,7,8-tetrahydropterin synthase; OS = Staphylococcus pasteuri OX=45972 GN=B8W95_05075 PE=3; SV = 1

SEQ ID NO: 25857 - protein, 139 aa, unidentified
  source 1..139: note = Staphylococcus petrasii
  REGION 1..139: note = tr|A0A5F1B318|A0A5F1B318_9STAP 6-carboxy-5,6,7,8-tetrahydropterin synthase; OS = Staphylococcus petrasii subsp. petrasii OX=1276937; GN = queD PE=3 SV=1
MFQQIYPQVNHPYSFELNKDFNFSAAHFIPSEDAGKCMRTHGHTYFVNLTIAGDTLDHNGFLINFSDLKKLIHDQFDHYLLNDLPQFKGKSPSTEIVAQTIYDIVESHLQTYDNQPHCVQVYLRETPSSYVVYRPKEFK

SEQ ID NO: 25858 - protein, 139 aa, unidentified; identical to SEQ ID NO: 25857
  source 1..139: note = Staphylococcus petrasii
  REGION 1..139: note = tr|A0A380G2C1|A0A380G2C1_9STAP 6-carboxy-5,6,7,8-tetrahydropterin synthase; OS = Staphylococcus petrasii subsp. jettensis OX=1077965; GN = queD PE=3 SV=1

SEQ ID NO: 25859 - protein, 141 aa, Staphylococcus pettenkoferi
  REGION 1..141: note = tr|A0A2N6QLN2|A0A2N6QLN2_9STAP 6-carboxy-5,6,7,8-tetrahydropterin synthase; OS = Staphylococcus pettenkoferi OX=170573 GN=queD PE=3 SV=1
MFQQMYPSINHKYSFELNKDFNFSAAHYIPSEDAGKCMRTHGHTYFVNLTIVGDELDHNGFLVNFSELKQLVHGQFDHHLLNDLPAFEGQSPSTEIVAQTVYDMVQEHLDQRDNQPKCAQVFVRETPTSYVRYIAKEFRHG

SEQ ID NO: 25860 - protein, 141 aa, Staphylococcus piscifermentans
  REGION 1..141: note = tr|A0A239UFW7|A0A239UFW7_9STAP 6-carboxy-5,6,7,8-tetrahydropterin synthase; OS = Staphylococcus piscifermentans OX=70258 GN=queD PE=3; SV = 1
MLQQIYPSVSHPYAFELNKDFHFAAAHYIPCEDAGKCVRTHGHTYFVNLTIVGDELDHSGFLINFAYLKKQIHEQFDHYLLNDLPQFKDKMPSTEVVAQTICKMAEEILEQQPNHPKCAQVYLRETPSSYVVYRPKEFRNG

SEQ ID NO: 25861 - protein, 142 aa, Staphylococcus piscifermentans
  REGION 1..142: note = tr|A0A431YY25|A0A431YY25_9STAP 6-pyruvoyl tetrahydrobiopterin synthase OS=Staphylococcus piscifermentans OX=70258 GN=CD125_09585 PE=4 SV=1
MTNFDNVQPPQQFKYRDNDVCIKNYYEFTCNNRIYFTEKFHKDLENHLYKFNIEILSAIDDYGLAMDFNEVDKLYKKEIEPYLDGKLVNETLPDMNTTAENIAFWIWEQFDRLLPENNKLQKLEFFETETQGLVITSELMEK

SEQ ID NO: 25862 - protein, 38 aa, Staphylococcus pseudintermedius
  REGION 1..38: note = tr|A0A317YP85|A0A317YP85_STAPS 6-carboxytetrahydropterin synthase QueD (Fragment); OS = Staphylococcus pseudintermedius OX=283734; GN = DD902_14525 PE=4 SV=1
YQIVKENLASLEHQPKCIQVFVRETPTSYVVFRPKEQV

SEQ ID NO: 25863 - protein, 143 aa, Staphylococcus pseudintermedius
  REGION 1..143: note = tr|A0A1B1P3D3|A0A1B1P3D3_STAPS 6-carboxy-5,6,7,8-tetrahydropterin synthase; OS = Staphylococcus pseudintermedius OX=283734 GN=queD PE=3; SV = 1
MMQQMYPQVDHDYMFELNKDFNFSAAHFIPDERAGKCTRVHGHTYFVNLTIGGDELDSMGFLINFSELKSLIHDQFDHYLLNDLVPFQGKSPSTEIVAQTIYDIVSARLAELPNAPKCLQVFLRETPTSYVIYRPKKKEQRHG

SEQ ID NO: 25864 - protein, 142 aa, Staphylococcus rostri
  REGION 1..142: note = tr|A0A2K3YS27|A0A2K3YS27_9STAP 6-carboxy-5,6,7,8-tetrahydropterin synthase; OS = Staphylococcus rostri OX=522262 GN=queD PE=3 SV=1
MMQQIYPSVEHPYTFELNKDFNFSAAHYIPAPEAGKCMRTHGHTYFVNLTIGGDALDDTGFLINFSHLKALIHDQFDHYLLNDLPMFEGKSPSTEVVAQTIYDIVADHLKDLPHAPKCLQVFLRETPSSYVVYRPKRTKEHM

SEQ ID NO: 25865 - protein, 139 aa, Staphylococcus saccharolyticus
  REGION 1..139: note = tr|A0A431YT17|A0A431YT17_9STAP 6-carboxy-5,6,7,8-tetrahydropterin synthase; OS = Staphylococcus saccharolyticus OX=33028 GN=queD PE=3; SV = 1
MIQQIYPSVSHPYQFELNKDFNFSAAHYIPSEDAGKCMRTHGHTYFVNITIVGDELDHNGFLVNFSDLKQLIHGQFDHYLLNDLVEFKGKSPSTEIVAQTIYQMVQSYLNEQDNNPKCVQVYLRETPTSYVVFRPKDEQ

SEQ ID NO: 25866 - protein, 139 aa, Staphylococcus saccharolyticus
  REGION 1..139: note = tr|A0A380H9N7|A0A380H9N7_9STAP 6-carboxy-5,6,7,8-tetrahydropterin synthase; OS = Staphylococcus saccharolyticus OX=33028 GN=queD PE=3; SV = 1
MMQQIYPSVTHPYQFELNKDFNFSAAHYIPCEDAGICIRTHGHTYFVNLTIAGDSLDHNGFLVNFSDLKKLVHDQFDHYLLNDLALFKDKRPSTEVVAQTIYQIVQNNLNNKANQPQCVQVYLRETPTSYVVFRPKDKQ

SEQ ID NO: 25867 - protein, 142 aa, Staphylococcus saprophyticus
  REGION 1..142: note = tr|Q4A0G7|Q4A0G7_STAS1 Putative 6-pyruvoyl tetrahydrobiopterin synthase OS=Staphylococcus saprophyticus subsp. saprophyticus (strain ATCC 15305 / DSM 20229 / NCIMB 8 711 / NCTC 7292 / S-41) OX=342451; GN = SSP0291 PE=
MSKFDHIQPPDHFRYKEGEVLIKNYYEFTCDNRIYFTQTVHKDLENQTYKFNIEILSSIDAYGLAMDFNEVDKLYEREIAPYIDGQLVNETLPEMNTTAENIAIWIWHQFNKHLPENNSLQKLEFFETDTQGLVLTTELMDK

SEQ ID NO: 25868 - protein, 142 aa, Staphylococcus saprophyticus
  REGION 1..142: note = tr|A0A4Y9KRS1|A0A4Y9KRS1_STASA 6-pyruvoyl tetrahydrobiopterin synthase OS=Staphylococcus saprophyticus OX=29385 GN=E4T75_02125 PE=4 SV=1
MTKFDHIQPPGQFKYRNGQVLIKNCYKFTCDNRIYFTNTVHKDLEDQQYQFNIEILSDIDKYGLALDFNEVDKLYQTEIEPYLDGQLVNDTLPEMNTTAENIAIWIWEQFEKSLPKETQLQKLEFFETASQGLVLTTNLMKH

SEQ ID NO: 25869 - protein, 143 aa, Staphylococcus schleiferi
  REGION 1..143: note = tr|A0A0K1A8F0|A0A0K1A8F0_9STAP 6-carboxy-5,6,7,8-tetrahydropterin synthase; OS = Staphylococcus schleiferi OX=1295 GN=queD PE=3 SV=1
MMQQIYPSVNHDYTYELNKDFNFSAAHFIPDERAGKCMRVHGHTYFVNITIAGDALDELGFLINFSELKSLIHDKFDHYLLNDLTHFQGKSPSTEIVAQTIYEIVAEHLKDLPHAPKCLQIFLRETPTSYVVYRPKKQEPNHG

SEQ ID NO: 25870 - protein, 142 aa, Staphylococcus schleiferi
  REGION 1..142: note = tr|A0A0K0ZS83|A0A0K0ZS83_9STAP 6-pyruvoyl tetrahydrobiopterin synthase OS=Staphylococcus schleiferi; OX = 1295 GN=SSCHL_0464 PE=4 SV=1
MTKFDHVRPPQHFARHHKTLIVIKRYAFTCDNRVYFSDTRYVDLEQHTYQLEVELWSKTDDQGMAVDFKEIDAVYNHYLAPKLEGQLINDTLPEMNTTVENIAHWIWQQFHAHLPEGVSLNTITLFETPDQGTKLTRNIMAQ

SEQ ID NO: 25871 - protein, 139 aa, unidentified
  source 1..139: note = Staphylococcus schweitzeri
  REGION 1..139: note = tr|A0A2K4AJU8|A0A2K4AJU8_9STAP 6-carboxy-5,6,7,8-tetrahydropterin synthase; OS = Staphylococcus schweitzeri OX=1654388 GN=queD PE=3 SV=1
MLQQIYPSTTHPFQFELNKDFNFSAAHHIPCEEAGICQNVHGHTYFVNLTIVGDKLDDTGFLINFSHLKKMIHGKFDHQLLNNLPAFKNKIPSTEIVAETIYQIVKENLDILEHQPKCIQVFVRETPTSYVVYRPKEQV

SEQ ID NO: 25872 - protein, 143 aa, Staphylococcus sciuri
  REGION 1..143: note = tr|A0A3S0SMD4|A0A3S0SMD4_STASR 6-carboxy-5,6,7,8-tetrahydropterin synthase; OS = Staphylococcus sciuri subsp. rodentium OX=147469; GN = queD PE=3 SV=1
MLHQMYPQVSHHYIYELNKDFNFSAAHAICDKRAGKCERVHGHTYFVNLTIVGDTLDDLGFLVNFSTLKQLVHDQFDHHLLNNLPLFKGKSPSTEVVAETIYGIVASHLETLPHQPQCVQVFLRETPSSYVVYRPKKKETPHG

SEQ ID NO: 25873 - protein, 143 aa, Staphylococcus sciuri
  REGION 1..143: note = tr|A0A5F0UVK9|A0A5F0UVK9_STASC 6-carboxy-5,6,7,8-tetrahydropterin synthase; OS = Staphylococcus sciuri OX=1296 GN=queD PE=3 SV=1
MLQQIYPSVQHPYAFELNKDFNFSSAHYIPHEEAGKCMNVHGHTYFVNLTIAGDELDKMGFLVNFSELKSLIHKRYDHQLLNNFEEFKDYSPSTEQVAQTIYNIVQASLDKRDNKPKCIQVFVRETPTSYVVYRPTKKGDDNA

SEQ ID NO: 25874 - protein, 143 aa, Staphylococcus simiae
  REGION 1..143: note = tr|G5JG85|G5JG85_9STAP 6-carboxy-5,6,7,8-tetrahydropterin synthase; OS = Staphylococcus simiae CCM 7213 = CCUG 51256 OX=911238; GN = SS7213T_02283 PE=3 SV=1
MLQQIYPSTDHPFQFELNKDFNFSAAHFIPSEDAGKCMRTHGHTYFVNLTIAGDELDHNGFLVNFSYLKKLIHDQFDHDLLNQLPAFEGQSPSTEVVAHKIYSIVQEELNTRDNHPQCVQVYLRETPTSYVVFRPKECQQHNG

SEQ ID NO: 25875 - protein, 142 aa, Staphylococcus simiae
  REGION 1..142: note = tr|G5JH24|G5JH24_9STAP Uncharacterized protein; OS = Staphylococcus simiae CCM 7213 = CCUG 51256 OX=911238; GN = SS7213T_03765 PE=4 SV=1
MTQFDHLTAPQHFQYKGGEVVLKQRYKFICDNRIYFSTTQFKDLQQHLYELEVDVLSPINDFGMAMDFNDMDHIYETFIKPKVHHQRLNDTLPSFNTTAENIAQWLWNEFNKHLPQGNQMYQLQLFETPQHGIYLNQTMMTE

SEQ ID NO: 25876 - protein, 141 aa, Staphylococcus simulans
  REGION 1..141: note = tr|A0A133QNG2|A0A133QNG2_STASI 6-carboxy-5,6,7,8-tetrahydropterin synthase; OS = Staphylococcus simulans OX=1286 GN=queD PE=3 SV=1
MLQQIYPTVAHPYAFELNKDFHFAAAHYIPCEDAGKCVRTHGHTYFVNLTIVGDELDHSGFLINFAALKKQIHEQFDHYLLNDLPQFKDKMPSTEVVAQTICQLTEEILEKQPNRPKCAQVYLRETPSSYVVYRPKEFRHG

SEQ ID NO: 25877 - protein, 141 aa, Staphylococcus simulans
  REGION 1..141: note = tr|A0A2T4R137|A0A2T4R137_STASI 6-carboxy-5,6,7,8-tetrahydropterin synthase; OS = Staphylococcus simulans OX=1286 GN=queD PE=3 SV=1
MLQQIYPTVVHPYAFELNKDFHFAAAHYIPCEDAGKCVRTHGHTYFVNLTIVGDELDHSGFLINFAALKKQIHEQFDHYLLNDLPQFKDKMPSTEVVAQTICQLTEEILEKQPNRPKCAQVYLRETPSSYVVYRPKEFRHG

SEQ ID NO: 25878 - protein, 139 aa, Staphylococcus sp.
  REGION 1..139: note = tr|A0A1J4H6Q5|A0A1J4H6Q5_9STAP 6-carboxy-5,6,7,8-tetrahydropterin synthase; OS = Staphylococcus sp. HMSC34G04 OX=1608860; GN = HMPREF3241_10490 PE=3 SV=1
MQQIYPSVTHPYQFELNKDFNFSAAHYIPFEEAGKCIRTHGHTYYVNLTIAGNTLDKCGFLVNFRDLKKLVHEQFDHYLLNDLPAFKDKSPSTEIVAQTIYHIVQKELNQRENQPKCVQVYLRETPSSYVVYRPKEDQV

SEQ ID NO: 25879 - protein, 139 aa, Staphylococcus sp.
  REGION 1..139: note = tr|A0A2J6P2T8|A0A2J6P2T8_9STAP 6-carboxy-5,6,7,8-tetrahydropterin synthase; OS = Staphylococcus sp. UMB0328 OX=2029110 GN=queD PE=3 SV=1
MIQQIYPSVNHPYQFELNKDFNFSAAHYIPSEDAGKCMRTHGHTYFVNITIAGDELDHNGFLVNFSDLKKLIHDQFDHYLLNDLVQFKGKSPSTEIVAQTIYQMVQSYLKDQKNQPKCVQVYLRETPTSYVVYRPKGDQ

SEQ ID NO: 25880 - protein, 143 aa, unidentified
  source 1..143: note = Staphylococcus stepanovicii
  REGION 1..143: note = tr|A0A240A0J2|A0A240A0J2_9STAP 6-carboxy-5,6,7,8-tetrahydropterin synthase; OS = Staphylococcus stepanovicii OX=643214 GN=queD PE=3 SV=1
MLQQIYPSVQHPYSFELNKDFNFSSAHYIPFEEAGKCHNVHGHTYFINLTIAGNELDEMGFLVNFSELKSLIHGRYDHRLLNDFQEFQDNSPSTEQVAQTIYNIVQESLDKRLNKPKCVQVFVRETPTSYVVYRPANHGVDHA

SEQ ID NO: 25881 - protein, 103 aa, Staphylococcus succinus
  REGION 1..103: note = tr|A0A2T4Q495|A0A2T4Q495_9STAP 6-pyruvoyl tetrahydrobiopterin synthase OS=Staphylococcus succinus; OX = 61015 GN=BU064_14185 PE=4 SV=1
MHKDLENQQYKFNVEILSEIDHYGLAMDFNEVDKLYKAHIAPYLEYQLVNETLPEMNTTAENIAFWIWEQFEIFLPQNNKLQKLEFFENDTQGLVLTAKLMDN

SEQ ID NO: 25882 - protein, 141 aa, Staphylococcus succinus
  REGION 1..141: note = tr|A0A2T4Q9N2|A0A2T4Q9N2_9STAP 6-carboxy-5,6,7,8-tetrahydropterin synthase; OS = Staphylococcus succinus OX=61015 GN=queD PE=3 SV=1
MFQQNYPSVQHPYCFELNKDFNFSAAHYIPNEDAGKCMRTHGHTYFVNLTIAGDTLDHNGFLVNFSDLKKLIHGQFDHYLLNDLPQFKGKSPSTEIVAQTIYEMVQKSLDERDNQPKCLQVYVRETPTSYVVYRPKGSSHE

SEQ ID NO: 25883 - protein, 143 aa, Staphylococcus vitulinus
  REGION 1..143: note = tr|A0A2T4PVU4|A0A2T4PVU4_9STAP 6-carboxy-5,6,7,8-tetrahydropterin synthase; OS = Staphylococcus vitulinus OX=71237 GN=queD PE=3 SV=1
MLQQIYPSVQHPYAFELNKDFNFSSAHYISYEEAGKCKNIHGHTYFINLTIAGNELDKMGFLVNFSELKSLIHKRYDHKLLNDFDEFKDNSPSTEQVAQTIYNIVQEALDRRANKPKCVQVFVRETPTSYVVYRPIKQGDNNA

SEQ ID NO: 25884 - protein, 167 aa, Staphylococcus warneri
  REGION 1..167: note = tr|A0A2V3ZH22|A0A2V3ZH22_STAWA 6-carboxytetrahydropterin synthase QueD OS=Staphylococcus warneri OX=1292 GN=queD PE=4 SV=1
MLQQFYPVKSHNYKYELNKDMNFAAAHFIDHSSAGKCQNMHGHTYFVNVTIVGNELQDNGFLVNFQQLKSLVHGKYDHTVMNDSDDFKTEEPSTEVVAKAIYKNIEEALMEYNNNPKVLQVIVRETPTSYVTYSEPLEYIHDIDTEHTYTDNDVFVSKTKDTDWSEW

SEQ ID NO: 25885 - protein, 139 aa, Staphylococcus warneri; identical to SEQ ID NO: 25825
  REGION 1..139: note = tr|A0A5F0U233|A0A5F0U233_STAWA 6-carboxy-5,6,7,8-tetrahydropterin synthase; OS = Staphylococcus warneri OX=1292 GN=queD PE=3 SV=1

SEQ ID NO: 25886 - protein, 142 aa, Staphylococcus xylosus
  REGION 1..142: note = tr|A0A2T4QJ45|A0A2T4QJ45_STAXY 6-carboxy-5,6,7,8-tetrahydropterin synthase; OS = Staphylococcus xylosus OX=1288 GN=queD PE=3 SV=1
MFQQNYPSVQHPYTFELNKDFNFSAAHYIPSDDAGKCMRTHGHTYFVNLTIVGDSLDHNGFLVNFSELKQLVHGQFDHHLLNDLPQFEGKSPSTEIVAQTIYEMVQTSLNQRNNQPKCVQVYVRETPTSYVVYRPKEQRNHE

SEQ ID NO: 25887 - protein, 141 aa, Staphylococcus xylosus
  REGION 1..141: note = tr|A0A418IFR8|A0A418IFR8_STAXY 6-pyruvoyl tetrahydrobiopterin synthase OS=Staphylococcus xylosus; OX = 1288 GN=BU112_06600 PE=4 SV=1
MTKFDHIEPPTQFQYRKGQVLIKNFFEFTCDNRIYFTNTVHKDLADQQYKFNIEILSDIDKYGLALDFNEVDKLYQKEIEPYLDGQLVNDTLPEMNTTAENIAIWIWEQFTKHLPNEYQLQKLEFFETSSQGLVLTANLMK

SEQ ID NO: 25888 - protein, 132 aa, Stappia indica
  REGION 1..132: note = tr|A0A285TBT1|A0A285TBT1_9RHOB 6-pyruvoyl-tetrahydropterin synthase OS=Stappia indica; OX = 538381 GN=SAMN05421512_11064 PE=4 SV=1
MHAVEVRDHIMIAHSFKGDVFGPAQQLHGATFVVDAAFFSQELDENGIVIDIGRAHEVLKETLTPLNYRNLDDVPEFKGKNTTTEFLSRHIFDALAKAARENRLGRPGNELASIRVTLHESHAARAWYEGKI

SEQ ID NO: 25889 - protein, 132 aa, Stappia sp.
  REGION 1..132: note = tr|A0A419YX91|A0A419YX91_9RHOB 6-pyruvoyl-tetrahydropterin synthase OS=Stappia sp. ARW1T; OX = 2135615 GN=C7968_3749 PE=4 SV=1
MHAVEVRDHIMIAHSFKGDVFGPAQQLHGATFVVDAAFFSQELDENGIVIDIGRAHEVLKETLTPLNYRNLDDVPEFKGKNTTTEFLSRHIFDALAKAARENRLGRPGSELASIRVTLHESHAARAWYEGKI

SEQ ID NO: 25890 - protein, 132 aa, Stappia sp.
  REGION 1..132: note = tr|A0A1Y1SN14|A0A1Y1SN14_9RHOB Uncharacterized protein OS=Stappia sp. 22II-S9-Z10 OX=1317123; GN = ATO13_18625 PE=4 SV=1
MYALEVRDHIMIAHSLPGEAFGPAQKMHGATFVVDAAFFAERLGPNDIVIDIGLATDTLKAILSTLNYANLDELPDFASQRSTTEVLCRWIFDKLAAAARDGTLGEDGQAVAKIRVTLNESHIARAWYEAAL

SEQ ID NO: 25891 - protein, 133 aa, Starkeya novella
  REGION 1..133: note = tr|D7AAY7|D7AAY7_STAND Uncharacterized protein; OS = Starkeya novella (strain ATCC 8093 / DSM 506 / CCM 1077 / IAM 12100 / NBRC 12443 / NCIB 9113) OX=639283; GN = Snov_373 4 PE=4 SV=1
MYCVEVRDRIMIAHSLPDPFFGPAQGLHGATFVVDVAFFRESLTTKNVVVDIGAALDVLKQTLKPLAYQNLDTLPEFAGKLTTTEFLAKHIFDAMAAAARSGALGEDADGLAKIRVTLHETDLARASYEGGLR

SEQ ID NO: 25892 - protein, 139 aa, Starkeya novella
  REGION 1..139: note = tr|A0A2W5KDU0|A0A2W5KDU0_STANO Uncharacterized protein OS=Starkeya novella OX=921 GN=DI565_13730 PE=4 SV=1
MYAVEVRDRIMIAHSLKGDVFGPAQKLHGATFVVDVAFFRRELDPDSIVVDIGRATEALSEALKPLNYANLDEVEELKGRLTTTEFLSRLIFDRMAGALAEGRLGPHAGGVETIRVTLQESDVARAWFEGPVGKGAAHG

SEQ ID NO: 25893 - protein, 193 aa, Stella humosa
  REGION 1..193: note = tr|A0A3N1LJH6|A0A3N1LJH6_9PROT 6-pyruvoyltetrahydropterin/6-carboxytetrahydropterin synthase OS=Stella humosa OX=94 GN=EDC65_2417 PE=4 SV=1
MDFAITRRIEIDAGHRIASHGSKCRHLHGHRYVVEATCRAASGELVREGEQSGMVLDFGFLKDEMVRIVDGPCDHGLIVAIDDNALLGLFAPAAADGEAWVADATREVAAVGYAERTGAALGQKLYLVPFPPTAECLARHWFERLSPAIAARSTGRAELVGVTVWETPNCRADFGLANMIQPPRLASEQERSY

SEQ ID NO: 25894 - protein, 137 aa, Stella humosa
  REGION 1..137: note = tr|A0A3N1KYC5|A0A3N1KYC5_9PROT 6-pyruvoyl-tetrahydropterin synthase OS=Stella humosa; OX = 94 GN=EDC65_4458 PE=4 SV=1
MYAVTVCDHFMIAHSFKGELFGPAQALHGATYAVEAEFRRAELDANGVVCDIGRAMTALREVLAAFDYRNLDAEPDLAGINTTTEFLSAEIHRRLAARAAAGDLGPDTAGRLESIKVILRESPRAWASFEGPVAAPR

SEQ ID NO: 25895 - protein, 118 aa, Stenotrophomonas acidaminiphila
  REGION 1..118: note = tr|A0A2W5L7I5|A0A2W5L7I5_9GAMM 6-carboxy-5,6,7,8-tetrahydropterin synthase; OS = Stenotrophomonas acidaminiphila OX=128780 GN=queD PE=3; SV = 1
MDIFKVFTVEAAHRLPHVPEGHKCARLHGHSFRIELHLSGPVDPQAGWVMDFADVKAAFKPIYDRLDHHYLNEIPGLENPTSEQLATWIWDQTKPLLPLLSAIVVHETCTSGCRYTGQ

SEQ ID NO: 25896 - protein, 118 aa, Stenotrophomonas acidaminiphila
  REGION 1..118: note = tr|A0A0R0DY25|A0A0R0DY25_9GAMM 6-carboxy-5,6,7,8-tetrahydropterin synthase; OS = Stenotrophomonas acidaminiphila OX=128780 GN=ptps PE=3; SV = 1
MDIFKDFTLEAAHRLPNVPAGHKCARLHGHSFRVRLEVSGEPGAESGWVMDFGDIKAAFQPLYEQLDHHYLNDIPGLENPTSERLAIWIWDRLQPVLPQLSAVTVHETCTSGCRYRGI

SEQ ID NO: 25897 - protein, 121 aa, Stenotrophomonas chelatiphaga
  REGION 1..121: note = tr|A0A0R0D073|A0A0R0D073_9GAMM 6-carboxy-5,6,7,8-tetrahydropterin synthase; OS = Stenotrophomonas chelatiphaga OX=517011 GN=ABB28_06820; PE = 3 SV=1
MEIFKVFMIEAAHRLPNVPPGHKCSRLHGHSFRVELKVEGEPGAETGWIMDFGDVKAAFQPIYDRLDHHYLNDIPGLENPTSENLATWIWQQLKPVLPELSEITVHETCTSGCRYRGPTGR

SEQ ID NO: 25898 - protein, 118 aa, Stenotrophomonas daejeonensis
  REGION 1..118: note = tr|A0A0R0E0I1|A0A0R0E0I1_9GAMM 6-carboxy-5,6,7,8-tetrahydropterin synthase; OS = Stenotrophomonas daejeonensis OX=659018 GN=ABB34_10530; PE = 3 SV=1
MDIFKDFTLEAAHRLPNVPPGHKCARLHGHSFRVRLEVSGEPGAETGWVMDFGDIKAAFLPLYEQLDHHYLNDIPGLENPTSERLSMWIWERLKPALPQLSAVTVHETCTSGCRYRGD

SEQ ID NO: 25899 - protein, 120 aa, Stenotrophomonas ginsengisoli
  REGION 1..120: note = tr|A0A0R0DAT4|A0A0R0DAT4_9GAMM 6-carboxy-5,6,7,8-tetrahydropterin synthase; OS = Stenotrophomonas ginsengisoli OX=336566 GN=ABB30_00815; PE = 3 SV=1
MEIFKEFVAESAHRLPHVPAGHKCGNLHGHSFRIRIAVRGEPDPATGWIMDFGDIKAAFAPIYAKLDHNYLNDLPGLDNPTSENLAIWIWQQLKPALPLLSSVEIFETCTSGCRYTGPTA

SEQ ID NO: 25900 - protein, 118 aa, Stenotrophomonas humi
  REGION 1..118: note = tr|A0A0R0CJF3|A0A0R0CJF3_9GAMM 6-carboxy-5,6,7,8-tetrahydropterin synthase; OS = Stenotrophomonas humi OX=405444 GN=ABB26_00930 PE=3 SV=1
MDIFKVFTLEAAHRLPNVPPGHKCARLHGHSFRIELKVSGEPGEDTGWIMDFSDLKAAFRPLYDQLDHNYLNDIPGLENPTSERLAMWIWDRLKPALPLLSEVVVHETCTSGCSYRGP

SEQ ID NO: 25901 - protein, 121 aa, Stenotrophomonas koreensis
  REGION 1..121: note = tr|A0A0R0BT05|A0A0R0BT05_9GAMM 6-carboxy-5,6,7,8-tetrahydropterin synthase; OS = Stenotrophomonas koreensis OX=266128 GN=ABB25_10875; PE = 3 SV=1
MEIFKEFIAESAHRLPHVPAGHKCGRLHGHSFRIRIAVRGEPAAETGWIIDFGDIKAAFAPIYAQLDHNYLNDIPGLENPTSENLAIWIWQQLQPSLPQLSAVEIFETCTSGCRYLGPGAA

SEQ ID NO: 25902 - protein, 120 aa, unidentified
  source 1..120: note = Stenotrophomonas lactitubi
  REGION 1..120: note = tr|A0A2M9QQC9|A0A2M9QQC9_9GAMM 6-carboxy-5,6,7,8-tetrahydropterin synthase; OS = Stenotrophomonas lactitubi OX=2045214 GN=queD PE=3 SV=1
MEIFKVFMLEAAHRLPNVPPGHKCARLHGHSFRVELKVEGEPGAQTGWIMDFGDVKAAFQPIYDRLDHHYLNDIPGLENPTSENLAVWIWNELKPVLPALSEITVHETCTSGCRYRGPAA

SEQ ID NO: 25903 - protein, 120 aa, Stenotrophomonas maltophilia; identical to SEQ ID NO: 24802
  REGION 1..120: note = tr|A0A0M1DA22|A0A0M1DA22_STEMA 6-carboxy-5,6,7,8-tetrahydropterin synthase; OS = Stenotrophomonas maltophilia OX=40324 GN=ygcM PE=3 SV=1

SEQ ID NO: 25904 - protein, 120 aa, Stenotrophomonas maltophilia
  REGION 1..120: note = tr|A0A0M0NQ57|A0A0M0NQ57_STEMA 6-carboxy-5,6,7,8-tetrahydropterin synthase; OS = Stenotrophomonas maltophilia OX=40324 GN=ABW45_20975; PE = 3 SV=1
MEIFKVFMLEAAHRLPNVPPGHKCARLHGHSFRVELKVEGEPGAQTGWIMDFGDVKAAFQPIYDRLDHHYLNDIPGLENPTSENLAVWIWNELKPSLPALSEITVHETCTSGCRYRGPTR

SEQ ID NO: 25905 - protein, 118 aa, unidentified
  source 1..118: note = Stenotrophomonas panacihumi
  REGION 1..118: note = tr|A0A0R0AFJ4|A0A0R0AFJ4_9GAMM 6-carboxy-5,6,7,8-tetrahydropterin synthase; OS = Stenotrophomonas panacihumi OX=676599 GN=ARC20_09335; PE = 3 SV=1
MEIFKVFMVEAAHRLPNVPPGHKCARLHGHSFRIELHVGGEPGADTGWIMDFGDVKAAFQPIYDRLDHHYLNDIEGLENPTSERLAMWIWEQLKPTLPALREVVIHETCTSGCRYRGQ

SEQ ID NO: 25906 - protein, 120 aa, Stenotrophomonas pavanii
  REGION 1..120: note = tr|A0A246KY29|A0A246KY29_9GAMM 6-carboxy-5,6,7,8-tetrahydropterin synthase; OS = Stenotrophomonas pavanii OX=487698 GN=queD PE=3 SV=1
MEIFKVFMLEAAHRLPNVPPGHKCARLHGHSFRVELKVEGEPGAQTGWIMDFGDVKAAFQPIYDRLDHHYLNDIPGLENPTSENLAVWIWNELKPSLPALSEITVHETCTSGCRYRGPNR

SEQ ID NO: 25907 - protein, 118 aa, unidentified
  source 1..118: note = Stenotrophomonas pictorum
  REGION 1..118: note = tr|A0A0R0A524|A0A0R0A524_9GAMM 6-carboxy-5,6,7,8-tetrahydropterin synthase; OS = Stenotrophomonas pictorum JCM 9942 OX=1236960; GN = ARC78_13140 PE=3 SV=1
MDIFKVFTLEAAHRLPNVPTGHKCSRLHGHSFRVELKVSGEPGEDTGWIMDFSDLKAAFQPLYDQLDHHYLNDIPGLENPTSERLAMWIWDRLKPALPLLSEVTVHETCTSGCSYRGP

SEQ ID NO: 25908 - protein, 117 aa, Stenotrophomonas rhizophila
  REGION 1..117: note = tr|A0A023Y779|A0A023Y779_9GAMM 6-carboxy-5,6,7,8-tetrahydropterin synthase; OS = Stenotrophomonas rhizophila OX=216778 GN=queD PE=3 SV=1
MEIFKVFTLEAAHRLPNVPPGHKCARLHGHSFRVELKVEGEPGEQTGWIMDFGDVKAAFQPIYDRLDHHYLNDIPGLENPTSERLAIWIWNELKPALPQLSEVTVHETCTSGCRYRG

SEQ ID NO: 25909 - protein, 117 aa, Stenotrophomonas rhizophila
  REGION 1..117: note = tr|A0A498C7X3|A0A498C7X3_9GAMM 6-carboxy-5,6,7,8-tetrahydropterin synthase; OS = Stenotrophomonas rhizophila OX=216778 GN=BCL79_3025; PE = 3 SV=1
MEIFKVFTLEAAHHLPNVPPGHKCARLHGHSFRVELKVEGEPGEQTGWIMDFGDVKAAFQPIYDRLDHHYLNDIPGLENPTSERLAMWIWDELKPALPALSEVTVHETCTSGCRYRG

SEQ ID NO: 25910 - protein, 118 aa, Stenotrophomonas sp.
  REGION 1..118: note = tr|A0A1Q4EUZ3|A0A1Q4EUZ3_9GAMM 6-carboxy-5,6,7,8-tetrahydropterin synthase; OS = Stenotrophomonas sp. 69-14 OX=1895856 GN=BGP18_10650; PE = 3 SV=1
MDIFKDFTLEAAHRLPNVPAGHKCARLHGHSFRVRLEVSGEPGVESGWVMDFGDIKAAFQPLYEQLDHHYLNDIPGLENPTSERLAIWIWDRLQPALPQLNAVTVHETCTSGCRYRGI

SEQ ID NO: 25911 - protein, 120 aa, Stenotrophomonas sp.; identical to SEQ ID NO: 24802
  REGION 1..120: note = tr|A0A356JFD8|A0A356JFD8_9GAMM 6-carboxy-5,6,7,8-tetrahydropterin synthase; OS = Stenotrophomonas sp. OX=69392 GN=queD PE=3 SV=1

SEQ ID NO: 25912 - protein, 121 aa, Stenotrophomonas terrae
  REGION 1..121: note = tr|A0A0R0CGB7|A0A0R0CGB7_9GAMM 6-carboxy-5,6,7,8-tetrahydropterin synthase; OS = Stenotrophomonas terrae OX=405446 GN=ABB27_07575 PE=3; SV = 1
MDIFKVFTLEAAHRLPNVPVGHKCSRLHGHSFRVELRVSGEPGPETGWIMDFSELKAAFQPLYDQLDHNYLNDIPGLENPTSERLAMWIWEKLKPALPLLSEVVVHETCTSGCSYKGDKAA

SEQ ID NO: 25913 - protein, 119 aa, Steroidobacter denitrificans
  REGION 1..119: note = tr|A0A127F919|A0A127F919_STEDE 6-carboxy-5,6,7,8-tetrahydropterin synthase; OS = Steroidobacter denitrificans OX=465721 GN=ACG33_02880; PE = 3 SV=1
MNLFRVFTIEAAHRLPNVPAGHKCARLHGHSFRIELHLRGTVDAHTGWVMDFADVRAAFQPVYDQLDHHYLNDIPGLENPTSENLARWVWAQTHPRLPLLHKVIIHETCTSGCEYQGPR

SEQ ID NO: 25914 - protein, 127 aa, Stigmatella aurantiaca
  REGION 1..127: note = tr|A0A1H8BDP2|A0A1H8BDP2_STIAU 6-carboxy-5,6,7,8-tetrahydropterin synthase OS=Stigmatella aurantiaca OX=41 GN=SAMN05444354_12397 PE=3 SV=1
MSKPVLITEISKEFTFEAAHRLPNVPPGHKCSRVHGHSYRVEFTLRGPVHPTFGWVVDFADLTAAWQPLHAQLDHRLLNEVPGLENPTSELLAAWLFERMNVPGTQVSKVRVAETCTSSCTVFAAGS

SEQ ID NO: 25915 - protein, 775 aa, Stigmatella aurantiaca
  REGION 1..775: note = tr|Q08RM3|Q08RM3_STIAD 6-pyruvoyl tetrahydropterin synthase family OS=Stigmatella aurantiaca (strain DW4/3-1); OX = 378806 GN=STIAU_0688 PE=4 SV=1
MDSGRRRPQQSIRPRPSGAVRLACSPIRRLSTKRQPQCHPGVPCGGVRARREVLGIHVREGRRLLYRVSIQPRRILPLPQIQVFGLAAEDGLAPGSEVEVAVHDHPAAIVSGAQGDATTGQDIVAQIQRLRGARGAVAKHQAGAWHVPHGVVLHLHVRGRVHPDAKPIVAIGAVPIEHQVAAHDDAGGGSPHPDAPHDDASPIGAQHIVLHGDVARGQVDDHPFPRRGGGAAMAPEGVVAQGDVGARLDVHAIFPVLVQFVVLHEQVVEGGARDGRAALRAETLHPIARVVVDVVAANHHVARGRLDHDAVAVLPTLLEVVDLVALDEDVAGGLGDADARAFSPVLQGAAAKNAVVGPLAAPEHRERLVTGHVHGEPLDAPIRAAHVDHRGAASRAALEEGRGTGRGLHREDLVRAPAPLLQLQPLRVRARPEKDRLTGPHQGERLGHGAEGLRLRTFGGVSPLRGDPENAGELRRRRGLLGLGRRGWHLWDRSRRRLLGRRGRGGKGGGVHGQRGRSTCSRRRDLHRRPRPIGTGAVLLLGHLRLATGGEPRTGDSTAEGHEGRSETHPDSLCGSAAMGAPRGWARTRPKEPSFLSFLSPPPARLLGRAAAHRDSGRLREAWRRGLQAPRRDASCVGWCKRGGTRMALGSPGVFLEIFKEFTFEAAHRLPNVPPGHKCFRLHGHSFRVEVHVRGPVSEPSGWIMDFADLKEAFTPLHAQLDHNYLNEIEGLKNPTSENLARWIWQRLRPGLPQLSRIVVRETCTSGCVYQGEDS

SEQ ID NO: 25916 - protein, 127 aa, Stigmatella erecta
  REGION 1..127: note = tr|A0A1I0H5E3|A0A1I0H5E3_9DELT 6-carboxy-5,6,7,8-tetrahydropterin synthase OS=Stigmatella erecta OX=83460 GN=SAMN05443639_104332 PE=3 SV=1
MSKPVLITEISKEFTFEAAHRLPNVPPGHKCSRVHGHSYRVEFTLRGPVHPTFGWVVDFAELTAAWQPLHAQLDHRLLNEVPGLENPTSELLAAWLFERMSVPGTQVSKVRVAETCTSSCTVFAAGS

SEQ ID NO: 25917 - protein, 165 aa, Stigmatella erecta
  REGION 1..165: note = tr|A0A1I0H813|A0A1I0H813_9DELT 6-pyruvoyltetrahydropterin/6-carboxytetrahydropterin synthase OS=Stigmatella erecta OX=83460; GN = SAMN05443639_104334 PE=4 SV=1
MARTTTIELHKEEMKFSAGHFTIFSATHRENLHGHNFTVYVALTGEVLEDGILSDYRPLKTAIIDRCRAWNETFLLPANSRHLRVERDARGNVLAHFNGEELRFLARDVTVLPVENITLEELARLFGEELVGDGSLMARLHIQRLVVKCASGPGQWSSWEWGRHV

SEQ ID NO: 25918 - protein, 146 aa, Streptacidiphilus sp.
  REGION 1..146: note = tr|A0A345T2D0|A0A345T2D0_9ACTN 6-carboxytetrahydropterin synthase OS=Streptacidiphilus sp. DSM 106435 OX=2126346 GN=C7M71_024790 PE=4 SV=1
MRFSARALPCCHRSWAHDGRCVYLHGYERSFELEFACAELDPATGFVIDFSALKGVRARLAEQFDHTTLVAEDDPELPLFRTLAERGIVDLRVMRHTGMEGAAVWVLAEASRLVEEATGGRVWVSRVEARESRKNAVVLTASPGGR

SEQ ID NO: 25919 - protein, 230 aa, Streptoalloteichus hindustanus
  REGION 1..230: note = tr|A0A1M5DB46|A0A1M5DB46_STRHI 6-pyruvoyl-tetrahydropterin synthase OS=Streptoalloteichus hindustanus OX=2017 GN=SAMN05444320_104376 PE=4 SV=1
MKAADEKCVANGQITISQSFAFSASHELRLLPASHKCRRNHGHNYVVTASALVRDDAAPGDLSPLGDYLATTFDHRLLNEQVIFHPTSELLAAYLAEWFRDNVASSTPITLVTMEVSETTTTSARCDGVTGEVTISKTFKTSHGDVTLVLGADGLNEVGFITDFGDLKPFGTYLQAPDADAGLRAAGPALVAHLAGWFVDNVEPETRGRLVSVRVDSGTTTGLWERGDAS

SEQ ID NO: 25920 - protein, 185 aa, Streptoalloteichus hindustanus
  REGION 1..185: note = tr|A0A1M5D089|A0A1M5D089_STRHI 6-pyruvoyltetrahydropterin/6-carboxytetrahydropterin synthase OS=Streptoalloteichus hindustanus OX=2017; GN = SAMN05444320_104246 PE=4 SV =1
MFRRTAPAEQADRLPLTVHNEHPVQHSIAIEHAFDTAHRLPELGGKCASLHGHSWRVRVVVSAISLSSDFTVVEFGAVKAGVRQWIDTHLDHGTMLGHRDPLTAPLAAAGCKVFRFGSDQPSTGPESLAGDLAWPTVEAVAVLLRRVSHNVLRDLPGAPPHVRIGQVVVRETRTNSAAYGPEEPA

SEQ ID NO: 25921 - protein, 147 aa, Streptococcus australis
  REGION 1..147: note = tr|A0A4V0BXA8|A0A4V0BXA8_9STRE 6-carboxy-5,6,7,8-tetrahydropterin synthase; OS = Streptococcus australis OX=113107 GN=queD PE=3 SV=1
MFFAPKEIKQETGESLVYNPHRTLVSKEFTFDAAHHLFHYEGKCKSLHGHTYHLQITVSGFLDERGMTYDFGDIKAIYKDYLEPHLDHRYLNETLPYMNTTAENMVYWIFQTMSQELPDERGLRLEYVRLYETPTAFAEFRREWLDD

SEQ ID NO: 25922 - protein, 148 aa, Streptococcus criceti
  REGION 1..148: note = tr|G5JPD7|G5JPD7_STRCG 6-carboxy-5,6,7,8-tetrahydropterin synthase; OS = Streptococcus criceti HS-6 OX=873449 GN=STRCR_1589 PE=3; SV = 1
MFFTPKEIKKEVPNKSLIYAPKRVLVSKEFTFDAAHHLFQYEGKCKFLHGHTYRLQIAVSGMLDERGMVYDFGDLKSIYKEHLEPQLDHRYLNESLPYMNTTAENMVYWIYKTVEAHLPDQHDLRMEYVRLYETPSSYAEFRRGWDLT

SEQ ID NO: 25923 - protein, 148 aa, Streptococcus downei
  REGION 1..148: note = tr|A0A380JED1|A0A380JED1_STRDO 6-carboxy-5,6,7,8-tetrahydropterin synthase; OS = Streptococcus downei MFe28 OX=764290 GN=queD PE=3 SV=1
MFLAPKEIKEEIPNKSLVYTPKRVLVSKEFTFDAAHHLFHYAGKCKSLHGHTYRLQIAISGMLDERGMVFDFADLKIIYKEHLEPHLDHRYLNESLPYMNTTAENMVYWIYKTFEANLSQIRGLRMESVRLYETPSSYAEFRREWDLE

SEQ ID NO: 25924 - protein, 139 aa, Streptococcus dysgalactiae; identical to SEQ ID NO: 25804
  REGION 1..139: note = tr|A0A4V0BU08|A0A4V0BU08_STREQ 6-carboxy-5,6,7,8-tetrahydropterin synthase; OS = Streptococcus dysgalactiae subsp. equisimilis OX=119602; GN = queD PE=3 SV=1

SEQ ID NO: 25925 - protein, 118 aa, Streptococcus dysgalactiae; identical to SEQ ID NO: 24425
  REGION 1..118: note = tr|A0A4V0B1Q5|A0A4V0B1Q5_STREQ 6-carboxy-5,6,7,8-tetrahydropterin synthase; OS = Streptococcus dysgalactiae subsp. equisimilis OX=119602; GN = queD PE=3 SV=1

SEQ ID NO: 25926 - protein, 148 aa, Streptococcus equinus
  REGION 1..148: note = tr|E8JNT1|E8JNT1_STREI 6-carboxy-5,6,7,8-tetrahydropterin synthase; OS = Streptococcus equinus ATCC 9812 OX=525379 GN=queD PE=3; SV = 1
MFEIPKEIKKPTGESLVYCPHRVMVSKEFTFDAAHHLYDYDGKCKALHGHTYHLQLAVSGMLDNRAMAVDFGDIKQIYKDHLEPYLDHRYLNESLPYMNTTAENMVYWIFKQLEQYLPKERDTRVEYVRLYETPTSYAEFRREWELDA

SEQ ID NO: 25927 - protein, 148 aa, Streptococcus equinus
  REGION 1..148: note = tr|A0A091BQN5|A0A091BQN5_STREI 6-carboxy-5,6,7,8-tetrahydropterin synthase; OS = Streptococcus equinus JB1 OX=1294274 GN=H702_05530 PE=3; SV = 1
MFLAPKEIKEPTGESLVYCPRRVLVSKEFTFDAAHHLFNYDGKCKALHGHTYCLQIAVSGLLDDRGMSVDFGDIKQIYKEHLEPHLDHRYLNESLPYMNTTAENMVYWIFEQVAKHLPKEREIRVEYVRLYETPSSFAEFRREWLLDD

SEQ ID NO: 25928 - protein, 148 aa, Streptococcus gallolyticus
  REGION 1..148: note = tr|F5X1J2|F5X1J2_STRG1 6-carboxy-5,6,7,8-tetrahydropterin synthase; OS = Streptococcus gallolyticus (strain ATCC 43143 / F-1867); OX = 981539 GN=queD PE=3 SV=1
MFEIPKELKVPTGESLVYCPRRVMVSKEFTFDAAHHLFNYDGKCKALHGHTYCLQIAVSGLLDDRGMAVDFGDLKQIYKKHLEPSLDHHYLNESLPYMNTTAENMVYWIFKQVAQYLPKEREIRVEYIRLYETPTSFAEFRREWEIDD

SEQ ID NO: 25929 - protein, 148 aa, Streptococcus gallolyticus
  REGION 1..148: note = tr|A0A1H9LVA7|A0A1H9LVA7_9STRE 6-carboxy-5,6,7,8-tetrahydropterin synthase; OS = Streptococcus gallolyticus OX=315405; GN = SAMN04487840_101206 PE=3 SV=1
MFEIPKELKVPTGESLVYCPRRVMVSKEFTFDAAHHLFNYDGKCKALHGHTYRLQIAVSGLLDDRGMAVDFGDLKQIYKKHLEPSLDHHYLNESLPYMNTTAENMVYWIFKQVAQHLPKEREIRVEYIRLYETPTSFAEFRREWEIDD

SEQ ID NO: 25930 - protein, 147 aa, unidentified
  source 1..147: note = Streptococcus halitosis
  REGION 1..147: note = tr|A0A3R8NWM3|A0A3R8NWM3_9STRE 6-carboxy-5,6,7,8-tetrahydropterin synthase; OS = Streptococcus halitosis OX=2172545 GN=queD PE=3 SV=1
MFFAPKEIRQETGESLVYNPHRTLVSKEFTFDAAHHLFHYEGKCKSLHGHTYHLQIAVSGFLDERGMTYDFGDIKAIYKDFLEPHLDHRYLNETLPYMNTTAENMVYWIFQTMSQELPDERSLRLEYVRLYETPTAFAEFRREWLDD

SEQ ID NO: 25931 - protein, 149 aa, Streptococcus henryi
  REGION 1..149: note = tr|A0A1G6A9Q9|A0A1G6A9Q9_9STRE 6-carboxy-5,6,7,8-tetrahydropterin synthase; OS = Streptococcus henryi OX=439219 GN=SAMN02910293_00263; PE = 3 SV=1
MFLAPKEIKEPTGQCLVYCPRRVQVSKEFTFDAAHHLFNYEGKCKSLHGHTYRLQIAVSGFLDDRGMAIDFGDLKTIYKEHLEPRLDHRYLNETLPYMNTTAENMVYWIYQEVAFHLPKERGLQVESVRLYETPFSYAEFRKEWDQDGI

SEQ ID NO: 25932 - protein, 147 aa, Streptococcus infantis
  REGION 1..147: note = tr|E8K2R3|E8K2R3_9STRE 6-carboxy-5,6,7,8-tetrahydropterin synthase; OS = Streptococcus infantis ATCC 700779 OX=889204 GN=queD; PE = 3 SV=1
MFFAPKEIKQETGESLVYNPHRTLVSKEFTFDAAHHLFHYEGKCKSLHGHTYHLQIAVSGFLDDRGMTYDFGDIKAIYKDYLEPHLDHRYLNETLPYMNTTAENMVYWIFQTMSQELPGERGLRLEYVRLYETPTAFAEFRREWLDD

SEQ ID NO: 25933 - protein, 147 aa, Streptococcus infantis
  REGION 1..147: note = tr|A0A0F3HK56|A0A0F3HK56_9STRE 6-carboxy-5,6,7,8-tetrahydropterin synthase; OS = Streptococcus infantis OX=68892 GN=queD PE=3 SV=1
MFFAPKEIKQETGESLVYNPHRTLVSKEFTFDAAHHLFHYEGKCKSLHGHTYHLQIAVSGFLDERGMTYDFGDIKQIYKDYLEPHLDHRYLNETLPYMNTTAENMVYWIFQTMSQELPDERGLRLEYIRLYETPTAFAEFRREWLDD

SEQ ID NO: 25934 - protein, 148 aa, Streptococcus lutetiensis
  REGION 1..148: note = tr|S5RLF6|S5RLF6_9STRE 6-carboxy-5,6,7,8-tetrahydropterin synthase; OS = Streptococcus lutetiensis 033 OX=1076934 GN=KE3_1184; PE = 3 SV=1
MFLAPKEIKEPAGESLAYCPRRVMVSKEFTFDSAHHLFNYDGKCKAVHGHIYRLKIAVSGWFDERGISVDFGDIKQIYKEHLEPHLDHRYLNESLPYMNTKAENMVYWIFEQVAKHLPKEREIRVEYVHLCETPSSYAVFRREWLLDD

SEQ ID NO: 25935 - protein, 148 aa, Streptococcus lutetiensis
  REGION 1..148: note = tr|A0A4V0E5T8|A0A4V0E5T8_9STRE 6-carboxy-5,6,7,8-tetrahydropterin synthase; OS = Streptococcus lutetiensis OX=150055 GN=queD PE=3 SV=1
MFLAPKEIKEPTGESLAYCPRRVMVSKEFTFDSAHHLFNYDGKCKAVHGHTYRLKIAVSGWFDERGISVDFGDIKQIYKEHLEPHWDHRYLNESLPYMNTTAENMVYWIFEQVAKHLPKEREIRVEYVHLCETPSSYAEFRREWLLDD

SEQ ID NO: 25936 - protein, 148 aa, unidentified
  source 1..148: note = Streptococcus macedonicus
  REGION 1..148: note = tr|H2A6Z3|H2A6Z3_STRMD 6-carboxy-5,6,7,8-tetrahydropterin synthase; OS = Streptococcus macedonicus (strain ACA-DC 198); OX = 1116231 GN=queD PE=3 SV=1
MFEIPKELKVPTGESLVYCPRRVMVSKEFTFDAAHHLFNYDGKCKALHGHTYRLQIAVSGLLDDRGMAVDFGDLKQIYKKHLEPSLDHHYLNESLPYMNTTAENMVYWIFKQVAQYLPKEREIRVEYIRLYETPTSFAEFRREWEIDD

SEQ ID NO: 25937 - protein, 51 aa, unidentified
  source 1..51: note = Streptococcus macedonicus
  REGION 1..51: note = tr|A0A1C3SPL6|A0A1C3SPL6_STRMC 6-carboxytetrahydropteri  n synthase @ Queuosine biosynthesis QueD, PTPS-I OS=Str  eptococcus macedonicus; OX = 59310 GN=SMA679_1203 PE=4 SV= 1
MNTTAENMVYWIFKQVAQYLPKEREIRVEYIRLYETPTSFAEFRREWEIDD

SEQ ID NO: 25938 - protein, 147 aa, Streptococcus mitis
  REGION 1..147: note = tr|A0A081Q1B8|A0A081Q1B8_STRMT 6-carboxy-5,6,7,8-tetrahydropterin synthase; OS = Streptococcus mitis OX=28037 GN=queD PE=3 SV=1
MFFAPKEIKQETGESLVYNPHRTLVSKEFTFDAAHHLFHYEGKCKSLHGHTYHLQIAVSGFLDERGMTYDFGDIKAIYKNYLEPHLDHRYLNETLPYMNTTAENMVYWIFQTMSQELPDERGLRLEYVRLYETPTAFAEFRREWLDD

SEQ ID NO: 25939 - protein, 147 aa, Streptococcus mitis
  REGION 1..147: note = tr|A0A4V6L4S0|A0A4V6L4S0_STRMT 6-carboxy-5,6,7,8-tetrahydropterin synthase; OS = Streptococcus mitis OX=28037 GN=queD PE=3 SV=1
MFFAPKEIKQETGESLVYNPHRTLVSKEFTFDAAHHLFHYEGKCKSLHGHTYHLQIAVSGFLDERGMTYDFGDIKAIYKNYLEPHLDHRYLNETLPYMNTTAENMVYWIFQIMNQELPDERGLRLEYVRLYETPTAFAEFRREWLDD

SEQ ID NO: 25940 - protein, 148 aa, Streptococcus mutans
  REGION 1..148: note = tr|A0A448RX91|A0A448RX91_STRMG 6-carboxy-5,6,7,8-tetrahydropterin synthase; OS = Streptococcus mutans OX=1309 GN=queD PE=3 SV=1
MFFAPKEIKKETGESLIYCPRRVLVSKEFTFDAAHHLFSYEGKCKALHGHTYHLQIAVSGFLDDKGMVYDFGDLKTIYQNLLEPHLDHAYLNESLPYMNTTAENMVYWIYKTVEKALPDEHGLQMESVRLYETPSAYAEFRKEWDLQA

SEQ ID NO: 25941 - protein, 148 aa, Streptococcus mutans
  REGION 1..148: note = tr|A0A2J9QEP1|A0A2J9QEP1_STRMG 6-carboxy-5,6,7,8-tetrahydropterin synthase; OS = Streptococcus mutans OX=1309 GN=queD PE=3 SV=1
MFLAPKEIKNETGESLLYCPKRVLVSKEFTFDAAHHLFNYEGKCKALHGHTYHLQIAVSAFLDERGMTYDFRDLKRIYQEYLEPKLDHRYLNESLPYMNTTAENMVYWIYKTVEKALTDERGLQMEHVRLYETPSAYAEFRREWDLQA

SEQ ID NO: 25942 - protein, 147 aa, Streptococcus oralis
  REGION 1..147: note = tr|I0STV0|I0STV0_STROR 6-carboxy-5,6,7,8-tetrahydropterin synthase; OS = Streptococcus oralis SK1074 OX=1095738 GN=queD PE=3 SV=1
MFFAPKEIKQETGESLIYNPHRTLVSKEFTFDAAHHLFHYEGKCKSLHGHTYHLQIAVSGFLDERGMTYDFGDIKAIYKNYLEPHLDHRYLNETLPYMNTTAENMVYWIFQTMSQELPDERGLRLEYVRLYETPTAFAEFRREWLDD

SEQ ID NO: 25943 - protein, 147 aa, Streptococcus oralis; identical to SEQ ID NO: 25938
  REGION 1..147: note = tr|A0A0F2DJL0|A0A0F2DJL0_STROR 6-carboxy-5,6,7,8-tetrahydropterin synthase; OS = Streptococcus oralis subsp. oralis OX=1891914 GN=queD; PE = 3 SV=1

SEQ ID NO: 25944 - protein, 148 aa, unidentified
  source 1..148: note = Streptococcus pasteurianus
  REGION 1..148: note = tr|F5X767|F5X767_STRPX 6-carboxy-5,6,7,8-tetrahydropterin synthase; OS = Streptococcus pasteurianus (strain ATCC 43144 / JCM 5346 / CDC 1723-81) OX=981540 GN=queD PE=3SV=1
MFEIPKELKVPTGESLVYCPRRVMVSKEFTFDAAHHLFNYDGKCKALHGHTYRLQIAVSGLLDDRGMAVDFGDLKQIYKKHLEPSLDHHYLNESLPYMNTTAENMVYWIFKQVAQHLPKEREIRVEYIRLYETPTSFAEFRREWELDD

SEQ ID NO: 25945 - protein, 148 aa, unidentified; identical to SEQ ID NO: 25944
  source 1..148: note = Streptococcus pasteurianus
  REGION 1..148: note = tr|A0A135YMY9|A0A135YMY9_9STRE 6-carboxy-5,6,7,8-tetrahydropterin synthase; OS = Streptococcus pasteurianus OX=197614; GN = HMPREF3205_02096 PE=3 SV=1

SEQ ID NO: 25946 - protein, 147 aa, Streptococcus peroris
  REGION 1..147: note = tr|E8KDG8|E8KDG8_9STRE 6-carboxy-5,6,7,8-tetrahydropterin synthase; OS = Streptococcus peroris ATCC 700780 OX=888746 GN=queD; PE = 3 SV=1
MFFVPKEIKHETGESLVYNPYRTMVSKEFTFDAAHHLFHYEGKCKSLHGHTYHLQIAVSGFLDDRGMTYDFGDIKQIYKNHLEPHLDHRYLNETLPYMNTTAENMVYWIFNTIQQELPDQRGLRLEYVRLYETPSSFAEFRREWLHD

SEQ ID NO: 25947 - protein, 147 aa, Streptococcus pneumoniae
  REGION 1..147: note = tr|A0A0U0KE29|A0A0U0KE29_STREE 6-carboxy-5,6,7,8-tetrahydropterin synthase; OS = Streptococcus pneumoniae OX=1313 GN=queD PE=3 SV=1
MFFAPKEIKQETGESLVYNPHRTLVSKEFTFDAAHHLFHYEGKCKSLHGHTYHLQIAVSGFLDERGMTYDFGDIKAIYKNYLEPHLDHRYLNETLPYMNTTAENMVYWIFQTMNQELPDERGLRLEYVRLYETPTAFAEFRREWLDD

SEQ ID NO: 25948 - protein, 147 aa, Streptococcus pneumoniae
  REGION 1..147: note = tr|A0A559GFE2|A0A559GFE2_STREE 6-carboxy-5,6,7,8-tetrahydropterin synthase; OS = Streptococcus pneumoniae OX=1313 GN=queD PE=3 SV=1
MFFAPKEIKQETGESLVYNPHRTLVSKEFTFDAAHHLFHYEGKCKSLHGHTYHLQIAVSGFLDERGMTYDFGDIKAIYKNYLEPHLDHRYLNETLPYMNTTAENIVYWIFRTMSQELPDERSLRLEYVRLYETPTAFAEFRREWLDD

SEQ ID NO: 25949 - protein, 147 aa, Streptococcus pseudopneumoniae
  REGION 1..147: note = tr|G0I718|G0I718_STRES 6-carboxy-5,6,7,8-tetrahydropterin synthase; OS = Streptococcus pseudopneumoniae (strain IS7493); OX = 1054460 GN=SPPN_09465 PE=3 SV=1
MFFAPKEIKQETGESLIYNPHRTLVSKEFTFDAAHHLFHYEGKCKSLHGHTYHLQIAVSGFLDERGMTYDFGDIKAIYKNYLEPHLDHRYLNETLPYMNTTAENMVYWIFQTMNQELPDERGLRLEYVRLYETPTAFAEFRREWLDD

SEQ ID NO: 25950 - protein, 147 aa, Streptococcus pseudopneumoniae; identical to SEQ ID NO: 25938
  REGION 1..147: note = tr|A0A3A4MR91|A0A3A4MR91_9STRE 6-carboxy-5,6,7,8-tetrahydropterin synthase; OS = Streptococcus pseudopneumoniae OX=257758 GN=queD PE=3; SV = 1

SEQ ID NO: 25951 - protein, 148 aa, Streptococcus ratti; identical to SEQ ID NO: 25940
  REGION 1..148: note = tr|J3A115|J3A115_STRRT 6-carboxy-5,6,7,8-tetrahydropterin synthase; OS = Streptococcus ratti FA-1 = DSM 20564 OX=699248; GN = D822_03384 PE=3 SV=1

SEQ ID NO: 25952 - protein, 148 aa, Streptococcus ratti; identical to SEQ ID NO: 25940
  REGION 1..148: note = tr|A0A5J6NQP3|A0A5J6NQP3_STRRT 6-carboxytetrahydropterin synthase QueD OS=Streptococcus ratti OX=1341 GN=queD PE=4 SV=1

SEQ ID NO: 25953 - protein, 147 aa, Streptococcus salivarius
  REGION 1..147: note = tr|A0A3S5E1F9|A0A3S5E1F9_STRSL 6-carboxy-5,6,7,8-tetrahydropterin synthase; OS = Streptococcus salivarius OX=1304 GN=ptpS PE=3 SV=1
MFFAPKEIKKETGESLVYNPHRTMVSKEFTFDAAHHLFNYEGKCKSLHGHTYHLQIAVSGYLDERGMTYDFGDLKRIYKDHLEPQLDHRYLNETLPYMNTTAENMVFWIFQTTSQHLPEERGLRLEYVRLYETPTAFAEFRREWLDD

SEQ ID NO: 25954 - protein, 147 aa, Streptococcus salivarius
  REGION 1..147: note = tr|A0A0F3H2E8|A0A0F3H2E8_STRSL 6-carboxy-5,6,7,8-tetrahydropterin synthase; OS = Streptococcus salivarius OX=1304 GN=queD PE=3 SV=1
MFFAPKEIKKETGESLVYNPHRTMVSKEFTFDAAHHLFNYEGKCKSLHGHTYHLQIAVSGYLDERGMTFDFGDLKSIYKDHLEPQLDHRYLNETLPYMNTTAENMVFWIFQTTSQHLPEERGLRLEYVRLYETPTAFAEFRREWLDD

SEQ ID NO: 25955 - protein, 148 aa, Streptococcus sobrinus
  REGION 1..148: note = tr|U2J2Q1|U2J2Q1_9STRE 6-carboxy-5,6,7,8-tetrahydropterin synthase; OS = Streptococcus sobrinus W1703 OX=1227275; GN = HMPREF1557_01728 PE=3 SV=1
MFFAPNEIKEEITGQSLIYTPKRVLVSKEFTFDAAHHLFRYEGKCKSLHGHTYRLQIAVSGLLDERGMVYDFGDLKAIYKQHLEPQLDHRYLNESLPYMNTTAENMVYWIYKTVEAHLPAKDGLRMERVRLYETPSSYAEFRREWDLE

SEQ ID NO: 25956 - protein, 147 aa, Streptococcus sp.
  REGION 1..147: note = tr|E0PZQ8|E0PZQ8_9STRE 6-carboxy-5,6,7,8-tetrahydropterin synthase; OS = Streptococcus sp. oral taxon 071 str. 73H25AP OX=864570; GN = queD PE=3 SV=1
MFFAPKEIKQETGESLVYNPHRTLVSKEFTFDAAHHLFHYEGKCKSLHGHTYHLQIAVSGFLDERGMTYDFGDIKAIYKNYLEPHLDHRYLNETLPYMNTTAENMVYWIFQTMSQELPDERSLRLEYVRLYETPTAFAEFRREWLDD

SEQ ID NO: 25957 - protein, 147 aa, Streptococcus sp.
  REGION 1..147: note = tr|D2EP97|D2EP97_9STRE 6-carboxy-5,6,7,8-tetrahydropterin synthase; OS = Streptococcus sp. M143 OX=563037 GN=queD PE=3 SV=1
MFFAPKEIKQETGESLVYNPHRTLVSKEFTFDAAHHLFHYEGKCKSLHGHTYHLQIAVSGFLDERGMTYDFGDIKAIYKNFLEPHLDHRYLNETLPYMNTTAENMVYWIFQTMSQELPDERGLRLEYVRLYETPTAFAEFRREWLDD

SEQ ID NO: 25958 - protein, 147 aa, Streptococcus thermophilus
  REGION 1..147: note = tr|A0A2U2M104|A0A2U2M104_STRTR 6-carboxy-5,6,7,8-tetrahydropterin synthase; OS = Streptococcus thermophilus OX=1308 GN=queD PE=3 SV=1
MFFAPKEIKTETGESLVYNLHRTMVSKEFTFDAAHHLFNYEGKCKSLHGHTYHLQIAVSGYLDERGMTYDFGDLKNIYKNHLEPYLDHRYLNESLPYMNTTAENMVFWIFQTTSEYLSEERELRLEYVRLYETPTAFAEFRREWLDD

SEQ ID NO: 25959 - protein, 147 aa, Streptococcus thermophilus; identical to SEQ ID NO: 25958
  REGION 1..147: note = tr|A0A0E2Q389|A0A0E2Q389_STRTR 6-carboxy-5,6,7,8-tetrahydropterin synthase; OS = Streptococcus thermophilus M17PTZA496 OX=1433289; GN = X841_05095 PE=3 SV=1

SEQ ID NO: 25960 - protein, 148 aa, unidentified
  source 1..148: note = Streptococcus troglodytae
  REGION 1..148: note = tr|A0A1L7LJS3|A0A1L7LJS3_9STRE 6-carboxy-5,6,7,8-tetrahydropterin synthase; OS = Streptococcus troglodytae OX=1111760 GN=SRT_11820 PE=3; SV = 1
MFLAPKEIKKETGESLVYCPKRVLVSKEFTFDAAHHLFNYEGKCKALHGHTYHLQIAVSAFLDERGMAYDFRDLKRIYQEYLEPKLDHRYLNESLPYMNTTAENMVYWIYKTIEKALTDERGLQMERVRLYETPSAYAEFRREWDLKS

SEQ ID NO: 25961 - protein, 147 aa, Streptococcus vestibularis
  REGION 1..147: note = tr|E3CQ03|E3CQ03_STRVE 6-carboxy-5,6,7,8-tetrahydropterin synthase; OS = Streptococcus vestibularis F0396 OX=904306 GN=queD PE=3; SV = 1
MFFAPKEIKKETGESLVYNLHRTMVSKEFTFDAAHHLFHYEGKCKSLHGHTYHLQIAVSGYLDERGMTYDFGDLKSIYKDHLEPHLDHRYLNETLPYMNTTAENMVFWIFQTTSEYLPEERGLRLEYVRLYETPTAFAEFRREWLDD

SEQ ID NO: 25962 - protein, 147 aa, Streptococcus vestibularis
  REGION 1..147: note = tr|E8KVK7|E8KVK7_STRVE 6-carboxy-5,6,7,8-tetrahydropterin synthase; OS = Streptococcus vestibularis ATCC 49124 OX=889206 GN=queD; PE = 3 SV=1
MFFAPKEIKKETGESLVYNSHRTMVSKEFTFDAAHHLFHYEGKCKSLHGHTYHLQIAVSGYLDERGMTYDFGDLKSIYKDHLEPHLDHRYLNETLPYMNTTAENMVFWIFQTASEYLPEERGLRLEYVRLYETPTAFAEFRREWLDD

SEQ ID NO: 25963 - protein, 132 aa, Streptomonospora alba
  REGION 1..132: note = tr|A0A0C2J538|A0A0C2J538_9ACTN 6-pyruvoyl tetrahydropterin synthase OS=Streptomonospora alba; OX = 183763 GN=LP52_24500 PE=4 SV=1
MFRVTVRDHFMVAHSFHGEMFGPAQGLHGATFTVDASFHRAELDADNVVVDIGLAAGELGAVLSELNYRNLDDEHAFAGVNTTTEFLAKVVADRLAERVAGGGLGEGARGLERISVTLHESHVAWASYERAL

SEQ ID NO: 25964 - protein, 132 aa, Streptomonospora sp.
  REGION 1..132: note = tr|A0A4P6Q737|A0A4P6Q737_9ACTN 6-pyruvoyl tetrahydropterin synthase OS=Streptomonospora sp. M2; OX = 2498135 GN=EKD16_24050 PE=4 SV=1
MFSVTVRDHIMVAHSFRGAVFGPAQRLHGATFTVDAAFYRAELDADNIVVDIALATRELGDVLGGLNHRNLDAEPAFAGANTTTEFLAGFVADRLADRVAAGGLGEGARGLERLAVTLHESHVAWATYERAL

SEQ ID NO: 25965 - protein, 132 aa, unidentified
  source 1..132: note = Streptomyces abyssalis
  REGION 1..132: note = tr|A0A1E7JSV8|A0A1E7JSV8_9ACTN 6-pyruvoyl tetrahydropterin synthase OS=Streptomyces abyssalis; OX = 933944 GN=AN215_05830 PE=4 SV=1
MYSITVRDHMMIAHSFRGDVFGPAQRLHGATFVVDATFRRGELDADGIVVDIGAATQELSGVLGDLNYRNLDDEPAFAGINTSTEMLARVVADRLAERVHAGALGEGARGLEAISVTLHESHVAWASYERRL

SEQ ID NO: 25966 - protein, 120 aa, Streptomyces acidiscabies
  REGION 1..120: note = tr|A0A0L0JIN9|A0A0L0JIN9_9ACTN 6-carboxy-5,6,7,8-tetrahydropterin synthase; OS = Streptomyces acidiscabies OX=42234 GN=queD PE=3 SV=1
MGFRISKEFHFSASHRLDGLPEGHQCGRMHGHNYLVRVELFAGPDDLDTVGFVRDYGELGKVKRWLDDELDHRHLNDVMDRNPTAEHLAQWIFERWSGHFPELTAVQVSETPRTWAEYRP

SEQ ID NO: 25967 - protein, 132 aa, Streptomyces acidiscabies
  REGION 1..132: note = tr|A0A0L0JGG5|A0A0L0JGG5_9ACTN 6-pyruvoyl tetrahydropterin synthase OS=Streptomyces acidiscabies; OX = 42234 GN=IQ63_42180 PE=4 SV=1
MFSVTVRDHIMIAHSFSGEVFGPAQRLHGATFLVDATFRREQLDDDNIVVDMGLASQELGAVVAELNYRNLDNEPDFAGVNTSTEYLAKVIADRLAERIGKGALGEGARGISALSVTLHESHIAWASYERAL

SEQ ID NO: 25968 - protein, 132 aa, unidentified
  source 1..132: note = Streptomyces actuosus
  REGION 1..132: note = tr|A0A2U9P9F7|A0A2U9P9F7_STRAS Uncharacterized protein OS=Streptomyces actuosus OX=1885 GN=DMT42_31870; PE = 4 SV=1
MFSVTVRDHIMVAHSFRGEVFGPAQRLHGATFLVDATFRRAQLDDDNIVVDIGLATRELGAVVGELNYRNLDNEPDFAGVNTSTEFLAKVIADRLAERIHKGALGEGAKGIAQISVTLHESHVAWASYERAV

SEQ ID NO: 25969 - protein, 132 aa, Streptomyces afghaniensis
  REGION 1..132: note = tr|S4MPH7|S4MPH7_9ACTN Uncharacterized protein; OS = Streptomyces afghaniensis 772 OX=1283301 GN=STAFG_5468; PE = 4 SV=1
MFSITVRDHIMIAHSFRGEVFGPAQRLHGATFLVDATFRREQLDDDNIVVDIGLATQELGAVVSELNYRNLDNEPDFAGVNTSTEFIAKVIADRLAERIHKGALGEGAKGIAGLTVTLHESHIAWASYERAL

SEQ ID NO: 25970 - protein, 120 aa, unidentified
  source 1..120: note = Streptomyces ahygroscopicus
  REGION 1..120: note = tr|K7S1M0|K7S1M0_9ACTN 6-carboxy-5,6,7,8-tetrahydropterin synthase; OS = Streptomyces ahygroscopicus subsp. wuzhouensis; OX = 387850 GN=tymB PE=3 SV=1
MAFRITKEFHFSASHRLAELPEGHPCGRMHGHNYVVELELAAPADGLDKAGFVRDYGDLKQFSRWLDAEVDHRHLNDVLDRNPSAEHLAQWLYERWLPHYPQLSAVRVSETAKTWAEYRP

SEQ ID NO: 25971 - protein, 118 aa, Streptomyces albidoflavus
  REGION 1..118: note = tr|A0A2A2UN85|A0A2A2UN85_9ACTN 6-carboxy-5,6,7,8-tetrahydropterin synthase; OS = Streptomyces albidoflavus OX=1886 GN=queD PE=3 SV=1
MEIFREFTFEAAHRLPRVPEGHKCARLHGHSYKVVVHVEAPVDAELGWVMDFGDIKRAFKPIDAQLDHYYLNDIEGLDNPTSENLARWIWDRLIGELPALSEITVRETCTSGCTYRGV

SEQ ID NO: 25972 - protein, 71 aa, Streptomyces alboflavus
  REGION 1..71: note = tr|A0A1Z1WS73|A0A1Z1WS73_9ACTN Uncharacterized protein OS=Streptomyces alboflavus OX=67267 GN=SMD44_08780; PE = 4 SV=1
MARRDAGHRHLNDAIGGDRNPSAENIALWIYQTWTGDYPELTAVRVSETPKTWATYRPATAVAARMGHADD

SEQ ID NO: 25973 - protein, 139 aa, Streptomyces alboflavus
  REGION 1..139: note = tr|A0A291W3Y0|A0A291W3Y0_9ACTN 6-carboxy-5,6,7,8-tetrahydropterin synthase; OS = Streptomyces alboflavus OX=67267 GN=queD PE=3 SV=1
MSDNVPTVGLPPGSFTIGKSFSFEAGHQLPGLPIGHKCARGHGHSYRVEVILTCGTLAPPGFVTDFGDLSPFKDFIDEHLDHRNLHEVLPVEPTAELIAQYLAGWFLQHLEPALPGRLMAVCVYETATSWARFDVVRNA

SEQ ID NO: 25974 - protein, 132 aa, Streptomyces albulus
  REGION 1..132: note = tr|A0A059VRK7|A0A059VRK7_STRA9 Uncharacterized protein OS=Streptomyces albulus OX=68570 GN=DC74_1533 PE=4; SV = 1
MFSITVRDHLMVAHSFRGAVFGPAQRLHGATFIVDATFRRPELDDDNIVVDIGLATQELGGVIAELNYRNLDDEPAFAGTNTSTEALAKVIADRLADRVHAGNLGAGARDLSGITVTLHESHVAWASYERTL

SEQ ID NO: 25975 - protein, 120 aa, Streptomyces albulus
  REGION 1..120: note = tr|A0A401RAX3|A0A401RAX3_STRA9 6-carboxy-5,6,7,8-tetrahydropterin synthase; OS = Streptomyces albulus OX=68570 GN=queD PE=3 SV=1
MAFRITKEFHFSASHRLAELPEGHPCGRMHGHNYVVELELAAPADGLDKAGFVRDYGDLKQFSRWLDAEVDHRHLNDVLDRNPSAEHLAQWLYEWWLPHYPQLSAVRVSETAKTWAEYRP

SEQ ID NO: 25976 - protein, 121 aa, Streptomyces albus
  REGION 1..121: note = tr|A0A0X7JBN8|A0A0X7JBN8_9ACTN 6-carboxy-5,6,7,8-tetrahydropterin synthase; OS = Streptomyces albus subsp. albus OX=67257 GN=ADL21_33455; PE = 3 SV=1
MYAITKEFHFSASHQLGALPAGHQCARTHGHNYLVVLELRCDDAELTEPGFVRDYGELDEFKHWLDATFDHRHLNDAVPGMNPSAENLAWWVYHQWVERLPELSCVRVSETPRTWATYRGK

SEQ ID NO: 25977 - protein, 124 aa, Streptomyces albus
  REGION 1..124: note = tr|A0A0B5EZI8|A0A0B5EZI8_STRA4 6-carboxy-5,6,7,8-tetrahydropterin synthase; OS = Streptomyces albus (strain ATCC 21838 / DSM 41398 / FERM P-419 / JCM 4703 / NBRC 107858 ) OX=1081613; GN = SLNWT_6863 PE=3 SV=1
MLRITKEFHFSASHVLDRLPSWHPCARMHGHNYVVVLELSARREELTEAGFVRDYRELDAFKKWMDGTLDHRHLNEAMGGGISPSAENLAAWIFDLWIEQFPELTSVRVSETPKTWAEYRPGEP

SEQ ID NO: 25978 - protein, 132 aa, Streptomyces ambofaciens
  REGION 1..132: note = tr|A0A0K2B244|A0A0K2B244_STRA7 6-pyruvoyl tetrahydropterin synthase OS=Streptomyces ambofaciens (strain ATCC 23877 / 3486 / DSM 40053 / JCM 4204 / NBRC 12836 / NRRLB-2516) OX=278992 GN=SAM23877_6304 PE=4 SV=1
MFSITVRDHIMIAHSFRGEVFGPAQRLHGATFLVDATFRREQLDDDNIVVDIGLATQELGAVVSELNYRNLDNEPDFAGVNTSTEFLAKVIADRLAERVHKGALGQGAEGLAGLTVTLHESHVAWASYERAL

SEQ ID NO: 25979 - protein, 132 aa, Streptomyces antibioticus
  REGION 1..132: note = tr|A0A0L8NBL1|A0A0L8NBL1_STRAT 6-pyruvoyl tetrahydropterin synthase OS=Streptomyces antibioticus; OX = 1890 GN=ADK77_38220 PE=4 SV=1
MFSITVRDHIMIAHSFRGEVFGPAQRLHGATFLVDATFRREQLDEDNIVVDIGLATQELRTITAELNYRNLDDEPEFAGVNTSTEFLAKVIADRLAERIGKGALGEGAKGLSGITVTLHESHIAWASYERGL

SEQ ID NO: 25980 - protein, 132 aa, Streptomyces antibioticus
  REGION 1..132: note = tr|A0A101PVC1|A0A101PVC1_STRAT 6-pyruvoyl tetrahydropterin synthase OS=Streptomyces antibioticus; OX = 1890 GN=AQJ23_39890 PE=4 SV=1
MFSITVRDHMMIAHSFRGEVFGPAQRLHGATFVVDATFRRPELDDDNIVVDIGLATAELGKVIAELNYRNLDDEERFQQINTSTEYLAKVIADHLVEAIHAGALGEGARRIHEVAVTLHESHIAWASYERAV

SEQ ID NO: 25981 - protein, 132 aa, Streptomyces antimycoticus
  REGION 1..132: note = tr|A0A4D4JY34|A0A4D4JY34_9ACTN Uncharacterized protein OS=Streptomyces antimycoticus OX=68175; GN = SANT12839_024670 PE=4 SV=1
MFSITVRDHIMIAHSFRGDVFGPAQRLHGATFLVDATFRRAELDDDNIVVDIGLATRELGEVCGALSYRNLDDEPDFEGINTSTEFLAKVIADRLAERVASGALGEGARGLSGIVVTLHESHVAWASYERGL

SEQ ID NO: 25982 - protein, 162 aa, Streptomyces antimycoticus
  REGION 1..162: note = tr|A0A4D4JZN4|A0A4D4JZN4_9ACTN Uncharacterized protein OS=Streptomyces antimycoticus OX=68175 GN=ptpS; PE = 4 SV=1
MDPGIPQGIASITRAPGMLRAGPSPHLEDPLFSITVRDHMMVAHSFRGEVFGPAQRLHGATFVVDATFRRPELDDDNIVVDIGLATTELGKVIGEFNYRNLDDEEQFHQVNTSTEYLAKVIADRLAEAIHAGTLGEGARGIREVVVTLHESHIAWAGYERSV

SEQ ID NO: 25983 - protein, 132 aa, unidentified
  source 1..132: note = Streptomyces antioxidans
  REGION 1..132: note = tr|A0A1V4CXX0|A0A1V4CXX0_9ACTN Uncharacterized protein OS=Streptomyces antioxidans OX=1507734; GN = VT50_0228955 PE=4 SV=1
MFSITVRDHIMVAHSFRGEVFGPAQRLHGATFLVDATFRRAELDDDNIVVDIGLATRELGEVCGALSYRNLDDEPDFEGVNTSTEFLAKVIADRLAARVRSGALGEGARGLAGIAVTLHESHIAWASYERDL

SEQ ID NO: 25984 - protein, 132 aa, Streptomyces asterosporus
  REGION 1..132: note = tr|A0A514JM21|A0A514JM21_9ACTN Uncharacterized protein OS=Streptomyces asterosporus OX=285570; GN = CD934_03890 PE=4 SV=1
MFSITVRDHIMIAHSFHGEVFGPAQRLHGATFLVDATFRREQLDEDNIVVDIGLATQELGAVVGALNYRNLDNEPDFAGVNTSTEYLAKVIADRLAERIHKGALGEGAKGIAGITVTLHESHIAWASYERAL

SEQ ID NO: 25985 - protein, 132 aa, Streptomyces auratus
  REGION 1..132: note = tr|J1ZRJ2|J1ZRJ2_9ACTN 6-pyruvoyl-tetrahydropterin synthase OS=Streptomyces auratus AGR0001 OX=1160718; GN = SU9_25044 PE=4 SV=1
MFSITVRDHLMVAHSFRGAVFGPAQRLHGATFLVDATFRRPELDDDNIVVDIGLATRELGAVVGELNYRNLDDEPAFAGINTSTEALAKVIADRLADRIQAGNLGEGARELTGISVTLHESHIAWATYERTL

SEQ ID NO: 25986 - protein, 132 aa, unidentified
  source 1..132: note = Streptomyces autolyticus
  REGION 1..132: note = tr|A0A1P8XSP0|A0A1P8XSP0_9ACTN Uncharacterized protein OS=Streptomyces autolyticus OX=75293; GN = BV401_11340 PE=4 SV=1
MFSITVRDHIMIAHSFRGEVFGPAQRLHGATFLVDATFRRADLDGDNIVVDIGLATRELGEVCGALSYRNLDDEPDFKGVNTSTEFLAKVIADRLAERVRSGALGEGARGLSGIAVTLHESHVAWASYERDL

SEQ ID NO: 25987 - protein, 132 aa, Streptomyces avermitilis
  REGION 1..132: note = tr|Q82M64|Q82M64_STRAW Uncharacterized protein; OS = Streptomyces avermitilis (strain ATCC 31267 / DSM 46492 / JCM 5070 / NBRC 14893 / NCIMB 12804 / NRRL 8165 / MA-4680 ) OX=227882 GN=SAVERM_1796 PE=4 SV=1
MFSITVRDHIMIAHSFRGEVFGPAQRLHGATFLVDATFRRAELDDDNIVVDIGLATQELGGVVSELNYRNLDNEPDFAHTNTSTEFLAKVIADRLAERVHKGALGEGARGLAGISVTLHESHIAWASYERAL

SEQ ID NO: 25988 - protein, 132 aa, Streptomyces avermitilis; identical to SEQ ID NO: 25987
  REGION 1..132: note = tr|A0A4D4LJL3|A0A4D4LJL3_STRAX Uncharacterized protein OS=Streptomyces avermitilis OX=33903; GN = SAV14893_009250 PE=4 SV=1

SEQ ID NO: 25989 - protein, 136 aa, Streptomyces avidinii
  REGION 1..136: note = tr|A0A329BTK2|A0A329BTK2_STRAV 6-carboxy-5,6,7,8-tetrahydropterin synthase; OS = Streptomyces avidinii OX=1895 GN=BCL80_11339 PE=3 SV=1
MDFSAVPLPSGDFTIGKMFSFEAGHRLPGLPGEHKCSRQHGHSYEVEVILTAPSLEEPGFVTDFGALAPFKEFLNTELDHHNLHEILPFEPTSERLAQFLAGWFVQNLQPAIPGRLVAVLVRETQSSWARFDVERQ

SEQ ID NO: 25990 - protein, 132 aa, Streptomyces azureus
  REGION 1..132: note = tr|A0A0K8PT80|A0A0K8PT80_STRAJ Queuosine biosynthesis protein QueD OS=Streptomyces azureus; OX = 146537 GN=SAZU_5957 PE=4 SV=1
MFSITVRDHIMIAHSFRGEVFGPAQRLHGATFLVDATFRREQLDEDNIVVDIGLATQELGAVVSELNYRNLDNEPDFAGVNTSTEFLAKVIADRLAERIHKGALGEGAKGIAGLTVTLHESHIAWASYERAL

SEQ ID NO: 25991 - protein, 96 aa, unidentified
  source 1..96: note = Streptomyces bingchenggensis
  REGION 1..96: note = tr|D7BPU7|D7BPU7_STRBB Putative 6-pyruvoyl tetrahydropterin synthase OS=Streptomyces bingchenggensis (strain BCW-1) OX=749414 GN=SBI_01833 PE=4 SV=1
MVVLELSAAPEDLTLPGFVRDYGDLSAFQKWVDGTLDHRHLNDVLDGVNPSAENIAMWLHERWVKEFPELTAVRVSETPKTWATYRPSLGGAHTPE

SEQ ID NO: 25992 - protein, 132 aa, unidentified
  source 1..132: note = Streptomyces bingchenggensis
  REGION 1..132: note = tr|D7CFL6|D7CFL6_STRBB 6-pyruvoyl tetrahydropterin synthase OS=Streptomyces bingchenggensis (strain BCW-1); OX = 749414 GN=SBI_01631 PE=4 SV=1
MFSITVRDHLMIAHSFHGEVFGPAQRLHGATFLVDATFRRTELDADNIVVDIGLATQQLNAVVGELNYRNLDEDPAFAGINTSTEFLAKVIADRLADRVAAGELGEGARGLSALTVTLHESHIAWASYERDL

SEQ ID NO: 25993 - protein, 132 aa, Streptomyces bottropensis
  REGION 1..132: note = tr|M3FHF7|M3FHF7_9ACTN Uncharacterized protein; OS = Streptomyces bottropensis ATCC 25435 OX=1054862; GN = SBD_6876 PE=4 SV=1
MFSITVRDHIMIAHSFRGEVFGPAQRLHGATFLVDATFRRAELDDDNIVVDIGLATQELGAVVSELNYRNLDNEPAFAHTNTSTEFLAKVIADRLAERIHKGALGENAKGIAGITVTLHESHIAWASYERAL

SEQ ID NO: 25994 - protein, 132 aa, Streptomyces bungoensis
  REGION 1..132: note = tr|A0A101TCD0|A0A101TCD0_9ACTN 6-pyruvoyl tetrahydropterin synthase OS=Streptomyces bungoensis; OX = 285568 GN=AQJ66_04220 PE=4 SV=1
MFSITVRDHIMIAHSFHGEVFGPAQRLHGATFLVDATFRREQLDEDNIVVDIGLATQELGAITGELNYRNLDNEPEFAGINTSTEFLAKVIADRLAERIHKGALGEGAKGIAGLTVTLHESHVAWASYERAL

SEQ ID NO: 25995 - protein, 136 aa, Streptomyces bungoensis
  REGION 1..136: note = tr|A0A117RGX1|A0A117RGX1_9ACTN 6-carboxy-5,6,7,8-tetrahydropterin synthase; OS = Streptomyces bungoensis OX=285568 GN=AQJ66_03255 PE=3; SV = 1
MGFTAVPLPPGNFTIGKKFGFEAGHRLPRLPHEHKCSRQHGHSYEVEVILTASALEDPGFVTDFGALAPFKSFLDTELDHHNLHEILPFEPTSERLAQFLAGWFVQNLQSEIPGRLVAVLVRETASSWARFDVVGQ

SEQ ID NO: 25996 - protein, 132 aa, Streptomyces caelestis
  REGION 1..132: note = tr|A0A0M8QSV8|A0A0M8QSV8_9ACTN 6-pyruvoyl tetrahydropterin synthase OS=Streptomyces caelestis; OX = 36816 GN=ADK41_13360 PE=4 SV=1
MFSITVRDHIMIAHSFHGEVFGPAQRLHGATFLVDATFRREQLDEDNIVVDIGLATQELGSVVGELNYRNLDDEPDFAGVNTSTEYLAKVVADRLAERIHKGALGEGAKGIAKIAVTLHESHIAWASYERAL

SEQ ID NO: 25997 - protein, 140 aa, Streptomyces caelestis
  REGION 1..140: note = tr|A0A0M8QN68|A0A0M8QN68_9ACTN 6-carboxy-5,6,7,8-tetrahydropterin synthase; OS = Streptomyces caelestis OX=36816 GN=ADK41_00700 PE=3 SV=1
MTTTTEQAPDGTFTISKRFTFDAAHQLTSLGPDHMCARLHGHGYRVEAVLSCAEDELVPPGFVVDFKDLEPLARYIKDTLDHRNLNEVLGFEPTSELLARHLAHWFLTHFTPAVADRLIQIRVSETEKTWATYTLNRRTA

SEQ ID NO: 25998 - protein, 230 aa, Streptomyces caeruleatus
  REGION 1..230: note = tr|A0A101U5U2|A0A101U5U2_9ACTN Uncharacterized protein OS=Streptomyces caeruleatus OX=661399; GN = AQJ67_09895 PE=4 SV=1
MSGKWRIGKLFRFEATRELSGRRDGHSFTAEIVLASEALTGPGFVADFGELAPVKKHIDAVLDHRMLNDVVPDPSDEGIAEHLRGWARDHLPAAVSSVLQDVRIRTGRTMSPPAGTAVDFGATHWLEGLPPGHQCGHHHGHTYRVFLPASGPEWPAPVNLPPSFADYLTSGLDGQVLNDVFAFNPTCEHLAEHFAKWLAERDIAGIDEEVLTVRVSETESTWGEHEGRPA

SEQ ID NO: 25999 - protein, 132 aa, Streptomyces caeruleatus
  REGION 1..132: note = tr|A0A101U856|A0A101U856_9ACTN 6-pyruvoyl tetrahydropterin synthase OS=Streptomyces caeruleatus; OX = 661399 GN=AQJ67_03120 PE=4 SV=1
MFSITVRDHIMIAHSFRGDVFGPAQRLHGATFLVDATFRREQLDDDNIVVDIGLATRELGAVVGELNYRNLDNEPDFAGINTSTEFLAKVIADRLAERIEKGALGEGARGLAGLTVTLHESHVAWASYERAL

SEQ ID NO: 26000 - protein, 132 aa, Streptomyces canus
  REGION 1..132: note = tr|A0A101P997|A0A101P997_9ACTN 6-pyruvoyl tetrahydropterin synthase OS=Streptomyces canus OX=58343; GN = AQI96_30160 PE=4 SV=1
MFSITVRDHIMIAHSFRGEVFGPAQRLHGATFLVDATFRREQLDDDNIVVDIGLATQELGAVVSELNYRNLDNEPDFAGINTSTEFLAKVIADRLAERIAKGALGEGARGLAGLTVSLHESHVAWASYERAL

SEQ ID NO: 26001 - protein, 132 aa, Streptomyces canus
  REGION 1..132: note = tr|A0A101RTL7|A0A101RTL7_9ACTN 6-pyruvoyl tetrahydropterin synthase OS=Streptomyces canus OX=58343; GN = AQJ46_34280 PE=4 SV=1
MFSITVRDHIMIAHSFRGEVFGPAQRLHGATFLVDATFRREQLDDDNIVVDIGLATQELGAVVSELNYRNLDNEPDFAGINTSTEFLAKVIADRLAERIEKGALGEGAKGLAGLTVSLHESHVAWASYERAL

SEQ ID NO: 26002 - protein, 136 aa, Streptomyces capillispiralis
  REGION 1..136: note = tr|A0A561TQC6|A0A561TQC6_9ACTN 6-carboxy-5,6,7,8-tetrahydropterin synthase; OS = Streptomyces capillispiralis OX=68182 GN=FHX78_116358; PE = 3 SV=1
MGFTAVPLPPGNFTIGKKFAFEAGHRLPRLPHEHKCSRQHGHSYEVEVILTASALEDPGFVTDFGALAPFKSFLDTELDHHNLHEILPFEPTSERLAQFLAGWFVQNLQSEIPGRLVAVLVRETASSWARFDVVGQ

SEQ ID NO: 26003 - protein, 132 aa, Streptomyces capillispiralis
  REGION 1..132: note = tr|A0A561TA13|A0A561TA13_9ACTN 6-pyruvoyl-tetrahydropterin synthase OS=Streptomyces capillispiralis OX=68182 GN=FHX78_11862 PE=4 SV=1
MFSITVRDHIMIAHSFRGEVFGPAQRLHGATFLVDATFRREQLDEDNIVVDIGLATQELGAVVGELNYRNLDNEPDFAGVNTSTEYLAKVIADRLAERIHKGALGEGAKGIAGLSVTLHESHIAWASYERAL

SEQ ID NO: 26004 - protein, 142 aa, unidentified
  source 1..142: note = Streptomyces cattleya
  REGION 1..142: note = tr|F8JT14|F8JT14_STREN 6-pyruvoyl-tetrahydropterin synthase OS=Streptomyces cattleya (strain ATCC 35852 / DSM 46488 / JCM 4925 / NBRC 14057 / NRRL 8057) OX=1003195 G; N = SCATT_05780 PE=4 SV=1
MTHSVTVRHNFETAHRLPHLPGKCTSLHGHSWWTEVTVEAPKLAAGLVVEFGPFKRALRQWIDTHLDHGVMLGPNDPLLPVLRSFDCKAYEVTGWPTVENVAALLADMAAGVLRDLVRAPGARVTRVHLAETHVNAATWIAS

SEQ ID NO: 26005 - protein, 132 aa, Streptomyces cellostaticus
  REGION 1..132: note = tr|A0A101NSI7|A0A101NSI7_9ACTN 6-pyruvoyl tetrahydropterin synthase OS=Streptomyces cellostaticus; OX = 67285 GN=AQI88_02380 PE=4 SV=1
MFSITVRDHIMIAHSFRGEVFGPAQRLHGATFLVDATFRREQLDEDNIVVDIGLATQELGAVTGELNYRNLDDEPEFAGINTSTEFLAKVIADRLAERVHKGALGEGAKGLASLTVTLHESHIAWASYERAL

SEQ ID NO: 26006 - protein, 118 aa, Streptomyces chartreusis
  REGION 1..118: note = tr|A0A2N9B6V5|A0A2N9B6V5_STRCX 6-carboxy-5,6,7,8-tetrahydropterin synthase; OS = Streptomyces chartreusis NRRL 3882 OX=1079985 GN=queD; PE = 3 SV=1
MEIFREFTFEAAHRLPRVPEGHKCARLHGHSYKVTVHVEAPVEPEAGWVMDFGDIKQAFKPIDAQLDHYYLNDIEGLDNPTSENLARWIWDRMVTELPGLSAITVRETCTSGCTYRGE

SEQ ID NO: 26007 - protein, 132 aa, Streptomyces chartreusis; identical to SEQ ID NO: 25990
  REGION 1..132: note = tr|A0A2N9B369|A0A2N9B369_STRCX Queuosine biosynthesis protein QueD OS=Streptomyces chartreusis NRRL 3882 OX=1079985 GN=SCNRRL3882_1246 PE=4 SV=1

SEQ ID NO: 26008 - protein, 132 aa, Streptomyces chattanoogensis
  REGION 1..132: note = tr|A0A0N0GX99|A0A0N0GX99_9ACTN 6-pyruvoyl tetrahydropterin synthase OS=Streptomyces chattanoogensis; OX = 66876 GN=ADL29_27265 PE=4 SV=1
MFSITVRDHLMVAHSFRGAVFGPAQRLHGATFVVDATFRRAELDADNIVVDIGLATQELGGVVGELNYRNLDDEPAFAGINTSTEALAKVIADRLADRIHAGNLGESARELAGISVTLHESHIAWATYERTL

SEQ ID NO: 26009 - protein, 132 aa, Streptomyces coelicoflavus
  REGION 1..132: note = tr|H1QAA5|H1QAA5_9ACTN Uncharacterized protein; OS = Streptomyces coelicoflavus ZG0656 OX=1120227; GN = SMCF_1812 PE=4 SV=1
MFSITVRDHIMVAHSFRGDVFGPAQRLHGATFLVDATFRREQLDEDNIVVDIGLATRELGAVVAELNYRNLDNEPDFAGVNTSTEFLAKVVADRLAERVHKGALGEGARGLAGLTVTLHESHVAWASYERAL

SEQ ID NO: 26010 - protein, 132 aa, unidentified
  source 1..132: note = Streptomyces coelicolor
  REGION 1..132: note = tr|A0A4R8N8F6|A0A4R8N8F6_STRCH 6-pyruvoyl-tetrahydropterin synthase OS=Streptomyces coelicolor OX=1902 GN=C7986_10510 PE=4 SV=1
MFSITVRDHIMIAHSFRGDVFGPAQRLHGATFLVDATFRREQLDEDNIVVDIGLATQELGAVVGALNYRNLDNEPDFAGVNTSTEFLAKVIADRLAERVHKGALGEGARGLAGLTVTLHESHVAWASYERAL

SEQ ID NO: 26011 - protein, 132 aa, unidentified; identical to SEQ ID NO: 26010
  source 1..132: note = Streptomyces coelicolor
  REGION 1..132: note = tr|O86696|O86696_STRCO 6-pyruvoyl-tetrahydropterin synthase OS=Streptomyces coelicolor (strain ATCC BAA-471 / A3(2) / M145) OX=100226 GN=SCO6650 PE=1 SV=1

SEQ ID NO: 26012 - protein, 132 aa, Streptomyces collinus
  REGION 1..132: note = tr|S5V597|S5V597_STRC3 Uncharacterized protein; OS = Streptomyces collinus (strain DSM 40733 / Tu 365); OX = 1214242 GN=B446_30310 PE=4 SV=1
MFSITVRDHIMIAHSFRGEVFGPAQRLHGATFLVDATFRREQLDEDNIVVDIGLATRELGAVTGELNYRNLDDEPEFAGINTSTEFLAKVIADRLAERVHKGALGEGAKGLKSLSVTLHESHIAWASYERGL

SEQ ID NO: 26013 - protein, 132 aa, Streptomyces corchorusii
  REGION 1..132: note = tr|A0A101PQY5|A0A101PQY5_STRCK 6-pyruvoyl tetrahydropterin synthase OS=Streptomyces corchorusii; OX = 1903 GN=AQJ11_41535 PE=4 SV=1
MFSITVRDHMMVAHSFRGEVFGPAQRLHGATFIVDATFRRPDLDDDNIVVDIGLATAELGKVVGALNYRNLDDEEQFQQINTSTEYLAKVIADRLVERIHAGALGEGARGIHEVAVTLHESHIAWASYERRV

SEQ ID NO: 26014 - protein, 132 aa, Streptomyces corchorusii
  REGION 1..132: note = tr|A0A101QKS7|A0A101QKS7_STRCK 6-pyruvoyl tetrahydropterin synthase OS=Streptomyces corchorusii; OX = 1903 GN=AQJ11_06180 PE=4 SV=1
MFSITVRDHIMIAHSFHGEVFGPAQRLHGATFLVDATFRREQLDEDNIVVDIGLATRELRTITAELNYRNLDDEPEFAGVNTSTEFLAKVVADRLAERIAKGALGEGAKGLAGITVTLHESHIAWASYERGL

SEQ ID NO: 26015 - protein, 132 aa, Streptomyces curacoi
  REGION 1..132: note = tr|A0A124H4E5|A0A124H4E5_9ACTN 6-pyruvoyl tetrahydropterin synthase OS=Streptomyces curacoi; OX = 146536 GN=AQI70_12035 PE=4 SV=1
MFSITVRDHIMIAHSFRGEVFGPAQRLHGATFLVDATFRREQLDDDNIVVDIGLATRELGAVVGELNYRNLDNEPDFAGINTSTEFLAKVIADRLAERIQKGALGEGAKGLAGITVTLHESHVAWASYERAL

SEQ ID NO: 26016 - protein, 132 aa, unidentified
  source 1..132: note = Streptomyces davaonensis
  REGION 1..132: note = tr|K4QTD5|K4QTD5_STRDJ Queuosine biosynthesis protein QueD OS=Streptomyces davaonensis (strain DSM 101723 / JCM 4913 / KCC S-0913 / 768) OX=1214101; GN = BN159_1832 PE= 4 SV=1
MFSITVRDHIMIAHSFRGEVFGPAQRLHGATFLVDATFRREQLDEDNIVVDIGLATQELGAVVAELNYRNLDNEPDFAGINTSTEFLAKVIADRLAERVHKGGLGEGARGLAQISVTLHESHVAWASYERAL

SEQ ID NO: 26017 - protein, 132 aa, Streptomyces decoyicus
  REGION 1..132: note = tr|A0A0L8M999|A0A0L8M999_9ACTN 6-pyruvoyl tetrahydropterin synthase OS=Streptomyces decoyicus; OX = 249567 GN=ADK74_11730 PE=4 SV=1
MFSITVRDHLMVAHSFRGAVFGPAQRLHGATFIVDATFRRAELDADNIVVDIGLATQELGAVVGELNYRNLDDEPAFAGINTSTEALAKVIADRLAERIEAGNFGAGARELAGISVTLHESHIAWATYERTL

SEQ ID NO: 26018 - protein, 132 aa, unidentified
  source 1..132: note = Streptomyces dengpaensis
  REGION 1..132: note = tr|A0A2L2MFL6|A0A2L2MFL6_9ACTN 6-carboxytetrahydropterin synthase OS=Streptomyces dengpaensis OX=2049881 GN=C4B68_05545 PE=4 SV=1
MFSITVRDHLMIAHSFRGEVFGPAQRLHGATFLVDATFRRAELDDDNIVVDIGLATQELGAVVSALNYRNLDDEPDFKNTNTSTEFLAKVIADRLADRVHAGALGEGARGLSGITVTLHESHIAWASYERAL

SEQ ID NO: 26019 - protein, 132 aa, Streptomyces diastatochromogenes
  REGION 1..132: note = tr|A0A233S3Q6|A0A233S3Q6_9ACTN Uncharacterized protein OS=Streptomyces diastatochromogenes OX=42236; GN = BEK98_35135 PE=4 SV=1
MFSITVRDHIMIAHSFRGEVFGPAQRLHGATFLVDATFRREQLDEDNIVVDIGLATQELGAITAELNYRNLDDEPEFAGINTSTEFLAKVIADRLAERVHKGALGEGAKGLKSVSVTLHESHIAWASYERGV

SEQ ID NO: 26020 - protein, 132 aa, Streptomyces diastatochromogenes
  REGION 1..132: note = tr|V5N6V9|V5N6V9_9ACTN 6-pyruvoyl tetrahydropterin synthase OS=Streptomyces diastatochromogenes OX=42236 PE=4; SV = 1
MFSITVRDHLMVAHSFRGAVFGPAQRLHGATFIVDATFRRPELDDDNIVVDIGLATQELGGVIAELNYRNLDDEPAFAGTNTSTEALAKVIADRLADRVHAGNLGAGARDLSGITVTLHESHVAWASYERAL

SEQ ID NO: 26021 - protein, 121 aa, Streptomyces filamentosus
  REGION 1..121: note = tr|D6AIR4|D6AIR4_STRFL 6-carboxy-5,6,7,8-tetrahydropterin synthase; OS = Streptomyces filamentosus NRRL 15998 OX=457431; GN = SSGG_00406 PE=3 SV=1
MMLHITKEFHFSASHRLEHLPSDHQCARLHGHNYIIELKLSAAPDQLTEPGFVRDYGDLADFKKWLDHTLDHRHLNDIIEDRNPSAENMAMWIYDQWTERYPELSAVRVSETDKTWAEYRP

SEQ ID NO: 26022 - protein, 131 aa, Streptomyces filamentosus
  REGION 1..131: note = tr|W9FLS6|W9FLS6_STRFL 6-carboxy-5,6,7,8-tetrahydropterin synthase; OS = Streptomyces filamentosus NRRL 11379 OX=457430; GN = SSIG_07345 PE=3 SV=1
MTPRFTSRSRLMLHITKEFHFSASHRLEHLPSDHQCARLHGHNYIIELKLSAAPDQLTEPGFVRDYGDLADFKKWLDHTLDHRHLNDIIEDRNPSAENMAMWIYDQWTERYPELSAVRVSETDKTWAEYRP

SEQ ID NO: 26023 - protein, 132 aa, unidentified
  source 1..132: note = Streptomyces fungicidicus
  REGION 1..132: note = tr|A0A494V8K7|A0A494V8K7_9ACTN 6-carboxytetrahydropterin synthase OS=Streptomyces fungicidicus OX=68203 GN=CNQ36_30485 PE=4 SV=1
MFSITVRDHIMIAHSFRGEVFGPAQRLHGATFLVDATFRREQLDDDNIVVDIGLATQELGAVVGELNYRNLDNEPDFAGVNTSTEYLAKVIADRLAERVHKGALGEGAKGIAKIAVTLHESHIAWASYERAL

SEQ ID NO: 26024 - protein, 132 aa, Streptomyces galbus
  REGION 1..132: note = tr|A0A4U5X9N7|A0A4U5X9N7_STRGB 6-carboxytetrahydropterin synthase OS=Streptomyces galbus; OX = 33898 GN=E4U92_04555 PE=4 SV=1
MFSVTVRDHIMIAHSFRGEVFGPAQRLHGATFLVDATFRREQLDADNIVVDIGLATQELGAVVSELNYRNLDNEPDFAGINTSTEFLAKVVADRLAERIHQGALGEGARGIAGLSVTLHESHVAWASYERAL

SEQ ID NO: 26025 - protein, 132 aa, Streptomyces gancidicus
  REGION 1..132: note = tr|M3E8R6|M3E8R6_9ACTN Uncharacterized protein; OS = Streptomyces gancidicus BKS 13-15 OX=1284664; GN = H114_05839 PE=4 SV=1
MFSITVRDHIMIAHSFRGEVFGPAQRLHGATFLVDATFRREQLDEDNIVVDIGLATQELGAVVGELNYRNLDNEPDFAGVNTSTEYLARVIADRLAERIHKGALGEGAKGIARISVTLHESHIAWASYERAL

SEQ ID NO: 26026 - protein, 132 aa, unidentified
  source 1..132: note = Streptomyces gilvosporeus
  REGION 1..132: note = tr|A0A1V0TM62|A0A1V0TM62_9ACTN Uncharacterized protein OS=Streptomyces gilvosporeus OX=553510; GN = B1H19_07390 PE=4 SV=1
MFSITVRDHLMVAHSFRGAVFGPAQRLHGATFVVDATFRRAELDADNIVVDIGLATQELGGVIGELNYRNLDDEPAFAGINTSTEALAKVIADRLADRVRAGNLGESARELSGISVTLHESHIAWATYERTL

SEQ ID NO: 26027 - protein, 132 aa, Streptomyces glaucescens
  REGION 1..132: note = tr|A0A089XJY9|A0A089XJY9_STRGA Uncharacterized protein OS=Streptomyces glaucescens OX=1907 GN=SGLAU_27865; PE = 4 SV=1
MFSVTVRDHIMIAHSFRGDVFGPAQRLHGATFLVDATFRRPELDDDNIVVDIGLATRELGAVVGELNYRNLDNEPDFAGVNTSTEFLAKVIADRLAERVHKGALGEGARGIAGITVTLHESHVAWASYERDL

SEQ ID NO: 26028 - protein, 132 aa, Streptomyces glauciniger
  REGION 1..132: note = tr|A0A239N335|A0A239N335_9ACTN 6-pyruvoyl-tetrahydropterin synthase OS=Streptomyces glauciniger OX=235986 GN=SAMN05216252_13018 PE=4 SV=1
MFSITVRDHVMVAHSFRGEVFGPAQRLHGATFLVDATFRRPELDADNIVVDIGLATQELGAVLAALNYRNLDDDPDFSGINTSTEFLAKTIADRLADRVAAGKLGEGAHGLTGITVTLHESHVAWASYERSL

SEQ ID NO: 26029 - protein, 132 aa, Streptomyces griseoaurantiacus
  REGION 1..132: note = tr|F3NG67|F3NG67_9ACTN 6-pyruvoyl tetrahydropterin synthase OS=Streptomyces griseoaurantiacus M045 OX=996637; GN = SGM_2131 PE=4 SV=1
MFSITVRDHLMIAHSFRGEVFGPAQRLHGATFLVDATFRRPELDEDNIVVDIGLATQELGAVVAELNYRNLDNEPDFADTNTSTEFLAKVVADRLARRIEDGRLGEGARGLTGLTVTLHESHIAWASYERAL

SEQ ID NO: 26030 - protein, 136 aa, Streptomyces griseoaurantiacus
  REGION 1..136: note = tr|F3NQA0|F3NQA0_9ACTN 6-carboxy-5,6,7,8-tetrahydropterin synthase; OS = Streptomyces griseoaurantiacus M045 OX=996637; GN = SGM_5175 PE=3 SV=1
MGFTAVPLPPGNFTIGKKFGFEAGHRLPRLPHEHKCSRQHGHSYEVEVILTASALEDPGFVTDFGALAPFKSFLDTELDHHNLHEILPFEPTSERLAQFLAGWFVQNLQSEIAGRLVAVLVRETASSWARFDVVGQ

SEQ ID NO: 26031 - protein, 144 aa, Streptomyces griseocarneus
  REGION 1..144: note = tr|A0A3L8IHQ9|A0A3L8IHQ9_9ACTN 6-pyruvoyl tetrahydrobiopterin synthase OS=Streptomyces griseocarneus; OX = 51201 GN=CTZ27_33285 PE=4 SV=1
MSRSQGVTVRHNFETAHRLPHLPGKCVSLHGHSWWVQVTVSAPEPRAGMVVEFGPFKQALRAWIDEHLDHGVMLGPDDPLVEVLRAHDCKVYEVPGWPTVEHVAALLAGVADQVLAALPRAPGARVTGVEVHETHVNAASWTAA

SEQ ID NO: 26032 - protein, 121 aa, Streptomyces griseochromogenes
  REGION 1..121: note = tr|A0A1B1B2S5|A0A1B1B2S5_9ACTN 6-carboxy-5,6,7,8-tetrahydropterin synthase; OS = Streptomyces griseochromogenes OX=68214 GN=AVL59_29115; PE = 3 SV=1
MLRITKDFQFSASHRLDHLPDDHQCARLHGHNYTVQLELSVQSRDDLTRAGFVRDYGDLADFKKWLDSELDHRHLNDVISGRNPSAENLAMWIYELWSERFSEISAVRVSETPKTWAEYRP

SEQ ID NO: 26033 - protein, 132 aa, Streptomyces griseochromogenes
  REGION 1..132: note = tr|A0A1B1AVQ7|A0A1B1AVQ7_9ACTN Uncharacterized protein OS=Streptomyces griseochromogenes OX=68214; GN = AVL59_14455 PE=4 SV=1
MFSITVRDHIMIAHSFRGDVFGPAQRLHGATFLVDATFRREQLDEDNIVVDIGLATQELGAVTGELNYRNLDDEPEFAGINTSTEFLAKVIADRLAERVHKGALGEGAKGLKSLTVTLHESHIAWASYERAL

SEQ ID NO: 26034 - protein, 137 aa, Streptomyces griseoflavus
  REGION 1..137: note = tr|D9Y0X4|D9Y0X4_9ACTN 6-pyruvoyl tetrahydropterin synthase OS=Streptomyces griseoflavus Tu4000 OX=467200; GN = SSRG_00715 PE=4 SV=1
MEGRPLFSITVRDHIMIAHSFRGEVFGPAQRLHGATFLVDATFRREQLDDDNIVVDIGLATQELGAVVGELNYRNLDNEPDFAGVNTSTEYLAKVIADRLAERVHKGALGEGAKGIAKIAVTLHESHIAWASYERAL

SEQ ID NO: 26035 - protein, 121 aa, Streptomyces griseoflavus; identical to SEQ ID NO: 25976
  REGION 1..121: note = tr|A0A0L8NMW9|A0A0L8NMW9_9ACTN 6-carboxy-5,6,7,8-tetrahydropterin synthase; OS = Streptomyces griseoflavus OX=35619 GN=ADK76_10880 PE=3; SV = 1

SEQ ID NO: 26036 - protein, 132 aa, Streptomyces griseoluteus
  REGION 1..132: note = tr|A0A4Z1D5C1|A0A4Z1D5C1_STRGP 6-carboxytetrahydropterin synthase OS=Streptomyces griseoluteus OX=29306 GN=E5082_26740 PE=4 SV=1
MFSITVRDHIMIAHSFRGDVFGPAQRLHGATFLVDATFRREQLDEDNIVVDIGLATRELGSITAELNYRNLDDDPEFAGVNTSTEFLAKVVADRLAERIAKGALGEGAKGLSALSVTLHESHIAWASYERGL

SEQ ID NO: 26037 - protein, 118 aa, Streptomyces griseoruber
  REGION 1..118: note = tr|A0A117R9I9|A0A117R9I9_9ACTN 6-carboxy-5,6,7,8-tetrahydropterin synthase; OS = Streptomyces griseoruber OX=1943 GN=AQJ64_31635 PE=3; SV = 1
MEIFREFAFEAAHRLPRVPEGHKCARLHGHSYKVTVHVEAPVDVEAGWVMDFGDIKRAFTPIDAQLDHYYLNDIEGLDNPTSENLARWIWGRLITELPSLSAITVRETCTSGCTYRGE

SEQ ID NO: 26038 - protein, 132 aa, Streptomyces griseoruber
  REGION 1..132: note = tr|A0A117RFQ6|A0A117RFQ6_9ACTN 6-pyruvoyl tetrahydropterin synthase OS=Streptomyces griseoruber; OX = 1943 GN=AQJ64_03310 PE=4 SV=1
MFSVTVRDHIMIAHSFRGEVFGPAQRLHGATFLVDATFRREQLDDDNIVVDIGLATQELGAVVSELNYRNLDNEPDFAGINTSTEFLAKVVADRLAERIHKGALGEGARGIASLSVTLHESHIAWASYERAL

SEQ ID NO: 26039 - protein, 132 aa, Streptomyces griseorubiginosus
  REGION 1..132: note = tr|A0A3N1N4K6|A0A3N1N4K6_9ACTN 6-pyruvoyl-tetrahydropterin synthase OS=Streptomyces griseorubiginosus OX=67304 GN=EDC83_7235 PE=4 SV=1
MFSITVRDHIMIAHSFRGEVFGPAQRLHGATFLVDATFRREQLDDDNIVVDIGLATQELGAVVSELNYRNLDNEPDFAGINTSTEFLAKVIADRLAERIEKGALGEGAKGLAGLTVTLHESHVAWASYERAL

SEQ ID NO: 26040 - protein, 132 aa, Streptomyces griseorubiginosus
  REGION 1..132: note = tr|A0A117NZC3|A0A117NZC3_9ACTN 6-pyruvoyl tetrahydropterin synthase OS=Streptomyces griseorubiginosus OX=67304 GN=AQJ54_14950 PE=4 SV=1
MFSITVRDHIMIAHSFRGEVFGPAQRLHGATFLVDATFRREQLDDDNIVVDIGLATQELGAVVSELNYRNLDNEPDFAGVNTSTEFLAKVIADRLAERIEKGALGEGAKGLAGLTVTLHESHVAWASYERAL

SEQ ID NO: 26041 - protein, 132 aa, Streptomyces griseoviridis
  REGION 1..132: note = tr|A0A3S9Z883|A0A3S9Z883_STRGD 6-carboxytetrahydropterin synthase OS=Streptomyces griseoviridis OX=45398 GN=ELQ87_05970 PE=4 SV=1
MFSVTVRDHIMIAHSFRGEVFGPAQRLHGATFLVDATFRREQLDDDGIVVDIGLATQELGAVTSELNYRNLDNEPEFAGVNTSTEFLAKVIADRLAERVHKGALGEGARGIAGIAVTLHESHIAWASYERAL

SEQ ID NO: 26042 - protein, 233 aa, Streptomyces griseus
  REGION 1..233: note = tr|A0A2X2M9D4|A0A2X2M9D4_STRGR Queuosine biosynthesis QueD, PTPS-I OS=Streptomyces griseus OX=1911; GN = queD PE=4 SV=1
MSSTQCLFRIGKGFRFEATRRLDDGRYDGHSFTAEAVLSSAVLSPEGFVADFGDLAPLKRYIDGALDHQILNDCVKDVSNEGIAQHLLGWARGHLASDVVSVLEGVQVRTGRTQPLPSAAFAPFEASHQLRGLPEGHLCGRLHGHSYVLSVPVSAVPRVGDIPVLLREHLRSAVHGRVLNEVIPGLNPTSENLARHFSQWLADRAMAGAGWNAACLRVSETETSWAEYTGGTA

SEQ ID NO: 26043 - protein, 118 aa, Streptomyces hainanensis
  REGION 1..118: note = tr|A0A4R4TVE3|A0A4R4TVE3_9ACTN 6-carboxy-5,6,7,8-tetrahydropterin synthase; OS = Streptomyces hainanensis OX=402648 GN=queD PE=3 SV=1
MEIFREFTFEAAHRLPNVPEGHKCARLHGHSYKVIVHVVAPVDPEAGWVMDFGDLKRTFKPIEAQLDHYYLNDIEGLENPTSEVLARWIWERLKPALPDLSALTVRETCTSGCTYRGE

SEQ ID NO: 26044 - protein, 122 aa, unidentified
  source 1..122: note = Streptomyces harbinensis
  REGION 1..122: note = tr|A0A1I6RYI3|A0A1I6RYI3_9ACTN 6-carboxy-5,6,7,8-tetrahydropterin synthase; OS = Streptomyces harbinensis OX=1176198; GN = SAMN05444716_103596 PE=3 SV=1
MFMISKEFHFSASHVLDRLPSWHQCARMHGHNYVVVLELSARAEDLTEAGFVRDYRDLDPFKKWLDDTLDDRHLNEALGETISPSAENLAKWIFDAWVEQIPELAAVRVSETPKTWAVYRPD

SEQ ID NO: 26045 - protein, 140 aa, Streptomyces himastatinicus
  REGION 1..140: note = tr|D9WF39|D9WF39_9ACTN Putative 6-pyruvoyl tetrahydropterin synthase OS=Streptomyces himastatinicus ATCC 53653 OX=457427 GN=SSOG_07063 PE=4 SV=1
MPPYREGPLFSITVRDHLMVAHSFSGEVFGPAQRLHGATFLVDATFRRSALDDDNIVVDIGLATQELGAVVGDLNYRNLDDEPAFKGINTSTEFLAKVIADRLAERVHAGALGEGARGLAGIQVTLHESHVAWASYERDL

SEQ ID NO: 26046 - protein, 157 aa, Streptomyces himastatinicus
  REGION 1..157: note = tr|D9WJ60|D9WJ60_9ACTN 6-pyruvoyl-tetrahydropterin synthase OS=Streptomyces himastatinicus ATCC 53653; OX = 457427 GN=SSOG_08871 PE=4 SV=1
MHHPPARFSVTKLFDDLPCTHRSWAHGGKCSFLHGYERSFEIEFGCGELEPKTGFVIDFGDLKEVRALLQAQFDHTTLIAADDPHRELFEDLGRSGVIDLRIMDHTGMEGAAEWVHDRVAQLVGERTVGRVRVLRVVARESRKNAVVFRAPDPRDPR

SEQ ID NO: 26047 - protein, 132 aa, Streptomyces hygroscopicus; identical to SEQ ID NO: 26013
  REGION 1..132: note = tr|A0A0S2PFN1|A0A0S2PFN1_STRHL Uncharacterized protein OS=Streptomyces hygroscopicus subsp. limoneus; OX = 264445 GN=SHL15_8115 PE=4 SV=1

SEQ ID NO: 26048 - protein, 132 aa, Streptomyces hygroscopicus
  REGION 1..132: note = tr|A0A1S6RFN2|A0A1S6RFN2_STRHY 6-pyruvoyl tetrahydropterin synthase OS=Streptomyces hygroscopicus; OX = 1912 GN=SHXM_03167 PE=4 SV=1
MFSITVRDHIMIAHSFRGDVFGPAQRLHGATFLVDATFRRAELDDDNIVVDIGLATRELGEVCGALSYRNLDDEPDFEGINTSTEFLAKVIADRLAERVHSGALGEGARGLSAIAVTLHESHVAWASYERGL

SEQ ID NO: 26049 - protein, 132 aa, unidentified
  source 1..132: note = Streptomyces incarnatus
  REGION 1..132: note = tr|A0A0G3A6M7|A0A0G3A6M7_9ACTN 6-pyruvoyl tetrahydropterin synthase OS=Streptomyces incarnatus; OX = 665007 GN=ABB07_05505 PE=4 SV=1
MFSITVRDHIMIAHSFRGEVFGPAQRLHGATFLVDATFRREQLDEDNIVVDIGLATQELRLITAELNYRNLDDEPEFAGVNTSTEFLAKVIADRLAERIHKGALGEGAKGLAGLTVTLHESHIAWASYERGL

SEQ ID NO: 26050 - protein, 132 aa, Streptomyces ipomoeae
  REGION 1..132: note = tr|A0A540Q019|A0A540Q019_9ACTN 6-carboxytetrahydropterin synthase OS=Streptomyces ipomoeae OX=103232 GN=Sipo7851_30260 PE=4 SV=1
MFSITVRDHIMIAHSFRGEVFGPAQRLHGATFLVDATFRRAELDDDNIVVDIGLATQELGAVVSELNYRNLDNEPDFANTNTSTEFLAKVIADRLAERIHKGALGENAKGIAGITVTLHESHIAWASYERAL

SEQ ID NO: 26051 - protein, 132 aa, Streptomyces ipomoeae; identical to SEQ ID NO: 26050
  REGION 1..132: note = tr|L1KV02|L1KV02_9ACTN Putative 6-pyruvoyl tetrahydropterin synthase OS=Streptomyces ipomoeae 91-03; OX = 698759 GN=STRIP9103_08363 PE=4 SV=1

SEQ ID NO: 26052 - protein, 120 aa, Streptomyces iranensis
  REGION 1..120: note = tr|A0A060ZZV9|A0A060ZZV9_9ACTN 6-carboxy-5,6,7,8-tetrahydropterin synthase; OS = Streptomyces iranensis OX=576784 GN=SIRAN7878 PE=3 SV=1
MYFCISKDFHFSASHRLDGLDASHPCARLHGHNYVVALELAAGSNGLDGVGFVRDYGDLAEFSQWLDSELDHRHLNDVVDTHPSAENISRWIFERGISRYPELHAVRVSETPKTWAEYRK

SEQ ID NO: 26053 - protein, 92 aa, Streptomyces iranensis
  REGION 1..92: note = tr|A0A061A065|A0A061A065_9ACTN Uncharacterized protein OS=Streptomyces iranensis OX=576784 GN=SIRAN7998; PE = 4 SV=1
MHGHNYVIELELAADDADLLPVGFVRDYGDLSAFKVWLDNHLDHRHLNDVMDENPTAENMAAWVYKTWSMEFPELTCVRVSETPKTWAEYRP

SEQ ID NO: 26054 - protein, 110 aa, unidentified
  source 1..110: note = Streptomyces jeddahensis
  REGION 1..110: note = tr|A0A177I054|A0A177I054_9ACTN 6-carboxy-5,6,7,8-tetrahydropterin synthase; OS = Streptomyces jeddahensis OX=1716141 GN=queD PE=4 SV=1
MLTIAKEFHFSASHVLDRLPSWHPCARMHGHNYLVVLELSARREDLTEAGFVRDYRELDDFKTWMDDTLDHRHLNKAMGGGYLPVRGESRRMDLRPLDRAISGVDSGQGL

SEQ ID NO: 26055 - protein, 136 aa, Streptomyces jietaisiensis; identical to SEQ ID NO: 26002
  REGION 1..136: note = tr|A0A1G7J4G4|A0A1G7J4G4_9ACTN 6-carboxy-5,6,7,8-tetrahydropterin synthase; OS = Streptomyces jietaisiensis OX=235987; GN = SAMN05216260_106285 PE=3 SV=1

SEQ ID NO: 26056 - protein, 132 aa, Streptomyces jietaisiensis; identical to SEQ ID NO: 26029
  REGION 1..132: note = tr|A0A1G7INC9|A0A1G7INC9_9ACTN 6-pyruvoyl-tetrahydropterin synthase OS=Streptomyces jietaisiensis OX=235987 GN=SAMN05216260_106104 PE=4 SV=1

SEQ ID NO: 26057 - protein, 136 aa, unidentified
  source 1..136: note = Streptomyces kanasensis
  REGION 1..136: note = tr|A0A124EC52|A0A124EC52_9ACTN 6-carboxy-5,6,7,8-tetrahydropterin synthase; OS = Streptomyces kanasensis OX=936756 GN=ATE80_23100 PE=3; SV = 1
METAPVPLPSGRFTIGKTFDFEAGHRLASLPPEHKCSRQHGHSYEVEVVLSASSLQGPGFVTDFGDLSPFKQYLDSELDHHNLYEVLDFEPTSELLAQYLAGWFITNMPSRIARQLTAVRVRETQRSWAQFDVAAT

SEQ ID NO: 26058 - protein, 132 aa, Streptomyces kasugaensis
  REGION 1..132: note = tr|A0A4Q9I0X6|A0A4Q9I0X6_STRKA 6-carboxytetrahydropterin synthase OS=Streptomyces kasugaensis OX=1946 GN=EYS09_02145 PE=4 SV=1
MFSITVRDHFMAAHSFRGEVFGPAQRLHGATFTVDATFRRTTLDADNIVVDIGLATQELGAVLGEFNYRNLDDHPAFEGINTSTEFLAKVIADRLAGQVHSGALGEGARQLSGISVTLHESPVAWATYERAL

SEQ ID NO: 26059 - protein, 125 aa, Streptomyces katrae
  REGION 1..125: note = tr|A0A0F4J9P1|A0A0F4J9P1_9ACTN 6-carboxy-5,6,7,8-tetrahydropterin synthase; OS = Streptomyces katrae OX=68223 GN=VR44_18905 PE=3 SV=1
MLTITKEFHFSASHVLDRLPSWHPCARMHGHNYAVVIELSGRREDLTEAGFVRDYRDLDAFKQWMDETFDHRHLNEALGGGISPSAENLAVWIFDQWTERIPELTAVRISETPKTWAEYRPVREA

SEQ ID NO: 26060 - protein, 136 aa, unidentified
  source 1..136: note = Streptomyces klenkii
  REGION 1..136: note = tr|A0A3B0A5R2|A0A3B0A5R2_9ACTN 6-carboxy-5,6,7,8-tetrahydropterin synthase; OS = Streptomyces klenkii OX=1420899 GN=D7231_34820 PE=3 SV=1
MPTTIGKAFRFEAAHRLASLGPEHKCSRPHGHSYRVEIALTRAELVPPGFVTDFGDLAPFGRYLSEELDHRDLTETLPFEPTCELLARHLAQWFIANLEPDIPGRLRSVRVSETASTWAQYDVEERDGGRAPADRR

SEQ ID NO: 26061 - protein, 132 aa, unidentified
  source 1..132: note = Streptomyces lasaliensis
  REGION 1..132: note = tr|A0A4V6AWH5|A0A4V6AWH5_STRLS 6-carboxytetrahydropterin synthase OS=Streptomyces lasaliensis OX=324833 GN=E4U91_30150 PE=4 SV=1
MFSVTVRDHIMIAHSFRGEVFGPAQRLHGATFLVDATFRREQLDADNIVVDIGLATQELGAVVSELNYRNLDDEPDFAGINTSTEFLAKVIADRLAERIHQGALGEGARGVAGLSVTLHESHVAWASYERAL

SEQ ID NO: 26062 - protein, 122 aa, Streptomyces laurentii
  REGION 1..122: note = tr|A0A160NUG6|A0A160NUG6_STRLU 6-carboxy-5,6,7,8-tetrahydropterin synthase; OS = Streptomyces laurentii OX=39478 GN=SLA_0226 PE=3 SV=1
MLSITKEFHFSASHRLAHLAADHPCGRLHGHNYVLMVELSARESELTPAGFVRDYGDLDALKKWIDEFLDHRHLNDVMKDRNPSAENIARWVYENWRRDLPELTAVRVSETPKTWATYRPAP

SEQ ID NO: 26063 - protein, 132 aa, Streptomyces lincolnensis
  REGION 1..132: note = tr|A0A1B1ML14|A0A1B1ML14_STRLN Uncharacterized protein OS=Streptomyces lincolnensis OX=1915 GN=SLCG_7028; PE = 4 SV=1
MFSITVRDHIMIAHSFRGEVFGPAQRLHGATFLVDATFRREQLDDDNIVVDIGLATQELGAVVSELNYRNLDNEPDFAGVNTSTEFLAKVIADRLAQRIEKGALGEGAKGLAGLTVTLHESHVAWASYERAL

SEQ ID NO: 26064 - protein, 132 aa, unidentified; identical to SEQ ID NO: 26010
  source 1..132: note = Streptomyces lividans
  REGION 1..132: note = tr|A0A076M2Z5|A0A076M2Z5_STRLI Uncharacterized protein OS=Streptomyces lividans TK24 OX=457428; GN = SLIV_05260 PE=4 SV=1

SEQ ID NO: 26065 - protein, 132 aa, Streptomyces longwoodensis
  REGION 1..132: note = tr|A0A101R1K6|A0A101R1K6_9ACTN 6-pyruvoyl tetrahydropterin synthase OS=Streptomyces longwoodensis; OX = 68231 GN=AQJ30_08620 PE=4 SV=1
MFSVTVRDHIMIAHSFRGEVFGPAQRLHGATFLVDATFRREQLDADNIVVDIGLATQELGAVVSDLNYRNLDNEPDFAGVNTSTEFLAKVIADRLAERIHRGALGEGARGIAGLSVTLHESHVAWASYERAL

SEQ ID NO: 26066 - protein, 132 aa, unidentified
  source 1..132: note = Streptomyces lunaelactis
  REGION 1..132: note = tr|A0A2R4TB68|A0A2R4TB68_9ACTN Uncharacterized protein OS=Streptomyces lunaelactis OX=1535768; GN = SLUN_33125 PE=4 SV=1
MFSITVRDHLMIAHSFRGEVFGPAQRLHGATFLVDATFRRPELDDDNIVVDIGLATQELNAVVAALNYRNLDDEPDFAGINTSTEFVAKVIADRLADRVHAGALGEGARGLTGITVTLHESHIAWASYERGL

SEQ ID NO: 26067 - protein, 231 aa, Streptomyces lydicus
  REGION 1..231: note = tr|A0A0D4DFN6|A0A0D4DFN6_9ACTN 6-pyruvoyl tetrahydropterin synthase OS=Streptomyces lydicus OX=47763; GN = T261_0739 PE=4 SV=1
MSAPAGTYRIGKRFRFEATRRLEGGRWDGHSFTAEVVLSAHTLGAEGFVIDFGELAPLKRYIDATFDHRTLNDVTEDVSNDGLSQHLADRASANLPLEAATALEAIYVSTGRPVPAAVSASSGFEASHQLHGLYDGHPCGRLHGHSYQVSMPTSALLRPADVPVLLRQHIRSAFDGRLLNEVLPGVNPTSENLARYFVEWLEDRCLGSGTATRVRVSETESSWAEYTGRPA

SEQ ID NO: 26068 - protein, 132 aa, Streptomyces lydicus
  REGION 1..132: note = tr|A0A1D7VL92|A0A1D7VL92_9ACTN Uncharacterized protein OS=Streptomyces lydicus OX=47763 GN=SL103_14250; PE = 4 SV=1
MFSITVRDHLMVAHSFRGAVFGPAQRLHGATFIVDATFRRPELDADNIVVDIGLATQELGGVVGELNYRNLDDEPAFAGVNTSTEALAKVIADRLAERVHAGNLGESARELTGISVTLHESHIAWATYERTL

SEQ ID NO: 26069 - protein, 132 aa, Streptomyces malaysiensis
  REGION 1..132: note = tr|A0A291SLU7|A0A291SLU7_9ACTN 6-carboxytetrahydropterin synthase OS=Streptomyces malaysiensis OX=92644 GN=DNK48_35550 PE=4 SV=1
MFSITVRDHIMIAHSFRGEVFGPAQRLHGATFLVDATFRRAELDGDNIVVDIGLATRELGEVCGALSYRNLDDEPDFKGVNTSTEFLAKVIADRLAERVRSGALGEGARGLSGIAVTLHESHVAWASYERDL

SEQ ID NO: 26070 - protein, 118 aa, unidentified
  source 1..118: note = Streptomyces mangrovisoli
  REGION 1..118: note = tr|A0A1J4NL35|A0A1J4NL35_9ACTN 6-carboxy-5,6,7,8-tetrahydropterin synthase; OS = Streptomyces mangrovisoli OX=1428628 GN=WN71_037155; PE = 3 SV=1
MEIFREFAFEAAHRLPRVPEGHKCARLHGHSYKVSVHVEAPVDAEQGWVMDFGDIKQAFQPIDAQLDHYYLNDIDGLDNPTSENLARWIWDRMIGDLPALSQITVRETCTSGCTYRGA

SEQ ID NO: 26071 - protein, 132 aa, unidentified
  source 1..132: note = Streptomyces mangrovisoli
  REGION 1..132: note = tr|A0A1J4NUF2|A0A1J4NUF2_9ACTN Uncharacterized protein OS=Streptomyces mangrovisoli OX=1428628; GN = WN71_027100 PE=4 SV=1
MFSVTVRDHIMIAHSFRGEVFGPAQRLHGATFLVDATFRREQLDDDNIVVDIGLATQELGSVAAELNYQNLDDVPEFAGINTSTEFLAKVIADRLAEAIHKGALGEGAKGIAGISVTLHESHVAWASYERAL

SEQ ID NO: 26072 - protein, 137 aa, Streptomyces melanosporofaciens
  REGION 1..137: note = tr|A0A1H4KRY5|A0A1H4KRY5_STRMJ 6-carboxy-5,6,7,8-tetrahydropterin synthase; OS = Streptomyces melanosporofaciens OX=67327; GN = SAMN04490356_0925 PE=3 SV=1
MNSPSDSSFPLGTLTIGKTFDFEAGHRLPSLPPEHKCSHQHGHSYQVEVILTAPTLEAPGFVTDFGALAPFKKFLDTELDHQNLHEVLPFEPTSEHVAQFLAGWIIQNLEPDIPGRLVAVRVCETERSWARFDVEQR

SEQ ID NO: 26073 - protein, 132 aa, Streptomyces melanosporofaciens
  REGION 1..132: note = tr|A0A1H4KXD7|A0A1H4KXD7_STRMJ 6-pyruvoyl-tetrahydropterin synthase OS=Streptomyces melanosporofaciens OX=67327 GN=SAMN04490356_1027 PE=4 SV=1
MFSITVRDHIMIAHSFRGDVFGPAQRLHGATFLVDATFRRAELDDDNIVVDIGLATRELGEVCGALSYRNLDDERDFEGINTSTEFLAKVIADRLAERVASGALGEGARGLSGIVVTLHESHVAWASYERGL

SEQ ID NO: 26074 - protein, 136 aa, Streptomyces microflavus; identical to SEQ ID NO: 25989
  REGION 1..136: note = tr|A0A285DLC3|A0A285DLC3_STRMI 6-carboxy-5,6,7,8-tetrahydropterin synthase; OS = Streptomyces microflavus OX=1919 GN=SAMN05421860_11239; PE = 3 SV=1

SEQ ID NO: 26075 - protein, 132 aa, Streptomyces mirabilis
  REGION 1..132: note = tr|A0A1I2A3I6|A0A1I2A3I6_9ACTN 6-pyruvoyl-tetrahydropterin synthase OS=Streptomyces mirabilis OX=68239 GN=SAMN02787118_101542 PE=4 SV=1
MFSITVRDHLMIAHSFRGEVFGPAQRLHGATFLVDATFRRAELDDDNIVVDIGLATQELGAVVSALNYRNLDNEPDFKNTNTSTEFLAKVIADRLAERVHAGALGEGAQGLAGITVTLHESHIAWASYERAL

SEQ ID NO: 26076 - protein, 132 aa, unidentified
  source 1..132: note = Streptomyces murayamaensis
  REGION 1..132: note = tr|Q84CK8|Q84CK8_9ACTN Uncharacterized protein; OS = Streptomyces murayamaensis OX=224537 PE=4 SV=1
MFSVTVRDHLMIAHSFSGEVFGPAQRLHGATYLVDATFQRPELDDDNIVIDMGLAGREVRGIVAALSYRNLDEDPDFAGTNTTTEFLAKVIADRLAARIHDGALGPGAQGLTGLTVRLHESHIAWADYHRTL

SEQ ID NO: 26077 - protein, 132 aa, Streptomyces nanshensis
  REGION 1..132: note = tr|A0A1E7L195|A0A1E7L195_9ACTN 6-pyruvoyl tetrahydropterin synthase OS=Streptomyces nanshensis; OX = 518642 GN=AN218_19710 PE=4 SV=1
MYSITVRDHMMIAHSFRGEVFGPAQRLHGATFVVDASFRRRELDADGLVVDIGAATQELNGVLADLNYRNLDDEPAFAGINTSTEMLARYVADQLAEKIEAGALGEGARGLDGLSVTLHESHVAWASYEREL

SEQ ID NO: 26078 - protein, 132 aa, unidentified
  source 1..132: note = Streptomyces natalensis
  REGION 1..132: note = tr|A0A0D7CLJ1|A0A0D7CLJ1_9ACTN 6-pyruvoyl tetrahydropterin synthase OS=Streptomyces natalensis ATCC 27448 OX=1240678 GN=SNA_24330 PE=4 SV=1
MFSITVRDHLMVAHSFRGAVFGPAQRLHGATFVVDATFRRAELDADNIVVDIGLATQELGGVIAELNYRNLDDEPAFAGINTSTEALAKVIADRLADRVHAGNLGESARELSGISVTLHESHIAWATYERTL

SEQ ID NO: 26079 - protein, 132 aa, unidentified
  source 1..132: note = Streptomyces nigra
  REGION 1..132: note = tr|A0A2S1IL52|A0A2S1IL52_9ACTN 6-carboxytetrahydropterin synthase OS=Streptomyces nigra; OX = 1827580 GN=DC008_29040 PE=4 SV=1
MFSITVRDHIMIAHSFHGEVFGPAQRLHGATFLVDATFRREQLDDDNIVVDIGLATQELGAVVAELNYRNLDNEPDFAGINTSTEFLAKVIADRLAERVEKGALGEGARGLAGITVTLHESHVAWASYERAL

SEQ ID NO: 26080 - protein, 146 aa, unidentified
  source 1..146: note = Streptomyces niveus
  REGION 1..146: note = tr|V6KCP2|V6KCP2_STRNV 6-carboxy-5,6,7,8-tetrahydropterin synthase; OS = Streptomyces niveus NCIMB 11891 OX=1352941; GN = M877_11200 PE=3 SV=1
MHDHDGTPAGQLKLGVAGLLTISKQFHFSASHVLDKLPSWHKCARMHGHNYVVVMELSAHPDDLTEAGFVRDYGDLDRFKTWVDETLDHRHLNEVMGISTSAENMALWIFSQWVERYPELTAVWVSETPRTWAVYRVEPRRTPAGG

SEQ ID NO: 26081 - protein, 132 aa, Streptomyces nodosus
  REGION 1..132: note = tr|A0A0B5DIC0|A0A0B5DIC0_9ACTN 6-pyruvoyl tetrahydropterin synthase OS=Streptomyces nodosus OX=40318; GN = SNOD_28190 PE=4 SV=1
MFSITVRDHLMIAHSFRGEVFGPAQRLHGATFLVDATFRRAELDDDNIVVDIGLATQELGAVVGGLNYRNLDDEPDFEGTNTSTEFLAKVIADRLAERIHQGALGENARGISALAVTLHESHIAWASYERAL

SEQ ID NO: 26082 - protein, 132 aa, Streptomyces noursei
  REGION 1..132: note = tr|A0A1B2H230|A0A1B2H230_STRNR 6-pyruvoyl-tetrahydropterin synthase OS=Streptomyces noursei ATCC 11455 OX=316284 GN=SNOUR_35065 PE=4 SV=1
MFSITVRDHLMVAHSFRGAVFGPAQRLHGATFIVDATFRRPELDADNIVVDIGLATQELGAVVAELNYRNLDDEPAFAGTNTSTEALAKVIADRLADRVHAGNLGAGARELAGITVTLHESHIAWASYERAL

SEQ ID NO: 26083 - protein, 132 aa, Streptomyces noursei
  REGION 1..132: note = tr|A0A2N8PJ65|A0A2N8PJ65_STRNR 6-pyruvoyl tetrahydropterin synthase OS=Streptomyces noursei OX=1971; GN = AOB60_10035 PE=4 SV=1
MFSITVRDHLMVAHSFRGAVFGPAQRLHGATFIVDATFRRPELDDDNIVVDIGLATQELGAVVAELNYRNLDDEPAFAGTNTSTEALAKVIADRLAERVHAGNLGAGARELAGITVTLHESHIAWASYERAL

SEQ ID NO: 26084 - protein, 118 aa, unidentified
  source 1..118: note = Streptomyces oceani
  REGION 1..118: note = tr|A0A1E7JW74|A0A1E7JW74_9ACTN 6-carboxy-5,6,7,8-tetrahydropterin synthase; OS = Streptomyces oceani OX=1075402 GN=AN216_23110 PE=3 SV=1
MEIFREFNFEAAHRLPNVPEGHKCSRLHGHSYKVIVHVEAPVDPEAGWVMDFGDLKRTFKPIESQLDHYYLNDIEGLENPTSEVLARWIWERLQPNLSGLSALTVRETCTSGCTYRGE

SEQ ID NO: 26085 - protein, 132 aa, Streptomyces olivochromogenes; identical to SEQ ID NO: 26075
  REGION 1..132: note = tr|A0A250V4I2|A0A250V4I2_STROL Uncharacterized protein OS=Streptomyces olivochromogenes OX=1963; GN = SO3561_00362 PE=4 SV=1

SEQ ID NO: 26086 - protein, 120 aa, Streptomyces olivochromogenes
  REGION 1..120: note = tr|A0A250VLI3|A0A250VLI3_STROL 6-carboxy-5,6,7,8-tetrahydropterin synthase; OS = Streptomyces olivochromogenes OX=1963 GN=SO3561_06393; PE = 3 SV=1
MTFRISKKFEFSASHQLTGLAPEHQCARMHGHNYVIELELGADDKDLSPVGFVRDYGELSAFKVWLDNHLDHRHLNDVMDENPTAENMAAWVYKTWSMEFPELTCVRISETPKTWAEYRP

SEQ ID NO: 26087 - protein, 132 aa, unidentified
  source 1..132: note = Streptomyces ossamyceticus
  REGION 1..132: note = tr|A0A3N1LHA2|A0A3N1LHA2_9ACTN 6-pyruvoyl-tetrahydropterin synthase OS=Streptomyces ossamyceticus OX=249581 GN=EDD87_1203 PE=4 SV=1
MFSITVRDHIMIAHSFRGEVFGPAQRLHGATFLVDATFRRAELDDDNIVVDIGLATQELGAVVSELNYRNLDNEPDFANTNTSTEFLAKVIADRLAERIHKGAMGENAKGIAGITVTLHESHIAWASYERAL

SEQ ID NO: 26088 - protein, 132 aa, Streptomyces pactum
  REGION 1..132: note = tr|A0A1S6J444|A0A1S6J444_9ACTN Uncharacterized protein OS=Streptomyces pactum OX=68249 GN=B1H29_06035; PE = 4 SV=1
MFSITVRDHIMIAHSFRGDVFGPAQRLHGATFLVDATFRREQLDEDNIVVDIGLATRELGAVVSELNYRNLDNEPDFAGVNTSTEFLARVIADRLAERVHKGGLGEGARGLAGLTVTLHESHVAWASYERAL

SEQ ID NO: 26089 - protein, 121 aa, unidentified
  source 1..121: note = Streptomyces palmae
  REGION 1..121: note = tr|A0A4Z0H2C0|A0A4Z0H2C0_9ACTN 6-carboxy-5,6,7,8-tetrahydropterin synthase; OS = Streptomyces palmae OX=1701085 GN=E4099_20160 PE=3 SV=1
MTLRITKQFAFSASHQLDGLPEGHQCGRLHGHNYVVEVELSARREELVEPGFVRDYGELSGLKGWIDEWLDHRHLNDVVKERTPTAEHLAIWIYEQWRSVYPELSAVRVSETPKTWAEYRP

SEQ ID NO: 26090 - protein, 132 aa, Streptomyces parvulus
  REGION 1..132: note = tr|A0A369V159|A0A369V159_9ACTN 6-carboxytetrahydropterin synthase OS=Streptomyces parvulus OX=146923 GN=DVZ84_23060 PE=4 SV=1
MFSITVRDHIMIAHSFRGDVFGPAQRLHGATFLVDATFRREQLDEDNIVVDIGLATRELGAVVSELNYRNLDNEPDFAGVNTSTEFLAKVVADRLAERVHQGALGEGARGLAGLTVTLHESHVAWASYERAL

SEQ ID NO: 26091 - protein, 132 aa, Streptomyces parvulus
  REGION 1..132: note = tr|A0A191V5X4|A0A191V5X4_9ACTN 6-pyruvoyl tetrahydropterin synthase OS=Streptomyces parvulus; OX = 146923 GN=Spa2297_27625 PE=4 SV=1
MFSITVRDHIMIAHSFRGDVFGPAQRLHGATFLVDATFRREQLDEDNIVVDIGLATRELGAVVGELNYRNLDNEPDFAGVNTSTEFLAKVVADRLAERVHKGALGEGARGLAGLTVTLHESHVAWASYERAL

SEQ ID NO: 26092 - protein, 132 aa, Streptomyces parvus
  REGION 1..132: note = tr|A0A5D4JNU8|A0A5D4JNU8_9ACTN 6-carboxytetrahydropterin synthase OS=Streptomyces parvus; OX = 66428 GN=FY004_03440 PE=4 SV=1
MFTVTVRDHLMIAHSLRGEVFGPAQRLHGATYLVDATFERPELDEDNIVVDMDLAAREVRGIVGALSFQNLDDHPDFAGVNTTTEFLAKVMADRLAARIHDGSLGANAQGLTGLTVRLHESHIAWADYHRAL

SEQ ID NO: 26093 - protein, 132 aa, Streptomyces peucetius
  REGION 1..132: note = tr|A0A2D3UC05|A0A2D3UC05_STRC0 Uncharacterized protein OS=Streptomyces peucetius subsp. caesius ATCC 27952 OX=316280 GN=CGZ69_18955 PE=4 SV=1
MFSVTVREHLMIAHSFRGEVFGPAQRLHGATFLVDATFRRPELDADNIVVDIGLAAKELGEVVGEFNYRNLDDESEFAGVNTSTEFLAKVIADRLADRVHAGALGEGARGLAGLTVTLHESHIAWASYERVL

SEQ ID NO: 26094 - protein, 132 aa, Streptomyces phaeoluteigriseus
  REGION 1..132: note = tr|A0A1V6MUV8|A0A1V6MUV8_9ACTN Uncharacterized protein OS=Streptomyces phaeoluteigriseus OX=114686; GN = BM536_007990 PE=4 SV=1
MFSVTVRDHIMIAHSFRGEVFGPAQRLHGATFLVDATFRREQLDEDNIVVDIGLATQELGAVVSELNYRNLDNEPDFAGVNTSTEFLAKVIADRLAERIHKGALGEGARGIAALSVSLHESHVAWASYERAL

SEQ ID NO: 26095 - protein, 132 aa, Streptomyces pharetrae
  REGION 1..132: note = tr|A0A1Y2PY30|A0A1Y2PY30_9ACTN Uncharacterized protein OS=Streptomyces pharetrae CZA14 OX=1144883; GN = OQI_08175 PE=4 SV=1
MFSVTVRDHIMIAHSFRGDVFGPAQRLHGATFLVDATFRRAELDDDNIVVDIGLATRELGAVVGELNYRNLDNEPDFAGVNTSTEFLAKVIADRLAERVHKGALGEGARGIAGITVTLHESHVAWASYERAL

SEQ ID NO: 26096 - protein, 118 aa, unidentified
  source 1..118: note = Streptomyces pini
  REGION 1..118: note = tr|A0A1I4J2K4|A0A1I4J2K4_9ACTN 6-carboxy-5,6,7,8-tetrahydropterin synthase; OS = Streptomyces pini OX=1520580 GN=SAMN05192584_12278 PE=3; SV = 1
MEIFREFTFEAAHRLPRVPEGHKCARLHGHSYKITVHVEAPVDAEAGWVMDFGDIKRAFKPIEAELDHYYLNDIEGLENPTSENLACWIWDRLIAELPDLSAITVRETCTSGCTYRGE

SEQ ID NO: 26097 - protein, 132 aa, Streptomyces platensis
  REGION 1..132: note = tr|A0A1Y2NHN1|A0A1Y2NHN1_STRPT 6-pyruvoyl tetrahydropterin synthase OS=Streptomyces platensis; OX = 58346 GN=BG653_01441 PE=4 SV=1
MFSITVRDHLMVAHSFRGAVFGPAQRLHGATFIVDATFRRPELDADNIVVDIGLATQELGGVIAELNYRNLDDEPAFAGINTSTEALAKVIADRLADRIEAGNLGEGARELAGISVTLHESHIAWATYERTL

SEQ ID NO: 26098 - protein, 132 aa, unidentified
  source 1..132: note = Streptomyces pluripotens
  REGION 1..132: note = tr|A0A221P629|A0A221P629_9ACTN 6-carboxytetrahydropterin synthase OS=Streptomyces pluripotens OX=1355015 GN=LK07_29345 PE=4 SV=1
MFSITVRDHIMIAHSFRGEVFGPARRLHGATFLVDATFRREQLDENNIVVDIGLATRELGAVAAELNYRNLDDEPEFAGTNTSTEFLAKVIADRLAARIHKGALGEGAKGLTGITVTLHESHIAWASYERGL

SEQ ID NO: 26099 - protein, 120 aa, unidentified
  source 1..120: note = Streptomyces pluripotens
  REGION 1..120: note = tr|A0A221P757|A0A221P757_9ACTN 6-carboxy-5,6,7,8-tetrahydropterin synthase; OS = Streptomyces pluripotens OX=1355015 GN=LK07_33115 PE=3; SV = 1
MTLRITKKFEFSASHQLSGLAEGHQCGRLHGHNYVIELELSADRTELTRTGFVRDYGELASFKAWLDRTLDHRHLNDLVDDNPTAENLAVWLYERWSKEFPELTSVRISETPKTWAEYRP

SEQ ID NO: 26100 - protein, 132 aa, unidentified
  source 1..132: note = Streptomyces populi
  REGION 1..132: note = tr|A0A2I0SI32|A0A2I0SI32_9ACTN 6-carboxytetrahydropterin synthase OS=Streptomyces populi; OX = 2058924 GN=CW362_28955 PE=4 SV=1
MFSITVRDHLMIAHSFRGEVFGPAQRLHGATFLVDATFRRPELDDDNIVVDIGLATQELGAVVSELNYRNLDSEPDFKDTNTSTEFLAKVIADRLADRVHAGALGAGAHGLAGITVTLHESHIAWASYERDL

SEQ ID NO: 26101 - protein, 132 aa, Streptomyces prasinopilosus
  REGION 1..132: note = tr|A0A1G6MK58|A0A1G6MK58_9ACTN 6-pyruvoyl-tetrahydropterin synthase OS=Streptomyces prasinopilosus OX=67344 GN=SAMN05216505_102585 PE=4 SV=1
MFSITVRDHIMIAHSFHGEVFGPAQRLHGATFLVDATFRREQLDEDNIVIDIGLATQELGAVVGGLNYRNLDNEPDFAGINTSTEYLAKVIADRLAERIHKGALGEGAKGIAGLTVTLHESHIAWASYERAL

SEQ ID NO: 26102 - protein, 132 aa, Streptomyces pseudovenezuelae; identical to SEQ ID NO: 26040
  REGION 1..132: note = tr|A0A117PRG5|A0A117PRG5_9ACTN 6-pyruvoyl tetrahydropterin synthase OS=Streptomyces pseudovenezuelae; OX = 67350 GN=AQI94_16250 PE=4 SV=1

SEQ ID NO: 26103 - protein, 132 aa, Streptomyces puniciscabiei; identical to SEQ ID NO: 26049
  REGION 1..132: note = tr|A0A542T0K8|A0A542T0K8_9ACTN 6-pyruvoyl-tetrahydropterin synthase OS=Streptomyces puniciscabiei OX=164348 GN=FB563_7539 PE=4 SV=1

SEQ ID NO: 26104 - protein, 120 aa, Streptomyces puniciscabiei
  REGION 1..120: note = tr|A0A1D7YJL8|A0A1D7YJL8_9ACTN 6-carboxy-5,6,7,8-tetrahydropterin synthase; OS = Streptomyces puniciscabiei OX=164348 GN=BFF78_35760; PE = 3 SV=1
MPFRITKKFEFSASHRLAGLAPDHQCARMHGHNYIVELELGADEADLSPVGFVRDYGDLSAFKNWLDNYLDHRHLNDVMDDNPTAENMAAWIYRTWSKEFFELTCVRVSETPKTWAEYRP

SEQ ID NO: 26105 - protein, 132 aa, unidentified
  source 1..132: note = Streptomyces qaidamensis
  REGION 1..132: note = tr|A0A143C9K4|A0A143C9K4_9ACTN 6-pyruvoyl tetrahydropterin synthase OS=Streptomyces qaidamensis; OX = 1783515 GN=A4E84_34010 PE=4 SV=1
MFSITVRDHIMIAHSFRGDVFGPAQRLHGATFLVDATFRREQLDDDNIVVDIGLATQELGAVVSELNYRNLDNEPDFAGVNTSTEFLAKVIADRLAERIHKGALGEGAKGIAGLTVTLHESHIAWASYERAL

SEQ ID NO: 26106 - protein, 118 aa, Streptomyces qinglanensis
  REGION 1..118: note = tr|A0A0U1V670|A0A0U1V670_9ACTN 6-carboxy-5,6,7,8-tetrahydropterin synthase; OS = Streptomyces qinglanensis OX=943816 GN=queD PE=3 SV=1
MEIFREFNFEAAHRLPNVPEGHKCSRLHGHSYKVIVHVEAPVDHEAGWVMDFGDLKRTFKPIESQLDHYYLNDIEGLENPTSEVLARWIWERLQPNLSGLSALTVRETCTSGCTYRGE

SEQ ID NO: 26107 - protein, 120 aa, Streptomyces rapamycinicus
  REGION 1..120: note = tr|A0A3L8REB2|A0A3L8REB2_STRRN 6-carboxy-5,6,7,8-tetrahydropterin synthase; OS = Streptomyces rapamycinicus (strain ATCC 29253 / DSM 41530 / NRRL 5491 / AYB-994) OX=134 3740 GN=D3C57_103095; PE = 3 SV=1
MTFRITKKFEFSASHRLTGLAPEHQCARMHGHNYVIELELAADDADLLPVGFVRDYGDLSAFKVWLDNHLDHRHLNDVMDENPTAENMAAWVYKTWSMEFPELTCVRVSETPKTWAEYRP

SEQ ID NO: 26108 - protein, 132 aa, Streptomyces rapamycinicus
  REGION 1..132: note = tr|A0A0A0NPE1|A0A0A0NPE1_STRRN 6-pyruvoyl tetrahydropterin synthase OS=Streptomyces rapamycinicus (strain ATCC 29253 / DSM 41530 / NRRL 5491 / AYB-994); OX = 1343740 GN =D3C57_105345 PE=4 SV=1
MFSITVRDHIMIAHSFRGEVFGPAQRLHGATFLVDATFRRAELDDDNIVVDIGLATRELGEVCGALSYRNLDDEPDFKGINTSTEFLAKVIADRLAERVGSGALGEGARGLSGIAVTLHESHVAWASYERGL

SEQ ID NO: 26109 - protein, 129 aa, unidentified
  source 1..129: note = Streptomyces regalis
  REGION 1..129: note = tr|A0A117MQJ8|A0A117MQJ8_9ACTN 6-carboxy-5,6,7,8-tetrahydropterin synthase; OS = Streptomyces regalis OX=68262 GN=ADL12_27235 PE=3 SV=1
MFTISKEFHFSASHVLDTLPSWHPCARLHGHNYVIVLELSAEDHDLAPPGFVRDYRDLDGFKKWVDATLDHRHLNEAMGGGIPPTAENLAKWIYDTWHDDLSELSAVKVSETPKTWAVYRPEGLTRGKQ

SEQ ID NO: 26110 - protein, 132 aa, unidentified
  source 1..132: note = Streptomyces regalis
  REGION 1..132: note = tr|A0A101J971|A0A101J971_9ACTN 6-pyruvoyl tetrahydropterin synthase OS=Streptomyces regalis OX=68262; GN = ADL12_41965 PE=4 SV=1
MFSITVRDHIMIAHSFRGEVFGPAQRLHGATFLVDATFRREQLDDDNIVVDIGLATRELGAVVGELNYRNLDNEPDFAGINTSTEFLAKVIADRLAERIEKGALGEGAKGLAGLTVTLHESHVAWASYERAL

SEQ ID NO: 26111 - protein, 132 aa, Streptomyces resistomycificus
  REGION 1..132: note = tr|A0A0L8LXR8|A0A0L8LXR8_9ACTN 6-pyruvoyl tetrahydropterin synthase OS=Streptomyces resistomycificus; OX = 67356 GN=ADK37_02720 PE=4 SV=1
MFSITVRDHIMIAHSFRGEVFGPAQRLHGATFLVDATFRREQLDDDNIVVDIGLATQELGAVVSELNYRNLDNEPDFAQINTSTEFLAKVVADRLAERIHKGSLGEGARGLAGLTVTLHESHVAWASYERAL

SEQ ID NO: 26112 - protein, 121 aa, Streptomyces rimosus
  REGION 1..121: note = tr|A0A0M9XC37|A0A0M9XC37_STRRM 6-carboxy-5,6,7,8-tetrahydropterin synthase; OS = Streptomyces rimosus subsp. rimosus OX=132474; GN = ADK43_35840 PE=3 SV=1
MYAITKEFHFSASHQLGALPAGHQCARTHGHNYLVVLELRCDDTELTEPGFVRDYGELDEFKHWLDATFDHRHLNDAVPGMNPSAENLARWVYHQWVERLPELSCVRVSETPRTWATYRGK

SEQ ID NO: 26113 - protein, 121 aa, Streptomyces rimosus; identical to SEQ ID NO: 21427
  REGION 1..121: note = tr|L8EZA8|L8EZA8_STRR1 6-carboxy-5,6,7,8-tetrahydropterin synthase; OS = Streptomyces rimosus subsp. rimosus (strain ATCC 10970 / DSM 40260 / JCM 4667 / NRRL 2234) OX=1 265868; GN = SRIM_10041 PE=3 SV=1

SEQ ID NO: 26114 - protein, 132 aa, unidentified; identical to SEQ ID NO: 26049
  source 1..132: note = Streptomyces roseochromogenus
  REGION 1..132: note = tr|V6KUN4|V6KUN4_STRRC 6-pyruvoyl tetrahydropterin synthase OS=Streptomyces roseochromogenus subsp. oscitans DS 12.976 OX=1352936 GN=M878_07135 PE=4 SV=1

SEQ ID NO: 26115 - protein, 147 aa, Streptomyces scabiei
  REGION 1..147: note = tr|C9ZBP0|C9ZBP0_STRSW Uncharacterized protein; OS = Streptomyces scabiei (strain 87.22) OX=680198; GN = SCAB_15941 PE=4 SV=1
MPRPGGRRTALEGRPLFSITVRDHIMIAHSFRGEVFGPAQRLHGATFLVDATFRRAELDDDNIVVDIGLATQELGAVVSELNYRNLDNEPAFAHTNTSTEFLAKVIADRLAERIHKGALGENAKGIAGIQVTLHESHIAWASYERAL

SEQ ID NO: 26116 - protein, 132 aa, Streptomyces scabiei; identical to SEQ ID NO: 25993
  REGION 1..132: note = tr|A0A086GK66|A0A086GK66_STRSC 6-pyruvoyl tetrahydropterin synthase OS=Streptomyces scabiei OX=1930; GN = IQ62_40215 PE=4 SV=1

SEQ ID NO: 26117 - protein, 136 aa, Streptomyces sedi
  REGION 1..136: note = tr|A0A5C4UM84|A0A5C4UM84_9ACTN 6-carboxy-5,6,7,8-tetrahydropterin synthase; OS = Streptomyces sedi OX=555059 GN=FH715_27375 PE=3 SV=1
MDLRSILLPPGTFTIGKKFDFEAGHRLAGLAPGHKCARQHGHSYEVEVILTAPTLENPGFVTDFGLLGPFKAFLDTELDHRDLHEILPFEPTSERLAQFLAGWFIQHLQPKVHGRLVAVIVRETRSSWARFHMEER

SEQ ID NO: 26118 - protein, 132 aa, Streptomyces seoulensis
  REGION 1..132: note = tr|A0A4P6U230|A0A4P6U230_STRSO 6-carboxytetrahydropterin synthase OS=Streptomyces seoulensis OX=73044 GN=D0Z67_24325 PE=4 SV=1
MFSITVRDHIMIAHSFRGDVFGPAQRLHGATFLVDATFRREQLDEDNIVVDIGLATRELGAITAELNYRNLDENPEFAGVNTSTEFLAKVVADRLAERIAKGALGEGAKGLSALSVTLHESHIAWASYERDL

SEQ ID NO: 26119 - protein, 132 aa, unidentified
  source 1..132: note = Streptomyces shenzhenensis
  REGION 1..132: note = tr|A0A3M0HQS0|A0A3M0HQS0_9ACTN Uncharacterized protein OS=Streptomyces shenzhenensis OX=943815; GN = CTZ28_43570 PE=4 SV=1
MFSITVRDHIMIAHSFRGEVFGPAQRLHGATFLVDATFRRQQLDDDNIVVDIGLATQELGAVVSELNYRNLDNEPDFAGVNTSTEFLAKVIADRLVECIHKGALGEGAKGLAGVTVTLHESHVAWASYERDL

SEQ ID NO: 26120 - protein, 132 aa, Streptomyces sioyaensis
  REGION 1..132: note = tr|A0A4V1NQG3|A0A4V1NQG3_9ACTN 6-carboxytetrahydropterin synthase OS=Streptomyces sioyaensis OX=67364 GN=EST54_09560 PE=4 SV=1
MFSITVRDHLMIAHSFRGEVFGPAQRLHGATFLVDATFRRPELDDDNIVVDIGLATRELGAVVGELNYRNLDEEPAFTGINTSTEALAKVIADRLADRIQAGNLGEGARELTGISVTLHESHIAWATYERTL

SEQ ID NO: 26121 - protein, 132 aa, Streptomyces sp.; identical to SEQ ID NO: 26092
  REGION 1..132: note = tr|A0A2T7M2K7|A0A2T7M2K7_9ACTN Uncharacterized protein OS=Streptomyces sp. CS014 OX=2162707; GN = DBP12_09230 PE=4 SV=1

SEQ ID NO: 26122 - protein, 132 aa, Streptomyces sp.; identical to SEQ ID NO: 26010
  REGION 1..132: note = tr|A0A397QA82|A0A397QA82_9ACTN 6-pyruvoyl-tetrahydropterin synthase OS=Streptomyces sp. 19 OX=492785 GN=CLW02_1142 PE=4 SV=1

SEQ ID NO: 26123 - protein, 129 aa, Streptomyces sparsogenes
  REGION 1..129: note = tr|A0A1R1S997|A0A1R1S997_9ACTN 6-carboxy-5,6,7,8-tetrahydropterin synthase; OS = Streptomyces sparsogenes DSM 40356 OX=1331668; GN = SPAR_33956 PE=3 SV=1
MLSITKEFRFSASHQLDHLRSGHPCGRLHGHNYVVVLELSAAPEDLSLPGFVRDYGDLSAFQKWVDETLDHRHLNDVLDGVNPSAENIAMWLHERWVKEFPELTAVRVSETPKTWATYRPSPALGDASF

SEQ ID NO: 26124 - protein, 132 aa, Streptomyces sparsogenes
  REGION 1..132: note = tr|A0A1R1S9Y8|A0A1R1S9Y8_9ACTN 6-pyruvoyl-tetrahydropterin synthase OS=Streptomyces sparsogenes DSM 40356 OX=1331668 GN=SPAR_33131 PE=4 SV=1
MFSITVRDHLMIAHSFRGEVFGPAQRLHGATFLVDATFRRAELDADNIVVDIGLATRELNAVVGELNYRNLDEEPAFADTNTSTEFLAKVIADRLAERVHAGALGEGARGLSGLTVTLHESHIAWASYERGL

SEQ ID NO: 26125 - protein, 132 aa, Streptomyces spinoverrucosus
  REGION 1..132: note = tr|A0A4Y3VDW3|A0A4Y3VDW3_9ACTN Uncharacterized protein OS=Streptomyces spinoverrucosus OX=284043; GN = SSP24_08410 PE=4 SV=1
MFSVTVRDHIMIAHSFRGEVFGPAQRLHGATFLVDATFRREQLDDDNIVVDIGLATRELGAVVSELNYRNLDSEPDFAGINTSTEFLAKVIADRLAERVHKGALGEGAKGLAGISVTLHESHVAWASYERGL

SEQ ID NO: 26126 - protein, 132 aa, unidentified
  source 1..132: note = Streptomyces spongiicola
  REGION 1..132: note = tr|A0A2S1Z1N0|A0A2S1Z1N0_9ACTN Uncharacterized protein OS=Streptomyces spongiicola OX=1690221; GN = DDQ41_16855 PE=4 SV=1
MFSVTVREHLMIAHSFQGEVFGPAQRLHGATYLVDASFRRTELDADNLVIDIGLATAELGGVVAEFNYRNLDELPEFAGTNTSTEYLAKVIADRLADRVHAGALGEGARGLSGVSVTLHESHIAWASYERDL

SEQ ID NO: 26127 - protein, 118 aa, Streptomyces stelliscabiei
  REGION 1..118: note = tr|A0A0L0JST2|A0A0L0JST2_9ACTN 6-carboxy-5,6,7,8-tetrahydropterin synthase; OS = Streptomyces stelliscabiei OX=146820 GN=IQ64_43405 PE=3; SV = 1
MEIFREFTFESAHRLPNVPEGHKCARLHGHSYKVIVHVEGPVGAESGWVMDFGDVKRAFKPIEARLDHYYLNEIEGLENPTSEVLARWIWDRLRPTLPGLSALTVRETCTSGCTYRGE

SEQ ID NO: 26128 - protein, 132 aa, Streptomyces stelliscabiei; identical to SEQ ID NO: 25993
  REGION 1..132: note = tr|A0A0L0KT98|A0A0L0KT98_9ACTN 6-pyruvoyl tetrahydropterin synthase OS=Streptomyces stelliscabiei; OX = 146820 GN=IQ64_28855 PE=4 SV=1

SEQ ID NO: 26129 - protein, 137 aa, unidentified
  source 1..137: note = Streptomyces sviceus
  REGION 1..137: note = tr|B5I7V3|B5I7V3_9ACTN Queuosine biosynthesis protein QueD OS=Streptomyces sviceus ATCC 29083 OX=463191; GN = SSEG_10266 PE=4 SV=2
MEGRPLFSITVRDHIMIAHSFRGEVFGPAQRLHGATFLVDATFRREQLDDDNIVVDIGLATQELGAVVSELNYRNLDNEPDFAGVNTSTEFLAKVIADRLAERIEKGALGEGAKGLAGLTVTLHESHVAWASYERAL

SEQ ID NO: 26130 - protein, 132 aa, unidentified; identical to SEQ ID NO: 25990
  source 1..132: note = Streptomyces swartbergensis
  REGION 1..132: note = tr|A0A243RFF4|A0A243RFF4_9ACTN Uncharacterized protein OS=Streptomyces swartbergensis OX=487165; GN = CA983_36390 PE=4 SV=1

SEQ ID NO: 26131 - protein, 131 aa, Streptomyces thermoautotrophicus
  REGION 1..131: note = tr|A0A132ML74|A0A132ML74_9ACTN 6-carboxy-5,6,7,8-tetrahydropterin synthase; OS = Streptomyces thermoautotrophicus OX=1469144 GN=LI90_203; PE = 3 SV=1
MTAVQGQHTIAKCFTFEASHRLPDLPEGHKCARLHGHSWTVEVILTADELTGPGFVTDFGDLKPLKHYIDEHLDHRHLNDVLDVPPTSENVAAHLAAWCVAYLEPVIPGRVVAVRVSETRTTWAEYRVVDR

SEQ ID NO: 26132 - protein, 132 aa, unidentified
  source 1..132: note = Streptomyces tirandamycinicus
  REGION 1..132: note = tr|A0A2S1SPE8|A0A2S1SPE8_9ACTN 6-carboxytetrahydropterin synthase OS=Streptomyces tirandamycinicus OX=2174846 GN=DDW44_05215 PE=4 SV=1
MFSVTVREHLMIAHSFQGEVFGPAQRLHGATYLVDASFRRAELDADNLVVDIGLATAELGGVVGEFNYRNLDELPEFAGTNTSTEFLAKVIADRLADRVHAGALGEGARGLSGISVTLHESHIAWASYERDL

SEQ ID NO: 26133 - protein, 132 aa, unidentified
  source 1..132: note = Streptomyces toyocaensis
  REGION 1..132: note = tr|A0A081XZC6|A0A081XZC6_STRTO 6-pyruvoyl tetrahydropterin synthase OS=Streptomyces toyocaensis; OX = 55952 GN=BU52_02290 PE=4 SV=1
MFSITVRDHIMIAHSFRGEVFGPAQRLHGATFLVDATFRREQLDEDNIVVDIGLATQELGAVVGELNYRNLDDEPDFAGVNTSTEYLAKVIADRLAERVHKGALGEGAKGIAKIAVTLHESHIAWASYERAL

SEQ ID NO: 26134 - protein, 125 aa, Streptomyces tubercidicus
  REGION 1..125: note = tr|A0A384YVS4|A0A384YVS4_9ACTN 6-carboxy-5,6,7,8-tetrahydropterin synthase; OS = Streptomyces tubercidicus OX=47759 GN=tubA PE=3 SV=1
MYSITKEFHFSASHQLDGLPPDHQCGRLHGHNYIVLLELSAAQDELTEPGFVRDYGELGVVKKWLDDTVDHRHLNDLMPGVNPTAEHLAQWVYRTWSSDFPELTAVRVSETPKTWATYRPAGPTA

SEQ ID NO: 26135 - protein, 132 aa, Streptomyces turgidiscabies
  REGION 1..132: note = tr|L7FJ05|L7FJ05_9ACTN Putative 6-pyruvoyl tetrahydropterin synthase OS=Streptomyces turgidiscabies Car8 OX=698760 GN=STRTUCAR8_08976 PE=4 SV=1
MFSITVRDHIMIAHSFSGEVFGPAQRLHGATFLVDATFRREQLDDDNIVVDIGLATQELGAVVSELNYRNLDNEPDFAGINTSTEFLAKIIADRLAARIEKGALGEGARGLAGLTVTLHESHVAWASYERAL

SEQ ID NO: 26136 - protein, 132 aa, unidentified
  source 1..132: note = Streptomyces uncialis
  REGION 1..132: note = tr|A0A1Q4VBX7|A0A1Q4VBX7_9ACTN 6-pyruvoyl tetrahydropterin synthase OS=Streptomyces uncialis; OX = 1048205 GN=AB852_00025 PE=4 SV=1
MFSITVRDHLMVAHSFRGEVFGPAQRLHGATFLVDATFRRAELDADNIVVDIGLATRELGTVVAALTYRNLDDEPDFTGVNTSTEFLAKVIADRLADRAASGALGEGARGLAGITVTLHESHIAWASYERAL

SEQ ID NO: 26137 - protein, 132 aa, Streptomyces variegatus
  REGION 1..132: note = tr|A0A0M2GTC8|A0A0M2GTC8_9ACTN 6-pyruvoyl tetrahydropterin synthase OS=Streptomyces variegatus; OX = 284040 GN=UK15_14800 PE=4 SV=1
MFSITVRDHIMIAHSFRGDVFGPAQRLHGATFLVDATFRREQLDEDNIVVDIGLATQELGAVVSELNYRNLDNEPDFAGVNTSTEFLAKVIADRLAERIHKGALGEGAKGIAGLTVTLHESHIAWASYERAL

SEQ ID NO: 26138 - protein, 119 aa, Streptomyces varsoviensis
  REGION 1..119: note = tr|A0A0L8QM83|A0A0L8QM83_9ACTN 6-carboxy-5,6,7,8-tetrahydropterin synthase; OS = Streptomyces varsoviensis OX=67373 GN=ADK38_21275 PE=3; SV = 1
MELSKEFRFESAHQLPYVPEGHKCGRLHGHSYRLTVHIDGDIDSSAGWVADFGDIKAAMKPLIEQLDHNFLNEVPGLENPTSEVLAYWVWDRLQPSLPLLSAITVHETCTSACVLRKPA

SEQ ID NO: 26139 - protein, 118 aa, Streptomyces varsoviensis
  REGION 1..118: note = tr|A0A0L8QXP1|A0A0L8QXP1_9ACTN 6-carboxy-5,6,7,8-tetrahydropterin synthase; OS = Streptomyces varsoviensis OX=67373 GN=ADK38_01375 PE=3; SV = 1
MEIFREFTFEAAHRLPNVPVGHKCGRLHGHSYRIQVHVESPVDEKTGWVMDFGDIKRAMVPLIETLDHHYLNEIKGLDNPTSEVLVRWVWDRLRDELPILSALTVRETCTSGCTYRGD

SEQ ID NO: 26140 - protein, 234 aa, Streptomyces venezuelae
  REGION 1..234: note = tr|F2R9E9|F2R9E9_STRVP Queuosine biosynthesis QueD, PTPS-I OS=Streptomyces venezuelae (strain ATCC 10712 / CBS 650.69 / DSM 40230 / JCM 4526 / NBRC 13096 / PD 04745)OX=953739 GN=SVEN_5706 PE=4 SV=1
MSSTQQPLFRIGKSFRFEATRRLDGGTYDGHSFTAEAVLTSMRLTPEGFVADFGDLAPLKRYIDGTLDHQVLNDYVEDVSNEGLARHLLGWAKSHLPADVVSVLEDVRVRTGRPQALPSAAFASFEASHQLHGLRDGHPCGRLHGHSYMLSVPVSAVPRLGDVPVLLRNHLRSAIHGKVLNQVIPGLNPTSENLAQYFSQWLTDRAMGGPGWDGTCVRISETETSWAEYMGGPA

SEQ ID NO: 26141 - protein, 148 aa, Streptomyces violaceoruber
  REGION 1..148: note = tr|A0A1V0UN04|A0A1V0UN04_STRVN 6-carboxy-5,6,7,8-tetrahydropterin synthase; OS = Streptomyces violaceoruber OX=1935 GN=B1H20_22615 PE=3; SV = 1
MMNLVKVRHNFESAHRLPQLGGKCTNLHGHSWWAEITVAGRLDERGVVVDFGLLKKSLREWIDTHLDHGSMLGEADPLVPALKADGTKLFLFGSAEPSKGLEWPTVENVAELLARVTSDRIAEAGWTDVAVSRVQVTETHVNAAEVIR

SEQ ID NO: 26142 - protein, 132 aa, Streptomyces violaceusniger; identical to SEQ ID NO: 25981
  REGION 1..132: note = tr|A0A0X3VUD2|A0A0X3VUD2_STRVO 6-pyruvoyl tetrahydropterin synthase OS=Streptomyces violaceusniger; OX = 68280 GN=ADL28_30580 PE=4 SV=1

SEQ ID NO: 26143 - protein, 132 aa, Streptomyces violaceusniger
  REGION 1..132: note = tr|G2P892|G2P892_STRVO Uncharacterized protein; OS = Streptomyces violaceusniger Tu 4113 OX=653045; GN = Strvi_6707 PE=4 SV=1
MFSITVRDHIMIAHSFRGDVFGPAQRLHGATFLVDATFRRAELDDDNIVVDIGLATRELGEVCGALSYRNLDDEPDFEGINTSTEFLAKVIADRLAERVHSGALGEGARGLSGIAVTLHESHVAWASYERGL

SEQ ID NO: 26144 - protein, 137 aa, Streptomyces viridochromogenes
  REGION 1..137: note = tr|D9X5V2|D9X5V2_STRVT Queuosine biosynthesis protein QueD OS=Streptomyces viridochromogenes (strain DSM 40736 / JCM 4977 / BCRC 1201 / Tue 494) OX=591159; GN = SSQG_06 601 PE=4 SV=1
MEGRPLFSITVRDHIMIAHSFRGEVFGPAQRLHGATFLVDATFRREQLDEDNIVVDIGLATQELGAVVSELNYRNLDNEPDFAGVNTSTEFLAKVIADRLAERIHKGALGEGAKGLAGLTVSLHESHIAWASYERAL

SEQ ID NO: 26145 - protein, 120 aa, Streptomyces viridochromogenes
  REGION 1..120: note = tr|A0A0J7Z870|A0A0J7Z870_STRVR 6-carboxy-5,6,7,8-tetrahydropterin synthase; OS = Streptomyces viridochromogenes OX=1938 GN=ACM01_27810; PE = 3 SV=1
MFTITKDFQFSASHRLGHLPEDHQCARLHGHNYTVQLELRCGDDQLTEPGFVRDYGELGDFKKWIDAELDHRHLNEVIPDRNPSAENMAHWIHQIWSERIPELSAVRVSETPKTWAEFRP

SEQ ID NO: 26146 - protein, 132 aa, Streptomyces viridosporus
  REGION 1..132: note = tr|D6A5T6|D6A5T6_STRV1 Uncharacterized protein; OS = Streptomyces viridosporus (strain ATCC 14672 / DSM 40746 / JCM 4963 / KCTC 9882 / NRRL B-12104 / FH 1290); OX = 566461GN=SSFG_01140 PE=4 SV=1
MFSITVRDHIMIAHSFHGEVFGPAQRLHGATFLVDATFRREQLDEDNIVVDIGLATQELGAVVGELNYRNLDDEPDFSGINTSTEYLAKVVADRLAERIHKGALGENAKGIAAITVTLHESHIAWASYERAL

SEQ ID NO: 26147 - protein, 128 aa, Streptomyces vitaminophilus
  REGION 1..128: note = tr|A0A0T6LS53|A0A0T6LS53_9ACTN 6-carboxy-5,6,7,8-tetrahydropterin synthase; OS = Streptomyces vitaminophilus OX=76728 GN=AQ490_23730; PE = 3 SV=1
MLTITKEFHFSSSHVLDRLPEGHPCARMHGHNYVVVLELSAPRAELNHAGFVRDYRELDVFKKWLDDTLDHRHLNEVMDGVSPSAENLAVWIHDLWREQLPELTAVRVSETPKTWVVYRPAPLRGPAG

SEQ ID NO: 26148 - protein, 132 aa, unidentified
  source 1..132: note = Streptomyces wuyuanensis
  REGION 1..132: note = tr|A0A1G9S346|A0A1G9S346_9ACTN 6-pyruvoyl-tetrahydropterin synthase OS=Streptomyces wuyuanensis OX=1196353 GN=SAMN05444921_106143 PE=4 SV=1
MFSVTVREHLMIAHSFHGEVFGPAQRLHGATYLVDATFRRAELDDDSLVVDIGLATAELGKVVGEFNYRNLDEVPEFAGINTSTEFLAKVIADRLADRVHSGALGEGARGLSGVSVTLHESHIAWASYERDL

SEQ ID NO: 26149 - protein, 147 aa, unidentified
  source 1..147: note = Streptomyces wuyuanensis
  REGION 1..147: note = tr|A0A1H0DK92|A0A1H0DK92_9ACTN 6-carboxy-5,6,7,8-tetrahydropterin synthase; OS = Streptomyces wuyuanensis OX=1196353; GN = SAMN05444921_13438 PE=3 SV=1
MDPLTGHHRIAKRFTFEAAHRLSGLPDGHKCARLHGHSYTAEIVLTADDLVPPGFVTDFVDLAVFGVYLNEHLNHRILNDVLPVSPTSENLAHHLAEWFIENVEPRVPGRLAAVRVSETASSWAEYVAPSRRSREAALDLPNPTGRQ

SEQ ID NO: 26150 - protein, 132 aa, Streptomyces xinghaiensis
  REGION 1..132: note = tr|A0A420V9C9|A0A420V9C9_9ACTN 6-carboxytetrahydropterin synthase OS=Streptomyces xinghaiensis OX=1038928 GN=DC095_002665 PE=4 SV=1
MFSVTVREHLMVAHSFRGEVFGPAQRLHGATFLVDATFRRTDLDADNIVVDIGLATSELGAVVGEFNYRNLDEVPEFAGVNTSTEYLAKVIADRLADKVHAGALGEGARGLSGISVTLHESHIAWASYERTL

SEQ ID NO: 26151 - protein, 132 aa, Streptomyces yokosukanensis
  REGION 1..132: note = tr|A0A101P1S1|A0A101P1S1_9ACTN 6-pyruvoyl tetrahydropterin synthase OS=Streptomyces yokosukanensis; OX = 67386 GN=AQI95_22715 PE=4 SV=1
MFSITVRDHIMIAHSFRGEVFGPAQRLHGATFLVDATFRREQLDEDNIVVDIGLATQELGGITAELNYRNLDDEPEFAGINTSTEFLAKVIADRLAERVHKGALGEGARGLAGIAVTLHESHIAWASYERGL

SEQ ID NO: 26152 - protein, 132 aa, Streptomyces yunnanensis; identical to SEQ ID NO: 26083
  REGION 1..132: note = tr|A0A1M7P7C1|A0A1M7P7C1_9ACTN 6-pyruvoyl-tetrahydropterin synthase OS=Streptomyces yunnanensis OX=156453 GN=SAMN05216268_12049 PE=4 SV=1

SEQ ID NO: 26153 - protein, 118 aa, unidentified
  source 1..118: note = Streptomyces zhaozhouensis
  REGION 1..118: note = tr|A0A286DY23|A0A286DY23_9ACTN 6-carboxy-5,6,7,8-tetrahydropterin synthase; OS = Streptomyces zhaozhouensis OX=1300267; GN = SAMN06297387_111120 PE=3 SV=1
MEIFREFTFEAAHRLPNVPEGHKCARLHGHSYKVIVHVEAPVDPESGWVMDFGDLKKGFKPLEAQLDHYYLNDIEGLENPTSEVLARWIWERLKPTLPDLSAITVRETCTSGCTYRGE

SEQ ID NO: 26154 - protein, 132 aa, Streptomyces zinciresistens
  REGION 1..132: note = tr|G2GLL1|G2GLL1_9ACTN Uncharacterized protein; OS = Streptomyces zinciresistens K42 OX=700597 GN=SZN_32046; PE = 4 SV=1
MFSITVRDHIMIAHSFRGDVFGPAQRLHGATFLVDATFRREQLDDDNIVVDIGLATRELGAVVGELNYRNLDNEPDFAGVNTSTEFLAKVIADRLAERIAKGALGEGARGLAGLTVTLHESHVAWASYERGL

SEQ ID NO: 26155 - protein, 136 aa, Streptomyces zinciresistens
  REGION 1..136: note = tr|G2G3Z2|G2G3Z2_9ACTN 6-carboxy-5,6,7,8-tetrahydropterin synthase; OS = Streptomyces zinciresistens K42 OX=700597 GN=SZN_00965; PE = 3 SV=1
MKQAPDGTFTISKRFAFDAAHQLTSLGPDHVCARLHGHGYRVEAVLSCTEDELVPPGFVVDFKDLEPLARYIKDTLDHRNLNEVLDFEPTSELLARHLAHWFLTHFTPAVAERLIQMRVSETEKTWATYTPNRRTA

SEQ ID NO: 26156 - protein, 188 aa, Subdoligranulum sp.
  REGION 1..188: note = tr|A0A3A6K3S1|A0A3A6K3S1_9FIRM Rubredoxin; OS = Subdoligranulum sp. OF01-18 OX=2302962 GN=DXA32_12755; PE = 4 SV=1
MRSITTLDLQYAHRFYGFKGEAQYLHGHTGVLTIEVEDSVNAGVNMVFPCNEIQKTAWDVLKNFDHALILREDDPLLPAILDVYEKQGIKNGHPNNVMKGEAFKTELATAYPDCRLVVTKETMTVEGMIKIVYDLLKDKLNIAKLTFTSGVNAASAEFETKNEIDRCPLCGIALNENGVCPKCGYKKQ

SEQ ID NO: 26157 - protein, 188 aa, Subdoligranulum sp.; identical to SEQ ID NO: 26156
  REGION 1..188: note = tr|A0A372V2Y2|A0A372V2Y2_9FIRM Rubredoxin; OS = Subdoligranulum sp. AM16-9 OX=2302960 GN=DW194_12005; PE = 4 SV=1

SEQ ID NO: 26158 - protein, 184 aa, Subdoligranulum variabile
  REGION 1..184: note = tr|D1PMA5|D1PMA5_9FIRM Uncharacterized protein; OS = Subdoligranulum variabile DSM 15176 OX=411471; GN = SUBVAR_05464 PE=4 SV=1
MRSITKLDLQYAHRFYGFRGEAQYLHGHTGVLTIEVEDTINPGVNMAFPCNEIQKTAWNVLKNFDHALILREDDPLLPAVLAVYEKQGIKDGDPNNIMKGPAFHTDLATAYPDCRLVVTKETLTVEGMIKIVYDLLKDQLNIVKLTFTSGVNAASQEYESRLHLDRCPLCGIALDENGVCPKCG

SEQ ID NO: 26159 - protein, 149 aa, Subsaximicrobium wynnwilliamsii
  REGION 1..149: note = tr|A0A5C6ZBT4|A0A5C6ZBT4_9FLAO 6-carboxy-5,6,7,8-tetrahydropterin synthase; OS = Subsaximicrobium wynnwilliamsii OX=291179; GN = ESY86_20100 PE=3 SV=1
MSNIRITKQFSFETGHALYGYDGKCKNVHGHSYNLAVTVIGQPIADSDHVKFGMVIDFGDLKKIVKEEIVDVFDHATVFNKNTPHVELAKELADRDHNVLLVDYQPTSEMMVIDFAEKIKQRLPENVQLHSLKLQETATSFAQWFASDN

SEQ ID NO: 26160 - protein, 136 aa, Subsaximicrobium wynnwilliamsii
  REGION 1..136: note = tr|A0A5C6ZGR2|A0A5C6ZGR2_9FLAO 6-carboxy-5,6,7,8-tetrahydropterin synthase; OS = Subsaximicrobium wynnwilliamsii OX=291179; GN = ESY86_12990 PE=3 SV=1
MKVTVSRKAHFNAAHRLYREDWSFEKNDAVFGKCNNPNFHGHNYELVVHVTGEIDPETGFVMDMKVLKDLIKAEIEDAFDHKNLNVEVPEFKELNPTAENIAVVIYQKLKPKLEASVDLEITLYETPRNFVSYSGN

SEQ ID NO: 26161 - protein, 188 aa, Succinatimonas hippei
  REGION 1..188: note = tr|E8LN23|E8LN23_SUCHY Uncharacterized protein; OS = Succinatimonas hippei (strain DSM 22608 / JCM 16073 / KCTC 15190 / YIT 12066) OX=762983 GN=HMPREF9444_02176 PE=4; SV = 1
MRSITKIDLQYAHRFYGFQGEAQYLHGHTGVLTIEVEDTIEPGVNMVFPCNEIQKTAWAVLKNFDHALILREDDPLLPAILDVYEKQGIKNGAPSNKMKGDAFKTELATAYPDCRLVVTKETMTVEGMIKIVYDLLKDKLNIVKLTFTSGVNAACAEFPAQESRARCPLCGVALNENGVCPKCGWRKA

SEQ ID NO: 26162 - protein, 180 aa, Succinatimonas sp.
  REGION 1..180: note = tr|R5EV13|R5EV13_9GAMM Uncharacterized protein; OS = Succinatimonas sp. CAG:777 OX=1262974 GN=BN779_00949; PE = 4 SV=1
MYTIDKQFEFEYGHRVWTQTLDERFSLDNRCICRHLHGHHAIVKLHLAAKELTDGMVTDFKHLNCFKQFLDDVLDHRFIIDEKDPLFLLDSAIINDYIDHGFYRTVDLSTLSIPETLPDEIKLSVVEKYDSFVIVDFIPTSENICKWLYDIANEMLDALNVYVSKVEFQETPKSHCSYEE

SEQ ID NO: 26163 - protein, 125 aa, Succiniclasticum ruminis
  REGION 1..125: note = tr|A0A1G6MQE4|A0A1G6MQE4_9FIRM 6-carboxy-5,6,7,8-tetrahydropterin synthase; OS = Succiniclasticum ruminis OX=40841 GN=SAMN04487864_11085; PE = 3 SV=1
MIVLKEFEFDAAHYLPSYNGKCEHLHGHTYKLVVKVDGRPDMEGMVLDFSLLKKIVQTKVLRKLDHKLLNDVLPNPSAENIAIWVWDQLAKPLYAENRRLYEVEVWETRTSGCIYRGEFYEGELC

SEQ ID NO: 26164 - protein, 125 aa, Succiniclasticum ruminis; identical to SEQ ID NO: 26163
  REGION 1..125: note = tr|A0A1I1ZQ67|A0A1I1ZQ67_9FIRM 6-carboxy-5,6,7,8-tetrahydropterin synthase; OS = Succiniclasticum ruminis DSM 9236 OX=1123323; GN = SAMN05216245_10471 PE=3 SV=1

SEQ ID NO: 26165 - protein, 180 aa, Succinivibrio sp.
  REGION 1..180: note = tr|A0A316SGZ6|A0A316SGZ6_9GAMM 6-carboxytetrahydropterin synthase OS=Succinivibrio sp.; OX = 2053619 GN=DBY31_06100 PE=4 SV=1
MYTIDKQFEFEYGHRVWTQTLDERFSLDNRCICRHLHGHHAIVKLHLAAKELTDGMVTDFKHLNCFKQFLDDVLDHRFIIDENDPLFLLDSAIINDYIDHGFYRTVDLSTLSIPETLPDEIKLSVVEKYDSFVIVDFIPTSENICKWLYDIANKMLDALNVYVSKVEFKETPKSHCSYEE

SEQ ID NO: 26166 - protein, 117 aa, Sulfitobacter brevis
  REGION 1..117: note = tr|A0A1I1ULG4|A0A1I1ULG4_9RHOB 6-carboxy-5,6,7,8-tetrahydropterin synthase; OS = Sulfitobacter brevis OX=74348 GN=SAMN04488523_102166; PE = 3 SV=1
MYRITKEFHFSASHQLEHLPDGHQCARLHGHNYVVVVELASPELNADGFVRDYGELKPLKTYIDGTFDHRHLNDVLAVPSTGENMAKHFYDWCAARWPETTAVKVSETPKTWAEYRP

SEQ ID NO: 26167 - protein, 139 aa, Sulfitobacter donghicola; identical to SEQ ID NO: 25879
  REGION 1..139: note = tr|A0A410XX67|A0A410XX67_9RHOB 6-carboxy-5,6,7,8-tetrahydropterin synthase; OS = Sulfitobacter donghicola OX=421000 GN=queD PE=3 SV=1

SEQ ID NO: 26168 - protein, 117 aa, Sulfitobacter guttiformis
  REGION 1..117: note = tr|A0A420DJK1|A0A420DJK1_9RHOB 6-carboxy-5,6,7,8-tetrahydropterin synthase; OS = Sulfitobacter guttiformis OX=74349 GN=C8N30_3516 PE=3; SV = 1
MYRITKEFHFSASHQLSHLPEGHQCARLHGHNYIVIVELASATLNSDGFVRDYGELKPLKAYIDDTFDHRHLNDVMDVPSTGENMARHFYDWCAAVWPEVTAVKVSETPKTWAEYRP

SEQ ID NO: 26169 - protein, 131 aa, Sulfitobacter guttiformis
  REGION 1..131: note = tr|A0A420DTG7|A0A420DTG7_9RHOB 6-pyruvoyl-tetrahydropterin synthase OS=Sulfitobacter guttiformis OX=74349 GN=C8N30_2187 PE=4 SV=1
MYAVEVRDHVMIAHSLPSPVFGPAQGMHGATFVVDAAFYTEDLDENGLVVDMGLATEALAAALAPLKYCNLDEVPEFKGKITTTEFLCGHIWKQLREVAKTTGLGDGGRVRSIRVMMHESHVARGWYQADI

SEQ ID NO: 26170 - protein, 117 aa, unidentified
  source 1..117: note = Sulfitobacter indolifex
  REGION 1..117: note = tr|A9E8J6|A9E8J6_9RHOB 6-carboxy-5,6,7,8-tetrahydropterin synthase; OS = Sulfitobacter indolifex HEL-45 OX=391624; GN = OIHEL45_16009 PE=3 SV=1
MFRIRKEFHFSASHQLTHLPDDHQCARLHGHNYIVVVELAAEALNADGFVRDYHDLKALKTYIDDHFDHRHLNDVMDGPSTAENMAKHFYDWCAARWSETSAVLVSETPKTWAEYRP

SEQ ID NO: 26171 - protein, 117 aa, Sulfitobacter litoralis
  REGION 1..117: note = tr|A0A1H0LHM0|A0A1H0LHM0_9RHOB 6-carboxy-5,6,7,8-tetrahydropterin synthase; OS = Sulfitobacter litoralis OX=335975; GN = SAMN04488512_104221 PE=3 SV=1
MFTITKEFHFSASHQLSHLPEDHQCARLHGHNYVVVVELRAEELNVDGFVRDYGELKPFKTYIDETFDHRHLNDVLDFASTGENMARHLYEWCAGRWPETTAVKVSETPKTWAEYRP

SEQ ID NO: 26172 - protein, 117 aa, Sulfitobacter pontiacus
  REGION 1..117: note = tr|A0A1H2T6X0|A0A1H2T6X0_9RHOB 6-carboxy-5,6,7,8-tetrahydropterin synthase; OS = Sulfitobacter pontiacus OX=60137 GN=SAMN04488041_10277; PE = 3 SV=1
MYTITKEFHFSASHQLSHLPDGHQCARLHGHNYVVVVELRAKELNADGFVRDYGELKPLKTYIDETFDHRHLNDVLDFVSTGENMARHLYEWCAQHWPETTAVKVSETPKTWAEYRP

SEQ ID NO: 26173 - protein, 117 aa, unidentified
  source 1..117: note = Sulfitobacter pseudonitzschiae
  REGION 1..117: note = tr|A0A073J2I4|A0A073J2I4_9RHOB 6-carboxy-5,6,7,8-tetrahydropterin synthase; OS = Sulfitobacter pseudonitzschiae OX=1402135 GN=SUH3_18145; PE = 3 SV=1
MYRITKEFHFSASHQLAHLPDGHQCARLHGHNYVVVVELAAEALNADGFVRDYGELKPLKDYIDAAFDHRHLNDVMGVPSTGENMARHFYDWCAARWPETTAVRVSETPKTWAEYRP

SEQ ID NO: 26174 - protein, 117 aa, Sulfitobacter sp.; identical to SEQ ID NO: 26172
  REGION 1..117: note = tr|A3SWE2|A3SWE2_SULSN 6-carboxy-5,6,7,8-tetrahydropterin synthase; OS = Sulfitobacter sp. (strain NAS-14.1) OX=314267; GN = NAS141_05878 PE=3 SV=1

SEQ ID NO: 26175 - protein, 117 aa, Sulfitobacter sp.
  REGION 1..117: note = tr|A0A2G2BYM9|A0A2G2BYM9_9RHOB 6-carboxy-5,6,7,8-tetrahydropterin synthase; OS = Sulfitobacter sp. OX=1903071 GN=queD PE=3 SV=1
MYRITKEFHFSASHQLGHLPIDHQCARLHGHNYIVVVELASDQLNSDGFVRDYGELKAFKTYIDENFDHRHLNDVMTNMTTGENLARHFYDWCAALWPETAAVKVSETPKTWAEYRP

SEQ ID NO: 26176 - protein, 163 aa, Sulfobacillus benefaciens
  REGION 1..163: note = tr|A0A2T2WS99|A0A2T2WS99_9FIRM Uncharacterized protein OS=Sulfobacillus benefaciens OX=453960; GN = C7B43_17600 PE=4 SV=1
MKLNLAGKDAGLTFESVHLVPGRGGCSRLHPHFHTVSVSLDGEPSDRGMLMHIYRLKEVVIRLCQEFDHMVLVANYPPEVMTVDEEETGYKINVNGKTYLLPYSDVLRLPIGTLNVEDLCQYMAENLLDRLDPILDARRIVSMTVEVDEGNGQSASVTVSTRR

SEQ ID NO: 26177 - protein, 119 aa, unidentified
  source 1..119: note = Sulfuricaulis limicola
  REGION 1..119: note = tr|A0A1B4XF02|A0A1B4XF02_9GAMM 6-carboxy-5,6,7,8-tetrahydropterin synthase; OS = Sulfuricaulis limicola OX=1620215 GN=SCL_1063 PE=3 SV=1
MEIFKIFTIEAAHLLPNVPEAHKCRRLHGHSFRIEIRVAGPVEEKSGWIMDFADLSRAFQPIYEQLDHHYLNEIEGLQNPTSEHLARWIWRRLKPALPALSEVIVRETCTAGCAYRGED

SEQ ID NO: 26178 - protein, 124 aa, Sulfuricella denitrificans
  REGION 1..124: note = tr|S6B2J5|S6B2J5_SULDS Queuosine biosynthesis protein QueD OS=Sulfuricella denitrificans (strain DSM 22764 / NBRC 105220 / skB26) OX=1163617 GN=SCD_n01059 PE=4; SV = 1
MHGHRYAIEISLSGNIISMPSSSEEGMVMDFSDVKAIAQKHVVEPWDHAFLVYAGDTVVLDFLKSIEGHKTVMLDCVPTAENLASKAFQILDLAYRDTYGNNLRLERVRIYETPNNWADATRGE

SEQ ID NO: 26179 - protein, 125 aa, Sulfuricella sp.
  REGION 1..125: note = tr|A0A0E9MG13|A0A0E9MG13_9PROT Uncharacterized protein OS=Sulfuricella sp. T08 OX=1632857 GN=SCT_1418; PE = 4 SV=1
MHGHRYAIEITLSGSIINTPGSSEEGMVMDFSDIKAIAQKHVVEPWDHAFLVYVGDTVVADFLRTIEGHKTVVLDCVPTAENLAAKAFQILELAYRDTYGNNLRLERVRIYETPNNWADATRGGI

SEQ ID NO: 26180 - protein, 193 aa, Sulfuricurvum kujiense
  REGION 1..193: note = tr|A0A2D3WQ05|A0A2D3WQ05_9HELI 6-carboxytetrahydropterin synthase QueD OS=Sulfuricurvum kujiense OX=148813 GN=CFH83_01195 PE=4 SV=1
MIIRKLFKFENAHVVRGCSTQRCRASIHGHSYKVEVLFESAYLDHGQMVYDFGLMKQGIKELIDSFDHAVAIWDGDDAEYIEAMKAHSNRWAVLPVSPSCEQFSRVMFVMIDKLVWFTKMVNGEKMVRLNSIIVHETETGYAQCFREDAYSELMGLIKLEDIHFSDEVRQGWSDPQLWEKVLAGETFVNPVSV

SEQ ID NO: 26181 - protein, 193 aa, Sulfuricurvum kujiense
  REGION 1..193: note = tr|E4TXA2|E4TXA2_SULKY 6-pyruvoyl-tetrahydropterin synthase OS=Sulfuricurvum kujiense (strain ATCC BAA-921 / DSM 16994 / JCM 11577 / YK-1) OX=709032 GN=Sulku_2308 PE =4 SV=1
MLIRKLFKFENAHVVRGCSTQRCRASIHGHSYKVEVLFESKYLDEGQMVYDFGLMKRGMKELIDSFDHGVAIWDGDDAEYIASMKAHSNRWVLLPVSPSCEQFSRVLFLMIDRLLASTQMVNGERGVKLHSIIVHETETGYAQAFEEDAYSELMGTIPLEMIAFSDEVREGWNDPQLWEKILTGQPFVNPKTV

SEQ ID NO: 26182 - protein, 193 aa, Sulfuricurvum sp.
  REGION 1..193: note = tr|A0A258ZEL6|A0A258ZEL6_9HELI 6-carboxytetrahydropterin synthase QueD OS=Sulfuricurvum sp. 24-42-5 OX=1970440 GN=B7Y17_04065 PE=4 SV=1
MIIRKLFKFENAHVVRGCSSERCRASVHGHSYKIEVLFESDYLDNGQMVYDFGLMKQGMKALIDSFDHSIALWDGDDVQYLADMKRHSNRWVQLPVSPSAEQFSRIIFVMIDRLLGCTQSINGEREVKLHSIIVHETDTGYAQGFREDAYSHKMGLIELDKIIFSEGVRAEWGDPQLWDKIMAGEVFINPDTV

SEQ ID NO: 26183 - protein, 193 aa, Sulfuricurvum sp.
  REGION 1..193: note = tr|A0A4R4G1A1|A0A4R4G1A1_9HELI 6-carboxytetrahydropterin synthase OS=Sulfuricurvum sp. IAE1 OX=2546102 GN=E0765_11915 PE=4 SV=1
MIIRKLFKFENAHIVRGCSTQRCRASIHGHSYKVEVLFESKYLDRGQMVYDFGLMKQGMKELIDSFDHAVAIWDADHTEYIDAMKEYSARWVLLPVSPSCEQFARVIFLMIDRLLCSTHMINGERGVRLHSVIVHETDTGYAQAFEEDAYSEWMGTIALDAIRFSKEVREGWSDPQLWEKVLNGDIFVNPDTV

SEQ ID NO: 26184 - protein, 148 aa, unidentified
  source 1..148: note = Sulfuriferula multivorans
  REGION 1..148: note = tr|A0A401JZW0|A0A401JZW0_9PROT 6-carboxy-5,6,7,8-tetrahydropterin synthase; OS = Sulfuriferula multivorans OX=1559896 GN=SFMTTN_2943; PE = 3 SV=1
MLITRRLEFDAGHRIPNHTSQCKHLHGHRYAIEITLSGDIITAEGQSAQGMVMDFSDVKRIAKEQLVDAWDHAFLAYRGDKVVCDFLASLPNHKTVILEVVPTVENLAQIAFDILNPAYRDTYGNHLRLKQVRIYETPNNWADCMPGE

SEQ ID NO: 26185 - protein, 148 aa, unidentified
  source 1..148: note = Sulfuriferula plumbiphila
  REGION 1..148: note = tr|A0A512L777|A0A512L777_9PROT 6-carboxytetrahydropterin synthase QueD OS=Sulfuriferula plumbiphila OX=171865 GN=TPL01_14730 PE=4 SV=1
MLITRRLEFDAGHRIPNHASQCKHLHGHRYAIEITLSGDIITAEGQSEQGMVMDFSDVKRIAREQLVDAWDHAFLAYRGDKPVCDFLATLTDHKTIILELVPTVENLAHIAFDILDPAYRDTYGNQLRLKQVRIYETPNNWADCRQPE

SEQ ID NO: 26186 - protein, 122 aa, unidentified
  source 1..122: note = Sulfurifustis variabilis
  REGION 1..122: note = tr|A0A1B4V577|A0A1B4V577_9GAMM 6-carboxy-5,6,7,8-tetrahydropterin synthase; OS = Sulfurifustis variabilis OX=1675686 GN=SVA_2136 PE=3; SV = 1
MEIYKLFTLEAAHRLPHVPENHKCRRLHGHSFRVEVRVRGPVDPAAGWVQDFADIGRAFQPIYEQLDHHYLNEIPGLENPTSENLARWIWDRLQPALPLLAEITVRETCTAGCVYRGEREGS

SEQ ID NO: 26187 - protein, 115 aa, Sulfurihydrogenibium azorense
  REGION 1..115: note = tr|C1DVU3|C1DVU3_SULAA 6-carboxy-5,6,7,8-tetrahydropterin synthase; OS = Sulfurihydrogenibium azorense (strain Az-Fu1 / DSM 15241 / OCM 825) OX=204536 GN=SULAZ_1259 PE= 3 SV=1
MPYIVRVKQKFNAAHFLTDYHGKPEPLHGHTWMVELYIKADKLDNGGMGYDFLEIKDLLKEILPDYKCMNDIYDFSPSAENVAKYIYDQVKKKYPTLVKVVVWETEEGGAEYYEE

SEQ ID NO: 26188 - protein, 161 aa, Sulfurihydrogenibium azorense
  REGION 1..161: note = tr|C1DT79|C1DT79_SULAA Putative 6-pyruvoyl tetrahydrobiopterin synthase (Ptps)(Ptp synthase); OS = Sulfurihydrogenibium azorense (strain Az-Fu1 / DSM 15241 / OCM 825) O X=204536 GN=SULAZ_0322 PE=4 SV=1
MKYEITKIFRFEAGHRVWKQDLRSGKTAKLSEGVVIENKCVNLHGHSYVLEVTVGSDTLNEQDVVVDFYHIKSALKDLVDNVFDHSFIIDVNDPIYPKFKELFGCYKITEVDFCPTAEALAKYFYDFLVQKLKEAGLEEDIKVVSVTLWETATGKATYRGE

SEQ ID NO: 26189 - protein, 115 aa, Sulfurihydrogenibium sp.
  REGION 1..115: note = tr|B2V641|B2V641_SULSY 6-carboxy-5,6,7,8-tetrahydropterin synthase; OS = Sulfurihydrogenibium sp. (strain YO3AOP1) OX=436114; GN = SYO3AOP1_0015 PE=3 SV=1
MPYIVRVRQKFNAAHFLTDYHGQPEPLHGHTWMVELFIRADKLDNGGMGYDFIEIKEFLKEILPDYKCMNDIYDFSPSAENVAKYLYDKIKERYPTLQKVVVWETEEGGAEYYEE

SEQ ID NO: 26190 - protein, 161 aa, Sulfurihydrogenibium sp.
  REGION 1..161: note = tr|A0A2J6X1M1|A0A2J6X1M1_9AQUI 6-carboxy-5,6,7,8-tetrahydropterin synthase; OS = Sulfurihydrogenibium sp. OX=2053621 GN=C0178_01550 PE=4; SV = 1
MKYEITKVFRFEAGHRVWKQDLRAGKTAKLSEGIPIENKCTNLHGHSYVLEVTVGSDTLNEQDVVVDFYHIKSALKDLIDNVFDHSFIIDVNDPIYPKFKELFGCYKITEVDFCPTAEALAKYFYDFLVQKIKEANLEEDIKVVSVTLWETATGKATYRGE

SEQ ID NO: 26191 - protein, 161 aa, Sulfurihydrogenibium yellowstonense
  REGION 1..161: note = tr|C4FKI0|C4FKI0_9AQUI Putative 6-pyruvoyl tetrahydrobiopterin synthase OS=Sulfurihydrogenibium yellowstonense SS-5 OX=432331 GN=SULYE_1080 PE=4 SV=1
MKYEITKIFRFEAGHRVWKQNLAEGKTAVLSGYACTDNKCRNLHGHSYILEVTVGSDTLNEQDVVVDFYHIKNALKDLVDNVFDHSFIIDINDPLYPVFKEYFKDLKITEVDFCPTAEALAKYFYDYLVQKLKEANLEEDIKVVQITLWETATGKATYKGE

SEQ ID NO: 26192 - protein, 193 aa, Sulfurimonas autotrophica
  REGION 1..193: note = tr|E0UR08|E0UR08_SULAO 6-pyruvoyl tetrahydrobiopterin synthase OS=Sulfurimonas autotrophica (strain ATCC BAA-671 / DSM 16294 / JCM 11897 / OK10); OX = 563040 GN=Saut_19 21 PE=4 SV=1
MIIRKLFKFENAHIVRGCSTVKCRSSIHGHSYKVELLFASNFLDNGQMVYDFGLMKQNMKDLVESFDHAIALWRDDNPEFVHDMKKHSARWVELPVSPSAEQFSRVIFVMIDKLLSLTSTINGEKEVKMHSVIVHETDTGYAQCFSADAYSKNMGKIKLEEIIFSRQVLNDFTDKELFEKIKRGEKFLNPESV

SEQ ID NO: 26193 - protein, 193 aa, Sulfurimonas denitrificans
  REGION 1..193: note = tr|Q30P94|Q30P94_SULDN 6-pyruvoyl tetrahydrobiopterin synthase-like protein OS=Sulfurimonas denitrificans (strain ATCC 33889 / DSM 1251) OX=326298; GN = Suden_1913 PE=4SV=1
MIIRKLFKFENAHVVRGCSTLRCRSSIHGHSYKVELLFESNFLDNAQMVYDFGLMKQNMKAIIDSFDHSITLWDKDEAEYIASMQKHSQRWVLLPLSPSAEQFSRLFFVLIDKLLSLTTSVNGEKEVKLYSVIVHETDTGYAQAFKEDAYSKNMGIVNIDEIIFSDTIKDDWADRDFWDKMKKDKRFLNPTTV

SEQ ID NO: 26194 - protein, 193 aa, unidentified
  source 1..193: note = Sulfurimonas gotlandica
  REGION 1..193: note = tr|B6BHS6|B6BHS6_SULGG 6-pyruvoyl tetrahydrobiopterin synthase OS=Sulfurimonas gotlandica (strain DSM 19862 / JCM 16533 / GD1) OX=929558 GN=ptpS; PE = 4 SV=1
MIIRKLFKFENAHIVRGCSTVKCRSSLHGHSYKVELLFESNFLDNGQMVYDFGLMKQNMKALVESFDHGVTVWSGDSWEYLDSMKKHSDRWVELPVSPSCEQFSRVIFVMIDRLLQLTNSVNGEREVKLNSVIVHETDTGYAQAFSYDAYSKDMGYIELDSIIFSDEVKNSWPDCELWERAKRGDSFINPTSV

SEQ ID NO: 26195 - protein, 193 aa, unidentified
  source 1..193: note = Sulfurimonas hongkongensis
  REGION 1..193: note = tr|T0KRB1|T0KRB1_9HELI 6-carboxy-5,6,7,8-tetrahydropterin synthase; OS = Sulfurimonas hongkongensis OX=1172190 GN=M947_06140; PE = 4 SV=1
MIIRKMFKFENAHIVRGCSTQKCRSSLHGHSYKVELLFESNFLDNAQMVYDFGLMKQNMKELIDAFDHGVSIWSSDKVEYIKDMKKHSQRWIELPVSPSCEQFSRVFFVMIDRLLQLTNTVNGEREVKLHSVIVHETATGYAQAFSYDAYSKDMGVIELDSIVFSQAVLDDFSDRELWERVKRGESFTNPTTV

SEQ ID NO: 26196 - protein, 193 aa, Sulfurimonas sp.
  REGION 1..193: note = tr|A0A2D3VUQ2|A0A2D3VUQ2_9HELI 6-carboxytetrahydropterin synthase QueD OS=Sulfurimonas sp. UBA12504 OX=2015903 GN=CFH84_07810 PE=4 SV=1
MIIRKMFKFENAHIVRGCSSVKCRSSLHGHSYKVELLFESNFLDNGQMVYDFGLMKQNMKALVESFDHAVALWNHDSKEYINDMKKHSHRWVELPVSPSAEQFSRVIFVMIDKLLRLTSSVNGEKEVKLSSVIVHETDTGYAQCFEADAYSLNMGIIKFEEIIFSQEVRNDWADKELWEKIKRSERFINPSCV

SEQ ID NO: 26197 - protein, 193 aa, Sulfurimonas sp.
  REGION 1..193: note = tr|A0A2G2PHV4|A0A2G2PHV4_9HELI 6-carboxytetrahydropterin synthase QueD OS=Sulfurimonas sp. OX=2022749 GN=COB17_00695 PE=4 SV=1
MIIRKLFKFENAHIVRGCSSIKCRSSVHGHSYKIEILFSSNFLDNGQMVYDFGLMKQNIKALVESFDHAITIWSEDNKGYISDMKKHSSRWVELPVSPSAEQFSRVIFLMIDKLLELTSGVNGEKEVSLNSVIVHETDTGYAQAFKEDAYSKNMGEINLKEIIFSDEIQDTWKDSSLWKKILNNEKFINSRNV

SEQ ID NO: 26198 - protein, 149 aa, unidentified
  source 1..149: note = Sulfurirhabdus autotrophica
  REGION 1..149: note = tr|A0A4R3XT84|A0A4R3XT84_9PROT 6-carboxy-5,6,7,8-tetrahydropterin synthase; OS = Sulfurirhabdus autotrophica OX=1706046 GN=EDC63_12417; PE = 3 SV=1
MQITRRLEFDAGHRIPHHKSQCRHMHGHRYAIEITLSGAIIEIEGISEQGMVMDFTDVKNIAYTYIAGVWDHAFLVYTGDTQVIEFLKTLPEHKTVALPFIPTAENLAAEAFRILDKAYQDTYGNNLRLEQVRLYETPNNWADAVRNKI

SEQ ID NO: 26199 - protein, 149 aa, unidentified
  source 1..149: note = Sulfurisoma sediminicola
  REGION 1..149: note = tr|A0A497XCE8|A0A497XCE8_9PROT 6-carboxy-5,6,7,8-tetrahydropterin synthase OS=Sulfurisoma sediminicola OX=1381557 GN=DFR35_1222 PE=3 SV=1
MLITRRLEFDAGHRIPDHRSQCRHLHGHRYAIEITLAGEVIEAAGRPDTGMVMDFSEVKEIARRCVVDAWDHAFLAYRGDTALVAFLATLPGHKTVLLDAVPTAENLARIAFGLLDPAYQDTFGNHLRLERVRLYETPNCWADATRARA

SEQ ID NO: 26200 - protein, 150 aa, Sulfuritalea hydrogenivorans
  REGION 1..150: note = tr|W0SGK0|W0SGK0_9PROT 6-pyruvoyltetrahydropterin synthase OS=Sulfuritalea hydrogenivorans sk43H OX=1223802; GN = SUTH_02378 PE=4 SV=1
MRITRRLEFDAGHRIPNHQSQCRHLHGHRYALEITLGGGVIDAAGRPDDGMVMDFSEVKAIAKQHVVDLWDHAFLVWRGDESVMNYLASVPGHKTVVLDAVPTAENLARIAFSILDPLYRDSYGNHLHLERIRLYETPNCWADATRDDLA

SEQ ID NO: 26201 - protein, 126 aa, Sulfurivirga caldicuralii
  REGION 1..126: note = tr|A0A1N6F6H9|A0A1N6F6H9_9GAMM 6-carboxy-5,6,7,8-tetrahydropterin synthase; OS = Sulfurivirga caldicuralii OX=364032; GN = SAMN05443662_0943 PE=3 SV=1
MKKRFTLKTLLDFAAAHRLHGYDGDCAKLHGHNWKVEVMVTGEQLDDVGMVIDFKEIKRHAKAVVAELDHTYLNDHPAFQNQNPTAENIAAYLFERLAERIDTPQRQVSAITVWENDRNCVTFSVE

SEQ ID NO: 26202 - protein, 180 aa, Sulfurospirillum barnesii
  REGION 1..180: note = tr|I3XZ87|I3XZ87_SULBS 6-pyruvoyl-tetrahydropterin synthase OS=Sulfurospirillum barnesii (strain ATCC 700032 / DSM 10660 / SES-3) OX=760154 GN=Sulba_1982 PE=4 SV=1
MLWQISKEFDFCYGHRVWSQQLDSEFSLTGCLACRHLHGHQGKIVVYLQSNELKNGMVTDFHHLNWFKQFLDATLDHKFIIDIHDPLFETLLPHFSDKQNLLSHEAGYQTPDLSKVVQEATHLIEMYEGYIIVDFVPTSENISTWLLGIIQKKMSRLGVKVSHVEFLETPKSRSIVYNQQ

SEQ ID NO: 26203 - protein, 180 aa, Sulfurospirillum cavolei
  REGION 1..180: note = tr|A0A2D3WD85|A0A2D3WD85_9PROT 6-carboxytetrahydropterin synthase OS=Sulfurospirillum cavolei OX=366522 GN=CFH80_08780 PE=4 SV=1
MLWQISKEFDFCYGHRVWSQQLDSEFALTGCLACRHLHGHQGKIVVYLQSTKLQDGMVTDFHHLNWFKRFLDDTLDHKFIIDIHDPLFETLLPHFADKQHLIEHEAGYKIPDLTRVKDEPSFIVELYDGYIIVDFVPTSENISTWLLGIVSQKMSRLGVEVSHIEFLETPKSRSIVYNQA

SEQ ID NO: 26204 - protein, 180 aa, Sulfurospirillum deleyianum
  REGION 1..180: note = tr|D1B474|D1B474_SULD5 Uncharacterized protein; OS = Sulfurospirillum deleyianum (strain ATCC 51133 / DSM 6946 / 5175) OX=525898 GN=Sdel_1879 PE=4 SV=1
MLWQISKEFDFCYGHRVWSQQLDSEFSLTGCLACRHLHGHQGKIVVYLQSNELKNGMVTDFHHLNWFKQFLDATLDHKFIIDIHDPLFETLLPHFADKQNLLSHEAGYQTPDLSKVAHEAMHLIEMYEGYIIVDFVPTSENISTWLLEIIQKKMSRLGVKVSHVEFLETPKSRSIVYNQK

SEQ ID NO: 26205 - protein, 180 aa, Sulfurospirillum halorespirans
  REGION 1..180: note = tr|A0A1D7TM80|A0A1D7TM80_9PROT 6-carboxy-5,6,7,8-tetrahydropterin synthase; OS = Sulfurospirillum halorespirans DSM 13726 OX=1193502; GN = SHALO_2346 PE=4 SV=1
MIWQISKEFDFCYGHRVWSQQLDSEFSLTGCLACRHLHGHQGKVIVYLQSAQLKDGMVTDFHHLNWFKQFLDTTLDHKFIIDIHDPLFETLLPHFADKAHLIENEAGYKIPDLNRVKDEPSHILEMYDGYIIVDFVPTSENISTWLLEIIAKKMSRLGVEVSHVEFLETPKSRSIVYNKQ

SEQ ID NO: 26206 - protein, 180 aa, Sulfurospirillum multivorans
  REGION 1..180: note = tr|A0A5B9TUF7|A0A5B9TUF7_SULMU 6-carboxy-5,6,7,8-tetrahydropterin synthase; OS = Sulfurospirillum multivorans OX=66821 GN=SMN_2585 PE=4; SV = 1
MIWQISKEFDFCYGHRVWSQQLDSEFSLTGCLACRHLHGHQGKVIVYLQSSQLKDGMVTDFHHLNWFKQFLDTTLDHKFIIDIHDPLFETLLPHFADKAHLIENEAGYKIPDLNRVKDEPSHILEMYDGYIIVDFVPTSENISTWLLEIIAKKMSRLGVEVSHVEFLETPKSRSIVYNKQ

SEQ ID NO: 26207 - protein, 193 aa, Sulfurospirillum sp.
  REGION 1..193: note = tr|A0A432STG9|A0A432STG9_9PROT 6-carboxytetrahydropterin synthase QueD; OS = Sulfurospirillum sp. OX=2053622 GN=DSZ05_00780 PE=4 SV=1
MIIRKLFKFENAHVVRGCTSERCKYSIHGHSYKIEVLFESNYLDQGQMVYDFGLTKTTIKELIDSFDHATALWNRDDPEYIAAIKKFSKRWVSLPVSPSAEQFSRVLFLMIDRLLSQTQMQNGEKEVKLHSVIVHETDTGYAQGFREDAYSKLMGEIDLNEIVFSDQVKAEWHDPQMWDKLLTGKIFVNPKPL

SEQ ID NO: 26208 - protein, 181 aa, Sulfurospirillum sp.
  REGION 1..181: note = tr|A0A2D3W1U1|A0A2D3W1U1_9PROT 6-pyruvoyl tetrahydrobiopterin synthase OS=Sulfurospirillum sp. UBA12182 OX=2015905 GN=CFH82_00540 PE=4 SV=1
MKWEIAKQFDFCYGHRVWSQTLNVEYSMDSCLACRHLHGHQGSLIVYLSSDKLERGMVTDFHHLNWFKIFLDKTLDHKFIIDINDPLFETLLPDFADKKNLIECNGGFKRPDTSILQGKNEALYELYEGYIIVDFVPTSENISTWLLGIVQEKMSKIGVHVSHIEFFETPKSRSVVYNEQN

SEQ ID NO: 26209 - protein, 193 aa, unidentified
  source 1..193: note = Sulfurovum riftiae
  REGION 1..193: note = tr|A0A151CH00|A0A151CH00_9PROT 6-carboxy-5,6,7,8-tetrahydropterin synthase OS=Sulfurovum riftiae OX=1630136 GN=AS592_08250 PE=4 SV=1
MLIRKLFKFENAHIVRDCSTRRCSENIHGHSYKVEVLLKSNYLDDGQMVYDFGLTKLYIKELIDAFDHGITLWSSDDASYLEAMKKHSSRWVELPVSPSAEQFSRVIYLMVERVLACTKMRNGEKEVQLHSIIVHETETGYAQGFKEDAHSELMGKIALEEIIFSEQVKSEWSDPQLWEKLLQKETLLNPERV

SEQ ID NO: 26210 - protein, 193 aa, Sulfurovum sp.
  REGION 1..193: note = tr|A0A0C2V4S6|A0A0C2V4S6_9PROT 6-carboxy-5,6,7,8-tetrahydropterin synthase OS=Sulfurovum sp. PC08-66 OX=1539063 GN=KU28_02315 PE=4 SV=1
MIIRKLFKFENAHIVRHCTTQRCSQNLHGHSYKVEVLLESSYLDEAQMVYDFGLMKLRIKELIDAFDHSITLWNKDDKAYLEAMQKHSKRWVVLPISPSAEQFSRVIFLMVEKIIDTTLMVNGERGVEVHSIIVHETDTGYAQSFAQDAHSERMGTIDVAQIEFSPQIQSEWSSPTLWHDILEGKPIQNPKEI

SEQ ID NO: 26211 - protein, 193 aa, Sulfurovum sp.
  REGION 1..193: note = tr|A0A0C2ZLQ0|A0A0C2ZLQ0_9PROT 6-carboxy-5,6,7,8-tetrahydropterin synthase OS=Sulfurovum sp. FS06-10 OX=1539064 GN=KU29_06620 PE=4 SV=1
MIIRKLFKFENAHIVRGCSTQKCSQNIHGHSYKIEVLLESNYLDHGQMVYDFGLTKRYIKELIDAFDHSITLWSGDNLSYVEDMKKHSARWVELPVSPSAEQFSRIIYLMVERVLECTGMVNGEREVTLHSIIVHETETGYAQGFKEDAYNKLMGTISLTDIIFSKQIQIEWSNSNLWNELLAKKLMVNPKKV

SEQ ID NO: 26212 - protein, 149 aa, unidentified
  source 1..149: note = Sunxiuqinia dokdonensis
  REGION 1..149: note = tr|A0A0L8VEW1|A0A0L8VEW1_9BACT 6-carboxy-5,6,7,8-tetrahydropterin synthase OS=Sunxiuqinia dokdonensis OX=1409788 GN=NC99_01820 PE=3 SV=1
MTKIRVTKQFGFEMSHALTNYDGLCSNIHGHSYKLQITLIGEPLLKKGDPKDGMVIDFSELKKLVKKEIVQAFDHSLVINNLSAHNKLLDLGQLYERHHLVNFQPTTENMVIFIADKLKTLLPEHLELFCVRLYETSSSYAEWFASDNN

SEQ ID NO: 26213 - protein, 149 aa, Sunxiuqinia elliptica
  REGION 1..149: note = tr|A0A4R6H061|A0A4R6H061_9BACT 6-carboxy-5,6,7,8-tetrahydropterin synthase OS=Sunxiuqinia elliptica OX=655355 GN=DET52_105211 PE=3 SV=1
MTKIRVTKQFGFEMSHALTNYDGLCSNIHGHSYKLQITLLGEPLESAGNPKDGMVMDFSVLKKLVKKHIVEPFDHSLMINDIAAHEKLTELGDLYRRQHLVNFQPTTENMVIFIADKLKKLLPEHLELFSVRLYETNNSFAEWFASDNP

SEQ ID NO: 26214 - protein, 149 aa, Sunxiuqinia elliptica
  REGION 1..149: note = tr|A0A1I2B0E9|A0A1I2B0E9_9BACT 6-carboxy-5,6,7,8-tetrahydropterin synthase OS=Sunxiuqinia elliptica OX=655355 GN=SAMN05216283_101276 PE=3 SV=1
MTKIRVTKQFGFEMSHALTNYDGLCSNIHGHSYKLQITLLGEPLESAGDPKDGMVMDFSVLKKLVKKYIVEPFDHSLMINDIAAHEKLTELGELYRRQHLVNFQPTTENMVIFIADKLKKLLPEHLELFSVRLYETNNSFAEWFASDNP

SEQ ID NO: 26215 - protein, 120 aa, unidentified
  source 1..120: note = Superficieibacter electus
  REGION 1..120: note = tr|A0A2P5GTH5|A0A2P5GTH5_9ENTR 6-carboxy-5,6,7,8-tetrahydropterin synthase; OS = Superficieibacter electus OX=2022662 GN=queD PE=3 SV=1
MSTTLFKDFTFEAAHHLPHVPEGHKCGRLHGHSFMVRLEITGEVDPHTGWIMDFAELKAAFKPTYDRLDHYYLNDIPGLENPTSEVLSRWIWEQVKPVVPLLSAVMIKETCTAGCVYRGE

SEQ ID NO: 26216 - protein, 148 aa, unidentified
  source 1..148: note = Sutterella megalosphaeroides
  REGION 1..148: note = tr|A0A2Z6IA84|A0A2Z6IA84_9BURK 6-pyruvoyl tetrahydrobiopterin synthase OS=Sutterella megalosphaeroides OX=2494234 GN=SUTMEG_11650 PE=4 SV=1
MITATRYHDISCGHRVCGHESKCAHLHGHNYRVTFECAGETESLDELGRVLDFSVIKEKLCMWLENEWDHHFLVWKEDPLAPHLKALDPTVVELDFNPTAENIAHHLATVVAPKCLDGTGVRVIRCTVEETRKCSAEWRLFNGFAPLR

SEQ ID NO: 26217 - protein, 141 aa, Sutterella parvirubra
  REGION 1..141: note = tr|H3KD58|H3KD58_9BURK 6-pyruvoyl tetrahydropterin synthase/QueD family protein OS=Sutterella parvirubra YIT 11816 OX=762967 GN=HMPREF9440_00664 PE=4 SV=1
MITASRYHDISCGHRVCGHETKCRHLHGHNYRITFECAGDLDHVGRVIDFSVIKEKLCMWLENEWDHHFLLWEEDPMASALTEIDPTVVLLPFNPTAENMATYLAETLAPKQLEGTGVRVVRCTVEETRKCQAEWKLFPVG

SEQ ID NO: 26218 - protein, 137 aa, Sutterella sp.
  REGION 1..137: note = tr|R7IJ14|R7IJ14_9BURK 6-pyruvoyl tetrahydropterin synthase/QueD family protein OS=Sutterella sp. CAG:351; OX = 1262975 GN=BN620_01745 PE=4 SV=1
MFTVTRYHDISCGHRVCGHESKCSHLHGHNYRITFCCAGELDSLGRVIDFSVIKEKLCVWLEEHFDHRFLIWTEDPLADALLSLDPKVVQVPFNPTAENIAEYLVTVVGPEQLRGTGVKLIRCDVEETRKCTATYTL

SEQ ID NO: 26219 - protein, 137 aa, Sutterella sp.; identical to SEQ ID NO: 22461
  REGION 1..137: note = tr|A0A414VVD0|A0A414VVD0_9BURK 6-carboxytetrahydropterin synthase OS=Sutterella sp. AM18-8-1 OX=2292076 GN=DW229_02845 PE=4 SV=1

SEQ ID NO: 26220 - protein, 187 aa, unidentified; identical to SEQ ID NO: 24276
  source 1..187: note = Sutterellaceae bacterium
  REGION 1..187: note = tr|A0A3D3SEN2|A0A3D3SEN2_9BURK Rubredoxin; OS = Sutterellaceae bacterium OX=2026794 GN=DIT20_04210 PE=4; SV = 1

SEQ ID NO: 26221 - protein, 116 aa, unidentified
  source 1..116: note = Sutterellaceae bacterium
  REGION 1..116: note = tr|A0A2E2R6R0|A0A2E2R6R0_9BURK 6-carboxy-5,6,7,8-tetrahydropterin synthase; OS = Sutterellaceae bacterium OX=2026794 GN=CMN90_13675 PE=3; SV = 1
MKVFKQFTFDVAHQLPDWPGLHGHSYTAEVWFEGPATDGYVVPESLLTQHVGAVHKRLDHSYLNEFIELPTSENIARWIWDQLRPVGPLIKVKVFRGSIGFGVEFDLEDAKAEGRA

SEQ ID NO: 26222 - protein, 184 aa, Swaminathania salitolerans
  REGION 1..184: note = tr|A0A511BRQ2|A0A511BRQ2_9PROT Uncharacterized protein OS=Swaminathania salitolerans OX=182838; GN = SSA02_16760 PE=4 SV=1
MLELSFTRRFSMGHRLISGSSERCAIPHGHNEFVTVTLQATRPSRLDGAGNVIVPFADAKRRWHDFVDTRLDHAFQISSQDPLLDWFRTREPERMTRLVITPGDPTTELMAALLYAKLAAFLRDDGDILRCTCLSLEETPTNTVTLSGGPEPYLPVTTEAATGADRSVWWHRADMTISDLGTEL

SEQ ID NO: 26223 - protein, 182 aa, unidentified
  source 1..182: note = Swingsia samuiensis
  REGION 1..182: note = tr|A0A4Y6UG68|A0A4Y6UG68_9PROT 6-carboxytetrahydropterin synthase OS=Swingsia samuiensis; OX = 1293412 GN=E3D00_02465 PE=4 SV=1
MTVELVFTRRFSMGHRLIAGTSEKCAIPHGHNEYVKVTLRPQEPKRLDGHQNMVLPFADAKTRWHNFIDNSLDHALQLSEADPLLAWFQEHEPERTSRIVVTPGDPTTEIMAALLFAKLSAILAAQGGLLRVYEIELQETPTNTVKLGGDPTHYLPYTNRPPHLCWWNRPDMSISDLPVLRS

SEQ ID NO: 26224 - protein, 213 aa, unidentified
  source 1..213: note = Swingsia sp.
  REGION 1..213: note = tr|A0A4Y6UAH5|A0A4Y6UAH5_9PROT 6-carboxytetrahydropterin synthase OS=Swingsia sp. F3b2; OX = 2558361 GN=E3E12_03260 PE=4 SV=1
MNAAPGAPSFGTTALNQGRSAPAAPQAELLFTRRFSMGHRLIAGTSDRCAIPHGHNEHVTVSLAAGLGHPSWDGAGGSGRLDGHANMLLPFAEAKGRWHRFIDERMDHSFQIGRDDPLLDWFRTHEPSRLGRLVVTPGDPTTELLAALLMAKMNAFLHAQGDVLRLTALEIRETPTNAVRLVGGDPSAYLPVCPAVEGEGPLPWWHRADDSTA

SEQ ID NO: 26225 - protein, 93 aa, unidentified
  source 1..93: note = Synechococcales bacterium
  REGION 1..93: note = tr|A0A3D5HZR0|A0A3D5HZR0_9CYAN 6-pyruvoyl tetrahydropterin synthase (Fragment) OS=Synechococcales bacterium UBA12195 OX=2055798 GN=DGR08_02900 PE=4 SV=1
MYTCSKSFEGFPCCHRQPNHEGHCRFVHGYSRSFTCWFGASELDENGFVVDFSSLKELRKQLNDQFDHTFLANSDDPLLSEWERLHELGALDL

SEQ ID NO: 26226 - protein, 291 aa, unidentified
  source 1..291: note = Synechococcales bacterium
  REGION 1..291: note = tr|A0A358BZ66|A0A358BZ66_9CYAN 6-pyruvoyl tetrahydropterin synthase OS=Synechococcales bacterium UBA8138 OX=2055796 GN=DEB19_06205 PE=4 SV=1
MADLAPHGQGRACVITRRACFSASHHYWLPELDGAENKRRFGPCSQAPGHGHNYELIVFMEGVLDADGMVLNLSEVKHAIRAEVTDPLDFHCLNNTWPEFAVEQRAEAALPTTEWLLHAIWQRLQPLLPLKALRLYEQPTLWADYLGNAMEAFLTIRTHFSAAHRLARPELSQQENEQIYGKCARPHGHGHNYFLEVTVRGQIDARTGMVCDLAALQQLVQDLVVEPFDHTFLNKDVPFFVDCVPTAENIALHISDRLNQPIAAIGAALHRIHLQESPNNAAVIYAEAALV

SEQ ID NO: 26227 - protein, 300 aa, Synechococcus elongatus
  REGION 1..300: note = tr|Q8KPQ0|Q8KPQ0_SYNE7 6-pyruvoyl-tetrahydropterin synthase-like protein OS=Synechococcus elongatus (strain PCC 7942) OX=1140 GN=SEF0045 PE=4 SV=1
MRDSQSRDRDRHAMECIINRRALFSASHRYWLPELSDAENQKLFGACARFPGHGHNYVLYVSMLGELDEYGMVLNLSDVKRVIKSEVTSQLDYAYLNDVWPEFQQGLPTTENLARVIWQRLAPHLPIVRIQLFESPSLWADYLGQAMEAYLTIQTHFSAAHRLAKESLSFEENCEIYGKCARPHGHGHNYHLEVTVAGEIDPRTGMLADLAALQQVVQDKVVEPFDHSFLNKDIPYFAEVVPTAENIAVHIRDLLAEPIRELGARLYKVKLIESPNNSAEVYCLQPSGLTNAAAAVPVLL

SEQ ID NO: 26228 - protein, 288 aa, Synechococcus elongatus
  REGION 1..288: note = tr|A0A3G6X1L0|A0A3G6X1L0_SYNEL 6-pyruvoyl tetrahydropterin synthase OS=Synechococcus elongatus PCC 11801 OX=2219813 GN=DOP62_10350 PE=4 SV=1
MECIINRRALFSASHRYWLPELSEAENQKLFGACARFPGHGHNYVLYVSMRGELDEYGMVLNLSDVKRVIKDEVTSQLDYAYLNDVWPEFQASLPTTENLARVIWQRLAPHLPIVRIQLFESPSLWADYLGQAMEAYLTIQTHFSAAHRLAKESLSFEENCEIYGKCARPHGHGHNYHLEVTVAGEIDPRTGMLADLAALQRVVQDTVVEPFDHSFLNKDIPYFAEVVPTAENIAVHIRDLLAGPIRELGARLYKVKLIESPNNSAEVYCPQPSRLSSDVEAAVPVLL

SEQ ID NO: 26229 - protein, 308 aa, unidentified
  source 1..308: note = Synechococcus lacustris
  REGION 1..308: note = tr|A0A2P7EDA3|A0A2P7EDA3_9SYNE 6-pyruvoyl tetrahydropterin synthase OS=Synechococcus lacustris; OX = 2116544 GN=C7K08_09180 PE=4 SV=1
  VARIANT 18: note = Xaa can be any naturally occurring amino acid
  VARIANT 235: note = Xaa can be any naturally occurring amino acid
  VARIANT 258: note = Xaa can be any naturally occurring amino acid
  VARIANT 288: note = Xaa can be any naturally occurring amino acid
MGFRALTVAAQVNGHAAXADLAPHGQGRACVITRRACFSASHHYWLPELDGAENKRRFGPCSQAPGHGHNYELIVFMEGVLDADGMVLNLSEVKHAIRAEVTDPLDFHCLNNTWPEFAVEQRAEAALPTTEWLLHAIWQRLQPLLPLKALRLYEQPTLWADYLGNAMEAFLTIRTHFSAAHRLARPELSQQENEQIYGKCARPHGHGHNYFLEVTVRGQIDARTGMVCDLAALQXLVQDLVVEPFDHTFLNKDVPFFXDCVPTAENIALHISDRLNQPIAAIGAALHXIHLQESPNNAAVIYAEAALV

SEQ ID NO: 26230 - protein, 151 aa, unidentified
  source 1..151: note = Synechococcus lacustris
  REGION 1..151: note = tr|A0A2P7EDZ1|A0A2P7EDZ1_9SYNE 6-pyruvoyl tetrahydropterin synthase OS=Synechococcus lacustris; OX = 2116544 GN=C7K08_07895 PE=4 SV=1
MYTCSKQFEGFPCCHRQPNHPGHCHFVHGYSRSFTCWFGSKELNQHGFVVDFSSLKALRQVLDQQFDHTFLANADDPLLPEWQRLHELGALDLRVMANVGMEGSAHWVWEQTNALLYARDAGRSWCWQVEARENSKNAAYWQLPPPWANQQ

SEQ ID NO: 26231 - protein, 290 aa, Synechococcus lividus
  REGION 1..290: note = tr|A0A2D2Q116|A0A2D2Q116_SYNLI 6-pyruvoyl tetrahydropterin synthase OS=Synechococcus lividus PCC 6715 OX=1917166 GN=BRW62_04765 PE=4 SV=1
MVCIINRRAEFAASHRYWLPEWSEAQNLSYFGACSRFPGHGHNYELVVSMQGDVDAFGMVLNLSEVKQVIRQQVIEPLNFSYLNEVWPEFQTTLPTTEHLARTIWDRLAPHLPLVRIRLFEHPRLWADYTGDPMDAYLSVGTHFSAAHRLALEELSYEENCRIYGKCARPHGHGHNYHVEITVKGEIHPRTGMIVDLVKLEAVLKEWVIEPLDHTFLNKDIPYFATVVPTAENIAIYIADVLRQPIRDLGATLHKVKLIESPNNSCEILCEESAQGTSPRETVLPVLERV

SEQ ID NO: 26232 - protein, 301 aa, Synechococcus sp.
  REGION 1..301: note = tr|A0A1Z9JE49|A0A1Z9JE49_9SYNE 6-pyruvoyl tetrahydropterin synthase OS=Synechococcus sp. TMED169; OX = 1986593 GN=CBD29_02205 PE=4 SV=1
  VARIANT 19: note = Xaa can be any naturally occurring amino acid
  VARIANT 28: note = Xaa can be any naturally occurring amino acid
  VARIANT 32: note = Xaa can be any naturally occurring amino acid
  VARIANT 64: note = Xaa can be any naturally occurring amino acid
  VARIANT 82: note = Xaa can be any naturally occurring amino acid
  VARIANT 116: note = Xaa can be any naturally occurring amino acid
  VARIANT 182: note = Xaa can be any naturally occurring amino acid
  VARIANT 184: note = Xaa can be any naturally occurring amino acid
  VARIANT 186: note = Xaa can be any naturally occurring amino acid
  VARIANT 188: note = Xaa can be any naturally occurring amino acid
  VARIANT 201: note = Xaa can be any naturally occurring amino acid
  VARIANT 203: note = Xaa can be any naturally occurring amino acid
  VARIANT 223: note = Xaa can be any naturally occurring amino acid
MTVVVAQVIGHAATAPHGXGRSCVITRXATFXSSHLYCLPELSSAENQLRFGACSQAPGHGHNXELIVSMEGGLDANGMVLXLSDVKHAIRSQVTEQLDFRCLNTAWPEFDVEGSXQAALPTTEWLLHAIWQRLATHLPLRSLRLYEQSTLWADYLGNSMEAFLTIRGHFAAAHRLAREELXAXEXEXIYGKCARPHGHGXNXLLDVTVRGQIDPRSGMLCDXAALQKLLDEEVLEPFDHTFLNKDVPFFATCVPTAENIALHIADRLKAPIADLGASLHKIRLQESPNNAAEIYAEPAQV

SEQ ID NO: 26233 - protein, 161 aa, Synechococcus sp.
  REGION 1..161: note = tr|A0A1J0PCT8|A0A1J0PCT8_9SYNE 6-pyruvoyl tetrahydropterin synthase OS=Synechococcus sp. SynAce01; OX = 1916956 GN=BM449_13275 PE=4 SV=1
MTAAPAAAYSCSKQFSGYPCCHRQWRHSGHCRFVHGYSRSFTFWFRAHQRDANGFVVDFSGLQALEAQLAKQFDHTFLVNADDPLLEQWRELEAQGGLDLRVMANVGMEASAELVWGWANALLQNQESGRACCWKAEARENEKNAACFEAIPAWFQLRADS

SEQ ID NO: 26234 - protein, 129 aa, Synechocystis sp.
  REGION 1..129: note = sp|Q55798|QUED_SYNY3 6-carboxy-5,6,7,8-tetrahydropterin synthase; OS = Synechocystis sp. (strain PCC 6803 / Kazusa) OX=1111708; GN = queD PE=3 SV=1
MWIIYKEFSFEAAHQLPHHEGKCRRLHGHSFRGRVYVASDRLKTTGSETGMVMDFSVLKAHLDPLVKNHLDHYYLNDSLGLESPTSEAIAAWIFAKLEEAGVPGLHSVEVLETCTSAARYFSPRLSPLL

SEQ ID NO: 26235 - protein, 129 aa, Synechocystis sp.
  REGION 1..129: note = tr|A0A068MYR2|A0A068MYR2_SYNY4 6-carboxy-5,6,7,8-tetrahydropterin synthase; OS = Synechocystis sp. (strain PCC 6714) OX=1147; GN = D082_26000 PE=3 SV=1
MWIIYKEFSFEAAHQLPHHEGKCRRLHGHSFRGRVYVASDHLKTSGSETGMVMDFSVLKAHLDPLIKNYLDHYYLNDSLGLESPTSEAIAAWIFAKLAEAGVPGLHSVEVLETCTSAARYFSPRLSSLL

SEQ ID NO: 26236 - protein, 121 aa, unidentified
  source 1..121: note = Synergistaceae bacterium
  REGION 1..121: note = tr|A0A3D4HN00|A0A3D4HN00_9BACT 6-carboxy-5,6,7,8-tetrahydropterin synthase; OS = Synergistaceae bacterium OX=2053624 GN=queD PE=3 SV=1
MFLKKDFSFDAAHRLEEYHGKCEALHGHTYRFQVTLKGTPDGESMVMDFVQLKGLVNELVVSRLDHSLLNDTIPQPTAENIALWIWRQIESAVRKENCALYSVQVWETSTSSVLIHREDLG

SEQ ID NO: 26237 - protein, 120 aa, unidentified
  source 1..120: note = Synergistaceae bacterium
  REGION 1..120: note = tr|A0A3C0QFT9|A0A3C0QFT9_9BACT 6-carboxy-5,6,7,8-tetrahydropterin synthase; OS = Synergistaceae bacterium OX=2053624 GN=queD PE=3 SV=1
MFLCREFKFDAAHNLVNYHGKCENLHGHTYRLAVVLKGQPDDEGMVFDFVELKKHVTELVLTKLDHAYINDILPQPTAEYIAMWIFKTLDKPLKRDNCELYEVRVWETENSSVICRREDV

SEQ ID NO: 26238 - protein, 121 aa, unidentified
  source 1..121: note = Synergistales bacterium
  REGION 1..121: note = tr|A0A101I4M0|A0A101I4M0_9BACT 6-carboxy-5,6,7,8-tetrahydropterin synthase; OS = Synergistales bacterium 58_81 OX=1635274 GN=XE01_0405; PE = 3 SV=1
MFLKKDFSFDAAHRLEEYHGKCEALHGHTYRFRVTLKGTPDGESMVMDFVQLKGLVNELVVSRLDHSLLNDTIPQPTAENIALWIWRQIESAVRKENCALYSVQVWETSTSSVLIHREDLG

SEQ ID NO: 26239 - protein, 126 aa, unidentified
  source 1..126: note = Synergistales bacterium
  REGION 1..126: note = tr|A0A101IWJ9|A0A101IWJ9_9BACT 6-carboxy-5,6,7,8-tetrahydropterin synthase; OS = Synergistales bacterium 54_9 OX=1641385 GN=XE12_0699; PE = 3 SV=1
MLLYKEFTFDAAHRLEQYHGKCETLHGHTYRLRVTVKGKPDEEGMVMDFLELKKLVNENILSQLDHAYLNDVIPQPTAERIALWIWKELDKRLLRPNCSLYAVQVWETATSSVIIQREDLDLLSNI

SEQ ID NO: 26240 - protein, 123 aa, Synergistes jonesii
  REGION 1..123: note = tr|A0A073ISZ4|A0A073ISZ4_9BACT 6-carboxy-5,6,7,8-tetrahydropterin synthase OS=Synergistes jonesii OX=2754 GN=EH55_02695 PE=3 SV=1
MLLCRDFKFDAAHNLIHYHGKCERLHGHTYHLRVTLEGAPDAEGMICDFAELKKIVGELVLSKLDHSYINDILPQPTAEYISMWIFRALDGALVRENCRLSEVCLWETEGSFVVCRREDVKDA

SEQ ID NO: 26241 - protein, 188 aa, Synergistes sp.
  REGION 1..188: note = tr|G9PYQ4|G9PYQ4_9BACT Uncharacterized protein; OS = Synergistes sp. 3_1_syn1 OX=457415 GN=HMPREF1006_00766; PE = 4 SV=1
MKSITKLDLQYAHRFYGFKGEAQYLHGHTGILTIEVEDSVNPGVNMVFPCNEIQKTAWDVLKNFDHALILREDDPLLPAVLDVYEKQGIRNGAPSNTMKGPAFKTELATAYPECRLVVTKETMTVEGMIKIVYDLLKDKLNIVKLTFTSGVNAASEEYVPKRSMDRCPLCGIAMDENGVCPKCGYRKA

SEQ ID NO: 26242 - protein, 123 aa, Synergistes sp.
  REGION 1..123: note = tr|G9PZK1|G9PZK1_9BACT 6-carboxy-5,6,7,8-tetrahydropterin synthase OS=Synergistes sp. 3_1_syn1 OX=457415 GN=HMPREF1006_01063 PE=3 SV=1
MLLCRDFKFDAAHNLIHYHGKCERLHGHTYHLRVTLEGAPDAEGMIFDFVDLKKTVNELVLSKLDHAYINDILPQPTAEYIAIWIFRELDGPLARGNCRLSEIRLWETESSSVICRREDVKDA

SEQ ID NO: 26243 - protein, 121 aa, unidentified
  source 1..121: note = Synergistetes bacterium
  REGION 1..121: note = tr|A0A1V6A2A2|A0A1V6A2A2_9BACT 6-carboxy-5,6,7,8-tetrahydropterin synthase; OS = Synergistetes bacterium ADurb.Bin155 OX=1852914 GN=queD; PE = 3 SV=1
MYLKKDFSFDAAHRLEHYHGKCESLHGHTYRFQVTLKGEPDHESMVMDFVRLKELVERLVVDRLDHSLLNDTIPQPTAENIALWIWRQIEEGVRGDNCGLYSVQVWETATSSILIHGEDLR

SEQ ID NO: 26244 - protein, 120 aa, unidentified
  source 1..120: note = Synergistetes bacterium
  REGION 1..120: note = tr|A0A2N1QTL3|A0A2N1QTL3_9BACT 6-carboxy-5,6,7,8-tetrahydropterin synthase; OS = Synergistetes bacterium HGW-Synergistetes-1 OX=2013842; GN = queD PE=3 SV=1
MFLCREFKFDAAHNLVNYHGKCENLHGHTYRLAVMLKGQPDDEGMVFDFVELKKHVTELVLSKLDHAYINDILPQPTAEYIAMWIFKILDKPLKRDNCELYEVKVWETESSSVICRREDV

SEQ ID NO: 26245 - protein, 124 aa, unidentified
  source 1..124: note = Syntrophaceae bacterium
  REGION 1..124: note = tr|A0A355H0V9|A0A355H0V9_9DELT 6-carboxy-5,6,7,8-tetrahydropterin synthase; OS = Syntrophaceae bacterium OX=2052184 GN=queD PE=3 SV=1
MYEVTIIKSFSAAHLLTEIGGKCEELHGHNFKVEVTVGADTLTEEGILIDFRLVKKWLKEILDEMDHQHLNDLPFFAGKNPSSENIAYHVYSAMQARAKTSGVAVIRVKVWESESAAVSYSDER

SEQ ID NO: 26246 - protein, 122 aa, unidentified
  source 1..122: note = Syntrophaceae bacterium
  REGION 1..122: note = tr|A0A1J5I4N9|A0A1J5I4N9_9DELT 6-carboxy-5,6,7,8-tetrahydropterin synthase; OS = Syntrophaceae bacterium CG2_30_58_14 OX=1805378; GN = AUK26_06540 PE=3 SV=1
MYEVTIRKSFAAAHLLREIGGKCEGLHGHNFIVEISAAAAELNEEGLLIDFRLLKRWTDEVLEELDHKYLNELPFFKDMNPSSEQIARFLYERIGEKAKPAKTPLSRVTVWETENARVSYSL

SEQ ID NO: 26247 - protein, 126 aa, Syntrophobacter fumaroxidans
  REGION 1..126: note = tr|A0LJR7|A0LJR7_SYNFM 6-carboxy-5,6,7,8-tetrahydropterin synthase; OS = Syntrophobacter fumaroxidans (strain DSM 10017 / MPOB); OX = 335543 GN=Sfum_1986 PE=3 SV=1
MPGVYEVFFRSGFSAAHLLRDYPGDCARLHGHNWTVEVYVECRELDEIGIGIDFYDIDKALKQIMVEMDHCNLNDLAAFKDRNPTSENLARYVYRELSGKLDAPAIKVVKVKVCETPDAGVTYREE

SEQ ID NO: 26248 - protein, 127 aa, Syntrophobacter fumaroxidans
  REGION 1..127: note = tr|A0LE55|A0LE55_SYNFM 6-carboxy-5,6,7,8-tetrahydropterin synthase; OS = Syntrophobacter fumaroxidans (strain DSM 10017 / MPOB); OX = 335543 GN=Sfum_0003 PE=3 SV=1
MKNTFYEIKIITDFSAAHHLRDFRGKCENLHGHNWKIEIVLRGTELNEIGVLVDFGEVKQATRALLSEVDHHYLNEIPFFADRNPSSENIARYLFERLAEKFDNDKLRLYRVSAWESDDACATFMRE

SEQ ID NO: 26249 - protein, 126 aa, Syntrophobacter sp.
  REGION 1..126: note = tr|A0A2U3K589|A0A2U3K589_9DELT 6-carboxy-5,6,7,8-tetrahydropterin synthase; OS = Syntrophobacter sp. SbD1 OX=2043167 GN=queD PE=3 SV=1
MAEVFEIFVKSRFAAAHSLGGYPGNCARVHGHNWEVEVFVRCSELDELGMGVDFCAIEPVVKEILTGLDHGNLNDLPAFANQNPTAENIARFLYKELARKLDTHAIHISRVKVSETPEAGAFYWEE

SEQ ID NO: 26250 - protein, 127 aa, Syntrophobacter sp.
  REGION 1..127: note = tr|A0A2U3LAX5|A0A2U3LAX5_9DELT 6-carboxy-5,6,7,8-tetrahydropterin synthase; OS = Syntrophobacter sp. SbD1 OX=2043167 GN=SBDP1_780012; PE = 3 SV=1
MDQRLFEIKIISGFAAAHNLKNFRGKCENLHGHNWKIEVVLRGRSLEENGILVDFGEVKAETRAALEELDHKYLNELPFFLQNNPSSENIARFLFERLSEKLNTLKIRIHSVSAWESADACATYMEY

SEQ ID NO: 26251 - protein, 136 aa, unidentified
  source 1..136: note = Syntrophobacteraceae bacterium
  REGION 1..136: note = tr|A0A352PWJ3|A0A352PWJ3_9DELT 6-carboxy-5,6,7,8-tetrahydropterin synthase; OS = Syntrophobacteraceae bacterium OX=2052185 GN=queD PE=3; SV = 1
MKGEHALPRTQYQVKIITDFAAAHNLRNFRGKCENLHGHNWKVEVVLRGDRLDESGVLMDFGELKEATREILTALDHQYLNDLAYFKERNPSSEYIAQYLFERLSERLNRDYCRIFQVSAWESANSCATYFGENLG

SEQ ID NO: 26252 - protein, 125 aa, unidentified
  source 1..125: note = Syntrophobacteraceae bacterium
  REGION 1..125: note = tr|A0A1J5INY3|A0A1J5INY3_9DELT 6-carboxy-5,6,7,8-tetrahydropterin synthase; OS = Syntrophobacteraceae bacterium CG2_30_61_12 OX=1805379; GN = AUK55_08825 PE=3 SV=1
MFEIKIISDFAAAHNLRNFRGRCENLHGHNWKVEVVLRGRGLNQTDMVIDFGEVKQATRDLLARLDHTYLNELPYFQIRNPSSENIALYLYENLSAQFDNEDRWVVRISAWESKDACATYLADRQ

SEQ ID NO: 26253 - protein, 126 aa, unidentified
  source 1..126: note = Syntrophobacterales bacterium
  REGION 1..126: note = tr|A0A1G3UNK9|A0A1G3UNK9_9DELT 6-carboxy-5,6,7,8-tetrahydropterin synthase; OS = Syntrophobacterales bacterium GWC2_56_13 OX=1802287; GN = A2X96_12360 PE=3 SV=1
MPGVFEVYVETHFSAAHALRGYPGDCARLHGHNWIVRVSVRCGELDDTGIAIDFRVIKGHVKDVLQGLDHCNMNETEPFTEVNPSSENIARHLYREISRRINSEAVRVSKVRVSETPGAGASYWEE

SEQ ID NO: 26254 - protein, 123 aa, unidentified
  source 1..123: note = Syntrophobacterales bacterium
  REGION 1..123: note = tr|A0A2M8GBH0|A0A2M8GBH0_9DELT 6-carboxy-5,6,7,8-tetrahydropterin synthase; OS = Syntrophobacterales bacterium CG_4_8_14_3_um_filter_49_14 OX=1974097 GN=queD PE=3 SV=1
MYEVTIRRSFSAAHTLKEIGGKCEELHGHNFVVEVSVTVPDLNREGLAIDFRVLKRWTEEILETLDHKYLNDIPYFNALNPSAENIARFVYERIAQKAHLQKIRVSRVTVWESEDARASYEGK

SEQ ID NO: 26255 - protein, 128 aa, Syntrophobotulus glycolicus
  REGION 1..128: note = tr|F0T105|F0T105_SYNGF 6-carboxy-5,6,7,8-tetrahydropterin synthase; OS = Syntrophobotulus glycolicus (strain DSM 8271 / FlGlyR); OX = 645991 GN=Sgly_3109 PE=3 SV=1
MAKATIVKEFTFDAAHRLEGYQGLCQNLHGHTYKLQVGIYGPVKNEAGAADDGMVWDFVKLKQAIKEKIIDKLDHQYINELVSFRPTSENIALWMMKTLLAANIPVKFIRLYETPTSYVEIHEGDIGE

SEQ ID NO: 26256 - protein, 123 aa, Syntrophomonas sp.
  REGION 1..123: note = tr|A0A3B8HSQ6|A0A3B8HSQ6_9FIRM 6-carboxy-5,6,7,8-tetrahydropterin synthase; OS = Syntrophomonas sp. OX=2053627 GN=queD PE=3 SV=1
MPYHLSVSQSFDAAHFLNGYPGNCANIHGHTWKVEVTIIGSKLDSLGMVVDFREVREKLAKVLEQFDHVLINEIAPFDRINPTSENLAYFIFQQMKKQLEGFQLKLVKVWESENTWVAYEEGE

SEQ ID NO: 26257 - protein, 1166 aa, Syntrophomonas wolfei
  REGION 1..1166: note = tr|Q0AV03|Q0AV03_SYNWW 6-pyruvoyl-tetrahydropterin synthase related domain conserved membrane protein; OS = Syntrophomonas wolfei subsp. wolfei (strain DSM 2245B / Goet tingen) OX=335541 GN=Swol_2160 PE=4 SV=1
MDKMDRERTLAESLKLQIDKLLQKKQEVDLGIENLEQEIARKAMRQESLDRSLEESQRIAAGMEEKAHLSAAKILAEAEAIAAVKREKMSAIEQEIALLQAELKEKATGEPIPQKEDDNNHPSTAQNSPNGIFARQHLNTNSYPEFSQVAASRATGDDNIYSMKLVGFVNARHFVIFGGTTGPVHAHSWQVETEVDVPREIGDTIEFSRVSQAVSAALGPYENTILNQVHPFDLIQPTTENIAMYFFNRVDEYLAKLGLKLYQLSLWETPTRGIQVNNHNLSLDEQIASELKAREENIAYREAAAIADPDFADLDQRDKEAADNKKSLSKPPPIFAGSLRASYSVRQYLLAAVLILFLSLLAYQHILWPSVEQRFPWGSDSWGHLFKAEMLYEQMQQGNYYPQFTEYWYNGVQPFRYWAPLPYYALAALRGLCGDIFTAGNLYIYLCALLGALSWLLLSRRMGLWPAVMAAVVWLLWQDNVRVAFSEGNLPRVLATALLPLLFALFLHIITQRKSYGAIIAVILTVQLVLLSHAMIAAVYCLSLALFAFFLWVFQGCSVKDLARGFLVLAAGVLSSSWWLLPSLSGGITGIDAQAVKQVVQFVPAHISLSPLYRFKNVETFYWGISLVLLLLASLVTWKSKPAWARSLTVCGIILFLITLPLFRAIYITLPLSHLLWPLRFSSFAALAILASGFTLELEEKRQGWLQSSTITACLLVVLLAFLLVDCLFSFRLLAHTGTKPFTVIQSGEFIKRDPGWRVATIDLSRLGSAPSFTFSEMAGLEQVFGWAWQGAVTSRNIMLLNTGLEQQYYPFLFRSCVDMGATDLVVKEDVITDLEAFREAAKRAGYQQRNKFADISVWRSIDQPYLVQKNPRCLVIGKYGGTIALQFPEVEMALSSRIDDCSLEELEQYSMLILSGANWHSKKQAEKLISDYAVSGGQVFIEMAGMPPNVLAKQPEFLGVYGEAVSIRQEIEVRGEDTRVILPPLWQQEGEWKAYVPMGLDKVELEFSYYGNQAPILGYKLLKGKKIWFLGANLSYHAYQSGQSESARLLKKIFDLKTEYAGDTIIPLQDYEASEKGYRMSYRLEQDAEVIVPISLLDGLVVKLDGRRIEAGNYENLLKLHLPAGTHRLEISIEKTAIFSWGKYLSLFTILLVIAALVRKVRSEG

SEQ ID NO: 26258 - protein, 830 aa, Syntrophomonas wolfei
  REGION 1..830: note = tr|A0A354YUF1|A0A354YUF1_9FIRM PTPS_related domain-containing protein (Fragment) OS=Syntrophomonas wolfei OX=863 GN=DDZ44_00085 PE=4 SV=1
MDKTDRERALIESLKLQMDSLLQKKQAVDLGIEGLKQEIARQVMRQESLERSLEESRRIAAGIEEKAHLSAAKILAEAEALVAVKREKLSAIEQEIALLRAELEEKASGEPVPQKDDDNLHSTAQNSPDGISSPQHHNTDSYPNFSRVAASRASGDDNIYSMKLVGFVNARHFVVFGGATGPVHAHSWQVETEVDVPRGIGDTIEFSRVSQAVSAALGPYENTILNQVHPFDLILPTTENIAMYFFNRLDEYLAKLGLKLYQLSLWETPTRGIQVNNHNLALDKQIAAELKARDGNAAYREAAAILDPDFAKLDQREKELANNKKLLSKPPPVSAGSRRGPYSTRQYLLAAVLILFLSLLAYQHILWTPVEQRFPWGSDSWGHLFKAEMLYEQIQQGNYYPQFTEYWYNGVQPFRYWAPLPYYALAGLRGLSGDIFTAGHLYIYLCALLGALSWLLLSRRMGLWPAVMAALVWLLWQDNVRVAFSEGNLPRVLATALLPLLFALFLHIITRRKSYGAIIAVILTVQLTLLCHAMIAAVYCLSLALFVFFLWVFQGCSVKDLARGLMVLAAGVLTSSWWLLPSLSGGITGIDAQAVKQVVQFVPAHISLSPLCRFKNVEIIYWGISLIMLLLSSLATWKSKPAWARSLVVCGIILLLITFPLFRAIYITLPLSHLLWPLRFSSFAALAVLASGFTLELEEKRQRWLQSSTVAACLLVVLLVFLLVDCLFSFRLLAHTGTRPFTIIQSGEFIKQEPGWRVATIDLSQLGSAPSFTFSEMAGLEQVFGWAWQGAVTSRNIMLLNTGLEQQYYPFLFRSCVDLGATDLVVKEDV

SEQ ID NO: 26259 - protein, 119 aa, Syntrophomonas zehnderi
  REGION 1..119: note = tr|A0A0E4GDI6|A0A0E4GDI6_9FIRM 6-carboxy-5,6,7,8-tetrahydropterin synthase; OS = Syntrophomonas zehnderi OL-4 OX=690567 GN=2738 PE=3 SV=1
MRQVSITKIFTFDSAHKLIDYNGPCAQIHGHTYRLEVTVCGPLAPDMIIDFYDIKKIVENIVLSKVDHQFLNDVVPFNPTVENMVVWMADLLEPAFAEPVKLEKIRLWENQSSYAEVTW

SEQ ID NO: 26260 - protein, 124 aa, unidentified
  source 1..124: note = Syntrophorhabdaceae bacterium
  REGION 1..124: note = tr|A0A1V5C2F6|A0A1V5C2F6_9DELT 6-carboxy-5,6,7,8-tetrahydropterin synthase; OS = Syntrophorhabdaceae bacterium PtaU1.Bin034 OX=1811715; GN = queD PE=3 SV=1
MFTLFVRETFAAAHKLDLYEGKCEELHGHNFRVEALFKGDKVGREGMLLDFTVLKAYLREIVSDLDHKYLNDIPFFKERASSSEYLALYIHDRLKDMVKKDGVTVSEVRVWESDNAYAAYGEPR

SEQ ID NO: 26261 - protein, 125 aa, unidentified
  source 1..125: note = Syntrophorhabdaceae bacterium
  REGION 1..125: note = tr|A0A1V5C914|A0A1V5C914_9DELT 6-pyruvoyl tetrahydropterin synthase OS=Syntrophorhabdaceae bacterium PtaU1.Bin034 OX=1811715 GN=A4E57_02690 PE=4 SV=1
MYTVAVERDFIARHFLFGGDWGDENNPHSHHYRIEVQLKGRSLDEHGYLVDIGEIEKVLDQILNHYRDRMLNSMSDFSGLNPSIEQFARIFCEDFANRVSHGILSSIRVKIWENDIAWASYTREL

SEQ ID NO: 26262 - protein, 124 aa, Syntrophorhabdus aromaticivorans
  REGION 1..124: note = tr|A0A351U138|A0A351U138_9DELT 6-carboxy-5,6,7,8-tetrahydropterin synthase; OS = Syntrophorhabdus aromaticivorans OX=328301; GN = DCZ04_04215 PE=3 SV=1
MSVFTLCVKDSFSAAHRLTDYHGKCEALHGHNFQVEAFVKGWQPENGGMVIDFTVLKGRLRQVLDVLDHKFINEISFFRERAGSSEYIAMYVFHELRKLMTETTVSLAEVRVWESDTAWVAYGE

SEQ ID NO: 26263 - protein, 122 aa, Syntrophorhabdus aromaticivorans
  REGION 1..122: note = tr|A0A351U6T9|A0A351U6T9_9DELT 6-carboxy-5,6,7,8-tetrahydropterin synthase; OS = Syntrophorhabdus aromaticivorans OX=328301 GN=queD PE=3; SV = 1
MYEICVETHFSAAHHLRGYQGKCEFPHGHNWIVEVSVQCKALDEVGIGVDFSDVKRATNEILEYLDHRDLNQLPQFSLENPTSENIARYIYRALSERLNDGTLQVSKVKVCETPGSGVSYWE

SEQ ID NO: 26264 - protein, 124 aa, Syntrophorhabdus sp.
  REGION 1..124: note = tr|A0A1V5CRN4|A0A1V5CRN4_9DELT 6-carboxy-5,6,7,8-tetrahydropterin synthase; OS = Syntrophorhabdus sp. PtaU1.Bin002 OX=1811702 GN=queD_1; PE = 3 SV=1
MSVFTLCVKDSFSAAHRLTGYHGKCEELHGHNFQVEVFVKGQQPEDGGMVIDFAVLKRRLRKVLDALDHKFINEIPFFRERASSSEYVAVYVFRELKKLMTETTVFLTEVRIWESDTAWVAYGE

SEQ ID NO: 26265 - protein, 122 aa, Syntrophorhabdus sp.
  REGION 1..122: note = tr|A0A1V4WZZ4|A0A1V4WZZ4_9DELT 6-carboxy-5,6,7,8-tetrahydropterin synthase; OS = Syntrophorhabdus sp. PtaB.Bin184 OX=1811701 GN=queD; PE = 3 SV=1
MFTLCVKDSFAAAHRLVGYKGKCEELHGHNFAVEVFMSGESLGDDGILVDFQTIKANLQKVLDVLDHKYINDIPFFAERVASAEYIAMYIFTEMENLMSGGRVSVSRVTVWESEKACASYER

SEQ ID NO: 26266 - protein, 125 aa, Syntrophothermus lipocalidus
  REGION 1..125: note = tr|D7CMQ3|D7CMQ3_SYNLT 6-carboxy-5,6,7,8-tetrahydropterin synthase; OS = Syntrophothermus lipocalidus (strain DSM 12680 / TGB-C1) OX=643648 GN=Slip_1215 PE=3 SV=1
MYQVTVQVEIAAAHQLRDYEGECARVHGHTWQIEVTVRGNDLDPQGMLIDFRKLKQLVNLVVAGYDHSLLNDVPPFDRVTPTAENLAKKIFEDIEARLEAPGVILEKVTVRESPRAWATFRRDGQ

SEQ ID NO: 26267 - protein, 159 aa, Syntrophus aciditrophicus
  REGION 1..159: note = tr|Q2LVK6|Q2LVK6_SYNAS Queuosine biosynthesis protein OS=Syntrophus aciditrophicus (strain SB) OX=56780; GN = SYN_01559 PE=4 SV=1
MSLRFPMRGLKISADFSGKRTAPSAESKRSLSFMPGVFEISIEEQFSAAHALRNYPGNCEHLHGHNWAVEVTVECEELNEIGIGIDFREVKQSVREALHRLDHVNLNELPQFCDINPSSENIARHLYNELSRKLNTEKIRVSRVRVSETPTSKASYREI

SEQ ID NO: 26268 - protein, 126 aa, Syntrophus gentianae
  REGION 1..126: note = tr|A0A1H7W9W0|A0A1H7W9W0_9DELT 6-carboxy-5,6,7,8-tetrahydropterin synthase OS=Syntrophus gentianae OX=43775 GN=SAMN04489760_10629 PE=3 SV=1
MPGIFEISVEEHFSSAHALRDYPGNCEHLHGHNWAVRVTVECKELNEIGIGIDFREVKESVREALHRLDHINLNELPPFQDINPSSENIARYLYSELSRKLNTETVRVSRVRVSETPTSSATYREI

SEQ ID NO: 26269 - protein, 151 aa, Syntrophus sp.
  REGION 1..151: note = tr|A0A351Z781|A0A351Z781_9DELT 6-pyruvoyl tetrahydropterin synthase OS=Syntrophus sp. (in: Bacteria); OX = 48412 GN=DCZ97_08710 PE=4 SV=1
MPYRICKTIEIESGHMLSKHHDNCKYPHGHSRRVELILESDELDANDMVCDFSVLKVALKRLLDSLDHAMCINTKDPMYKAFKETYGDRVIGFDATDPTTEVIAKTIFDRVKESLDRYGNKKGQPYRLGKGVRLIRARVWETSTSWAEYGR

SEQ ID NO: 26270 - protein, 122 aa, Syntrophus sp.
  REGION 1..122: note = tr|A0A1G3VR67|A0A1G3VR67_9DELT 6-carboxy-5,6,7,8-tetrahydropterin synthase OS=Syntrophus sp. RIFOXYC2_FULL_54_9 OX=1802292 GN=A3J94_06735 PE=3 SV=1
MYEVTIKKSFSAAHLLKEIGGKCEELHGHNFLVEISVAAESLNEEGLLIDFRVVKRWTDEALEALDHKYLNELDYFKNRNPSSEAIARFLHERIGEKARQAKVALSRVTVWESDNSRVTYSL

SEQ ID NO: 26271 - protein, 131 aa, unidentified
  source 1..131: note = Tabrizicola sp.
  REGION 1..131: note = tr|A0A2N4YL61|A0A2N4YL61_9RHOB Uncharacterized protein OS=Tabrizicola sp. TH137 OX=2067452 GN=C0V75_02035; PE = 4 SV=1
MYAVEVRDHIMIAHSLPSPVFGPAQGMHGATFTVDAAFFAADIDDHGLVVDIGLAVEALAAVLQPLRYRNLDEVPEFKGKFTTTEFLCGVIHKGMAARLRAGELKDGGRVTRLRITLHESHMARAWCEGDI

SEQ ID NO: 26272 - protein, 124 aa, unidentified
  source 1..124: note = Tahibacter aquaticus
  REGION 1..124: note = tr|A0A4R6YV27|A0A4R6YV27_9GAMM 6-carboxy-5,6,7,8-tetrahydropterin synthase OS=Tahibacter aquaticus OX=520092 GN=DFR29_10878 PE=3 SV=1
MDLFKIFQIEAAHRLPQVPVGHKCSRLHGHSFRIEVHVSGPVDPQWGWVMDFAEIKQAFAPIFDALDHHYLNEVPGLENPTSENLAAWIWRALKPGLPLLSRIVIHETCTSGCSYSGPSNDGSR

SEQ ID NO: 26273 - protein, 136 aa, unidentified
  source 1..136: note = Taibaiella chishuiensis
  REGION 1..136: note = tr|A0A2P8D4N3|A0A2P8D4N3_9BACT 6-pyruvoyltetrahydropterin/6-carboxytetrahydropterin synthase OS=Taibaiella chishuiensis OX=1434707; GN = B0I18_104279 PE=4 SV=1
MVYLTRVEHFNAAHKLYNPEWSDAENAEVFGKCSNANWHGHNYELHVTVKGDPHPETGFIFNAKTLGVLIKDAVIEKIDHRNLNMDVEFMKGKFTSAENLAIGIWNELKPHIEKEGAILHGIRLYETPKIYVEYFG

SEQ ID NO: 26274 - protein, 117 aa, unidentified
  source 1..117: note = Taibaiella soli
  REGION 1..117: note = tr|A0A2W2B1Q7|A0A2W2B1Q7_9BACT 6-carboxy-5,6,7,8-tetrahydropterin synthase OS=Taibaiella soli OX=1649169 GN=queD PE=3 SV=1
MLIYREITFDSAHFLPNVPEGHKCRHMHGHTYRLKVFIEGPLTKEGWVIDFKDMKEAMMPIIDVVDHKVLNDIPGLENPTCELLAVWLWDQLKPVLPGLKKVELNETPTSGAIYEGV

SEQ ID NO: 26275 - protein, 136 aa, unidentified
  source 1..136: note = Taibaiella soli
  REGION 1..136: note = tr|A0A2W2A9X2|A0A2W2A9X2_9BACT 6-carboxytetrahydropterin synthase OS=Taibaiella soli; OX = 1649169 GN=DN068_14780 PE=4 SV=1
MVYLTRVEHFNAAHRLYNESWSDAQNLEVFGKCSNANWHGHNYELHVTIKGEPHPETGFVFNAKTLGDLIKDIIVERVDHRNLNMDVDFMKGKFTSAENFAIGIWNELQPHVAEKGAQLHCIKLYETPRIYVEYFG

SEQ ID NO: 26276 - protein, 136 aa, unidentified
  source 1..136: note = Taibaiella sp.
  REGION 1..136: note = tr|A0A3N7CD11|A0A3N7CD11_9BACT 6-pyruvoyl tetrahydrobiopterin synthase OS=Taibaiella sp. KBW10; OX = 2153357 GN=DBR32_14325 PE=4 SV=1
MIYLTRVEHFNAAHKLSNPNWTDEQNFEVFNKCSNPNWHGHNYELHVTVKGDPNPETGFVYNAKVLGQIIKDTVIEKIDHKNLNLDVDFMQGKFTSAENLAIGIWDQLKPHIEADGAVLHCVKLLETKNIYVEYYG

SEQ ID NO: 26277 - protein, 178 aa, unidentified
  source 1..178: note = Taibaiella sp.
  REGION 1..178: note = tr|A0A3N6ZM53|A0A3N6ZM53_9BACT 6-carboxytetrahydropterin synthase QueD OS=Taibaiella sp. KBW10 OX=2153357 GN=DBR32_15370 PE=4 SV=1
MSSFIGSIIFCLAIFKSKIFCLIKKISEICGFISKYMLQLTKIFPFETAHAVFGYEGPCRNIHGHSYELHVTVAATEKTEDYIAPPGFLIDFKDIKRIVKAEIVDYFDHKLVLSKGYLAAHPEISAHENLIVWDHEPSAENILIYTRKRLQIILPEGIVIKSMRLYETRTSYAEWIED

SEQ ID NO: 26278 - protein, 286 aa, unidentified
  source 1..286: note = Tamilnaduibacter salinus
  REGION 1..286: note = tr|A0A2U1CVA3|A0A2U1CVA3_9ALTE 6-pyruvoyl tetrahydropterin synthase-like protein OS=Tamilnaduibacter salinus OX=1484056 GN=C8D92_107153 PE=4 SV=1
MLTMNHLFVDNLTVIDFAYLDPRRGLVGESWIADVVLAGDLDDQGMVFDFGDVKPTIKRVIDECVDHRLAVPADHPSANLHINGDRIAVGWRLEDGRGIRHESPREAVAVIPGKQILPSSVSAMLERELRNVLPGNVTDIEVHLREEVIDGPYYHYVHGLKKHKGNCQRIAHGHRSRLQIHRDGHRDHSLEDAWARRWRDIYVGTQEDVVEQFVENETPYTRFAYDANQGEFALTLPSNTVYLIDSDSTVELIAAHLADESKANHPDSEIRVKAYEGVGKGALAIR

SEQ ID NO: 26279 - protein, 283 aa, unidentified
  source 1..283: note = Tamilnaduibacter salinus
  REGION 1..283: note = tr|A0A2A2I863|A0A2A2I863_9ALTE 6-pyruvoyl tetrahydropterin reductase OS=Tamilnaduibacter salinus; OX = 1484056 GN=CF392_00655 PE=4 SV=1
MNHLFVDNLTVIDFAYLDPRRGLVGESWIADVVLAGDLDDQGMVFDFGDVKPTIKRVIDECVDHRLAVPADHPSANLHINGDRIAVGWRLEDGRGIRHESPREAVAVIPGKQILPSSVSAMLERELRNVLPGNVTDIEVHLREEVIDGPYYHYVHGLKKHKGNCQRIAHGHRSRLQIHRDGHRDHSLEDAWARRWRDIYVGTQEDVVEQFVENETPYTRFAYDANQGEFALTLPSNTVYLIDSDSTVELIAAHLADESKANHPDSEIRVKAYEGVGKGALAIR

SEQ ID NO: 26280 - protein, 151 aa, unidentified
  source 1..151: note = Tamlana nanhaiensis
  REGION 1..151: note = tr|A0A0D7W858|A0A0D7W858_9FLAO 6-pyruvoyl tetrahydropterin synthase OS=Tamlana nanhaiensis; OX = 1382798 GN=PK35_04485 PE=4 SV=1
MSNHIRITKQFSFETGHALYGYDGKCKNVHGHSYKLSVTVIGTPISDVNNVKYGMVIDFGDLKKIVKEEIVDVFDHATVFNKNTPHVELAKELKDRGHNVLLVDYQPTSEMMVIDFAKKIKKRLPKHINLHSLKLQETDTSYAEWFAYDNI

SEQ ID NO: 26281 - protein, 136 aa, unidentified
  source 1..136: note = Tamlana nanhaiensis
  REGION 1..136: note = tr|A0A0D7W369|A0A0D7W369_9FLAO 6-carboxy-5,6,7,8-tetrahydropterin synthase OS=Tamlana nanhaiensis OX=1382798 GN=PK35_06405 PE=3 SV=1
MRATVSRKAHFNAAHRLYRKDWSDEKNQAVFGKCNNPNFHGHNYELIVSVTGEINPETGFVVDMKILKDLIFEEIEQSFDHKNLNLEVEAFKNLNPTAENIAVVIYNILKPKLNSELNLKITLYETPRNFVTYSGE

SEQ ID NO: 26282 - protein, 136 aa, unidentified
  source 1..136: note = Tamlana sedimentorum
  REGION 1..136: note = tr|A0A0D7WAZ5|A0A0D7WAZ5_9FLAO 6-carboxy-5,6,7,8-tetrahydropterin synthase OS=Tamlana sedimentorum OX=1435349 GN=PW52_08965 PE=3 SV=1
MKATVSRKAHFNAAHRLYRATWSDDKNKAVFGKCSNPNFHGHNYELIVSVTGEIDKETGFVIDMKVLKDLIYEEIEQTFDHKNLNLEVEVFKTLNPTAENIAVVIYNILKPKLSKHLDLQITLYETPRNFVTYSGK

SEQ ID NO: 26283 - protein, 151 aa, unidentified
  source 1..151: note = Tamlana sedimentorum
  REGION 1..151: note = tr|A0A0D7WBV5|A0A0D7WBV5_9FLAO 6-pyruvoyl tetrahydropterin synthase OS=Tamlana sedimentorum; OX = 1435349 GN=PW52_02845 PE=4 SV=1
MSNHIRITKQFSFETGHALYGYDGKCKNVHGHSYKLSVTVIGTPISDPNNVKFGMVIDFGDLKKIVKEEIVDVFDHATVFNQNTPHVELAKELKDRGHNVLLVDYQPTSEMMVIDFAKKIKKRLPNHINLHSLKLQETDTSYAEWFAYDNI

SEQ ID NO: 26284 - protein, 151 aa, Tamlana sp.
  REGION 1..151: note = tr|A0A5C4SSQ1|A0A5C4SSQ1_9FLAO 6-carboxytetrahydropterin synthase OS=Tamlana sp. CW2-9; OX = 2583814 GN=FGF67_01145 PE=4 SV=1
MGNNIRITKKFAFETGHALYGYDGKCKNVHGHSYKLSVTVIGKPISDNTNVKYGMVIDFGDLKKIVKEEIVSVFDHATVFNKNTPHIELAKELESRGHNVLLVDYQPTSEMMVLDFAKKISHRLPSHISLHSLKLQETDSSFAQWFAYDNI

SEQ ID NO: 26285 - protein, 136 aa, Tamlana sp.
  REGION 1..136: note = tr|A0A2I7SJ18|A0A2I7SJ18_9FLAO 6-carboxy-5,6,7,8-tetrahydropterin synthase OS=Tamlana sp. UJ94 OX=2069432 GN=C1A40_10750 PE=3 SV=1
MKATVSRKAHFNAAHRLHNKNWSLEKNSAVFGKCNNPNYHGHNYELIVSVTGEINKETGFVIDVAILKQLIEVEIEAAFDHKNLNLEVPEFETLNPTVENIAVVIYNKLKPKLQSTLELEITLYETPRNFVRYSGK

SEQ ID NO: 26286 - protein, 149 aa, unidentified
  source 1..149: note = Tangfeifania diversioriginum
  REGION 1..149: note = tr|A0A1M6IFK0|A0A1M6IFK0_9BACT 6-carboxy-5,6,7,8-tetrahydropterin synthase; OS = Tangfeifania diversioriginum OX=1168035; GN = SAMN05444280_11688 PE=3 SV=1
MAKIRVTKRFHFEMAHTLHEYDGLCRNIHGHSYNLEVTLAGEPRNQPGHPKDGMVMDFADLKHLVKSEIVNRFDHSLMVNKLVPEEQTELLRKTSERIILVDFQPTTENIVSYIAEILQEKLPPDVSLFSIRLFETVTAFAEWFAEDNQ

SEQ ID NO: 26287 - protein, 110 aa, Tannerella sp.
  REGION 1..110: note = tr|R7DJ54|R7DJ54_9BACT 6-carboxy-5,6,7,8-tetrahydropterin synthase OS=Tannerella sp. CAG:51 OX=1262979 GN=BN686_00643 PE=3 SV=1
MYIVKKTLEISASHHLNLSYESKCSSLHGHNWIISIFCRAETLNQDGMVTDFSLIKKLIHEKLDHKNLNEILPFNPTAENIARWVCDQTPFCFRVEVQESEGNIAIYEKD

SEQ ID NO: 26288 - protein, 110 aa, Tannerella sp.; identical to SEQ ID NO: 26287
  REGION 1..110: note = tr|A0A396MWE5|A0A396MWE5_9BACT 6-carboxy-5,6,7,8-tetrahydropterin synthase OS=Tannerella sp. AF04-6 OX=2293248 GN=DWV37_12610 PE=3 SV=1

SEQ ID NO: 26289 - protein, 177 aa, Tanticharoenia sakaeratensis
  REGION 1..177: note = tr|A0A0D6MJ34|A0A0D6MJ34_9PROT Uncharacterized protein OS=Tanticharoenia sakaeratensis NBRC 103193; OX = 1231623 GN=Tasa_010_048 PE=4 SV=1
MLDLVFTRRFSMGHRLIAGASERCALPHGHNELVTVTLRSTAPAGLDGDRNMTVPFAEAKAHWHRFVDERLDHALQLSETDPLLSWFRTHEPERAARIVVTPGDPTTELMAALLMAKLDAFLLQDGDRLRCIGIEIQETPTNTVRLTGPARDWLPTPRPEGACWWHRPDFSIADPAA

SEQ ID NO: 26290 - protein, 121 aa, unidentified
  source 1..121: note = Tardiphaga robiniae
  REGION 1..121: note = tr|A0A165RT25|A0A165RT25_9BRAD 6-carboxy-5,6,7,8-tetrahydropterin synthase OS=Tardiphaga robiniae OX=943830 GN=A4A58_06630 PE=3 SV=1
MWELTKSFRFEAAHALSHTTLGEVSQEIHGHSFRAEITIRGVPDPVTGMVMDLGLLDRSLDELRKTLDHKFLNKIEAIGIPTLENLSRFIWDRVADKAPVVRVGVFRDSCNESCVYFGPKG

SEQ ID NO: 26291 - protein, 119 aa, unidentified
  source 1..119: note = Tardiphaga sp.
  REGION 1..119: note = tr|A0A420AUB0|A0A420AUB0_9BRAD 6-carboxy-5,6,7,8-tetrahydropterin synthase OS=Tardiphaga sp. YR296 OX=2135488 GN=C7504_2346 PE=3 SV=1
MWELTKSFRFEAAHALSHTTLGEVSQEIHGHSFRAEVTIRGVPDPVTGMVMDLGLLDRSLDELRKTLDHKFLNKIEAIGIPTLENLSRFIWDRVADKAPVVRVGVFRDSCNESCVYFGP

SEQ ID NO: 26292 - protein, 121 aa, unidentified
  source 1..121: note = Tardiphaga sp.
  REGION 1..121: note = tr|A0A5A7WDT7|A0A5A7WDT7_9BRAD 6-carboxy-5,6,7,8-tetrahydropterin synthase OS=Tardiphaga sp. P9-11 OX=2024614 GN=CIW50_05665 PE=3 SV=1
MWELTKSFRFEAAHALSHTTLGEVSQEIHGHSFRAEVTIRGVPDPVTGMVMDLGLLDRSLDELRKTLDHKFLNKIEAIGIPTLENLSRFIWDRVADKAPVVRVGVFRDSCNESCVYFGPAS

SEQ ID NO: 26293 - protein, 164 aa, Tatlockia micdadei
  REGION 1..164: note = tr|A0A1V1FC60|A0A1V1FC60_TATMI 6-pyruvoyl tetrahydrobiopterin synthase OS=Tatlockia micdadei OX=451; GN = B6N58_00695 PE=4 SV=1
MKKYLTTVELQKESMKFSAGHTTIFSATEREPLHGHMYAVYLALTTWVEENGMTFDYRYYKERIHNLCRSLNQTFLMPQFSPFLEFAEDGEYYYFTFNHKKIPFLKEDVTLMPLTNITVEELSRWFVNELIKNKTELDRHRIEKVVVKVFSAPGQSASHEWQRS

SEQ ID NO: 26294 - protein, 165 aa, Tatlockia micdadei
  REGION 1..165: note = tr|A0A098GDK0|A0A098GDK0_TATMI 6-pyruvoyl tetrahydrobiopterin synthase OS=Tatlockia micdadei OX=451; GN = LMI_0149 PE=4 SV=1
MMKKYLTTVELQKESMKFSAGHTTIFSATEREPLHGHMYAVYLALTTWVEENGMTFDYRYYKERIHNLCRSLNQTFLMPQFSPFLEFAEDGEYYYFTFNHKKIPFLKEDVTLMPLTNITVEELSRWFVNELIKNKTELDRHRIEKVVVKVFSAPGQSASHEWQRS

SEQ ID NO: 26295 - protein, 120 aa, Tatumella citrea
  REGION 1..120: note = tr|A0A1Y0LHG4|A0A1Y0LHG4_TATCI 6-carboxy-5,6,7,8-tetrahydropterin synthase OS=Tatumella citrea OX=53336 GN=A7K98_04765 PE=3 SV=1
MSVTTLFKEFQFEAAHYLPHVPDGHKCGRLHGHSFLVRLEITGEVDPHTGWVMDFAELKARFKPLYEQLDHHYLNEIDGLENPTSEVLAIWIWQKMKPVLPLLSAVMIKETCTAGCTYRG

SEQ ID NO: 26296 - protein, 120 aa, Tatumella morbirosei
  REGION 1..120: note = tr|A0A095TDT7|A0A095TDT7_9GAMM 6-carboxy-5,6,7,8-tetrahydropterin synthase OS=Tatumella morbirosei OX=642227 GN=HA49_07295 PE=3 SV=1
MSVTTLFKEFQFEAAHYLPHVPDGHKCGRLHGHSFLVRLEITGEVDPHTGWVMDFAELKARFKPLYEQLDHHYLNEIEGLENPTSEVLAIWIWQKMKPLLPLLSAVMIKETCTAGCTYRG

SEQ ID NO: 26297 - protein, 288 aa, Tatumella morbirosei
  REGION 1..288: note = tr|A0A095T5F1|A0A095T5F1_9GAMM Isocitrate dehydrogenase OS=Tatumella morbirosei OX=642227; GN = HA49_15320 PE=4 SV=1
MKIFINDLTVLDFSFIDTEAGVIGNSLIVDMILEGDMNAESMVMDFSHAKKSIKNEIDKLADHVLIVPETNSHVMVSHAGTTTEVATLDNDGKVRCFISGPQESFFLVRSDKISDRYLESIIEKHLLACLPQGVKGITITLRPETIHGESYHYSHGLKKHRGNCQRIAHGHRSTIRILIDGERSHRWEQQWAKRWNNAYLLSREDIVSVSELSPRAVAYWHKGMICSSYRSFQGYFEIMLGCEAVDILPYDTTVESLALFIRQSIEQQLPAAKVEVHAFEGVGKGAIA

SEQ ID NO: 26298 - protein, 122 aa, Tatumella ptyseos
  REGION 1..122: note = tr|A0A2X5NI41|A0A2X5NI41_9GAMM 6-carboxy-5,6,7,8-tetrahydropterin synthase OS=Tatumella ptyseos OX=82987 GN=queD PE=3 SV=1
MSVTTLFKEFQFEAAHYLPHVPDGHKCGRLHGHSFLVRLEITGEVDPHTGWVMDFAELKARFKPLYEQLDHHYLNEIDGLENPTSEVLAAWIWQKMKPELPLLSAVMIKETCTAGCVYRGQA

SEQ ID NO: 26299 - protein, 122 aa, Tatumella ptyseos; identical to SEQ ID NO: 26298
  REGION 1..122: note = tr|A0A085JAL3|A0A085JAL3_9GAMM 6-carboxy-5,6,7,8-tetrahydropterin synthase OS=Tatumella ptyseos ATCC 33301 OX=1005995 GN=queD PE=3 SV=1

SEQ ID NO: 26300 - protein, 121 aa, Tatumella sp.; identical to SEQ ID NO: 25127
  REGION 1..121: note = tr|A0A2G8BSK5|A0A2G8BSK5_9GAMM 6-carboxy-5,6,7,8-tetrahydropterin synthase OS=Tatumella sp. OPLPL6 OX=1928657 GN=BOM24_16470 PE=3 SV=1

SEQ ID NO: 26301 - protein, 143 aa, Taylorella asinigenitalis
  REGION 1..143: note = tr|G4QDN1|G4QDN1_TAYAM 6-carboxy-5,6,7,8-tetrahydropterin synthase OS=Taylorella asinigenitalis (strain MCE3) OX=1008459 GN=TASI_0259 PE=3; SV = 1
MKVVKTFNFDIAHLLDGHDGKCKNLHGHTYRLEVEVTGPVITEGPKMGMVIDFADLKSIVEELVIEPMDHAFLYDSTNDRESEIAKLLDGWKMKTYAFAHRTTAENISSHILTKLRSRIEGVSRVRLWETPSSYSECIFNEDY

SEQ ID NO: 26302 - protein, 143 aa, Taylorella asinigenitalis
  REGION 1..143: note = tr|I7JNR2|I7JNR2_9BURK 6-carboxy-5,6,7,8-tetrahydropterin synthase OS=Taylorella asinigenitalis 14/45 OX=1091495 GN=KUM_1401 PE=3 SV=1
MKVVKTFNFDIAHLLDGHDGKCKNLHGHTYRLEVEVTGPVITEGPKMGMVIDFADLKSIVEELVIEPMDHAFLYDSTNDRESEIAKLLDGWKMKTYAFAHRTTAENISSHILNKLRSRIEGVSRVRLWETPSSYSECIFNEDH

SEQ ID NO: 26303 - protein, 143 aa, Taylorella equigenitalis
  REGION 1..143: note = tr|I7IBC0|I7IBC0_9BURK 6-carboxy-5,6,7,8-tetrahydropterin synthase OS=Taylorella equigenitalis 14/56 OX=1091497 GN=KUK_1234 PE=3 SV=1
MKVVKTFNFDIAHLLDGHDGKCKNLHGHTYRLEVEVAGPVIEDGPKKGMVIDFADLKSVVDDLIIARMDHAFLYDSTNERETAIAQLLEGWNMKTYPFKHRTTAENISRHIFDLLRERLEGVNRVRLWETPSSYSECTFDDEI

SEQ ID NO: 26304 - protein, 176 aa, Telmatospirillum siberiense
  REGION 1..176: note = tr|A0A2N3PTK2|A0A2N3PTK2_9PROT 6-carboxytetrahydropterin synthase OS=Telmatospirillum siberiense OX=382514 GN=CWS72_14600 PE=4 SV=1
MTSFTVSRQISIDAGHRVMTHGSKCRHLHGHRYTIEATCLADHLQDVGEQSDMVFDFGFLKEAMAAEIDAPCDHGFLAHVEDFELLDMFCPETADAIEWIRAIRQAVRQDGHHLTTETRMETKLYVLDVNPTAEQLSRHWFNRLKPVVTARSGGVAKLQEIIVWEPPHCRAAYREP

SEQ ID NO: 26305 - protein, 137 aa, unidentified
  source 1..137: note = Tenacibaculum caenipelagi
  REGION 1..137: note = tr|A0A4R6TG69|A0A4R6TG69_9FLAO 6-pyruvoyltetrahydropterin/6-carboxytetrahydropterin synthase OS=Tenacibaculum caenipelagi OX=1325435; GN = DFQ07_1577 PE=4 SV=1
MPKVTVHRKAHFNAAHRLFNSNWSDEKNFEVFGKCSNPNYHGHNYELIVSLTGEVNEETGYVYDLGKLKDLIQLKVENVLDHKNLNIEVEEFKNLNPTVENISVVIYNKLRASIPENLDLEVTLYETPRNYVTYRGA

SEQ ID NO: 26306 - protein, 150 aa, unidentified
  source 1..150: note = Tenacibaculum caenipelagi
  REGION 1..150: note = tr|A0A4R6THP1|A0A4R6THP1_9FLAO 6-pyruvoyltetrahydropterin/6-carboxytetrahydropterin synthase OS=Tenacibaculum caenipelagi OX=1325435; GN = DFQ07_1118 PE=4 SV=1
MSKIRITKQFNFETGHALYGYDGKCKNVHGHSYKLSVTVIGSPITDTSNVKYGMVIDFGDLKKIVKEEIVDVFDHATVFNKNTPHVELAKELKDRDHHVILVDYQPTSEMMVIDFAKKIQSRLPGNIKLHAIKLQETETSFAEWYAADNE

SEQ ID NO: 26307 - protein, 150 aa, Tenacibaculum dicentrarchi
  REGION 1..150: note = tr|A0A2I2M175|A0A2I2M175_9FLAO 6-pyruvoyl tetrahydropterin synthase OS=Tenacibaculum dicentrarchi; OX = 669041 GN=TDCHD05_10091 PE=4 SV=1
MNNIRITKQFTFETGHALYGYDGKCKNVHGHSYKLFVTVTGQPIMDTTNVKFGMVIDFGDLKKIVKEEIVDIFDHATVFNQNTPHVELAKELKDRGHHVILVDYQPTSEMMAIDFAKKIKDRLPENIKLHGIKLQETDTSFAEWIASDNE

SEQ ID NO: 26308 - protein, 137 aa, Tenacibaculum dicentrarchi
  REGION 1..137: note = tr|A0A2I2M2F5|A0A2I2M2F5_9FLAO 6-carboxy-5,6,7,8-tetrahydropterin synthase; OS = Tenacibaculum dicentrarchi OX=669041 GN=TDCHD05_20279; PE = 3 SV=1
MPKVTVHRKAHFNAAHRLFNPDWSDEKNQQIFGKCSNPNYHGHNYDLIVSLTGEIDKETGYVYDLGILKTLIKDEVEDVFDHKNLNLDVADFENLNPTAENISVVIFNKLRGHIPVNLALEITLYETQRNYVTYNGA

SEQ ID NO: 26309 - protein, 149 aa, Tenacibaculum discolor
  REGION 1..149: note = tr|A0A497Z5Y0|A0A497Z5Y0_9FLAO 6-carboxy-5,6,7,8-tetrahydropterin synthase; OS = Tenacibaculum discolor OX=361581 GN=C8N27_0890 PE=3 SV=1
MSKIRITKQFTFETGHALYGYDGKCKNVHGHSYKLSVTVIGSPITDTSNVKYGMVIDFGDLKKIVKEDIVDVFDHATVFNKNTPHVELAQELKNRGHHVILVDYQPTSEMMVIDFAKKIQRRLPENIKLHAIKLQETDTSFAEWYASDN

SEQ ID NO: 26310 - protein, 137 aa, Tenacibaculum discolor
  REGION 1..137: note = tr|A0A497YW59|A0A497YW59_9FLAO 6-pyruvoyltetrahydropterin/6-carboxytetrahydropterin synthase OS=Tenacibaculum discolor OX=361581 GN=C8N27_1986; PE = 4 SV=1
MPKVTVHRKAHFNAAHRLFNPKWSDEKNHEVFGKCSNPNYHGHNYELIVSLTGEIDQETGYVYDLGKLKDLIKLKVEDVLDHKNLNIEVEEFKSINPTVENISVVIYNKLRVSIPEKLDLEVTLYETPRNYVTYRGA

SEQ ID NO: 26311 - protein, 150 aa, unidentified
  source 1..150: note = Tenacibaculum finnmarkense
  REGION 1..150: note = tr|A0A2H1XLU4|A0A2H1XLU4_9FLAO 6-pyruvoyl tetrahydropterin synthase OS=Tenacibaculum finnmarkense; OX = 1680763 GN=TNO006_120008 PE=4 SV=1
MNNIRITKQFTFETGHALYGYDGKCKNVHGHSYKLYVTVTGQPISDSTNVKFGMVIDFGDLKKIVKEEIVDIFDHATVFNQNTPHIELAKELKDRGHHVILVDYQPTSEMMAIDFAKKIKDRLPENIKLHAIKLQETDSSFAEWFASDNQ

SEQ ID NO: 26312 - protein, 137 aa, unidentified
  source 1..137: note = Tenacibaculum finnmarkense
  REGION 1..137: note = tr|A0A2H1XZD6|A0A2H1XZD6_9FLAO 6-pyruvoyl tetrahydrobiopterin synthase OS=Tenacibaculum finnmarkense; OX = 1680763 GN=TFHFJT_230012 PE=4 SV=1
MPKVTVHRKAHFNAAHRLFNPDWSDEKNQQIFGKCNNPNYHGHNYDLIVSLTGEINAETGYVYDLGILKGLIKTQVEDVFDHKNLNLDVADFENLNPTAENISVVIFNKLRGHIPVNLALEITLYETQRNYVTYNGS

SEQ ID NO: 26313 - protein, 137 aa, Tenacibaculum gallaicum
  REGION 1..137: note = tr|A0A3E0I1H4|A0A3E0I1H4_9FLAO 6-pyruvoyltetrahydropterin/6-carboxytetrahydropterin synthase OS=Tenacibaculum gallaicum OX=561505; GN = C7448_10398 PE=4 SV=1
MPKVTVHRKAHFNAAHRLFNPKWSDEKNYEVFGKCSNPNYHGHNYELIISLTGEVDQETGYVYDLGKLKDLIKLKVEDVLDHKNLNIEVEEFKDVNPTVENISVVIYNKLRVSIPEKLDLEVTLYETPRNYVTYRGA

SEQ ID NO: 26314 - protein, 149 aa, Tenacibaculum gallaicum
  REGION 1..149: note = tr|A0A3E0ICT0|A0A3E0ICT0_9FLAO 6-carboxy-5,6,7,8-tetrahydropterin synthase; OS = Tenacibaculum gallaicum OX=561505 GN=C7448_101421 PE=3; SV = 1
MSNIRITKQFTFETGHALYGYDGKCKNVHGHSYKLSVTVIGSPITDTSNVKYGMVIDFGDLKKIVKEEIVDVFDHATVFNKNTPHVELAKELKDRGHHVILVDYQPTSEMMVIDFAKKIQSRLPKRIKLHAIKLQETDTSFAEWYASDN

SEQ ID NO: 26315 - protein, 137 aa, unidentified
  source 1..137: note = Tenacibaculum holothuriorum
  REGION 1..137: note = tr|A0A1Y2PD02|A0A1Y2PD02_9FLAO 6-pyruvoyl tetrahydrobiopterin synthase OS=Tenacibaculum holothuriorum OX=1635173 GN=WH52_06225 PE=4 SV=1
MPRVTVHRKAHFNAAHRLFNPKWSDEKNVAVFGKCSNPNYHGHNYELIVSLTGEIDKETGYVYDLGILKDLIKEEVEEAFDHKNLNIEVEEFKALNPSVENIAVVIYDKLRVKIEKEYELKITLYETPRNYVTYSGE

SEQ ID NO: 26316 - protein, 150 aa, unidentified
  source 1..150: note = Tenacibaculum holothuriorum
  REGION 1..150: note = tr|A0A1Y2PBH7|A0A1Y2PBH7_9FLAO 6-pyruvoyl tetrahydropterin synthase OS=Tenacibaculum holothuriorum; OX = 1635173 GN=WH52_13370 PE=4 SV=1
MSKIRITKQFSFETGHALYGYDGKCKNVHGHSYKLSVTVIGTPISDTSNVKYGMVIDFGDLKKIVKEEIVDVFDHATVFNKNTPHVELAKELKDRGHHVILVGYQPTSEMMVIDFAEKIKSRLPENLLLHSIKLQETDTSFAEWYASDNN

SEQ ID NO: 26317 - protein, 150 aa, Tenacibaculum jejuense
  REGION 1..150: note = tr|A0A238UF03|A0A238UF03_9FLAO Queuosine biosynthesis QueD, PTPS-I OS=Tenacibaculum jejuense; OX = 584609 GN=TJEJU_4143 PE=4 SV=1
MSKIRITKKFTFETAHALYGYDGKCKNIHGHSYKLFVTVIGEPISDTNNPKYGMVIDFGDLKKIVNKEIVDEFDHSTLFNKNTPHLELAEYLKELGHHILLVDYQPSSEMMVIDFAKKISGNLPEGIRLHSLKLQETESCYAEWFASDNI

SEQ ID NO: 26318 - protein, 137 aa, Tenacibaculum jejuense
  REGION 1..137: note = tr|A0A238U896|A0A238U896_9FLAO 6-carboxy-5,6,7,8-tetrahydropterin synthase; OS = Tenacibaculum jejuense OX=584609 GN=TJEJU_1535 PE=4 SV=1
MPRVTVHRKAHFNAAHRLYRKDWSDEKNFEVFNKCSNTYFHGHNYELIVSLTGEIDKETGYVYDLGKLKQIIKEEIEEAFDHKNLNIEVEEFKDLNPTAENISVVIYNKLRTHISEDLDMEITLYETPRNFVTYSGS

SEQ ID NO: 26319 - protein, 137 aa, Tenacibaculum litoreum
  REGION 1..137: note = tr|A0A3R9DM40|A0A3R9DM40_9FLAO 6-carboxytetrahydropterin synthase OS=Tenacibaculum litoreum OX=321269 GN=EI424_07225 PE=4 SV=1
MPKVTVHRKAHFNAAHRLFNPKWSDEKNYEVFGKCSNPNYHGHNYELIVSLTGEIDQETGYVYDLGKLKDLIKLKVEDTLDHKNLNIEVEEFKNVNPTVENISVVIYNKLRVSIPEKLDLEVTLYETPRNYVTYRGA

SEQ ID NO: 26320 - protein, 149 aa, Tenacibaculum litoreum
  REGION 1..149: note = tr|A0A3R9EBI2|A0A3R9EBI2_9FLAO 6-carboxy-5,6,7,8-tetrahydropterin synthase; OS = Tenacibaculum litoreum OX=321269 GN=EI424_04555 PE=3; SV = 1
MSKIRITKQFTFETGHALYGYDGKCKNVHGHSYKLSVTVIGSPITDTSNVKYGMVIDFGDLKKIVKEEIVDVFDHATVFNKNTPHVELAQELKDRGHHVILVDYQPTSEMMVIDFAKKIQDRLPENIKLHAIKLQETDTSFAEWYASDN

SEQ ID NO: 26321 - protein, 137 aa, Tenacibaculum lutimaris
  REGION 1..137: note = tr|A0A420DZ98|A0A420DZ98_9FLAO 6-pyruvoyltetrahydropterin/6-carboxytetrahydropterin synthase OS=Tenacibaculum lutimaris OX=285258; GN = C8N26_2154 PE=4 SV=1
MPKVTVHRKAHFNAAHRLFNPKWSDEKNHEVFGKCSNPNYHGHNYELIVSLTGEIDQETGYVYDLGKLKDLIKLKVEDVLDHKNLNIEVEEFKNVNPTVENISVVIYNKLRVSIPEHLDLEVTLYETPRNYVTYRGA

SEQ ID NO: 26322 - protein, 149 aa, Tenacibaculum lutimaris
  REGION 1..149: note = tr|A0A420E5Q0|A0A420E5Q0_9FLAO 6-carboxy-5,6,7,8-tetrahydropterin synthase; OS = Tenacibaculum lutimaris OX=285258 GN=C8N26_0588 PE=3; SV = 1
MSKIRITKQFNFETGHALYGYDGKCKNVHGHSYKLSVTVIGSPITDTSNVKYGMVIDFGDLKKIVKEEIVDVFDHATVFNKNTPHIELAKELKDRGHHVILVNYQPTSEMMVIDFAEKIQSRLPENIKLHAIKLQETETSFAEWYASDN

SEQ ID NO: 26323 - protein, 149 aa, Tenacibaculum maritimum
  REGION 1..149: note = tr|A0A2H1E5F6|A0A2H1E5F6_9FLAO 6-carboxy-5,6,7,8-tetrahydropterin synthase; OS = Tenacibaculum maritimum NCIMB 2154 OX=1349785; GN = MARIT_0069 PE=3 SV=1
MANIRITKQFNFETGHALYGYDGKCKNVHGHSYKLSVTVIGQPITDASNVKYGMVIDFGDLKRIVKEDIVDVFDHATVFNKNTPHIELAKELQDRDHHVILVDYQPTSEMMVIDFAEKIKKRLPENIQLYALKLQETATSFAEWYASDN

SEQ ID NO: 26324 - protein, 137 aa, Tenacibaculum maritimum
  REGION 1..137: note = tr|A0A2H1E8T6|A0A2H1E8T6_9FLAO 6-carboxy-5,6,7,8-tetrahydropterin synthase; OS = Tenacibaculum maritimum NCIMB 2154 OX=1349785; GN = MARIT_1223 PE=3 SV=1
MPRVTVHRKAHFNAAHRLHREDWSEEKNNLFFGKCSNPNYHGHNYELIVSLTGEVDKETGFVYDLGKLKKLIEEEIEEAFDHKNLNIEVTEFKDLNPTAENIAIVIYNKLRVKILKKLDLKITLYETPRNYVSYSGE

SEQ ID NO: 26325 - protein, 137 aa, Tenacibaculum mesophilum
  REGION 1..137: note = tr|A0A1M5G2N1|A0A1M5G2N1_9FLAO 6-pyruvoyltetrahydropterin/6-carboxytetrahydropterin synthase OS=Tenacibaculum mesophilum OX=104268; GN = SAMN05444344_2283 PE=4 SV=1
MPKVTVHRKAHFNAAHRLFNPKWSDEKNYEVFGKCSNPNYHGHNYELIVSLTGEIDQETGYVYDLGKLKDLIKSKVEDLLDHKNLNIEVKEFKNVNPTVENISVVIYNKLRVSIPEKLDLAITLYETPRNYVTYRGT

SEQ ID NO: 26326 - protein, 149 aa, Tenacibaculum mesophilum
  REGION 1..149: note = tr|A0A1M5DLJ4|A0A1M5DLJ4_9FLAO 6-carboxy-5,6,7,8-tetrahydropterin synthase; OS = Tenacibaculum mesophilum OX=104268 GN=SAMN05444344_1142; PE = 3 SV=1
MSKIRITKQFTFETGHALYGYDGKCKNVHGHSYKLSVTVIGSPITDTSNVKYGMVIDFGDLKKIVKEEIVDVFDHATVFNKNTPHVELAKELKDRGHHVILVDYQPTSEMMVIDFAKKIQKRLPENIKLHGIKLQETDTSFAEWYASDN

SEQ ID NO: 26327 - protein, 137 aa, Tenacibaculum skagerrakense
  REGION 1..137: note = tr|A0A4R2NM16|A0A4R2NM16_9FLAO 6-pyruvoyltetrahydropterin/6-carboxytetrahydropterin synthase OS=Tenacibaculum skagerrakense OX=186571; GN = EV195_11119 PE=4 SV=1
MPRVTVHRKAHFNSAHRLYRKDWSDEKNFEVFNKCSNPNFHGHNYELIVSLTGEIDEETGYVYDLGKLKQIIKEEVEEPFDHKNLNLEVEEFKNLNPTAENISVVIYNKLRTIIPNTLDIKITLYETPRNFVTYSGK

SEQ ID NO: 26328 - protein, 150 aa, Tenacibaculum skagerrakense
  REGION 1..150: note = tr|A0A4R2P224|A0A4R2P224_9FLAO 6-pyruvoyltetrahydropterin/6-carboxytetrahydropterin synthase OS=Tenacibaculum skagerrakense OX=186571; GN = EV195_10180 PE=4 SV=1
MSTIRITKQFNFETGHALYGYDGKCKNVHGHSYKLSVTVVGSPISDTSNVKFGMVIDFGDLKKIVKEEIVDVFDHATVFNKNTPHIELAKELKDRGHDVILVDYQPTSEMMVIDFAKKIKNRLPDNIKLHSIKLQETDTSYAEWYASDNM

SEQ ID NO: 26329 - protein, 149 aa, Tenacibaculum soleae
  REGION 1..149: note = tr|A0A1B9Y1A6|A0A1B9Y1A6_9FLAO 6-carboxytetrahydropterin synthase QueD OS=Tenacibaculum soleae OX=447689 GN=BA195_02530 PE=4 SV=1
MANIRITKQFSFETGHALYGYDGKCKNVHGHSYKLSVTVIGQPITDVSNVKYGMVIDFGDLKKIVIEEIVDVFDHATVFNQNTPHVELAKELKARDHHVILVDYQPTSEMMVIDFADKIQKRLPDNIKLFSLKLQETETSFAEWFASDN

SEQ ID NO: 26330 - protein, 136 aa, Tenacibaculum soleae
  REGION 1..136: note = tr|A0A1B9Y2A7|A0A1B9Y2A7_9FLAO 6-pyruvoyl tetrahydrobiopterin synthase OS=Tenacibaculum soleae; OX = 447689 GN=BA195_04425 PE=4 SV=1
MKKIAITRREHFNSAHRLHNSNWSIEKNKEVFGKCNNENYHGHNYDLEVSIIGAINPETGYVIDTKILSNHIKREILEPFDHRNLNLDTKEFEYLNPTVENIAVVIYNKLRKVISNHLEIKIKLYETPRNFVEYPC

SEQ ID NO: 26331 - protein, 150 aa, Tenacibaculum sp.
  REGION 1..150: note = tr|A0A2H1YJV7|A0A2H1YJV7_9FLAO 6-pyruvoyl tetrahydropterin synthase OS=Tenacibaculum sp. TNO020; OX = 1458515 GN=TNO020_70102 PE=4 SV=1
MNNIRITKQFTFETGHALYGYDGKCKNVHGHSYKLFVTVTGQPISDSSNVKFGMVIDFGDLKKIVKEEIVDIFDHATVFNQNTPHIELAKELKDRGHHVILVDYQPTSEMMAIDFAKKIKDRLPENIKLHAIKLQETDSSFAEWFASDNQ

SEQ ID NO: 26332 - protein, 149 aa, Tenacibaculum sp.
  REGION 1..149: note = tr|A0A1H5F707|A0A1H5F707_9FLAO 6-carboxy-5,6,7,8-tetrahydropterin synthase; OS = Tenacibaculum sp. MAR_2010_89 OX=1250198; GN = SAMN04487765_1035 PE=3 SV=1
MANIRITKQFSFETGHALYGYDGKCKNVHGHSYKLSVTVIGEPISDTSNVKYGMVIDFGDLKKIVKEDIVDVFDHATVFNKNTPHVELAKELQDRGHHVILVDYQPTSEMMIIDFASKIKKRLPGNIKLHSLKLQETDTSFAEWHASDN

SEQ ID NO: 26333 - protein, 150 aa, unidentified
  source 1..150: note = Tenacibaculum todarodis
  REGION 1..150: note = tr|A0A1L3JKK5|A0A1L3JKK5_9FLAO 6-carboxytetrahydropterin synthase QueD OS=Tenacibaculum todarodis OX=1850252 GN=LPB136_09925 PE=4 SV=1
MSTIRITKQFNFETGHALYGYDGKCKNVHGHSYKLSVTVIGQPITDSSNVKFGMVIDFSDLKKVVKEEIVDVFDHATVFNKNTPHVELAKELQDRGHHVILVDYQPTSEMMVIDFAEKIKNRLPENINLHSLRLQETETSFAEWFASDNL

SEQ ID NO: 26334 - protein, 137 aa, unidentified
  source 1..137: note = Tenacibaculum todarodis
  REGION 1..137: note = tr|A0A1L3JGI1|A0A1L3JGI1_9FLAO 6-carboxy-5,6,7,8-tetrahydropterin synthase; OS = Tenacibaculum todarodis OX=1850252 GN=LPB136_02115 PE=3; SV = 1
MPKVTVHRKAHFNAAHRLYRKDWSDAKNTAVFGKCSNPNFHGHNYELIVSLTGEIEEETGFVYDLGKLRELIKSEVEEALDHKNLNVEVPEFKDLNPTAENISVVIYNKLKKHLPTNLTIEITLYETARNFVSYKGE

SEQ ID NO: 26335 - protein, 128 aa, unidentified
  source 1..128: note = Tenericutes bacterium
  REGION 1..128: note = tr|A0A420Z0Z5|A0A420Z0Z5_9BACT 6-carboxy-5,6,7,8-tetrahydropterin synthase OS=Tenericutes bacterium OX=2231116 GN=queD PE=3 SV=1
MEVKMIRICKTFVFDAAHKLPEHKGKCKNLHGHRYKLEIEVRNEVNPNTGMVMDFGDLKQIINDTFIKNWDHSYLNESFENPTAEIMVEHMINWLKNIFNKEGVYAELTKVRLYETPNSYAEWRKEDQ

SEQ ID NO: 26336 - protein, 186 aa, unidentified
  source 1..186: note = Tenericutes bacterium
  REGION 1..186: note = tr|A0A1V6B9W4|A0A1V6B9W4_9BACT 6-pyruvoyl tetrahydropterin synthase OS=Tenericutes bacterium ADurb.Bin140 OX=1852919 GN=BWX94_01328 PE=4 SV=1
MRSFTTLDLQYAHRFYGFRGEAQYLHGHTGILTIEVEDRVNMGVNMVFPCNEIKKIAWEVLQNFDHALILREDDPLLPVILGVYEAQGIRNGHPSNKQKGPAFKTELATAYPECRLVVTKETMTVEGMIKIVYDLLKDKLNIVKLTFTSGVNGASQEYEPQKVIDCCPLCGVALNENGVCPKCGYK

SEQ ID NO: 26337 - protein, 165 aa, unidentified
  source 1..165: note = Tengunoibacter tsumagoiensis
  REGION 1..165: note = tr|A0A401ZZF9|A0A401ZZF9_9CHLR 6-pyruvoyl tetrahydrobiopterin synthase OS=Tengunoibacter tsumagoiensis OX=2014871 GN=KTT_20980 PE=4 SV=1
MAGEQIRRKVKVEGGTLKFSSAHFITYGGKCERLHGHNYGVLVEIEGELGQDGLVFDFTLLKRYAREICQKLDHHFLLPMRNPQLELIALSDQWEIRFGEKRYLFPYTDVVELPIENSTAELLAEYIHGELLQLLAQHDISHLISLMVGVEEAPTQMAYYQKELR

SEQ ID NO: 26338 - protein, 135 aa, unidentified
  source 1..135: note = Tengunoibacter tsumagoiensis
  REGION 1..135: note = tr|A0A401ZTP3|A0A401ZTP3_9CHLR 6-carboxy-5,6,7,8-tetrahydropterin synthase; OS = Tengunoibacter tsumagoiensis OX=2014871 GN=KTT_01470; PE = 3 SV=1
MVYLTRRVTFSAAHRLWSHALSDEENQVVYDKCANPNGHGHNYILEVTVRGTPDPQTGMVMNLTDMKKIMNEQVVDWVDHKHLNYDVPWLEGVIPTAEMLAMKFWERLERDFPAGLLYEVVLHETENNRASYRGE

SEQ ID NO: 26339 - protein, 118 aa, unidentified
  source 1..118: note = Tepidanaerobacter acetatoxydans
  REGION 1..118: note = tr|F4LS35|F4LS35_TEPAE 6-carboxy-5,6,7,8-tetrahydropterin synthase; OS = Tepidanaerobacter acetatoxydans (strain DSM 21804 / JCM 16047 / Re1) OX=1209989 GN=TEPIRE1_2421PE=3 SV=1
MILTRKFKFDAAHNLVEYHGKCEKLHGHTYKLVVKLEGKPGKEDMIMDFSELKHVVESKILQQLDHSYLNDFIKQPSAENIAKWIWDRLYDELSRENCRLYEIQVWETENCGIMYRGE

SEQ ID NO: 26340 - protein, 118 aa, Tepidanaerobacter syntrophicus
  REGION 1..118: note = tr|A0A0U9HMP0|A0A0U9HMP0_9THEO 6-carboxy-5,6,7,8-tetrahydropterin synthase; OS = Tepidanaerobacter syntrophicus OX=224999 GN=TSYNT_8148; PE = 3 SV=1
MILTRIFKFDAAHNLVEYHGKCERLHGHTYKLVVKLEGKPGKEDMIMDFSELKRIVESTILQQLDHSYLNDFIKQPSAENISRWIWDRLYNELSRENCRLYEIQVWETENCGVTYRGE

SEQ ID NO: 26341 - protein, 143 aa, Tepidibacter formicigenes
  REGION 1..143: note = tr|A0A1M6NVI3|A0A1M6NVI3_9FIRM 6-carboxy-5,6,7,8-tetrahydropterin synthase; OS = Tepidibacter formicigenes DSM 15518 OX=1123349; GN = SAMN02744037_01376 PE=3 SV=1
MYILKAEHSFDSAHFLANYEGKCSNIHGHRWRVIIEVQSENLIDGGQLDGMVIDFGDLKKDVRALADSYDHAFIIQKGTMRKETLECIIEDGFKIVEVEFRPTAENFAAFFFKTMEEKGYNVKRATVYETPTNSATYEKSEVK

SEQ ID NO: 26342 - protein, 143 aa, Tepidibacter thalassicus
  REGION 1..143: note = tr|A0A1M5QN30|A0A1M5QN30_9FIRM 6-carboxy-5,6,7,8-tetrahydropterin synthase; OS = Tepidibacter thalassicus DSM 15285 OX=1123350; GN = SAMN02744040_01039 PE=3 SV=1
MYILKAEHSFDSAHFLANYEGKCSNIHGHRWKVLIEVQSEELVSGGQLDGMVIDFGDLKRDVKAMADFYDHALIIQRGTMRKETLELLVEDGFKIIEVEFRPTAENFAAFFFKCMEEKGYNVKRATVYETPTNCASYERNEVR

SEQ ID NO: 26343 - protein, 121 aa, unidentified
  source 1..121: note = Tepidicaulis marinus
  REGION 1..121: note = tr|A0A081B8Y6|A0A081B8Y6_9RHIZ 6-carboxy-5,6,7,8-tetrahydropterin synthase; OS = Tepidicaulis marinus OX=1333998 GN=M2A_1003 PE=3 SV=1
MRIYKEFTFEAAHYLPSAPPGHPNSRLHGHSFRAVVWLAGTPDPETGLIREFSEFRDALEDARQALDHHCLNEIEGLAAPTLECLTMWIWRRLKNSLPQIARVEVHRDTCKEGCVYEGEAD

SEQ ID NO: 26344 - protein, 147 aa, unidentified
  source 1..147: note = Tepidiphilus thermophilus
  REGION 1..147: note = tr|A0A0K6IWB2|A0A0K6IWB2_9PROT Queuosine biosynthesis protein QueD OS=Tepidiphilus thermophilus; OX = 876478 GN=Ga0061068_10755 PE=4 SV=1
MQITRRFEFDAGHRIPNHESRCRHLHGHRYALEVTLIGEPVPEAGRSDEGMVLDFSALKALVHETVVDPWDHAFLVHRDDALVRSLLERIPDHRTVVLDAVPTAENLARIAYELLSERLHLAHGDRLRLRRVRLYETPNCWADYPDD

SEQ ID NO: 26345 - protein, 286 aa, unidentified
  source 1..286: note = Terasakiispira papahanaumokuakeensis
  REGION 1..286: note = tr|A0A1E2V7D0|A0A1E2V7D0_9GAMM Uncharacterized protein OS=Terasakiispira papahanaumokuakeensis OX=197479; GN = BFW38_04420 PE=4 SV=1
MNLFVNAFTHLDASLWCPEHGLTGASWWVDLELQGPQGDDGMILDFGEVKPWTKRAIDAGPDHTLLVPEHAEGVTVQTLPDERLCITTQTPYAMTVTGPAEAFTLLPVDRVTPEVIAQYLMAELNPKLPVPGQLTLALRAEPIEGAELHYSHGLRLHQGNCQRIAHGHRSRLHIWRDGQEAPEVAARLAARWNHAYLYDQADDVSPSLMGEAPSEPLTSLAYTAAQGLFELTLPTHVCHALPVQTTVENLADALAQQLHEIEPGHHWRVCLNEGIDKGACAQRSAS

SEQ ID NO: 26346 - protein, 280 aa, Teredinibacter sp.
  REGION 1..280: note = tr|A0A509DZT8|A0A509DZT8_9GAMM Uncharacterized protein OS=Teredinibacter sp. ISS155 OX=2584524; GN = TDB9533_02359 PE=4 SV=1
MRLFVDNLTNVDFSYLDAKRGLVGETWLASIELEGSLDAQGMVVDFGIVKKKLRHWLDDILDHRLLVPARSSCLQQKQTAANDSISFEWHLGEQQIVCKSPQQALTFIDAEEINMESVAAWSQQQLAGVFPDTVQNLTLRFSNESIDTPFYHYSHGLKKHKGNCQRIAHGHRSRLNIWLNDQYSDEEVAWWAQNWRDIYIATEEDQCESPNTQNHAFAYEADQGKFYLEVPKNLCYLIDTDSTVELIAHHIAKQLKHKYPDTQVRVQAFEGMGKGAIVEL

SEQ ID NO: 26347 - protein, 278 aa, Teredinibacter turnerae
  REGION 1..278: note = tr|C5BR66|C5BR66_TERTT Uncharacterized protein; OS = Teredinibacter turnerae (strain ATCC 39867 / T7901); OX = 377629 GN=TERTU_1152 PE=4 SV=1
MLLFVDQLTNVDFSYLDPERGLVGETWLAGVELEGALDDQGMVCDFGTVKAKSRHWLDDTIDHCLLVPAEHPAIAIVDANGNYEITMTLTSGETLFCKAPKQAITLVKTKHINEASVGEWCVSQLLKLYPASVKSVAVSFVPEVIDGPYYHYSHGLRKHAGNCQRIAHGHRSKLEVKIDGKAAVEVTAKWAELWRDIYIGSTPDLINDSGDQYTFAYTAAQGEFRLSLPKRLCYLIDTDSTVELIASHIVQQIKSRFPENSVSVRAYEGLAKGAVCSL

SEQ ID NO: 26348 - protein, 122 aa, Terrabacter aerolatus
  REGION 1..122: note = tr|A0A512D609|A0A512D609_9MICO 6-carboxy-5,6,7,8-tetrahydropterin synthase OS=Terrabacter aerolatus OX=422442 GN=TAE01_34900 PE=3 SV=1
MTHNSEIYREFTFEAAHRLPNVPEGHKCARLHGHSYLAAVHVAGPVGEETGWVQDFGEIKAAFKPLEEQLDHHFLNEVRGLENPTSEVLAKWIWDRLVVALPNLTEVRVRETCTSGCIYRGE

SEQ ID NO: 26349 - protein, 132 aa, Terrabacter aerolatus
  REGION 1..132: note = tr|A0A512D4W9|A0A512D4W9_9MICO Uncharacterized protein OS=Terrabacter aerolatus OX=422442 GN=TAE01_33180; PE = 4 SV=1
MFSVTVRDHMMVAHSFTGEVFGPAQRLHGATFVVDVTFRGPELDDDGILVDIGLATQHVHEVVGALGYRNLDDEPAFAGVNTTTEVLARHVAVVVGERVRAGDLGGATDRVTALSVTLHESHVAWATYECDL

SEQ ID NO: 26350 - protein, 131 aa, Terrabacter lapilli
  REGION 1..131: note = tr|A0A543N5Z4|A0A543N5Z4_9MICO 6-pyruvoyl-tetrahydropterin synthase OS=Terrabacter lapilli OX=436231 GN=FHW53_1160 PE=4 SV=1
MFSVTVRDHMMVAHSFEGERFGPAQRLHGATFVVDATFCGADLDPDGILLDIGLATEQVHEVVGALSYRNLDEVPDLERNTSTEVLARHIADRLAERVHSGALGTEPGRLSAVLVTLHESHVAWATYERTV

SEQ ID NO: 26351 - protein, 132 aa, Terrabacter sp.
  REGION 1..132: note = tr|A0A0Q8YDS9|A0A0Q8YDS9_9MICO 6-pyruvoyl tetrahydropterin synthase OS=Terrabacter sp. Root85; OX = 1736603 GN=ASE25_02535 PE=4 SV=1
MFSVTVRDHMMIAHSFRGEVFGPAQRLHGATFVVDVTFRGPELDDDDILVDIGLATQHVREVVGAFGYRNLDDEPDFAGVNTSTEVLARTIAERVAGRIRAGDLGGATDRVTALAVTLHESHVAWASYECEL

SEQ ID NO: 26352 - protein, 132 aa, Terrabacter sp.
  REGION 1..132: note = tr|A0A0Q9T7G4|A0A0Q9T7G4_9MICO 6-pyruvoyl tetrahydropterin synthase OS=Terrabacter sp. Soil810; OX = 1736418 GN=ASG96_19295 PE=4 SV=1
MFSVTVRDHMMIAHSFRGEVFGPAQRLHGATFVVDVTFRGPELDRDDILVDIGLATRHVREVVGALGYRNLDDDPDFAGVNTSTEVLARTVAERVADRVRAGDLGGATDQVTGLVVTLHESHVAWASYECDL

SEQ ID NO: 26353 - protein, 145 aa, Terribacillus aidingensis
  REGION 1..145: note = tr|A0A285P548|A0A285P548_9BACI 6-carboxy-5,6,7,8-tetrahydropterin synthase; OS = Terribacillus aidingensis OX=586416; GN = SAMN05421503_3043 PE=3 SV=1
MIQQIYPQVPHDFSYELNKDLHFAAAHSIQHPDAGKCQQVHGHTYFANITIAGDELDDSGFLFNFSTIKALIHKKFDHTYLNDHTDILKENDFPTTEVMARKIYELIQNELDQLPHQPKCLQVFLRETPTSYCIYRPKRGIENGK

SEQ ID NO: 26354 - protein, 145 aa, Terribacillus goriensis
  REGION 1..145: note = tr|A0A075LHV9|A0A075LHV9_9BACI 6-carboxy-5,6,7,8-tetrahydropterin synthase; OS = Terribacillus goriensis OX=386490 GN=GZ22_01520 PE=3; SV = 1
MIQQIYPQVQHDYSYELNKDLHFAAAHSIQHPDAGKCQQVHGHTYFANVTIAGDELDDSGFLFNFSTIKALIHKKFDHTLLNDHTDVFGKDDFPTTEVMARKIYELIQQELDQLPHQPKCLQVFLRETPTSYCVYRPKRGTKNGK

SEQ ID NO: 26355 - protein, 145 aa, Terribacillus halophilus
  REGION 1..145: note = tr|A0A1G6RSL8|A0A1G6RSL8_9BACI 6-carboxy-5,6,7,8-tetrahydropterin synthase; OS = Terribacillus halophilus OX=361279; GN = SAMN05421663_106174 PE=3 SV=1
MIQQIYPQVQHDYSYELNKDLHFAAAHSIQHPDAGKCQQVHGHTYFANVTIAGDELDDSGFLFNFSTIKALIHKKFDHTLLNDHTDVFEKNDFPTTEVMARKIYELIQQELDQLPHKPKCLQVFLRETPTSYCVYRPKRGTENGQ

SEQ ID NO: 26356 - protein, 145 aa, Terribacillus saccharophilus
  REGION 1..145: note = tr|A0A268A816|A0A268A816_9BACI 6-carboxy-5,6,7,8-tetrahydropterin synthase; OS = Terribacillus saccharophilus OX=361277 GN=queD PE=3 SV=1
MIQQIYPQVQHDYSYELNKDLHFAAAHSIQHPDAGKCQQVHGHTYFANVTIAGDELDDSGFLFNFSTIKALIHKKFDHTLLNDHTDVFGKDDFPTTEVMARKIYELIQQELDQLPHQPKCLQVFLRETPTSYCVYRPKRGTENGK

SEQ ID NO: 26357 - protein, 145 aa, Terribacillus saccharophilus; identical to SEQ ID NO: 26354
  REGION 1..145: note = tr|A0A1H8IPH4|A0A1H8IPH4_9BACI 6-carboxy-5,6,7,8-tetrahydropterin synthase; OS = Terribacillus saccharophilus OX=361277; GN = SAMN04489762_2612 PE=3 SV=1

SEQ ID NO: 26358 - protein, 145 aa, Terribacillus sp.
  REGION 1..145: note = tr|A0A268BMQ5|A0A268BMQ5_9BACI 6-carboxy-5,6,7,8-tetrahydropterin synthase; OS = Terribacillus sp. 7520-G OX=2025389 GN=queD PE=3 SV=1
MIQQIYPQVQHDYCYELNKDLHFAAAHSIQHPDAGKCQQVHGHTYFANITIAGDELDDSGFLFNFSTIKALIHKKFDHTLLNDHTDVLGKDDFPTTEVMARKIYELIQQELDQLPHKPKCLQVFLRETPTSYCVYRPKRGTENGK

SEQ ID NO: 26359 - protein, 125 aa, unidentified
  source 1..125: note = Terriglobus albidus
  REGION 1..125: note = tr|A0A5B9E5U0|A0A5B9E5U0_9BACT 6-carboxy-5,6,7,8-tetrahydropterin synthase OS=Terriglobus albidus OX=1592106 GN=queD PE=3 SV=1
MFEITVEATFSSGHYLRNYHGKCENPHGHNYRVLVTLQGKELDESGLLLDFKLLKQVMRPVVNYLDHQMINDLKPFDEVNPSAENLARYFYQETSKQMLEMTNGRVSVKDCVMYETDTSMARYFE

SEQ ID NO: 26360 - protein, 136 aa, unidentified
  source 1..136: note = Terriglobus albidus
  REGION 1..136: note = tr|A0A5B9EH68|A0A5B9EH68_9BACT 6-carboxytetrahydropterin synthase OS=Terriglobus albidus; OX = 1592106 GN=FTW19_17870 PE=4 SV=1
MVQLTRKAEFSASHFYWVDSWSPEENQRAFGKCANRNGHGHNYTLEVTVQGRVDPVTGFVVDLKELKEILEREVVSVYDHRHLNHEVPEFRTMQPTSENIAIAIWRRLEGKIAGANLVKVRVYEMEDLYADYMGEA

SEQ ID NO: 26361 - protein, 125 aa, Terriglobus roseus
  REGION 1..125: note = tr|A0A1G7QGF4|A0A1G7QGF4_9BACT 6-carboxy-5,6,7,8-tetrahydropterin synthase OS=Terriglobus roseus OX=392734 GN=SAMN05444167_3843 PE=3 SV=1
MYEVTVESHFSSGHYLRDYHGKCENPHGHNYRVLVTLAGEELEPNGLLLDFKILKDILKPVVNYLDHQMINDLEPFTTVNPSAENLAKYFFDETNTRLSDVTKGRVRVKSSTIFETNTSQATYSE

SEQ ID NO: 26362 - protein, 161 aa, Terriglobus roseus
  REGION 1..161: note = tr|I3ZH17|I3ZH17_TERRK 6-pyruvoyl-tetrahydropterin synthase OS=Terriglobus roseus (strain DSM 18391 / NRRL B-41598 / KBS 63) OX=926566 GN=Terro_2271 PE=4 SV=1
MPIAHFTRRYRLSASHRLHAPSLNDQQNRDTYGKCNNPYGHGHNYFVEVTVAGPIDPETGFVVDMPKLDALAKRELIDRFDAQHMNADPVFNGDFVPSTENLGIEVERVFRRAVPLLDPTCQLRLHRIRIEETKNNSFDLLAPGQIDALIPHEQHALQPIA

SEQ ID NO: 26363 - protein, 125 aa, Terriglobus saanensis
  REGION 1..125: note = tr|E8UYW1|E8UYW1_TERSS 6-carboxy-5,6,7,8-tetrahydropterin synthase OS=Terriglobus saanensis (strain ATCC BAA-1853 / DSM 23119 / SP1PR4); OX = 401053 GN=AciPR4_3574 PE=3SV=1
MFEVTVEATFSSGHYLRNYRGKCENPHGHNYKVLVTLVGKELDASGLLLDFKLLKQVMRPVVDYLDHQMINDLEPFTTVNPSAENLAKYFFDETSKQLFEMSEGRVSVKQSTIYETDTSMATYYE

SEQ ID NO: 26364 - protein, 148 aa, Terriglobus saanensis
  REGION 1..148: note = tr|E8UX09|E8UX09_TERSS Uncharacterized protein; OS = Terriglobus saanensis (strain ATCC BAA-1853 / DSM 23119 / SP1PR4) OX=401053 GN=AciPR4_1065 PE=4 SV=1
MTPVVHFSRRYRFSSSHRLHVGTMSEEENYATFGKCNNPFGHGHNYVLEVTVAGSVDAATGMVVDMVALDSLVKEQIVERFDQTHLNIDPLFAGALVPSTENFVIEVEKLLLKSADALGVRLVRVRMEETSNNSFDLLPQEPRDRVVF

SEQ ID NO: 26365 - protein, 92 aa, unidentified
  source 1..92: note = Terrimicrobium sacchariphilum
  REGION 1..92: note = tr|A0A146G7H2|A0A146G7H2_TERSA 6-pyruvoyltetrahydropterin OS=Terrimicrobium sacchariphilum OX=690879 GN=TSACC_21229 PE=4 SV=1
MHGHSFKVEIVVEGEVDPHMGWVYDHAEISRAMEPLLDYIDHKYMNELPELENPTIEHIAAWFWRKLTPTLPGLAEIVVHETPTARCIYRGE

SEQ ID NO: 26366 - protein, 137 aa, Terrimonas sp.
  REGION 1..137: note = tr|A0A2T7Q581|A0A2T7Q581_9BACT 6-carboxy-5,6,7,8-tetrahydropterin synthase OS=Terrimonas sp. NS-102 OX=2171976 GN=DC498_19725 PE=3 SV=1
MSKKVAVYRRERFNAAHRLNNPAWDDATNFKVFGKCSNPHYHGHNYELEVKVIGEPAAETGFVMDLKVLSDIIKEEVVERFDHKNLNLDTAEFKNLNPTAENIVVVIYSLLRSRIDAKNDIQVRLYETPRNFVEYPA

SEQ ID NO: 26367 - protein, 136 aa, Terrimonas sp.
  REGION 1..136: note = tr|A0A2T7Q576|A0A2T7Q576_9BACT 6-pyruvoyl tetrahydrobiopterin synthase OS=Terrimonas sp. NS-102; OX = 2171976 GN=DC498_19715 PE=4 SV=1
MVYLTRIEHFNAAHKLYNEAWSVEKNEEVFGKCANENWHGHNYDLYVTVKGNPDQDTGFIMDVKKLSLLINEFVLEKLDHLNLNEDVDFMKGQFCSTENLAVGIWNQLANRLPAGVQLHCIKLYETPQIYVEYYGE

SEQ ID NO: 26368 - protein, 130 aa, unidentified
  source 1..130: note = Tersicoccus phoenicis
  REGION 1..130: note = tr|A0A1R1L731|A0A1R1L731_9MICC 6-pyruvoyl tetrahydrobiopterin synthase OS=Tersicoccus phoenicis; OX = 554083 GN=BKD30_13440 PE=4 SV=1
MYRLTVRDHVMIAHSLPDPAFGPAQGLHGATFVVEATFHRVELNEHAIVLDIGVATAALAAVLADLAYRNLDEHPDLAGQLTTTERLARFVADRLAGHLADEMPGHGVTELDVVLREHPDAWAGYTRSLA

SEQ ID NO: 26369 - protein, 130 aa, unidentified
  source 1..130: note = Tersicoccus sp.
  REGION 1..130: note = tr|A0A1R1M331|A0A1R1M331_9MICC 6-pyruvoyl tetrahydrobiopterin synthase OS=Tersicoccus sp. Bi-70; OX = 1897634 GN=BGP79_03170 PE=4 SV=1
MYRLTVRDHVMIAHSLPDPAFGPAQGLHGATFVVEATFHRAELTEQAIVLDIGVATAALGAVLADLNYRNLDDHPAFAGRLTTTEHLARFVADRLAEHLARDLPGHGVTELDVVLREHPDAWAGYTRPVD

SEQ ID NO: 26370 - protein, 126 aa, Tessaracoccus sp.
  REGION 1..126: note = tr|A0A3M0G5Q9|A0A3M0G5Q9_9ACTN 6-carboxytetrahydropterin synthase OS=Tessaracoccus sp. JDX10 OX=2479848 GN=EAX62_10905 PE=4 SV=1
MYSLTVCDHIMIAHSLPDPRFGPAQGMHGATMAVEATWRRHELGPLSIVMDIGEATSMLATVLDALRYENLDEHPDFVGRLSTTETVARHISDKLRERFDESEFAGLQVLLREHPGAWATYDVNFG

SEQ ID NO: 26371 - protein, 141 aa, unidentified
  source 1..141: note = Testudinibacter aquarius
  REGION 1..141: note = tr|A0A4R3Y9Y8|A0A4R3Y9Y8_9PAST 6-carboxy-5,6,7,8-tetrahydropterin synthase; OS = Testudinibacter aquarius OX=1524974 GN=EDC16_10272 PE=3; SV = 1
MFKISKEFSFDMAHMLDGHDGKCKNLHGHTYKLQIELCAPLLTDAAKCGMVMDYSDLKNTVNELIIKPMDHAFIFDQNSAKESKVADLLQELDSKVFALPYRTTAELMAQFIFQRLQQAGLPISAVRLWETPTSFCEYTAS

SEQ ID NO: 26372 - protein, 155 aa, Tetrasphaera japonica
  REGION 1..155: note = tr|A0A077LVV4|A0A077LVV4_9MICO Uncharacterized protein OS=Tetrasphaera japonica T1-X7 OX=1194083; GN = BN12_2480003 PE=4 SV=1
MPHDLLPGGRRIVARARRREEPTMFAMTVRDHMMVAHSLRGEVFGPAQQLHGATFVVDATFRREDLDPSGVVLDIGLASEALRSLLSGLTYRNLDDVAELRGANTTTEVLARHVADRLAEAIDRGDLGDGARGVASIAVTLHESHVAWASYERDV

SEQ ID NO: 26373 - protein, 159 aa, Thalassobacillus cyri
  REGION 1..159: note = tr|A0A1H4GWY5|A0A1H4GWY5_9BACI 6-pyruvoyltetrahydropterin/6-carboxytetrahydropterin synthase OS=Thalassobacillus cyri OX=571932; GN = SAMN05421743_11950 PE=4 SV=1
MSLSKYGFTIVENLQKIDEDIKRHQLKYHNKRVMVSKEFTFDAAHHLHCYEGKCKNLHGHTYKVIFGISGYVDDIGIVIDFGDIKKIWKEQIEIHLDHRYLNDTLPAMNTTAENMVVWIYEQMEAALQTKTAGTRVEFVKLYETPTSYAEVKREWMENA

SEQ ID NO: 26374 - protein, 132 aa, Thalassobaculum litoreum
  REGION 1..132: note = tr|A0A1G7N4E0|A0A1G7N4E0_9PROT 6-pyruvoyl-tetrahydropterin synthase OS=Thalassobaculum litoreum DSM 18839 OX=1123362 GN=SAMN05660686_02075 PE=4; SV = 1
MFTVTVRDHVMIAHSFKGDLFGPAQRLHGATYVVDLRINAETLDANGVVVDIGAAHAALSDTLQPWAYRNLDELEEFAGVNTTTEFLAKTAFDRIAAVARSGGLGRPGNELASLEVVFNESHVASAGYRGTL

SEQ ID NO: 26375 - protein, 278 aa, unidentified; identical to SEQ ID NO: 23289
  source 1..278: note = Thalassobium sp.
  REGION 1..278: note = tr|A0A2G2AK91|A0A2G2AK91_9RHOB Uncharacterized protein OS=Thalassobium sp. OX=2030825 GN=COB58_00025 PE=4; SV = 1

SEQ ID NO: 26376 - protein, 118 aa, unidentified
  source 1..118: note = Thalassobius activus
  REGION 1..118: note = tr|A0A0P1IRV0|A0A0P1IRV0_9RHOB 6-carboxy-5,6,7,8-tetrahydropterin synthase; OS = Thalassobius activus OX=1715691 GN=queD PE=3 SV=1
MYRIAKEFAFSASHNLTDLPEGHPCKRVHGHNYVVTLELASEELDDTGFIVDVKELNALRDWIDDTLDHRHLNEVFDHPNVTTEWLCKVIFDWCKARWCQTSAVKIQETPKIWAEYRP

SEQ ID NO: 26377 - protein, 136 aa, Thalassobius sp.
  REGION 1..136: note = tr|A0A2E9GC37|A0A2E9GC37_9RHOB 6-carboxy-5,6,7,8-tetrahydropterin synthase; OS = Thalassobius sp. OX=1979401 GN=CMO01_29195 PE=3 SV=1
MRLSVYRKEHFNAAHRLHNPNWSDEKNKEVFGLCNNPNFHGHNYDLIVKVTGEVDPETGYVIDLKILKKIIREEVVSKFDHKNLNLDTKEFKELNPTAENIAYVIYNKIRARLEKKFDLNITLYETERNFVEYPAS

SEQ ID NO: 26378 - protein, 139 aa, Thalassobius sp.
  REGION 1..139: note = tr|A0A2E9G9G4|A0A2E9G9G4_9RHOB 6-carboxytetrahydropterin synthase QueD OS=Thalassobius sp. OX=1979401 GN=CMO01_24590 PE=4 SV=1
MVHICRKEHFNAAHKLYNPNWSRERNEEVFGPCANENWHGHNFELIVTVKGQPDPETGFVIDLKVLGKIIKENIISKVDHKNLNLDVEFMKGKLTSCENLVLEFWKILEYQLSKVSDNAKLHCLELIETNKNSVKYYGE

SEQ ID NO: 26379 - protein, 117 aa, Thalassococcus halodurans
  REGION 1..117: note = tr|A0A1H5TKS9|A0A1H5TKS9_9RHOB 6-carboxy-5,6,7,8-tetrahydropterin synthase; OS = Thalassococcus halodurans OX=373675; GN = SAMN04488045_0657 PE=3 SV=1
MFRISKEFHFSASHQLEHLPADHQCARLHGHNYIVVVELAAAELNEDGFVRDYHELKPLKTYIDDTFDHRHLNDVLDVPSTAENMAKHFFDWCRARWPETSAVKVSETPKTWAEYRP

SEQ ID NO: 26380 - protein, 131 aa, Thalassococcus sp.
  REGION 1..131: note = tr|A0A4V0Z9A7|A0A4V0Z9A7_9RHOB Uncharacterized protein OS=Thalassococcus sp. S3 OX=2017482 GN=CFI11_04855; PE = 4 SV=1
MFAVEVRDHIMIAHTLPSEVFGPAQGMHGATFTVDAAFFTEDLDAHGLVVDIGLATETLARTLAPLRYKNLDEIPEFKGKFTTTEFLCHHIFTAMSEHVRAGALKDDSRVRRLRISLHESHIARAWYEGDV

SEQ ID NO: 26381 - protein, 278 aa, Thalassolituus oleivorans
  REGION 1..278: note = tr|A0A1L6KD86|A0A1L6KD86_9GAMM Uncharacterized protein OS=Thalassolituus oleivorans OX=187493; GN = CN03_08800 PE=4 SV=1
MHLFVDQLTNVDFSYLDPHRGLVGETWWASAVLEGALDEQGMVCDFGIVKKTLRNWLDLELDHRLLVPIRSPALQHCLHDDKITLTWHFGHGQHLTMTAPQQAVALVDAEVINDLTVAEWSITQLSSSFPGSIEQLSLTFENENIHGANYHYSHGLKKHDGNCQRIAHGHRSRIEIFIDGERNPSLEQQWANTWEDIYLGTVEDLSNQTEEHLHFHYHAQQGEFTLSLPKDCCYLMDTDTTVELIAAHLAQEIKRDHPSVEVCVRAFEGVNKGAMVAL

SEQ ID NO: 26382 - protein, 278 aa, Thalassolituus oleivorans; identical to SEQ ID NO: 26381
  REGION 1..278: note = tr|W8FX91|W8FX91_9GAMM Uncharacterized protein; OS = Thalassolituus oleivorans R6-15 OX=1208320; GN = R615_08150 PE=4 SV=1

SEQ ID NO: 26383 - protein, 278 aa, Thalassolituus sp.
  REGION 1..278: note = tr|A0A558NM59|A0A558NM59_9GAMM Uncharacterized protein OS=Thalassolituus sp. C2-1 OX=2597518; GN = FOT50_08565 PE=4 SV=1
MQLFVEQLTNVDFSYLDAKRGLVGETWWASAVLDGALDEQGMVCDFGIVKKTLRNWLDDELDHRLLVPVQSPALTLKHSGDIIELSWQYDNGDLLEMRAPRQAVALVDAEHIDANSVAHWCREQLRSHFPVNVEQLTLSFVAEDIDDAFYHYSHGLKKHNGNCQRIAHGHRSRIQIWLDDERSSTLEQQWAERWADIYLGSTEDLISSDNNQLLFRYSAQQGEFELSLPASRNYMMNTDTTVEFIARHLADTIKQQHPDSQVRVRAFEGVNKGAIAEA

SEQ ID NO: 26384 - protein, 303 aa, Thalassomonas actiniarum
  REGION 1..303: note = tr|A0A0D8CX59|A0A0D8CX59_9GAMM 6-pyruvoyl tetrahydropterin synthase OS=Thalassomonas actiniarum; OX = 485447 GN=SG35_12580 PE=4 SV=1
MQLFVNDLTVIDFSYLCKHRGIVGESWIVDVLLDGDLNEQSMVLDFAIVKKQIKAIIDDAVDHKLLLPNKESRLRVTNSVDNDQHEYVDFDSDVGSYYLQSPKCAFAKIDSEAVTIAAVTAHLQTIIKQQLPGNIQGLTLNLRPEKIDGFYYHYTHGLKKHDGNCQRIAHGHRSKIQLYKNDMRSISLEKNWCQRWQDIYLASEEDRSSFEQIQLSPQAKAALDKETSAQDEKAPGHQYFAYHAPQGRFDIAVPSGILEVVDCDSTVELLADYIARQLKKNSPQDNFKVVAFEGVAKGAIANV

SEQ ID NO: 26385 - protein, 292 aa, Thalassomonas sp.
  REGION 1..292: note = tr|A0A553FJV7|A0A553FJV7_9GAMM Uncharacterized protein OS=Thalassomonas sp. M1454 OX=2594477; GN = FNN08_04940 PE=4 SV=1
MQLFVNDLTVIDFSYLCSDRGVVGESWIVDVLLSGDLNAESMVLDFGIVKKQIKAIIDEAVDHKLVLPMQNPDLKVTESHRDNHLFVDFDITDNELYLHSPAQAFAQIDTDKITEESVTRYLEVVIKQQLPENVQGLTLNLRPEKIEGSYYHYTHGLKKHDGNCQRIAHGHRSTINIFENDIRSVELEQKWCKRWQDIYLASDVDSIKLEQVELSIQAKSKLQPDHQFFSYYAPQGRFDIAVRNKRLEVVDCDSTVELLADYIARQLKQENLNNTYKVVAFEGVGKGAIASV

SEQ ID NO: 26386 - protein, 306 aa, Thalassomonas viridans
  REGION 1..306: note = tr|A0A0D8DDE4|A0A0D8DDE4_9GAMM 6-pyruvoyl tetrahydropterin synthase OS=Thalassomonas viridans; OX = 137584 GN=SG34_11455 PE=4 SV=1
MQLFVNDLTVIDFSYLCKQRGIVGESWIVDVLLDGDLNEQSMVLDFAIVKKQIKAIIDDAVDHKLLLPNKEGALRVTDSIDNDGHEYVDFAAVVGSYYLQSPKCAFAKIDSEAITIEAVTAHLQTIIKQQLPGNIQGLTLNLRPEKIDGFYYHYTHGLKKHDGNCQRIAHGHRSKIQLYKNDMRSISLEKNWCKRWQDIYLASEEDRSSFEQIQLSAVAKEKLAEAKATQKASGEKVSGHQYFAYHAPQGRFDIAVPENILEVVDCDSTVELLADYIARQLKKTSPGDNFKVVAYEGVAKGAIANV

SEQ ID NO: 26387 - protein, 118 aa, unidentified
  source 1..118: note = Thalassospira alkalitolerans
  REGION 1..118: note = tr|A0A1Y2L776|A0A1Y2L776_9PROT 6-carboxy-5,6,7,8-tetrahydropterin synthase; OS = Thalassospira alkalitolerans OX=1293890 GN=TALK_18790; PE = 3 SV=1
MFTITKQFAFSASHQLAGLDADHPCSRLHGHNYIVEVELRGASLDARGFVRDYRELGPLKTMIDDVFDHRHLNEVLGHDHPTAERLALFFYDWAHDRWPEVTAVRVSETPKTWAEYRP

SEQ ID NO: 26388 - protein, 118 aa, unidentified
  source 1..118: note = Thalassospira lohafexi
  REGION 1..118: note = tr|A0A2N3L6A5|A0A2N3L6A5_9PROT 6-carboxy-5,6,7,8-tetrahydropterin synthase; OS = Thalassospira lohafexi OX=744227 GN=queD PE=3 SV=1
MFTITKQFAFSASHQLAGLDADHPCSRLHGHNYIVEVELKGATLDARGFVRDYRELGPLKRMIDDEFDHRHLNEVLGHDHPTAEQLALFFYDWAHDRWPEVSAVRVSETPKTWAEYRP

SEQ ID NO: 26389 - protein, 118 aa, Thalassospira lucentensis
  REGION 1..118: note = tr|A0A367VUX0|A0A367VUX0_9PROT 6-carboxy-5,6,7,8-tetrahydropterin synthase; OS = Thalassospira lucentensis MCCC 1A00383 = DSM 14000; OX = 1123365 GN=TH1_05450 PE=3 SV=1
MFTITKQFAFSASHQLAGLDADHPCSRLHGHNYIVEVELKDATLDARGFVRDYRELGPLKRMIDDEFDHRHLNEVLGHDHPTAENLALFFYDWAHDRWPEVSAVRVSETPKTWAEYRP

SEQ ID NO: 26390 - protein, 118 aa, Thalassospira lucentensis
  REGION 1..118: note = tr|A0A154L365|A0A154L365_9PROT 6-carboxy-5,6,7,8-tetrahydropterin synthase; OS = Thalassospira lucentensis OX=168935 GN=AUP42_04595 PE=3; SV = 1
MFTITKQFAFSASHQLAGLDADHPCARLHGHNYIVEVELRGAELDARGFVRDYRELGPLKKMIDDEFDHRHLNEVLGHDHATAERLALFFYEWAHDRWPEVSAVRVSETPKTWAEYRP

SEQ ID NO: 26391 - protein, 118 aa, unidentified
  source 1..118: note = Thalassospira marina
  REGION 1..118: note = tr|A0A2N3KRK9|A0A2N3KRK9_9PROT 6-carboxy-5,6,7,8-tetrahydropterin synthase; OS = Thalassospira marina OX=2048283 GN=queD PE=3 SV=1
MFRITKQFAFSASHVLGGLSPDHPCSRLHGHNYVVEVELQAETLDSRGFVRDYRELSPLKHLIDDEFDHRHLNDVFGHDHATAENLAKFFYDWAKDRWPEVSAVRVSETPKTWAEYRP

SEQ ID NO: 26392 - protein, 118 aa, unidentified
  source 1..118: note = Thalassospira mesophila
  REGION 1..118: note = tr|A0A1Y2L5D5|A0A1Y2L5D5_9PROT 6-carboxy-5,6,7,8-tetrahydropterin synthase; OS = Thalassospira mesophila OX=1293891 GN=TMES_07260 PE=3; SV = 1
MFRITKQFAFSASHVLGGLSADHPCARLHGHNYIVEVELQAETLDSRGFVRDYRELTPLKRLIDDEFDHRHLNDVLGHDHATAENLAKFFYDWARNRWDEVSAVRVSETPKTWAEYRP

SEQ ID NO: 26393 - protein, 119 aa, unidentified
  source 1..119: note = Thalassospira permensis
  REGION 1..119: note = tr|A0A074K586|A0A074K586_9PROT 6-carboxy-5,6,7,8-tetrahydropterin synthase; OS = Thalassospira permensis NBRC 106175 OX=1353532; GN = SMB34_19055 PE=3 SV=1
MMFTITKQFAFSASHQLAGLDADHPCSRLHGHNYIVEVELRGAELDARGFVRDYRELAPLKQMIDDEFDHRHLNEVLGHDHATAERLALFFYDWAHDRWPEVSAVRVSETPKTWAEYRP

SEQ ID NO: 26394 - protein, 118 aa, unidentified
  source 1..118: note = Thalassospira povalilytica
  REGION 1..118: note = tr|A0A2N3KEL0|A0A2N3KEL0_9PROT 6-carboxy-5,6,7,8-tetrahydropterin synthase; OS = Thalassospira povalilytica OX=732237 GN=queD PE=3 SV=1
MFTITKQFAFSASHQLAGLEADHPCSRLHGHNYIVEVELKGANLDARGFVRDYRELGPLKRLIDDEFDHRHLNEVLGHDHPTAEKLALFFYEWAHDRWPEVSAVRVSETPKTWAEYRP

SEQ ID NO: 26395 - protein, 118 aa, Thalassospira profundimaris
  REGION 1..118: note = tr|A0A367VH56|A0A367VH56_9PROT 6-carboxy-5,6,7,8-tetrahydropterin synthase; OS = Thalassospira profundimaris OX=502049 GN=TH8_13120 PE=3; SV = 1
MFTITKQFAFSASHQLAGLEADHPCSRLHGHNYIVEVELKGANLDARGFVRDYRELGPLKRLIDDEFDHRHLNEVLGHDHPTAEKLALFFYQWAHDRWPEVSAVRVSETPKTWAEYRP

SEQ ID NO: 26396 - protein, 118 aa, Thalassospira profundimaris
  REGION 1..118: note = tr|K2LEE1|K2LEE1_9PROT 6-carboxy-5,6,7,8-tetrahydropterin synthase; OS = Thalassospira profundimaris WP0211 OX=1177928; GN = TH2_09914 PE=3 SV=1
MFTITKQFAFSASHQLSGLEEDHPCARLHGHNYIVEVELKGADLDERGFVRDYRELGPLKRLIDDEFDHRHLNEVLGHDHPTAERLALFFYEWAQGRWPEVSAVRVSETPKTWAEYRP

SEQ ID NO: 26397 - protein, 118 aa, Thalassospira sp.
  REGION 1..118: note = tr|A0A419W1Y0|A0A419W1Y0_9PROT 6-carboxy-5,6,7,8-tetrahydropterin synthase; OS = Thalassospira sp. DSM 26710 OX=2035225 GN=CLY44_3959; PE = 3 SV=1
MFTITKQFAFSASHQLSGLEEDHPCARLHGHNYIVEVELKGAALDQRGFVRDYRELGPLKRLIDDEFDHRHLNEVLGHDHPTAERLALFFYEWAHDRWPEVSAVRVSETPKTWAEYRP

SEQ ID NO: 26398 - protein, 118 aa, Thalassospira sp.
  REGION 1..118: note = tr|A0A3C0FN32|A0A3C0FN32_9PROT 6-carboxy-5,6,7,8-tetrahydropterin synthase; OS = Thalassospira sp. OX=1912094 GN=queD PE=3 SV=1
MFTITKQFAFSASHQLSGLEEDHPCARLHGHNYIVEVELKGATLDERGFVRDYRELGPLKRLIDDAFDHRHLNEVLGHDHPTAERLALFFYEWAHDRWPEVSAVRVSETPKTWAEYRP

SEQ ID NO: 26399 - protein, 118 aa, Thalassospira xiamenensis
  REGION 1..118: note = tr|A0A367WF51|A0A367WF51_9PROT 6-carboxy-5,6,7,8-tetrahydropterin synthase; OS = Thalassospira xiamenensis OX=220697 GN=TH24_12055 PE=3; SV = 1
MFTITKQFAFSASHQLAGLDADHPCARLHGHNYIVEVELRGAELDARGFVRDYRELAPLKQMIDDEFDHRHLNKVLGHDHATAERLALFFYDWAHDRWPEVSAVRVSETPKTWAEYRP

SEQ ID NO: 26400 - protein, 118 aa, Thalassospira xiamenensis
  REGION 1..118: note = tr|A0A0B4XRN3|A0A0B4XRN3_9PROT 6-carboxy-5,6,7,8-tetrahydropterin synthase; OS = Thalassospira xiamenensis M-5 = DSM 17429 OX=1123366; GN = TH3_04335 PE=3 SV=1
MFTITKQFAFSASHQLAGLDADHPCARLHGHNYIVEVELRGAELDARGFVRDYRELAPLKKMIDDEFDHRHLNEVLGHDHATAERLALFFYDWAHDRWPEVSAVRVSETPKTWAEYRP

SEQ ID NO: 26401 - protein, 118 aa, Thalassospira xianhensis
  REGION 1..118: note = tr|A0A367UCH2|A0A367UCH2_9PROT 6-carboxy-5,6,7,8-tetrahydropterin synthase; OS = Thalassospira xianhensis MCCC 1A02616 OX=1177929; GN = TH5_10170 PE=3 SV=1
MFTITKQFAFSASHQLAGLDADHPCARLHGHNYIVEVELRGDSLDARGFVRDYSELGPLKKMIDDEFDHRHLNEVLGHDHATAERLALFFYEWAHDRWPEVSAVRVSETPKTWAEYRP

SEQ ID NO: 26402 - protein, 292 aa, unidentified
  source 1..292: note = Thalassotalea agarivorans
  REGION 1..292: note = tr|A0A1I0F387|A0A1I0F387_THASX 6-pyruvoyl tetrahydropterin synthase OS=Thalassotalea agarivorans; OX = 349064 GN=SAMN05660429_02028 PE=4 SV=1
MQLFVDDLTVIDFSYLCQQRGVVGESWIVDVVLDGDLNDQSMILDFGVVKKQIKAIIDDAVDHKLLLPIHSSALKVSDSTHQVDHEYVDFMATRGSLFLQSPKQAFAKIESKSIDIDSVTSHLTQVIAEQLPNNVQGLTLTLRPEVINSDYYHYTHGLKLHDGNCQRIAHGHRSKIGIYLNGQRSIDAEHAWCERWRDIYIASEEDQVDIDQIELSSYAMDNVSDQHKYFSYRAPQGRFDIAVMKNQLEIVDCDSTVELLADFIARTLNKQYKQEVKVVAYEGVAKGAIATV

SEQ ID NO: 26403 - protein, 293 aa, unidentified
  source 1..293: note = Thalassotalea euphylliae
  REGION 1..293: note = tr|A0A3E0TYL0|A0A3E0TYL0_9GAMM Uncharacterized protein OS=Thalassotalea euphylliae OX=1655234; GN = DXX94_01725 PE=4 SV=1
MQLFVNDLTVIDFSYLCEQRGIVGESWIVDVLLDGDLNEMSMVLDFGVVKKQIKAIIDDAVDHKLLLPTGSKMLRVTDSDVREGHEFVDFTSNRASYFLQSPICAFAKLECQAITIEAVTEHLIEVIQKQLPDNVKGLSINLRPEVIPSEFYHYTHGLKKHDGNCQRIAHGHRSKINLFKNEQADTELEAYWCERWRDIYLASIEDKVIKEEIELSAFAHDNLQPDHQYFAYMAPQGRFDIAVQEHVLEVVDCDSTVELLADYIGRQLKAEHPNDTIKVVAYEGVGKGAIASV

SEQ ID NO: 26404 - protein, 293 aa, unidentified
  source 1..293: note = Thalassotalea euphylliae
  REGION 1..293: note = tr|A0A3E0TQS7|A0A3E0TQS7_9GAMM Uncharacterized protein OS=Thalassotalea euphylliae OX=1655234; GN = DXX93_10175 PE=4 SV=1
MQLFVNDLTVIDFSYLCEQRGIVGESWIVDVLLDGDLNEMSMVLDFGVVKKQIKAIIDDAVDHKLLLPIGSEKLHVTNSDSREGHEFVDFICERASYFLQSPECAFAKLDCNAITIEAVTEHLIEVIQKQLPDNVKGLSINLRPEVIPSDFYHYTHGLKKHDGNCQRIAHGHRSKINLFKNDQADTELEAYWCERWRDIYLASIEDKVSKQEIELSAFAHDNLQPEHQYFAYMAPQGRFDIAVQEHVLEVVDCDSTVELLADYIGRQLKAEHPNDTIKVVAYEGVGKGAIANV

SEQ ID NO: 26405 - protein, 292 aa, unidentified
  source 1..292: note = Thalassotalea sp.
  REGION 1..292: note = tr|A0A516HGS4|A0A516HGS4_9GAMM Uncharacterized protein OS=Thalassotalea sp. PS06 OX=2594005; GN = FNC98_08265 PE=4 SV=1
MQLFVNDLTVIDFSYLCKDRGVVGESWIVDVILSGDLNAESMVLDFGIVKKQIKAIIDDAVDHKLLLPKDDNKLFVEQSDRDNHLYVDFYPQGMSSIHLQSPHCAFAQIPGDKVNEEGVTRYLVEVIKAQLPENVTGIELTLRPEAIDGFYYHYTHGLKKHDGNCQRIAHGHRSKINLFENDIRSLSLEKQWCNRWQDIYLATDSDAITQQQVELSKRGKQDLSDQHQCFSYYAPQGRFDIAIKDKLEVVDCDSTVELLADYIARQLKAENPENRYKVVAFEGVGKGAIGYV

SEQ ID NO: 26406 - protein, 292 aa, unidentified
  source 1..292: note = Thalassotalea sp.
  REGION 1..292: note = tr|A0A4U1B5G2|A0A4U1B5G2_9GAMM Uncharacterized protein OS=Thalassotalea sp. ZS-4 OX=2572245; GN = E8M12_10390 PE=4 SV=1
MQLFVNDLTVIDFSYLCRDRGVVGESWIVDVILSGDLNAESMVLDFGIVKKQIKAIIDDAVDHKLLLPVADNHLIISDSERDNHVYVDFYPQQLASIHLQSPQCAFAEIPDEQITESAVTRYLQAVIKAQLPENVKGIELTLRPEAIDGFYYHYTHGLKKHDGNCQRIAHGHRSKINLYENNIRSLSLEKQWCNRWQDIYLATDSDAISQQQVELSKRGLQDLTADHQCFSYYAPQGRFDIAIKDNLEVVDCDSTVELLADYIARQLKAERPDNDYKVVAFEGVGKGAIGNV

SEQ ID NO: 26407 - protein, 147 aa, Thauera aminoaromatica
  REGION 1..147: note = tr|A0A5C7T472|A0A5C7T472_9RHOO 6-carboxytetrahydropterin synthase QueD OS=Thauera aminoaromatica OX=164330 GN=queD PE=4 SV=1
MRITRRLEFDAGHRIPDHASQCRHLHGHRYALEVTLSGDIIKADGVPVNGMVMDFADVKRIANEYVVGPWDHAFLAYRGDHLVLDLLAAIPGHKTVVLDVVPTAENLAAEAFRILDPAYRDTYGNHLRLERVRLYETPNCWADALRD

SEQ ID NO: 26408 - protein, 150 aa, Thauera aminoaromatica
  REGION 1..150: note = tr|A0A5C7S936|A0A5C7S936_9RHOO 6-carboxytetrahydropterin synthase QueD OS=Thauera aminoaromatica OX=164330 GN=queD PE=4 SV=1
MRITRRLEFDAGHRIPDHASQCRHLHGHRYALEITLSGETIRRDGSPVNGMVMDFGDVKAIAKQQVVDVWDHAFLAYRGDIAVVAFLQSMPGHKTVILDVVPTAENLAAEAFRILDPAYRDIYGNHLRLERVRLFETPNCWADAVRAEQA

SEQ ID NO: 26409 - protein, 147 aa, Thauera aromatica
  REGION 1..147: note = tr|A0A2R4BLE5|A0A2R4BLE5_THAAR 6-carboxy-5,6,7,8-tetrahydropterin synthase OS=Thauera aromatica K172 OX=44139 GN=Tharo_1085 PE=3 SV=1
MRITRRLEFDAGHRIPDHASQCRHLHGHRYALEVTLSGEIIEADGLPVNGMVMDFADVKRIANALVVERWDHAFLVYRQDCKVLDFLASLPGHKTVVLDVVPTAENLAAEAFRILDPAYHDSYGNHLRLERVRLYETPNCWADALRS

SEQ ID NO: 26410 - protein, 147 aa, Thauera chlorobenzoica
  REGION 1..147: note = tr|A0A1H5VTM0|A0A1H5VTM0_9RHOO 6-carboxy-5,6,7,8-tetrahydropterin synthase OS=Thauera chlorobenzoica OX=96773 GN=Tchl_1049 PE=3 SV=1
MRITRRLEFDAGHRIPDHASQCRHLHGHRYALEITLSGEIIDADGLPVNGMVMDFADVKRIANALVVERWDHAFLVYRQDRKVLDFLASLPGHKTVVLDVVPTAENLAAEAFRILDPAYRDSYGNHLRLERVRLYETPNCWADALHG

SEQ ID NO: 26411 - protein, 132 aa, unidentified
  source 1..132: note = Thauera humireducens
  REGION 1..132: note = tr|A0A127K418|A0A127K418_9RHOO 6-pyruvoyl tetrahydropterin synthase OS=Thauera humireducens; OX = 1134435 GN=AC731_006930 PE=4 SV=1
MYSLTVRDHIMIAHSFRGEIFGLAQRVHGATYLIDATFQRTELDADGLVVDIGLANDTLRAVLAEFNFRNLDDEPAFAGRNTTTEFMARVVFDRLAAAIRDGRLGEGGRGLERLKVTLHESHIAWASYEGAL

SEQ ID NO: 26412 - protein, 147 aa, unidentified
  source 1..147: note = Thauera humireducens
  REGION 1..147: note = tr|A0A127K557|A0A127K557_9RHOO 6-carboxy-5,6,7,8-tetrahydropterin synthase OS=Thauera humireducens OX=1134435 GN=AC731_009075 PE=3 SV=1
MRITRRLEFDAGHRIPDHASQCRHLHGHRYAIEVTLSGEIIKADGLPVNGMVMDFADVKRIANECVVERWDHAFLVYRGDTQIMSLLSAIPDHKTVVLDVVPTAENLAAEAFRILDPAYRDTYGNHLRLERVRLYETPNCWADAVRA

SEQ ID NO: 26413 - protein, 147 aa, Thauera linaloolentis
  REGION 1..147: note = tr|N6Z0R1|N6Z0R1_9RHOO 6-carboxy-5,6,7,8-tetrahydropterin synthase OS=Thauera linaloolentis 47Lol = DSM 12138 OX=1123367 GN=C666_09855; PE = 3 SV=1
MRITRRLEFDAGHRIPDHASQCRHLHGHRYAIEVTLSGEIIEADGLPVNGMVMDFADVKRIANDFVVARWDHAFLVYRGDTQVMALLDAIPGHKTVVLDVVPTAENLAAEAFRILDPAYRDTYGNHLRLERVRLYETPNCWADAIRG

SEQ ID NO: 26414 - protein, 147 aa, Thauera phenylacetica
  REGION 1..147: note = tr|N6ZMQ4|N6ZMQ4_9RHOO Uncharacterized protein; OS = Thauera phenylacetica B4P OX=1234382 GN=C667_18100 PE=4; SV = 1
MRITRRLEFDAGHRIPDHASQCRHLHGHRYALEVTLSGDIIKADGVPVNGMVMDFADVKRIANEYVVGPWDHAFLAYRGDHLVLDMLAAIPGHKTVVLDVVPTAENLAAEAFRILDPAYRDTYGNHLRLERVRLYETPNCWADALRD

SEQ ID NO: 26415 - protein, 132 aa, Thauera phenylacetica
  REGION 1..132: note = tr|N6ZDB9|N6ZDB9_9RHOO Uncharacterized protein; OS = Thauera phenylacetica B4P OX=1234382 GN=C667_22139 PE=4; SV = 1
MYSLSVREHIMIAHSFRGEIFGPAQRVHGATYLVDACFQRGELDADGLVVDIGLAAETLKAVLAEFNFRNLDELEEFRGRNTTTEFMARVIFDRLAAAIRAGRLGPGARGLERLKVSLHESHVAWASYEGAL

SEQ ID NO: 26416 - protein, 132 aa, unidentified
  source 1..132: note = Thauera propionica
  REGION 1..132: note = tr|A0A235F0L1|A0A235F0L1_9RHOO Uncharacterized protein OS=Thauera propionica OX=2019431 GN=CGK74_08425; PE = 4 SV=1
MYALTVRDHIMIAHSFRGEIFGPAQRVHGATYLIDATFQRTELDADGLVVDIGLASDTLRSVLAEFNFRNLDDEPAFTGRNTTTEFMARVVFDRLAAAIRDGRLGEGGRGLERLKVTLHESHIAWASYEGAL

SEQ ID NO: 26417 - protein, 147 aa, unidentified
  source 1..147: note = Thauera propionica
  REGION 1..147: note = tr|A0A235EXU5|A0A235EXU5_9RHOO 6-carboxy-5,6,7,8-tetrahydropterin synthase OS=Thauera propionica OX=2019431 GN=queD PE=3 SV=1
MRITRRLEFDAGHRIPDHASQCRHLHGHRYAIEVTLSGEIIKADGLAVNGMVMDFADVKRIANELVVSQWDHAFLVYRDDTLVADFLAAVPGHKTVVLDVVPTAENLAAEAFRILDPAYRDTYGNHLRLERVRLYETPNCWADAVRA

SEQ ID NO: 26418 - protein, 132 aa, Thauera sp.
  REGION 1..132: note = tr|A0A0C3IZ35|A0A0C3IZ35_9RHOO Uncharacterized protein OS=Thauera sp. SWB20 OX=1572758 GN=PO78_2359 PE=4; SV = 1
MYSLTVREHIMIAHSFRGEIFGPAQRVHGATYLVDACFQRSELDADGLVVDIGLAAATLKAVLAEFNFRNLDELEEFRGRNTTTEFMARVIFDRLAATIRAGRLGPGAQGLERLKVSLHESHVAWASYEGAL

SEQ ID NO: 26419 - protein, 147 aa, Thauera sp.
  REGION 1..147: note = tr|A0A290ZJM8|A0A290ZJM8_9RHOO 6-carboxy-5,6,7,8-tetrahydropterin synthase OS=Thauera sp. K11 OX=2005884 GN=queD PE=3 SV=1
MRITRRLEFDAGHRIPDHASQCRHLHGHRYAIEVTLSGEIIKADGLPVNGMVMDFADVKRIANELVVSQWDHAFLVYRGDTLVADFLASVPGHKTVVLDVVPTAENLAAEAFRILDPAYRDTYGNHLRLERVRLYETPNCWADAVRG

SEQ ID NO: 26420 - protein, 132 aa, Thauera terpenica
  REGION 1..132: note = tr|S9ZAF6|S9ZAF6_9RHOO 6-pyruvoyl tetrahydropterin synthase OS=Thauera terpenica 58Eu OX=1348657; GN = M622_06545 PE=4 SV=1
MYALTVRDHIMIAHSFKGEVFGPAQRLHGATYLIDACFKRSELDADALVVDIGLASEALRSVLAGLNFRNLDDEPAFAGKNTTTEFMARVIFEHMAAAIKDGRLGEGGRGLEYLQVTLHESHIAWASYEGAL

SEQ ID NO: 26421 - protein, 147 aa, Thauera terpenica
  REGION 1..147: note = tr|T0B230|T0B230_9RHOO 6-carboxy-5,6,7,8-tetrahydropterin synthase OS=Thauera terpenica 58Eu OX=1348657 GN=M622_10125 PE=3 SV=1
MRITRRLELDAGHRIPDHASQCRHLHGHRYAIEVTLSGEIIKADGLPVNGMVMDFADVKRIANEFVVERWDHAFLVYRGDTTVMSLLEAIPGHKTVVLDVVPTAENLAAEAFRILDSAYHDVYANHLRLERVRLYETPNCWADATRA

SEQ ID NO: 26422 - protein, 123 aa, Thermanaeromonas toyohensis
  REGION 1..123: note = tr|A0A1W1VEG9|A0A1W1VEG9_9THEO 6-carboxy-5,6,7,8-tetrahydropterin synthase; OS = Thermanaeromonas toyohensis ToBE OX=698762; GN = SAMN00808754_0510 PE=3 SV=1
MVAVTHIFTFEAAHRLEGYNGDCARLHGHTYRLEVTVKGPVKADGMVIDFSQLKALVEERIIQRIDHQYLNELFPFNPTCENLLLHFWRELEEALKILPHLTLKRLVLWESPFAYAEMEDDKG

SEQ ID NO: 26423 - protein, 125 aa, unidentified
  source 1..125: note = Thermanaerothrix daxensis
  REGION 1..125: note = tr|A0A0P6XU88|A0A0P6XU88_9CHLR 6-pyruvoyl tetrahydropterin synthase OS=Thermanaerothrix daxensis; OX = 869279 GN=SE15_10830 PE=4 SV=1
MYRVAVSRSFIAQHFLIGGDWGAENLPHAHAYRVEVEVSGEQLDANFYLMDIVALEAALESQVARYRNRLLNDLPEFAGVNPSLEFFARLLCENIAHSLPAAGLSHLRVRLWEHENAWASYEMAL

SEQ ID NO: 26424 - protein, 121 aa, Thermanaerovibrio acidaminovorans
  REGION 1..121: note = tr|D1B660|D1B660_THEAS 6-carboxy-5,6,7,8-tetrahydropterin synthase; OS = Thermanaerovibrio acidaminovorans (strain ATCC 49978 / DSM 6589 / Su883) OX=525903 GN=Taci_1270PE=3 SV=1
MKLKRRFSFSAAHWLPRYKGRCEALHGHTYSFVITLEGSPDPEGMIMDFTELKGLVEEMVLSRLDHSCLNDLLEQPTAEALSRWIFEALADRLEAPNRRLESVEVFESPDCSALFLREDRR

SEQ ID NO: 26425 - protein, 121 aa, Thermanaerovibrio velox
  REGION 1..121: note = tr|H0UQ26|H0UQ26_9BACT 6-carboxy-5,6,7,8-tetrahydropterin synthase; OS = Thermanaerovibrio velox DSM 12556 OX=926567; GN = TheveDRAFT_0494 PE=3 SV=1
MILKRSFSFDAAHHLPRYKGRCEALHGHTYRFTVALQGSPDHEGMVMDFTELKALVRELVVSRLDHTCLNDLIEQPTAENIARWIFQTLAEPLKAPGRSLAWVEVFEGPESSAVFMAEDLR

SEQ ID NO: 26426 - protein, 135 aa, Thermoactinomyces sp.
  REGION 1..135: note = tr|A0A151YXQ2|A0A151YXQ2_9BACL 6-pyruvoyl tetrahydrobiopterin synthase OS=Thermoactinomyces sp. AS95; OX = 1811386 GN=AYX07_10785 PE=4 SV=1
MRGKYTMVKHFWISCAHSIPGAGKCERIHGHNYKVTFCVEGFELDEKHMLIDFRQVKHAIEKKYDHHYLNDFPEFDPEQTGVAPSTEKVAEVFFRIIEGLCRQKSNQPRCKWVEVEETNEAYARFERVDEQEEKS

SEQ ID NO: 26427 - protein, 128 aa, Thermoactinomyces sp.
  REGION 1..128: note = tr|A0A1K1W8T9|A0A1K1W8T9_9BACL 6-carboxy-5,6,7,8-tetrahydropterin synthase; OS = Thermoactinomyces sp. DSM 45891 OX=1761907; GN = SAMN04487866_10532 PE=3 SV=1
MHGKYTLTKYFWISCAHSVPGAGKCERIHGHNYKVTFCVDGTKLDESQMLIDFRQVKHVIEKKYDHHLLNDFPEFNPEVGGAAPSTEKVAEIFFCAIEQLCEKKSNQPILRWVEVQETNEAFARFERA

SEQ ID NO: 26428 - protein, 128 aa, Thermoactinomyces vulgaris; identical to SEQ ID NO: 21572
  REGION 1..128: note = tr|A0A0N0Y9T9|A0A0N0Y9T9_THEVU 6-carboxy-5,6,7,8-tetrahydropterin synthase; OS = Thermoactinomyces vulgaris OX=2026 GN=ADL26_14995 PE=3; SV = 1

SEQ ID NO: 26429 - protein, 122 aa, Thermoanaerobacter brockii
  REGION 1..122: note = tr|E8UUL1|E8UUL1_THEBF 6-carboxy-5,6,7,8-tetrahydropterin synthase; OS = Thermoanaerobacter brockii subsp. finnii (strain ATCC 43586 / DSM 3389 / AKO-1) OX=509193 GN=Th ebr_0332 PE=3; SV = 1
MKVTKIFTFDSAHNLINYNGKCEELHGHTYKLEVTVEGKPDGEGMVIDFVKLKEIVNEKVVKKLDHKYLNEVLGFNTTCENILLWIWKELEPVFKGDNYHLYKLRLWETPTSFAEITEKDLV

SEQ ID NO: 26430 - protein, 122 aa, Thermoanaerobacter ethanolicus; identical to SEQ ID NO: 18601
  REGION 1..122: note = tr|C7ISM1|C7ISM1_THEET 6-carboxy-5,6,7,8-tetrahydropterin synthase; OS = Thermoanaerobacter ethanolicus CCSD1 OX=589861; GN = TeCCSD1DRAFT_1282 PE=3 SV=1

SEQ ID NO: 26431 - protein, 122 aa, Thermoanaerobacter italicus
  REGION 1..122: note = tr|D3T4X6|D3T4X6_THEIA 6-carboxy-5,6,7,8-tetrahydropterin synthase; OS = Thermoanaerobacter italicus (strain DSM 9252 / Ab9); OX = 580331 GN=Thit_2036 PE=3 SV=1
MKVTKIFTFDSAHNLVNYNGKCEELHGHTYKLEVTVEGKPDGEGMVIDFVKLKEIVNEKVVKKLDHKYLNEVLGFNTTCENILLWMWKELEAVLKGDNYHLYKLRLWETPTSFTEITKKDLV

SEQ ID NO: 26432 - protein, 121 aa, Thermoanaerobacter kivui
  REGION 1..121: note = tr|A0A097ATU7|A0A097ATU7_THEKI 6-carboxy-5,6,7,8-tetrahydropterin synthase; OS = Thermoanaerobacter kivui OX=2325 GN=TKV_c21090 PE=3 SV=1
MKVTKIFTFDSAHNLVNYNGKCEELHGHTYKLEVTVEGKPDEEGMVIDFVKLKEIVSEKVIKRLDHKYLNEVFEFNTTCENILLWMWNELKDVLTEDRYRLYKLKLWETSTSFAEITEEDL

SEQ ID NO: 26433 - protein, 122 aa, Thermoanaerobacter mathranii
  REGION 1..122: note = tr|D7ASB0|D7ASB0_THEM3 6-carboxy-5,6,7,8-tetrahydropterin synthase; OS = Thermoanaerobacter mathranii subsp. mathranii (strain DSM 11426 / CIP 108742 / A3) OX=583358 GN =Tmath_1993 PE=3; SV = 1
MKVTKIFTFDSAHNLLNYNGKCEELHGHTYKLEVTVEGKPDGEGMVIDFVKLKEIVNEKVVKKLDHKYLNEVLGFNTTCENILLWIWKELEPVFKGDNYHLYKLRLWETPTSFAEITEKDLV

SEQ ID NO: 26434 - protein, 122 aa, Thermoanaerobacter pseudethanolicus; identical to SEQ ID NO: 26429
  REGION 1..122: note = tr|B0KCE8|B0KCE8_THEP3 6-carboxy-5,6,7,8-tetrahydropterin synthase; OS = Thermoanaerobacter pseudethanolicus (strain ATCC 33223 / 39E) OX=340099 GN=Teth39_0322 PE=3 SV= 1

SEQ ID NO: 26435 - protein, 122 aa, Thermoanaerobacter siderophilus
  REGION 1..122: note = tr|I9KSC1|I9KSC1_9THEO 6-carboxy-5,6,7,8-tetrahydropterin synthase; OS = Thermoanaerobacter siderophilus SR4 OX=880478; GN = ThesiDRAFT1_0826 PE=3 SV=1
MKVTKIFTFDSAHNLINYNGKCEELHGHTYKLEVTVEGKPDGEGMVIDFVKLKEIVNEKVVKKLDHKYLNEVLGFNTTCENILLWIWKELEPVLKGDNYHLYKLRLWETPTSFAEITEKDFV

SEQ ID NO: 26436 - protein, 122 aa, Thermoanaerobacter sp.
  REGION 1..122: note = tr|A0A0B3BBT7|A0A0B3BBT7_9THEO 6-carboxy-5,6,7,8-tetrahydropterin synthase; OS = Thermoanaerobacter sp. YS13 OX=1511746 GN=THYS13_24060; PE = 3 SV=1
MKVTKIFTFDSAHNLINYNGKCEELHGHTYKLEVTVEGKPDGEGMVIDFVKLKEIINEKVVKKLDHKYLNEVLEFNTTCENILLWIWKELEPVLKGDNYHLYKLRLWETPTSFAEITEKDFV

SEQ ID NO: 26437 - protein, 122 aa, Thermoanaerobacter sp.; identical to SEQ ID NO: 18601
  REGION 1..122: note = tr|A0A3B8MYZ2|A0A3B8MYZ2_THESB 6-carboxy-5,6,7,8-tetrahydropterin synthase; OS = Thermoanaerobacter sp. OX=1755 GN=queD PE=3 SV=1

SEQ ID NO: 26438 - protein, 122 aa, Thermoanaerobacter thermocopriae; identical to SEQ ID NO: 26429
  REGION 1..122: note = tr|A0A117KJS6|A0A117KJS6_9THEO 6-carboxy-5,6,7,8-tetrahydropterin synthase; OS = Thermoanaerobacter thermocopriae OX=29350 GN=XD37_1942; PE = 3 SV=1

SEQ ID NO: 26439 - protein, 122 aa, Thermoanaerobacter thermohydrosulfuricus
  REGION 1..122: note = tr|A0A1G7KE55|A0A1G7KE55_THETY 6-carboxy-5,6,7,8-tetrahydropterin synthase; OS = Thermoanaerobacter thermohydrosulfuricus OX=1516; GN = SAMN04244560_00617 PE=3 SV=1
MKVTKIFAFDSAHNLINYNGKCEELHGHTYKLEVTVEGKPDGEGMVIDFVKLKEIVNEKVVKKLDHKYLNEVLGFNTTCENILLWIWKELEPVLKGDNYHLYKLRLWETPTSFAEITEKDFV

SEQ ID NO: 26440 - protein, 122 aa, Thermoanaerobacter thermohydrosulfuricus; identical to SEQ ID NO: 26439
  REGION 1..122: note = tr|M8CX45|M8CX45_THETY 6-carboxy-5,6,7,8-tetrahydropterin synthase; OS = Thermoanaerobacter thermohydrosulfuricus WC1 OX=1198630; GN = TthWC1_1490 PE=3 SV=1

SEQ ID NO: 26441 - protein, 122 aa, Thermoanaerobacter uzonensis
  REGION 1..122: note = tr|A0A1M4YSP6|A0A1M4YSP6_9THEO 6-carboxy-5,6,7,8-tetrahydropterin synthase; OS = Thermoanaerobacter uzonensis DSM 18761 OX=1123369; GN = SAMN02745195_01809 PE=3 SV=1
MKVTKTFTFDSAHNLINYNGKCEELHGHTYKLEVTVEGKPDGEGMIIDFVKLKEIVNEKVVKKLDHKYLNEVLEFNTTCENILLWMWKELEPVLKGDNYYLYKLRLWETPTSFAEITEKDFV

SEQ ID NO: 26442 - protein, 122 aa, Thermoanaerobacter wiegelii
  REGION 1..122: note = tr|G2MX31|G2MX31_9THEO 6-carboxy-5,6,7,8-tetrahydropterin synthase; OS = Thermoanaerobacter wiegelii Rt8.B1 OX=697303; GN = Thewi_2309 PE=3 SV=1
MKVTKIFTFDSAHNLINYNGKCEELHGHTYKLEVTVEGKPDGEGMVIDFVKLKEIVNEKVVKKLDHKYLNEVLEFNTTCENILLWIWKELEPVLKGDNYHLYKLRLWETPTSFAEITEKDFV

SEQ ID NO: 26443 - protein, 123 aa, Thermoanaerobacterium aotearoense
  REGION 1..123: note = tr|W9EG28|W9EG28_9FIRM 6-carboxy-5,6,7,8-tetrahydropterin synthase; OS = Thermoanaerobacterium aotearoense SCUT27 OX=1421016; GN = V518_1106 PE=3 SV=1
MKVTKSFTFDSAHNLTKYNGKCENLHGHTYKLEVTVEGGIDDEGMVIDFAQLKAIVDSEVVKKLDHAYLNDVLGFNTTCENIAMWMWEKLDPLLKSDRFHLFSIRLWETPTSFAEVTIQDFTK

SEQ ID NO: 26444 - protein, 123 aa, Thermoanaerobacterium saccharolyticum; identical to SEQ ID NO: 26443
  REGION 1..123: note = tr|I3VTY1|I3VTY1_THESW 6-carboxy-5,6,7,8-tetrahydropterin synthase; OS = Thermoanaerobacterium saccharolyticum (strain DSM 8691 / JW/SL-YS485) OX=1094508 GN=Tsac_0960 P E=3 SV=1

SEQ ID NO: 26445 - protein, 123 aa, Thermoanaerobacterium sp.
  REGION 1..123: note = tr|A0A1X2FY28|A0A1X2FY28_9FIRM 6-carboxy-5,6,7,8-tetrahydropterin synthase; OS = Thermoanaerobacterium sp. PSU-2 OX=1930849; GN = BVF91_07035 PE=3 SV=1
MKVTKVFTFDSAHNLTSYNGKCENLHGHTYKLEVTVEGSIDDEGMVIDFAHLKAIVDSEVVKKLDHAYLNEVLGFNTTCENIAVWMWRKLDPLLKSERFHLFSIRLWETPTSFAEVTIQDFIK

SEQ ID NO: 26446 - protein, 125 aa, Thermoanaerobacterium sp.
  REGION 1..125: note = tr|A0A285BGJ3|A0A285BGJ3_9FIRM 6-carboxy-5,6,7,8-tetrahydropterin synthase; OS = Thermoanaerobacterium sp. RBIITD OX=1550240; GN = SAMN05660242_1971 PE=3 SV=1
MKVTKIFTFDSAHNLTKYNGKCENLHGHTYKLEVTVEGELDDEGMVIDFEILKDIVNKVIIDKLDHHYLNEVFGFNTTCENIITWMWKELKPELKSERYELYKIKLWETPTSFAEITSNDVYHKD

SEQ ID NO: 26447 - protein, 123 aa, Thermoanaerobacterium thermosaccharolyticum
  REGION 1..123: note = tr|D9TRD3|D9TRD3_THETC 6-carboxy-5,6,7,8-tetrahydropterin synthase; OS = Thermoanaerobacterium thermosaccharolyticum (strain ATCC 7956 / DSM 571 / NCIB 9385 / NCA 3814)OX=580327; GN = Tthe_0384 PE=3 SV=1
MKVTKVFTFDSAHNLTKYNGKCENLHGHTYKLEVTVEGSVNDEGIVIDFAELKAIVENQVVKKLDHMYLNDVLGFNTTCENIITWAWKILEPLLRTERYHLYSIKLWETPTNFAEVDIKDFEK

SEQ ID NO: 26448 - protein, 123 aa, Thermoanaerobacterium thermosaccharolyticum
  REGION 1..123: note = tr|A0A2G1CM35|A0A2G1CM35_THETR 6-carboxy-5,6,7,8-tetrahydropterin synthase; OS = Thermoanaerobacterium thermosaccharolyticum OX=1517; GN = BFT35_05710 PE=3 SV=1
MKVTKVFTFDSAHNLTKYNGKCENLHGHTYKLEVTVEGSVNNEGIIIDFAELKSIVEDEVVKKLDHMYLNDVLGFNTTCENIITWAWKILEPLLRTERYHLYSIKLWETPTNFAEVDIKDFEK

SEQ ID NO: 26449 - protein, 123 aa, Thermoanaerobacterium xylanolyticum
  REGION 1..123: note = tr|F6BGC0|F6BGC0_THEXL 6-carboxy-5,6,7,8-tetrahydropterin synthase; OS = Thermoanaerobacterium xylanolyticum (strain ATCC 49914 / DSM 7097 / LX-11) OX=858215 GN=Thexy_0 282 PE=3 SV=1
MKVTKVFTFDSAHNLTRYNGKCENLHGHTYKLEVTVEGSIDDEGMVIDFAHLKAIVDSEVVKKLDHAYLNEVLGFNTTCENIAIWMWRKLDPLLKDDRFHLFSIRLWETPTSFAEVTIQDFTK

SEQ ID NO: 26450 - protein, 153 aa, unidentified
  source 1..153: note = Thermoanaerobaculum aquaticum
  REGION 1..153: note = tr|A0A062XSK4|A0A062XSK4_9BACT Uncharacterized protein OS=Thermoanaerobaculum aquaticum OX=1312852; GN = EG19_02225 PE=4 SV=1
MGSFRVAKQFTFDAGHRLVSHPELCRHLHGHTYRVEVVLEAPSLDPNAMVCDYKALSLLVRSVLAPLDHAMILWREDPLRGVLEQAGERVVVLDAEPSAEVLAQHLFSEIKKVLAQAAAEPQRVAPYRWRPEIRLVSVRLWETPTTWAEYSEA

SEQ ID NO: 26451 - protein, 118 aa, Thermobifida halotolerans
  REGION 1..118: note = tr|A0A399FYY2|A0A399FYY2_9ACTN 6-carboxy-5,6,7,8-tetrahydropterin synthase; OS = Thermobifida halotolerans OX=483545 GN=NI17_20285 PE=3; SV = 1
MEIFREFGFEAAHRLPRVPEGHKCARLHGHSYRVIVHVDAPVDPESGWVMDFGDIKRAFKPIRDRLDHYYLNELDGLENPTSENLARWIWERLRPVLPALSAVTVRETCTSGCTYQGE

SEQ ID NO: 26452 - protein, 141 aa, Thermobrachium celere
  REGION 1..141: note = tr|R7RTM8|R7RTM8_9CLOT 6-carboxy-5,6,7,8-tetrahydropterin synthase; OS = Thermobrachium celere DSM 8682 OX=941824 GN=TCEL_00865; PE = 3 SV=1
MLSVSKEFTFEAAHMLSEHEGECKNLHGHSYKLIVEATGDIQNGMIIDFKDLKNIVKETIIDKIDHSFIYYNSSKDDVEHKIAEVLKGSGKKIFEVNYRPTAENMAMHFYNILNDNLKDKGLKVVSITLYETQKSFAKVVG

SEQ ID NO: 26453 - protein, 117 aa, Thermobrachium celere
  REGION 1..117: note = tr|R7RSN8|R7RSN8_9CLOT 6-carboxy-5,6,7,8-tetrahydropterin synthase; OS = Thermobrachium celere DSM 8682 OX=941824 GN=TCEL_00447; PE = 3 SV=1
MILIKEFEFDAAHNLIHYHGKCERLHGHTYKLVVKLEGEPDHEGMVFDFVELKKIVKERIIDKFDHAYLNDIIEQPTAENIAVYVWNALYDVLKRDNCRLYEVEVWETKTSGIVYRG

SEQ ID NO: 26454 - protein, 116 aa, Thermocrinis albus
  REGION 1..116: note = tr|D3SPE9|D3SPE9_THEAH 6-carboxy-5,6,7,8-tetrahydropterin synthase; OS = Thermocrinis albus (strain DSM 14484 / JCM 11386 / HI 11/12) OX=638303 GN=Thal_0401 PE=3 SV=1
MPWRVVVKRQFNAAHFLTDYHGAPEPLHGHTWCVEIHIRADSLDKGGMGVDFVEIDRFLKDILPDYKLLNEVFEFSPSAENVARWLFEKVKERFPTLEKVVVWETENCGAEYWEEE

SEQ ID NO: 26455 - protein, 164 aa, Thermocrinis albus
  REGION 1..164: note = tr|D3SNL6|D3SNL6_THEAH Uncharacterized protein; OS = Thermocrinis albus (strain DSM 14484 / JCM 11386 / HI 11/12) OX=638303 GN=Thal_0116 PE=4 SV=1
MRWQISKTFRFEAGHRVWKQNLTYGRGAQFTVTKETPINKCVNLHGHSYLLEVVLGSDYLSEQEMVMDFHHIKSALKDLIETMDHSFIIDVHDPMYPELKELAEKYGSLKIFPVDFCPTAEALAKFFYDFLTERLREAGLLGEVKVVKVTLWETATSKAEYYGE

SEQ ID NO: 26456 - protein, 114 aa, Thermocrinis minervae
  REGION 1..114: note = tr|A0A1M6QEW0|A0A1M6QEW0_9AQUI 6-carboxy-5,6,7,8-tetrahydropterin synthase; OS = Thermocrinis minervae OX=381751 GN=SAMN05444391_0209; PE = 3 SV=1
MPWLIRVKRKFNAAHYLTNYHGKPEPLHGHTWTVEVFIRADSLDEGGMGYDFVEIDRRLKELLPDYKLLNEVFDFSPSAENVARWLYYKLKQEYPTLEKVVVWETEECGTEFWE

SEQ ID NO: 26457 - protein, 164 aa, Thermocrinis minervae
  REGION 1..164: note = tr|A0A1M6RT25|A0A1M6RT25_9AQUI 6-pyruvoyltetrahydropterin/6-carboxytetrahydropterin synthase OS=Thermocrinis minervae OX=381751; GN = SAMN05444391_0759 PE=4 SV=1
MVKWVISKTFRFEAGHRVWKQNLTMGRGSVFTKEIPQNKCINLHGHSYVLEVYLGSDTLSQQEMVMDFYHLKNALKDLIEEIDHSFIIDVHDPIYPELKAVAEKYGAFKIFPVEFCPTAEALAKFFYDFLKEKLKEAGLLEEVKVVKVVLWETATSKAEYSECT

SEQ ID NO: 26458 - protein, 166 aa, Thermocrinis ruber
  REGION 1..166: note = tr|W0DA58|W0DA58_9AQUI 6-carboxy-5,6,7,8-tetrahydropterin synthase; OS = Thermocrinis ruber OX=75906 GN=THERU_00315 PE=4 SV=1
MKWQISKVFRFEAGHRVWKQNLTYGRGADFTIGKEIPVNKCVNLHGHSYVLEVVLGSDTLSEQDMVIDFYHVKNALKELIDTIDHSFIIDKADPMYPELKELAEKYGALKLFPVDFCPTAEALAKFFYDFLEDKLRAVGLLEEVKVIKVVLWETATSKAEYYGNVL

SEQ ID NO: 26459 - protein, 115 aa, Thermocrinis ruber
  REGION 1..115: note = tr|W0DG56|W0DG56_9AQUI 6-carboxy-5,6,7,8-tetrahydropterin synthase; OS = Thermocrinis ruber OX=75906 GN=THERU_03290 PE=3 SV=1
MPWLLRVKKKFNAAHFLTNYHGKPEPLHGHTWAVEVFLKVHTLDEGGMGEDFVEISKFLDEILPDYKLLNEVFDFSPSAENVAKWLYERVKERYPTVQKVVVWETEDCGAEYFEV

SEQ ID NO: 26460 - protein, 128 aa, Thermocrispum agreste
  REGION 1..128: note = tr|A0A2W4JGL5|A0A2W4JGL5_9PSEU 6-carboxytetrahydropterin synthase OS=Thermocrispum agreste OX=37925 GN=DIU77_09775 PE=4 SV=1
MFTVTVRDHLMIAHSFRGEVFGPAQRLHGATYVVDATFSGPELTEDGILLDIGLAARELSAVVAELNYRNLDDEPAFAGRNTSTEFLAKVIADRLADRIAHLAMPNLTGLKVTLRESHVAWASYERQL

SEQ ID NO: 26461 - protein, 123 aa, unidentified
  source 1..123: note = Thermodesulfatator autotrophicus
  REGION 1..123: note = tr|A0A177E8I4|A0A177E8I4_9BACT 6-carboxy-5,6,7,8-tetrahydropterin synthase; OS = Thermodesulfatator autotrophicus OX=1795632; GN = TH606_02630 PE=3 SV=1
MFELTVRDEFAAAHYLRNYPGACERLHGHNWKVEIAVRGEKLNEIDVLVDFKNLKKHLKEVLEELDHQNLNEHPAFQDQNPSSENIARYIFEKLAPKMASYGVELVRVTVCETERSCASYLKD

SEQ ID NO: 26462 - protein, 123 aa, Thermodesulfatator indicus
  REGION 1..123: note = tr|F8ACX9|F8ACX9_THEID 6-carboxy-5,6,7,8-tetrahydropterin synthase; OS = Thermodesulfatator indicus (strain DSM 15286 / JCM 11887 / CIR29812) OX=667014 GN=Thein_0896 PE =3 SV=1
MFELTVKDEFAAAHYLRDYPGACERLHGHNWKVEIAVRGEKLNEIDVLIDFKDLKKHLKEVLDELDHQNLNEHPAFQDKNPSSENIARYIFEKLAPKLKPYGVELIRVTVCETERACASFVKA

SEQ ID NO: 26463 - protein, 123 aa, Thermodesulfatator sp.
  REGION 1..123: note = tr|A0A432UIB3|A0A432UIB3_9BACT 6-carboxy-5,6,7,8-tetrahydropterin synthase; OS = Thermodesulfatator sp. OX=1874629 GN=queD PE=3 SV=1
MYQVFIKTHFSSAHFLRNYPGNCEKLHGHNWDVEVAVVAHSLDEIDVAIDFRDLKKIVNSVVERLDHKNLNELPEFASRNPSSERLAQFIYKEVKKGLEAFPQVNPHSVKVCETPSSGVIYSE

SEQ ID NO: 26464 - protein, 123 aa, Thermodesulfatator sp.
  REGION 1..123: note = tr|A0A432UFT7|A0A432UFT7_9BACT 6-carboxy-5,6,7,8-tetrahydropterin synthase; OS = Thermodesulfatator sp. OX=1874629 GN=queD PE=3 SV=1
MFELTVREEFSAAHQLRGYAGACEKLHGHNWRVEIRVQGEKLNHIGILLDFKELREVLREVIAELDHRFLNEHPAFRTQNPSSENLARYIYERLAEKLAGYPVRVSRVTVCETERACATYFPD

SEQ ID NO: 26465 - protein, 124 aa, unidentified
  source 1..124: note = Thermodesulfitimonas autotrophica
  REGION 1..124: note = tr|A0A3N5BJ18|A0A3N5BJ18_9THEO 6-carboxy-5,6,7,8-tetrahydropterin synthase; OS = Thermodesulfitimonas autotrophica OX=1894989; GN = EDD75_0508 PE=3 SV=1
MFELTVETSFAAAHQLEGHPSPCGRLHGHNWVVALTVAGEELAPSGMVVDFKVLKGVLQEVVAELDHRYLNELPFFRNGTPPTAENIARYIFLRATEKLSGQPGVRVRQVRVAESPSAWVVYRP

SEQ ID NO: 26466 - protein, 124 aa, unidentified
  source 1..124: note = Thermodesulfobacteria bacterium
  REGION 1..124: note = tr|A0A496QKL2|A0A496QKL2_9BACT 6-carboxy-5,6,7,8-tetrahydropterin synthase; OS = Thermodesulfobacteria bacterium OX=2202153 GN=queD PE=3; SV = 1
MFDIFIRTHFSAAHYLRNYPGNCEHLHGHNWDVEVVVRAEKLNKIDVGIDFRDLKKAVAGVLSELDHTNLNDHPRFKDKNPSSERLAEYIYSRVKEDLKPFSEIELARVSVCETSKTGVTYWED

SEQ ID NO: 26467 - protein, 148 aa, unidentified
  source 1..148: note = Thermodesulfobacteriales bacterium
  REGION 1..148: note = tr|A0A524JW48|A0A524JW48_9BACT 6-carboxytetrahydropterin synthase; OS = Thermodesulfobacteriales bacterium OX=2528040; GN = E4H21_01435 PE=4 SV=1
MEKVKIKEYVSLTKTYRFSAGHRLFIKSLSDEENFKIFDTCSNPNGHGHDYSIEVKLTGDIDPETGMIYSLEDLDKIMKLVIEDLDHKRLDIEVPYFENDQPTGENIAKYIWNKIKPSLSDKLIHLKLSETSNSYFEYYEEGNYPYER

SEQ ID NO: 26468 - protein, 140 aa, unidentified
  source 1..140: note = Thermodesulfobacteriales bacterium
  REGION 1..140: note = tr|A0A524JUA4|A0A524JUA4_9BACT 6-carboxytetrahydropterin synthase; OS = Thermodesulfobacteriales bacterium OX=2528040; GN = E4H21_01440 PE=4 SV=1
MGFKKLLTKKMEFSASHRYWNQEWSEEKNIEVFGKSAGPHGHGHNYNLEVTVEGEVDAETGMIINLYELKSVMTEVLVDFDHKHLNEDNPHFKSLVPTTENIARVIWELLEEKLENNPKCSLYRVRLYETQDLYADYWRK

SEQ ID NO: 26469 - protein, 124 aa, Thermodesulfobacterium commune
  REGION 1..124: note = tr|A0A075WSP4|A0A075WSP4_9BACT 6-carboxy-5,6,7,8-tetrahydropterin synthase; OS = Thermodesulfobacterium commune DSM 2178 OX=289377; GN = HL41_03300 PE=3 SV=1
MFRLKVQDSFSSAHFLRNYEGPCEKLHGHNWKVEVVVEGERLNELDMLIDFKELKKALKETLKSLDHRLLNDLPYFLEVNPSSERIAQYIFQDLKKKLSLYTNLKIKEVTVFETEKACATYFEP

SEQ ID NO: 26470 - protein, 124 aa, Thermodesulfobacterium commune; identical to SEQ ID NO: 26469
  REGION 1..124: note = tr|A0A101FIA3|A0A101FIA3_9BACT 6-carboxy-5,6,7,8-tetrahydropterin synthase; OS = Thermodesulfobacterium commune OX=1741 GN=queD PE=3 SV=1

SEQ ID NO: 26471 - protein, 123 aa, unidentified
  source 1..123: note = Thermodesulfobacterium geofontis
  REGION 1..123: note = tr|A0A2N7PME5|A0A2N7PME5_9BACT 6-carboxy-5,6,7,8-tetrahydropterin synthase; OS = Thermodesulfobacterium geofontis OX=1295609 GN=queD; PE = 3 SV=1
MFKLKVQDFFSSAHYLKDYHGPCENLHGHNWKVELVVEGSELNSTDILIDFSILKKILKETLAELDHKLLNEIPYFKNTNPSSERLAEYIFKKVKEKLSAYTNVKVKEVTVFETEKASATYYE

SEQ ID NO: 26472 - protein, 123 aa, unidentified
  source 1..123: note = Thermodesulfobacterium geofontis
  REGION 1..123: note = tr|F8C2N0|F8C2N0_THEGP 6-carboxy-5,6,7,8-tetrahydropterin synthase; OS = Thermodesulfobacterium geofontis (strain OPF15); OX = 795359 GN=TOPB45_1346 PE=3 SV=1
MFKLKVQDYFSSAHYLKDYKGPCEKIHGHNWKVELIVEGSELNSLDILIDFAILKKILKEVLFELDHKLLNEIPYFENINPSSERLAEYIFKKVKEKLSSYPNVKVKEVTVFETEKAGATYYE

SEQ ID NO: 26473 - protein, 125 aa, unidentified
  source 1..125: note = Thermodesulfobium acidiphilum
  REGION 1..125: note = tr|A0A2R4W0J2|A0A2R4W0J2_9FIRM 6-carboxy-5,6,7,8-tetrahydropterin synthase; OS = Thermodesulfobium acidiphilum OX=1794699 GN=TDSAC_0877; PE = 3 SV=1
MYTLIVEDSFSSAHFLTNNGEIEFEPLHGHTFKVSVEISGNTLDDFGMLIDFRIIKKKLKEILDIFDHKLLNDVVKFSPTSENLSKYIFDEFEKFLENYKGIIVSSVTVWESQTTCAKYKKEVSR

SEQ ID NO: 26474 - protein, 119 aa, unidentified
  source 1..119: note = Thermodesulfobium acidiphilum
  REGION 1..119: note = tr|A0A2R4W245|A0A2R4W245_9FIRM 6-carboxy-5,6,7,8-tetrahydropterin synthase; OS = Thermodesulfobium acidiphilum OX=1794699 GN=TDSAC_1450; PE = 3 SV=1
MRIKVYKEFNFSAAHKLVDYNGECANLHGHTYKLGVAVSGSVGENSMVIDFKVLKNIVEERVVSKLDHKYLNDIIHNPTAERVCEWILDELKDYMPESVNLEFIRLWESETSYVEISLK

SEQ ID NO: 26475 - protein, 118 aa, Thermodesulfobium narugense
  REGION 1..118: note = tr|M1E713|M1E713_9FIRM 6-carboxy-5,6,7,8-tetrahydropterin synthase; OS = Thermodesulfobium narugense DSM 14796 OX=747365; GN = Thena_1469 PE=3 SV=1
MRIKVYKEFSFSAAHKLVDYKGDCANLHGHTYRLGVAVSGPIGENSMVIDFKILKNIVEERIISKLDHKYLNDIIYNPTAEKVCEWILNELKDSVPESVKLEFVRLWESETSYVEISV

SEQ ID NO: 26476 - protein, 125 aa, Thermodesulfobium narugense
  REGION 1..125: note = tr|M1E623|M1E623_9FIRM 6-carboxy-5,6,7,8-tetrahydropterin synthase; OS = Thermodesulfobium narugense DSM 14796 OX=747365; GN = Thena_0977 PE=3 SV=1
MYTLIVEDSFSSAHFLTRNGEIEFEPLHGHTFKVSVEISGNSLDEFGMLIDFRIIKKKLKEILDTFDHKLLNDVVPFSPTSENLSKYIFDEFEKFLENYRGLNVNSITVWESQTTCAKYQKEVQR

SEQ ID NO: 26477 - protein, 132 aa, Thermodesulforhabdus norvegica
  REGION 1..132: note = tr|A0A1I4QSH7|A0A1I4QSH7_9DELT 6-carboxy-5,6,7,8-tetrahydropterin synthase; OS = Thermodesulforhabdus norvegica OX=39841; GN = SAMN05660836_00186 PE=3 SV=1
MEGLYEVKIQAGFAAAHQLRNFRGKCENLHGHNWKVEVVVRGTRLDECGILVDFGELKKATNELLEELDHKLLNDHPCFRDVNPSSEHIARFIFQRLSQKFNGKYRWVHCVSTWESDNACATYYGIRSAGDE

SEQ ID NO: 26478 - protein, 122 aa, Thermodesulfovibrio aggregans
  REGION 1..122: note = tr|A0A0U9HWP4|A0A0U9HWP4_9BACT 6-carboxy-5,6,7,8-tetrahydropterin synthase; OS = Thermodesulfovibrio aggregans OX=86166 GN=TAGGR_2350; PE = 3 SV=1
MYKLKIITGFDAAHQLRGYKGKCENIHGHNWKVEVEVFAENLNEIGIAIDFKELRKITEDVISELDHSFINQVHPFNEINPSSENIARWIYMSLKDRLSTTPVRLHSVTVWESDYASATYFE

SEQ ID NO: 26479 - protein, 122 aa, Thermodesulfovibrio aggregans
  REGION 1..122: note = tr|A0A2J6WNB3|A0A2J6WNB3_9BACT 6-carboxy-5,6,7,8-tetrahydropterin synthase; OS = Thermodesulfovibrio aggregans OX=86166 GN=queD PE=3 SV=1
MYKLKIITGFDAAHQLRGYKGKCENIHGHNWKVEVEVIAENLNEIGIAIDFKELKGITEEIISRLDHSFINQISPFTEINPSSENIARWIYMSLKDKLSKVPVKLYSVTVWESDYASATYFE

SEQ ID NO: 26480 - protein, 122 aa, Thermodesulfovibrio sp.
  REGION 1..122: note = tr|A0A1C3FGZ1|A0A1C3FGZ1_9BACT 6-carboxy-5,6,7,8-tetrahydropterin synthase; OS = Thermodesulfovibrio sp. N1 OX=1871110 GN=THER_0657 PE=3; SV = 1
MYKLKIITDFDAAHQLRGYKGKCENIHGHNWKVEIEVIAENLNEIGIAIDFKDLKKISDEVVSELDHTFINEIPPFNQINPSSENIARWIYLNLKSKFEKGPVKLYSVTVWESDNAGATYFE

SEQ ID NO: 26481 - protein, 124 aa, Thermodesulfovibrio sp.
  REGION 1..124: note = tr|A0A1G3XV02|A0A1G3XV02_9BACT 6-carboxy-5,6,7,8-tetrahydropterin synthase; OS = Thermodesulfovibrio sp. RBG_19FT_COMBO_42_12 OX=1802373; GN = A2Z47_04950 PE=3 SV=1
MFELMIETDFSAAHQIRGYKGACERLHGHNWKIQVHVVAERLNEIDMVIDFHELKRLTEEVIAPLDHSFLNDIFPFTEKNPSSENIAKWIYDSLRKKINNDNIHLSAVTVWESDGASASYFESD

SEQ ID NO: 26482 - protein, 122 aa, Thermodesulfovibrio yellowstonii
  REGION 1..122: note = tr|B5YJJ7|B5YJJ7_THEYD 6-carboxy-5,6,7,8-tetrahydropterin synthase; OS = Thermodesulfovibrio yellowstonii (strain ATCC 51303 / DSM 11347 / YP87) OX=289376 GN=THEYE_A056 9 PE=3 SV=1
MYKLKIITGFDAAHQLKGYKGKCENIHGHNWKVEVEVISEKLNEIGIALDFKELKKNVDEVVSQLDHTFINQIPPFTQLNPSSENIARWIYMSLKDKFNTTLVRLYSVTVWESDYASATYME

SEQ ID NO: 26483 - protein, 135 aa, unidentified
  source 1..135: note = Thermoflavifilum aggregans
  REGION 1..135: note = tr|A0A2M9CTC1|A0A2M9CTC1_9BACT 6-carboxy-5,6,7,8-tetrahydropterin synthase; OS = Thermoflavifilum aggregans OX=454188 GN=BXY57_0741 PE=3; SV = 1
MMYITRRVHFNAAHKLYNPAWSKEKNEEVFGKCANENWHGHNYVLYVTVKGEIDPETGYVTDAKALHELIQRKILDQVDHRNLNLDVPFMKGKICSTENFAKAIWEQLAPEIKQGKLHCVKLYETENIYVEYFGD

SEQ ID NO: 26484 - protein, 151 aa, unidentified
  source 1..151: note = Thermoflavifilum aggregans
  REGION 1..151: note = tr|A0A2M9CU26|A0A2M9CU26_9BACT 6-pyruvoyltetrahydropterin/6-carboxytetrahydropterin synthase OS=Thermoflavifilum aggregans OX=454188; GN = BXY57_0998 PE=4 SV=1
MNRVRVTRVFHFEAAHALYGYDGKCRHIHGHGYELHVTLLGEPLQDPSHPKQGMVMDFGDIKQCIQQHIIEQFDHALLLCRHTPFFELADTLQQHTDRIVWLDYTPTCENLVIDFARRIRSVLPTQVQLHHLTLYETPSSYASWYAEDQPA

SEQ ID NO: 26485 - protein, 134 aa, Thermoflavimicrobium dichotomicum
  REGION 1..134: note = tr|A0A1I3RN68|A0A1I3RN68_9BACL 6-carboxy-5,6,7,8-tetrahydropterin synthase; OS = Thermoflavimicrobium dichotomicum OX=46223; GN = SAMN05421852_110117 PE=3 SV=1
MPGKYTLVKHFWISCAHRVPGAGKCERVHGHNYKITFCVEGTKLDQMQMLIDFRQVKHALEKKYDHHFLNEFPEFDPEQGGSIPSTEKVAEVFYWAIHDLCQAKENKPTLKWVEVQETNEAYARFEWIDEQEGT

SEQ ID NO: 26486 - protein, 130 aa, Thermoflavimicrobium sp.
  REGION 1..130: note = tr|A0A364K142|A0A364K142_9BACL 6-carboxy-5,6,7,8-tetrahydropterin synthase; OS = Thermoflavimicrobium sp. FBKL4.011 OX=2137476; GN = DL897_16325 PE=3 SV=1
MPGKYTLIKHFWISCAHSVPRAGKCERVHGHNYKVTFCVEGTELDQTQMLIDFRLVKHALEKKYDHHLLNEFPEFNPEQGGSIPSTEKVAEVFYWTIHKLCQTKENKPTLKWIEVQETNEAYARYEWNEE

SEQ ID NO: 26487 - protein, 135 aa, unidentified
  source 1..135: note = Thermoflexibacter ruber
  REGION 1..135: note = tr|A0A1I2JP47|A0A1I2JP47_9BACT 6-carboxy-5,6,7,8-tetrahydropterin synthase; OS = Thermoflexibacter ruber OX=1003 GN=SAMN04488541_10603; PE = 3 SV=1
MRVSVFRKEHFNAAHRLHNPQWSEEMNQRVFGKCNNANFHGHNYELVVKVTGEIHPETGYVMDMKVLSDIIKEQVLDRFDHKNLNLDVVEFQKLNPTAENIAVVIWQLLRPHLNQNLDLKITLYETERNFVEFPA

SEQ ID NO: 26488 - protein, 138 aa, unidentified
  source 1..138: note = Thermoflexibacter ruber
  REGION 1..138: note = tr|A0A1I2GHK8|A0A1I2GHK8_9BACT 6-pyruvoyltetrahydropterin/6-carboxytetrahydropterin synthase OS=Thermoflexibacter ruber OX=1003; GN = SAMN04488541_101871 PE=4 SV=1
MVYVCRKEHFNAAHRLYNPRWSDEKNTEVFGACANKYFHGHNFELIVKVKGMPDPDTACVIDLKVLSKIIKEHIIAKVDHKNLNIEVDFLQDKMPSCETLVVEFWKILEREIAKVSQARLHSITLYETHNNFVEYFGE

SEQ ID NO: 26489 - protein, 164 aa, unidentified
  source 1..164: note = Thermoflexus hugenholtzii
  REGION 1..164: note = tr|A0A2A9HGA1|A0A2A9HGA1_9CHLR 6-pyruvoyltetrahydropterin/6-carboxytetrahydropterin synthase OS=Thermoflexus hugenholtzii OX=1495650; GN = A9A59_1582 PE=4 SV=1
MGGMHTSRKVTVERNRLRFAAAHMATFSGDCEPLHGHNYDVFIELEGPLTEDAWVWDFSAVKRAARELTELLDHKFLLQRASRHLEIREEPDAWEVSYRGRTYRFPASDVLPLPIPNSTAECIAEWFAARLLEALQLQGATHIRRLTVGIEEMPGQAGWYTLEL

SEQ ID NO: 26490 - protein, 162 aa, unidentified
  source 1..162: note = Thermoflexus hugenholtzii
  REGION 1..162: note = tr|A0A212R5U2|A0A212R5U2_9CHLR 6-pyruvoyltetrahydropterin/6-carboxytetrahydropterin synthase OS=Thermoflexus hugenholtzii JAD2 OX=877466; GN = SAMN02746019_00013240 PE= 4 SV=1
MDRVQVAQDNLVFCAGHFMIFPQGSEPLHGHNYRVSVALEGELRDDMVMDFVALKRLVKALVEELDHRVLLPAEHPRLRLRIEEDQVEAEVDRKRYVFPLEDVRILPIPNTSAEWLARYLAGRLRARLPEGLRLHALEVEVEESFGQRAIHREVLHAAAAAS

SEQ ID NO: 26491 - protein, 144 aa, unidentified
  source 1..144: note = Thermogemmatispora argillosa
  REGION 1..144: note = tr|A0A455T1K3|A0A455T1K3_9CHLR 6-carboxy-5,6,7,8-tetrahydropterin synthase; OS = Thermogemmatispora argillosa OX=2045280 GN=KTA_27120; PE = 3 SV=1
MATVYLTRRASFSASHRLWSEALSERENWELYGKCANPNGHGHNYTLEVTLRGEPDPRTGMLMNLSELRAIIHREIVDQVDHHHLNYDVPWLRESIPTTENLVIKFWERLEAALPPGLLYEVRLIETDNNSASYRGERHPLTRP

SEQ ID NO: 26492 - protein, 169 aa, unidentified
  source 1..169: note = Thermogemmatispora argillosa
  REGION 1..169: note = tr|A0A455SZX5|A0A455SZX5_9CHLR 6-pyruvoyl tetrahydrobiopterin synthase OS=Thermogemmatispora argillosa OX=2045280 GN=KTA_08480 PE=4 SV=1
MASASSFKVKVEGGYLQFSAAHFITYGGKCERLHGHNYGVSVEAEGTLNEDQLVFDFTILKRLTREICQRLNHRFLLPMKNPHIELIASADEWEIRFREKRYVFPRADVVELPIDNSTAERLAEYIAQELLEALTPYNTLNVQTLTVGVSEAPTQMAYCHLDLRGHLAG

SEQ ID NO: 26493 - protein, 144 aa, unidentified
  source 1..144: note = Thermogemmatispora tikiterensis
  REGION 1..144: note = tr|A0A328VMA4|A0A328VMA4_9CHLR 6-carboxy-5,6,7,8-tetrahydropterin synthase; OS = Thermogemmatispora tikiterensis OX=1825093; GN = A4R35_12280 PE=3 SV=1
MATVYLTRRASFSASHRLWSEALSERENWELYGKCANPNGHGHNYTLEVTLRGEPDPHTGMLMNLAELREIMHREIVDQVDHRHLNYDVPWLRESIPTTENLVIKFWERLEAALPPGLLYEVRLIETDNNSASYRGERHPLTHP

SEQ ID NO: 26494 - protein, 169 aa, unidentified
  source 1..169: note = Thermogemmatispora tikiterensis
  REGION 1..169: note = tr|A0A328VPL7|A0A328VPL7_9CHLR Uncharacterized protein OS=Thermogemmatispora tikiterensis OX=1825093; GN = A4R35_21505 PE=4 SV=1
MASVSSFKVKVEGGYLQFSAAHFITYGGKCERLHGHNYGVTVEAEGTLSEDQLVFDFTILKRLTREICQQLNHRFLLPMKNPHIELIASADEWEIRFGEKRYVLPRAEVVELPIDNSTAERLAEYIAQELLEALTPYNTLNIHTLTVGVSEAPTQIAYCHLDLRRRLPG

SEQ ID NO: 26495 - protein, 170 aa, unidentified
  source 1..170: note = Thermogutta terrifontis
  REGION 1..170: note = tr|A0A286RJ50|A0A286RJ50_9PLAN Queuosine biosynthesis QueD, PTPS-I OS=Thermogutta terrifontis; OX = 1331910 GN=THTE_3393 PE=4 SV=1
MGEGFEIRIGREAVQFSAAHFLVFGPDSAEAVHGHDFSVEVAVTGNLLDPGWVMDFLVLHRFVQEIVEPLDHKVLLPAKNPWLRLEMLGDELVRASLGKWSWQFPAVHCFLLPVCNVTAELLAQYIGGILKGRIEAELPGSMERLRVEVFETPHYSARWTYVRQEGESRC

SEQ ID NO: 26496 - protein, 133 aa, unidentified
  source 1..133: note = Thermogutta terrifontis
  REGION 1..133: note = tr|A0A286RLJ4|A0A286RLJ4_9PLAN 6-carboxytetrahydropterin synthase, Queuosine biosynthesis QueD, PTPS-I OS=Thermogutta terrifontis OX=1331910; GN = THTE_4238 PE=4 SV=1
MYQVLREIDFCYGHRLLNYSGKCRNLHGHNGLLVITFETASLDELGMVLDFTDIKRVVQGWIDENLDHRMILHRQDPVVPVLQEMGEPLFLMDENPTAENIARLIFDYVAQKGLPVVETRLWETPRCAAVYRP

SEQ ID NO: 26497 - protein, 123 aa, Thermohydrogenium kirishiense
  REGION 1..123: note = tr|A0A4R4ASQ5|A0A4R4ASQ5_9FIRM 6-carboxy-5,6,7,8-tetrahydropterin synthase; OS = Thermohydrogenium kirishiense OX=937254 GN=EDC21_10191; PE = 3 SV=1
MKVTKVFTFDSAHNLTKYNGKCENLHGHTYKLEVTVEGNTNDEGIVVDFAELKSIVENEVVKKLDHMYLNDVLGFNTTCENIIIWMWERLETRLRTERYHLYKIKLWETPTSFAEVDIKDFEK

SEQ ID NO: 26498 - protein, 145 aa, unidentified
  source 1..145: note = Thermolongibacillus altinsuensis
  REGION 1..145: note = tr|A0A4R1QFJ5|A0A4R1QFJ5_9BACI 6-carboxy-5,6,7,8-tetrahydropterin synthase; OS = Thermolongibacillus altinsuensis OX=575256; GN = EDD69_10756 PE=3 SV=1
MIHQIYPQVAHSFQYEINKDMSLAAAHFIPHEAAGKCAHLHGHTYIINITVAGDELDETGFLVNFQQLKRLIHDRFDHTLINDHGELFNEKNSYDFPTAESIARKVCEIVQEHLDTLPNRPKCLQVFVRETPTSYAVYRPKWEKK

SEQ ID NO: 26499 - protein, 117 aa, Thermomonas haemolytica
  REGION 1..117: note = tr|A0A4R3N3Z3|A0A4R3N3Z3_9GAMM 6-carboxy-5,6,7,8-tetrahydropterin synthase OS=Thermomonas haemolytica OX=141949 GN=EDC34_10822 PE=3 SV=1
MDIYKTFTLEAAHRLPNVPAGHKCARLHGHSFGIELHVSGEPGAETGWVMDFADLKAAFQPLYEQLDHHYLNDIEGLENPTSERLAVWIWERLKPRVPLLSAVVVRETCTSGCRYSG

SEQ ID NO: 26500 - protein, 171 aa, Thermomonas haemolytica
  REGION 1..171: note = tr|A0A4V6P007|A0A4V6P007_9GAMM 6-pyruvoyltetrahydropterin/6-carboxytetrahydropterin synthase OS=Thermomonas haemolytica OX=141949; GN = EDC34_10572 PE=4 SV=1
MSAQGGTAMQERVTIRLAKQNMKFSAGHFTIFSASERERLHGHNFTVEVDIEARMLGNGMCFDYGLYKDRVVALCRELNEWTILPTRSPYLRIEEDGDHVYAHFDGQRIPFLRGDVLLLPIENATLEEFAGWFLQRLCEDREALRAHAIDAIEVRVLSGPGQSAGRRVRLG

SEQ ID NO: 26501 - protein, 117 aa, Thermomonas hydrothermalis
  REGION 1..117: note = tr|A0A1M4SD06|A0A1M4SD06_9GAMM 6-carboxy-5,6,7,8-tetrahydropterin synthase OS=Thermomonas hydrothermalis OX=213588 GN=SAMN02745204_00145 PE=3 SV=1
MDIYKTFTIEAAHRLPNVPVGHKCARLHGHSFRIELHVSGEVGAETGWVMDFADLKAAFRPLYEQLDHHYLNEIPGLENPTSENLAIWIWQRLKPQLPLLSAVVVHETCTSGCRYSG

SEQ ID NO: 26502 - protein, 172 aa, Thermomonas hydrothermalis
  REGION 1..172: note = tr|A0A1M4X846|A0A1M4X846_9GAMM 6-pyruvoyltetrahydropterin/6-carboxytetrahydropterin synthase OS=Thermomonas hydrothermalis OX=213588; GN = SAMN02745204_01368 PE=4 SV=1
MSMQRQPDSGEIVMIRLAKQAMKFSAGHFTIFSASERERLHGHNFTVEVDIEARMLGNGMCFDYGLYKDRVIALCRELNEWMLLPTRSPYLRIEEAGEQVLAHFAGQVIPFLRRDVRLLPLENITLEELARWFLERLAEDPQTLREHAVVAIEVRVFSGPGQSAGRRMVMPQ

SEQ ID NO: 26503 - protein, 117 aa, Thermomonas sp.
  REGION 1..117: note = tr|A0A5B7ZRL1|A0A5B7ZRL1_9GAMM 6-carboxy-5,6,7,8-tetrahydropterin synthase OS=Thermomonas sp. SY21 OX=2202149 GN=queD PE=3 SV=1
MDIFKVFTIEAAHRLPNVPAGHKCARLHGHSFRIELRVSGEPGADTGWVMDFADIKAAFKPLYEQLDHHYLNDIEGLDNPTSERLAMWIWARLKPALPLLSEVVVHETCTSGCSYRG

SEQ ID NO: 26504 - protein, 117 aa, Thermomonas sp.
  REGION 1..117: note = tr|A0A5C7QZL9|A0A5C7QZL9_9GAMM 6-carboxy-5,6,7,8-tetrahydropterin synthase OS=Thermomonas sp. OX=1971895 GN=queD PE=3 SV=1
MDIFKVFTIEAAHRLPNVPDGHKCARLHGHSFRVELHVSGEPGAETGWVMDFGDIKAAFAPIYAQLDHHYLNEIDGLDNPTSERLAMWIWARLKPALPLLSEVVVHETCTSGCRFRG

SEQ ID NO: 26505 - protein, 132 aa, Thermomonospora curvata
  REGION 1..132: note = tr|D1A5Z8|D1A5Z8_THECD Uncharacterized protein; OS = Thermomonospora curvata (strain ATCC 19995 / DSM 43183 / JCM 3096 / NBRC 15933 / NCIMB 10081 / Henssen B9); OX = 47185 2 GN=Tcur_2746 PE=4 SV=1
MFSVTVRGHFMVAHSFRGEVFGPAQRLHGATFVVDATFRRTELDKDNVVVDIGLATRELNAVLAELNYRNLDDDPDFAGVNTTTEFLAKVIADRLAERVRAGALGEQARGLTGIAVTLHESHVAWASYERAL

SEQ ID NO: 26506 - protein, 149 aa, unidentified
  source 1..149: note = Thermophagus xiamenensis
  REGION 1..149: note = tr|A0A1I2CZJ7|A0A1I2CZJ7_9BACT 6-pyruvoyltetrahydropterin/6-carboxytetrahydropterin synthase OS=Thermophagus xiamenensis OX=385682; GN = SAMN05444380_11762 PE=4 SV=1
MSKIRLTKEFRFEMAHALWNYDGLCKHIHGHSYILQVTVIGQPNDNEKDPKCGMVMDFGDLKKIVKEEIVEKLDHAIVLNQKARNQHLFEIPQMFDKIHFVPYQPTCENLLLDFAQKIQARLPENIALHKLKLNETANSFAEWYASDNL

SEQ ID NO: 26507 - protein, 132 aa, Thermopolyspora flexuosa
  REGION 1..132: note = tr|A0A543IYN2|A0A543IYN2_9ACTN 6-pyruvoyl-tetrahydropterin synthase OS=Thermopolyspora flexuosa OX=103836 GN=FHX40_2398 PE=4 SV=1
MFSVTVRDHVMVAHSFRGEVFGPAQRLHGATFVVDATFRRPELDSDNVVVDIGLASRELKAVLDRINYRNLDDEPEFEGVNTTTEFLARWIADRLAERVHAGALGEQARGLTGITVTLHESHAAWASYEREL

SEQ ID NO: 26508 - protein, 125 aa, Thermosediminibacter oceani
  REGION 1..125: note = tr|D9S1R6|D9S1R6_THEOJ 6-carboxy-5,6,7,8-tetrahydropterin synthase; OS = Thermosediminibacter oceani (strain ATCC BAA-1034 / DSM 16646 / JW/IW-1228P) OX=555079 GN=Toce_ 0570 PE=3 SV=1
MFLIKEFKFDAAHNLVKYKGKCEKLHGHTYRLVVVLEGTPDAEGMIMDFLELKNIVEENVLKFLDHSYINDYIEQPSAENIAVWVWRRLEERVKRENCRLYEVQVWETATSGAVYRGEALEGRSE

SEQ ID NO: 26509 - protein, 130 aa, Thermosinus carboxydivorans
  REGION 1..130: note = tr|A1HNF1|A1HNF1_9FIRM 6-carboxy-5,6,7,8-tetrahydropterin synthase OS=Thermosinus carboxydivorans Nor1 OX=401526 GN=TcarDRAFT_2260 PE=3 SV=1
MRQPTVRTTKIFTFDAAHFLPGHEGKCAQMHGHTYRLEVTVERKDGGVATGGPEDGMVIDFGRLSALIKDRVVDKLDHKVLNDCFPFRPTSENMARHIFIELSAILANEDVNVVRVVLWETPTSYVEVTA

SEQ ID NO: 26510 - protein, 120 aa, Thermosipho africanus
  REGION 1..120: note = tr|B7IDG1|B7IDG1_THEAB 6-carboxy-5,6,7,8-tetrahydropterin synthase OS=Thermosipho africanus (strain TCF52B) OX=484019 GN=queD PE=3 SV=1
MLLVSKEFTFDAAHNLVKYHGKCEKLHGHTYKLVVTVAGEKDEEGMVIDFLELKRIVQEKVLNRLDHSYINEIIPQPSAENIAEWIWKQLETELHSERYFLYEIKVYETPTSYVTLKKNM

SEQ ID NO: 26511 - protein, 120 aa, Thermosipho africanus
  REGION 1..120: note = tr|K2PPB1|K2PPB1_9BACT 6-carboxy-5,6,7,8-tetrahydropterin synthase OS=Thermosipho africanus H17ap60334 OX=1161912 GN=H17ap60334_05294 PE=3; SV = 1
MLLVSKEFTFDAAHNLVKYHGKCEKLHGHTYKLVVTVAGEKDEEGMVIDFLELKRIIKEKVLSRLDHSYINEIIPQPSAENIAEWIWKQLEPELNSERYFLYEIKVYETPTSYVTLKKNM

SEQ ID NO: 26512 - protein, 123 aa, Thermosipho atlanticus
  REGION 1..123: note = tr|A0A1M5U6U4|A0A1M5U6U4_9BACT 6-carboxy-5,6,7,8-tetrahydropterin synthase OS=Thermosipho atlanticus DSM 15807 OX=1123380 GN=SAMN02745199_1650 PE=3; SV = 1
MFYVSKEFTFDAAHNLVKYHGKCENLHGHTYKLVVTVAGEKNEEGMVIDFLELKKIVQENVLNILDHAYINKIIKQPSAENIAEWIWEKLSKKLSSDRFFLYEIKLYETPTSYVTLRKDDKHV

SEQ ID NO: 26513 - protein, 120 aa, Thermosipho melanesiensis
  REGION 1..120: note = tr|A6LMF6|A6LMF6_THEM4 6-carboxy-5,6,7,8-tetrahydropterin synthase OS=Thermosipho melanesiensis (strain DSM 12029 / CIP 104789 / BI429); OX = 391009 GN=Tmel_1258 PE=3 S V=1
MIFVTKEFTFDAAHNLIKYHGKCEKLHGHTYKLLVTVAGKKDEEGMVIDFLELKKIVKENVLNILDHSYINEIIEQPSAENIAEWIWERLKEKLNTERYFLYEIKLYETPTSYVTLRGSY

SEQ ID NO: 26514 - protein, 122 aa, Thermosipho sp.
  REGION 1..122: note = tr|A0A1L7BGE1|A0A1L7BGE1_9BACT 6-carboxy-5,6,7,8-tetrahydropterin synthase OS=Thermosipho sp. 1063 OX=1462747 GN=BG95_07060 PE=3 SV=1
MLLVTKEFTFDAAHNLVKYHGKCERLHGHTYKLIVTVAGEKDEEGMVIDFIELKNIVKENVLNILDHSYINDIIEQPSAENIAEWIWERLIEKLKTDRYFLYEVKLYETPTSYVTLRRNLDV

SEQ ID NO: 26515 - protein, 151 aa, Thermosporothrix hazakensis
  REGION 1..151: note = tr|A0A326U885|A0A326U885_9CHLR 6-pyruvoyltetrahydropterin/6-carboxytetrahydropterin synthase OS=Thermosporothrix hazakensis OX=644383; GN = EI42_03574 PE=4 SV=1
MPRYAIVTREFTFEAMHHLPGHKGKCRRPHGHSYRLEISLRGPIQEAPGQSSDGMVMDFDDLKSIVNRTIIEELGDSVPRGPAAQPVERGGMDHNDLNALTGIRTTAENLVHWIWDALVAGGVSEDLLYRVRLWETAKGYAEITRAERGLE

SEQ ID NO: 26516 - protein, 138 aa, Thermosporothrix hazakensis
  REGION 1..138: note = tr|A0A326UGN9|A0A326UGN9_9CHLR 6-carboxy-5,6,7,8-tetrahydropterin synthase; OS = Thermosporothrix hazakensis OX=644383 GN=EI42_03808; PE = 3 SV=1
MVFLTRRVTFSAAHRLWSNDLSDEENYAIYDKCANPNGHGHNYTLEVTVQGQPDPKTGMIINLTDLKRIVNEQVVDWVDHKHLNHDVPWLEGVIPTTEMLVIKFWERLESAFPAHMLYEVTLHETENNVATYRGPACE

SEQ ID NO: 26517 - protein, 138 aa, Thermosporothrix sp.; identical to SEQ ID NO: 26516
  REGION 1..138: note = tr|A0A455SPX0|A0A455SPX0_9CHLR 6-carboxy-5,6,7,8-tetrahydropterin synthase; OS = Thermosporothrix sp. COM3 OX=2490863 GN=KTC_42090 PE=3; SV = 1

SEQ ID NO: 26518 - protein, 190 aa, Thermosporothrix sp.
  REGION 1..190: note = tr|A0A455STT9|A0A455STT9_9CHLR 6-pyruvoyl tetrahydrobiopterin synthase OS=Thermosporothrix sp. COM3; OX = 2490863 GN=KTC_58810 PE=4 SV=1
MNGMLKTQSNTFDEPYSKERETEIMAGERIQRKVKIEGGYLKFSSAHFITYGGKCERLHGHNYGVRVEAEGTLNQDRLVFDFTVLKRLTKDICRSLDHRFLLPLQNPHLQLKQTEENWEIVYQEKRYLFPKEDVAELPIDNSTAERLAEYICNELCKQLASFDISNLTSITVGVEEAPTQMAYYSLTLQE

SEQ ID NO: 26519 - protein, 135 aa, unidentified
  source 1..135: note = Thermostaphylospora chromogena
  REGION 1..135: note = tr|A0A1H1HSI1|A0A1H1HSI1_9ACTN 6-pyruvoyl-tetrahydropterin synthase; OS = Thermostaphylospora chromogena OX=35622; GN = SAMN04489764_4743 PE=4 SV=1
MFTVTVRDHLMIAHSFRGEVFGPAQRLHGATYVVDAAFHRPELDADGVVVDIGLAARELGAVLGELNYRNLDEEPAFAGVNTTTEFLAKVIADRLAERIRAGKLGEGARGLTGLTVTLHESHVAWASYECRLQTR

SEQ ID NO: 26520 - protein, 123 aa, Thermosulfidibacter takaii
  REGION 1..123: note = tr|A0A0S3QT53|A0A0S3QT53_THET7 6-carboxy-5,6,7,8-tetrahydropterin synthase; OS = Thermosulfidibacter takaii (strain DSM 17441 / JCM 13301 / NBRC 103674 / ABI70S6) OX=12 98851 GN=queD PE=3; SV = 1
MPWLLKIVDSFGAAHFLRNYRGKCENLHGHNWRVELEVFGDKLDKTGLVLDFKLLKRILKEVLDRLDHRLINEIEPFDKINPSSENIARFIFEEVAGKLPEGVKVHSVTVWESDSACAKYFQE

SEQ ID NO: 26521 - protein, 123 aa, unidentified
  source 1..123: note = Thermosulfurimonas dismutans
  REGION 1..123: note = tr|A0A179D398|A0A179D398_9BACT 6-carboxy-5,6,7,8-tetrahydropterin synthase; OS = Thermosulfurimonas dismutans OX=999894 GN=TDIS_1497; PE = 3 SV=1
MFELTVRDEFSAAHQLRGYEGACENLHGHNWKVEVAVRGSQLNEIGILIDFKELKKALKEILSELDHCHLNEHPAFRDLNPSSENLARFIFERLEEKLAGKPVEVFRVTVCETERSCASYFRG

SEQ ID NO: 26522 - protein, 290 aa, unidentified
  source 1..290: note = Thermosynechococcus elongatus
  REGION 1..290: note = tr|A0A3B7MHC8|A0A3B7MHC8_9CYAN 6-carboxytetrahydropterin synthase OS=Thermosynechococcus elongatus PKUAC-SCTE542 OX=2016101 GN=D3A95_00810 PE=4 SV=1
MNCIIHRRAEFAASHRYWLPEWSEGENLARFGASSRFPGHGHNYELFVSMKGVVDDFGMVLNLSDVKHIIRREVIEPLNFSYLNEVWPEFQATLPTTEHIARVIWDRLSPHLPLVRIRLLEHPRLWADYTGDPMEAYLSVGTHFSAAHRLALDDLSYEENCRIYGKCARPHGHGHNYHVEITVKGAIHPRTGMVVDLVKLEEVLKEQVIEPLDHTFLNKDIPYFATVVPTAENIAIYIAQLLQEPIRQLGATLHKVKLIESPNNSCEILCEELPPRDGVLSGALPVLERV

SEQ ID NO: 26523 - protein, 290 aa, unidentified
  source 1..290: note = Thermosynechococcus elongatus
  REGION 1..290: note = tr|Q8DJX5|Q8DJX5_THEEB 6-pyruvoyl-tetrahydropterin synthase OS=Thermosynechococcus elongatus (strain BP-1); OX = 197221 GN=tll1095 PE=4 SV=1
MNCIIHRRAEFAASHRYWLPEWSEAENLARFGANSRFPGHGHNYELFVSMEGVVDDFGMVLNLSDVKHIIRREVIEPLNFSYLNEVWPEFQATLPTTEHIARVIWDRLFPHLPLVRIRLFEHPRLWADYTGDPMEAYLSVGAHFSAAHRLALEDLSYEENCRIYGKCARPHGHGHNYHVEITVKGSIHPRTGMVVDLVKLEEVLKEQVIEPLDHTFLNKDIPYFATVVPTAENIAIYIAHLLQEPVRQLGATLHRVKLIESPNNSCEILCEELPPRNEVISGALPVLERV

SEQ ID NO: 26524 - protein, 290 aa, unidentified
  source 1..290: note = Thermosynechococcus sp.
  REGION 1..290: note = tr|A0A5C2M983|A0A5C2M983_9CYAN 6-pyruvoyl tetrahydropterin synthase OS=Thermosynechococcus sp. CL-1; OX = 2583530 GN=FFX45_11765 PE=4 SV=1
MNCIIHRRAEFAASHRYWLPEWSEAENLARFGANSRFPGHGHNYELFVSMGGVVDDFGMVLNLSDVKHIIRREVIEPLNFSYLNEVWPEFQATLPTTEHIARVIWDRLSPHLPLVRIQLFEHPRLWADYTGGPMEAYLSVGAHFSAAHRLALEDLSYEENCRIYGKCARPHGHGHNYHVEITVKGAIHPRTGMIVDLIKLEEVLKEQVIEPLDHTFLNKDIPYFATVVPTAENIAIYIAQLLQEPIRQLGATLHKVKLIESPNNSCEILCEELPPRDGVLSGVLPVLERV

SEQ ID NO: 26525 - protein, 290 aa, unidentified
  source 1..290: note = Thermosynechococcus sp.
  REGION 1..290: note = tr|V5V2T2|V5V2T2_9CYAN 6-pyruvoyl tetrahydrobiopterin synthase QueD OS=Thermosynechococcus sp. NK55a OX=1394889 GN=queD PE=4 SV=1
MDCIIHRRAEFAASHRYWLPEWSDVENRARFGGNSYFPGHGHNYELIVSIRGTVDDFGMVLNLSEVKHVIRREVIEPLNFSYLNEVWPEFQATLPTTEHIARVIWDRLFPHLPLVRIRLFEHPRLWADYTGDPMEAYLSVGTHFSAAHRLALQDLSYEENCRIYGKCARPHGHGHNYHVEITVKGSIHPRTGMVVDLVKLEEVLREQVIEPLDHTFLNEDIPYFATVVPTAENIAIYIAQLLQEPIRQLGATLHRVKLIESPNNACEILCEELPPRNEGISAALPVLERA

SEQ ID NO: 26526 - protein, 124 aa, Thermosyntropha lipolytica
  REGION 1..124: note = tr|A0A1M5PDF0|A0A1M5PDF0_9FIRM 6-carboxy-5,6,7,8-tetrahydropterin synthase; OS = Thermosyntropha lipolytica DSM 11003 OX=1123382; GN = SAMN02745221_01439 PE=3 SV=1
MAYELGIIQEFAAAHRLNNYPGDCSNIHGHTWKVEITVKGNKLDPTGMLIDFRELKRIAASIIKEKYDHRFLNEIEPFDRINPTAENIAREIYYDMKKTLTPVVELEKVKVWESPTAYAVYKEE

SEQ ID NO: 26527 - protein, 159 aa, Thermotalea metallivorans
  REGION 1..159: note = tr|A0A140LAA6|A0A140LAA6_9CLOT 6-carboxy-5,6,7,8-tetrahydropterin synthase OS=Thermotalea metallivorans OX=520762 GN=queD PE=4 SV=1
MKIAVTKEFTFDCAHMLSNHEGLCANLHGHTYKLQITVQASDFQETNLGSSSSEGMVIDFKELNAIVHDLIISKFDHSFICWENGCEAERELASVAKKYGLRVATLMERPTAENICKHFFKLLRNYFKTKNYSIDIVSARLWETPTSFAEVMDHDVSCC

SEQ ID NO: 26528 - protein, 120 aa, Thermotoga maritima
  REGION 1..120: note = tr|R4NP53|R4NP53_THEMA 6-carboxy-5,6,7,8-tetrahydropterin synthase OS=Thermotoga maritima (strain ATCC 43589 / MSB8 / DSM 3109 / JCM 10099); OX = 243274 GN=Tmari_0035 P E=3 SV=1
MILVKKFSFEAAHNLTRYLGKCERLHGHTYRLVVKIEGPLNEEEMVMDFAELKKIVEELVISKLDHSYLNDMFDQPTTERVAIWIWDQLSKEMEKRGVRLHEIELWETETSGVVYRGEKV

SEQ ID NO: 26529 - protein, 120 aa, Thermotoga maritima; identical to SEQ ID NO: 26528
  REGION 1..120: note = tr|Q9WXP5|Q9WXP5_THEMA 6-carboxy-5,6,7,8-tetrahydropterin synthase OS=Thermotoga maritima (strain ATCC 43589 / MSB8 / DSM 3109 / JCM 10099); OX = 243274 GN=TM_0038 PE=3SV=1

SEQ ID NO: 26530 - protein, 120 aa, Thermotoga naphthophila
  REGION 1..120: note = tr|A0A101ERC5|A0A101ERC5_9THEM 6-carboxy-5,6,7,8-tetrahydropterin synthase OS=Thermotoga naphthophila OX=93930 GN=queD PE=3 SV=1
MILVKKFSFEAAHNLTKYHGKCEKLHGHTYRLVVKIEGPLNEEEMVMDFAELKKIVEELVISKLDHSYLNDMFDQPTTERVAIWIWDQLSKEMEKRGVRLHEIELWETETSGVVYRGEKV

SEQ ID NO: 26531 - protein, 120 aa, Thermotoga naphthophila; identical to SEQ ID NO: 26528
  REGION 1..120: note = tr|D2C729|D2C729_THENR 6-carboxy-5,6,7,8-tetrahydropterin synthase OS=Thermotoga naphthophila (strain ATCC BAA-489 / DSM 13996 / JCM 10882 / RKU-10) OX=590168 GN=Tna p_0669 PE=3 SV=1

SEQ ID NO: 26532 - protein, 131 aa, Thermotoga neapolitana
  REGION 1..131: note = tr|B9K796|B9K796_THENN 6-carboxy-5,6,7,8-tetrahydropterin synthase OS=Thermotoga neapolitana (strain ATCC 49049 / DSM 4359 / NS-E); OX = 309803 GN=CTN_0653 PE=3 SV=1
MEIMSSSRGENMVLVKKFSFEAAHNLVKYHGKCERLHGHTYRLTVKVEGPLNEEDMVMDFAELKKMVEDRVIKKLDHSYLNELFEQPTTERVAIWIWEQLSGPLRECGVRLVEIELWETETSGVVYRGEKV

SEQ ID NO: 26533 - protein, 120 aa, Thermotoga petrophila; identical to SEQ ID NO: 26530
  REGION 1..120: note = tr|A5IL30|A5IL30_THEP1 6-carboxy-5,6,7,8-tetrahydropterin synthase OS=Thermotoga petrophila (strain RKU-1 / ATCC BAA-488 / DSM 13995); OX = 390874 GN=Tpet_0885 PE=3 SV= 1

SEQ ID NO: 26534 - protein, 129 aa, Thermotoga sp.; identical to SEQ ID NO: 24705
  REGION 1..129: note = tr|A0A101EU03|A0A101EU03_9THEM 6-carboxy-5,6,7,8-tetrahydropterin synthase OS=Thermotoga sp. 50_1627 OX=1635260 GN=XD58_1110 PE=3 SV=1

SEQ ID NO: 26535 - protein, 120 aa, Thermotoga sp.
  REGION 1..120: note = tr|A0A0A6QL85|A0A0A6QL85_9THEM 6-carboxy-5,6,7,8-tetrahydropterin synthase OS=Thermotoga sp. Mc24 OX=1231241 GN=Mc24_01973 PE=3 SV=1
MILVKKFSFEAAHNLTRYLGKCERLHGHTYRLVVKIEGPLNEEEMVMDFAELKKIVEELVVSKLDHSYLNDMFDQPTTERIAIWIWDQLSKEVEKRGVRLHEIELWETETSGVVYRGEKV

SEQ ID NO: 26536 - protein, 130 aa, unidentified
  source 1..130: note = Thermotogae bacterium
  REGION 1..130: note = tr|A0A1V6GY00|A0A1V6GY00_9BACT 6-carboxy-5,6,7,8-tetrahydropterin synthase OS=Thermotogae bacterium ADurb.Bin062 OX=1852923 GN=queD PE=3 SV=1
MRVSKVFSFDSAHFLPSYHGKCETLHGHTYRLVVTVAGVPDAEGMVIDFILLKKIVQEEVLSVLDHSLLNDILPQPTAENIAKWVWQRISEKVRRDRAALFEVEVWETPTSYVRVRSEDILESTSRGTPD

SEQ ID NO: 26537 - protein, 133 aa, unidentified
  source 1..133: note = Thermotogales bacterium
  REGION 1..133: note = tr|A0A117MAF2|A0A117MAF2_9BACT 6-carboxy-5,6,7,8-tetrahydropterin synthase; OS = Thermotogales bacterium 46_20 OX=1635293 GN=XE05_1104; PE = 3 SV=1
MHMLNRFLPGGDFIFLVTKEFTFDAAHRLERYHGKCEELHGHTYRLSISVKGELDDEGMVIDFLELKALIKEHVLSHLDHKYLNEVIEQPTAENIAKWVFDAVKPLIDSEKRKLHEVRVWETVTSSATYRESQ

SEQ ID NO: 26538 - protein, 122 aa, Thermovenabulum gondwanense
  REGION 1..122: note = tr|A0A162MKI8|A0A162MKI8_9FIRM 6-carboxy-5,6,7,8-tetrahydropterin synthase; OS = Thermovenabulum gondwanense OX=520767 GN=queD PE=3 SV=1
MILIREFKFDAAHNLTAYRGKCERLHGHTYKLVVKIQGTPDSEGMIIDFVELKKIVEDSVLKKFDHSYINEIIPQPTAENIAEYIFKELYDVLKRDNCFLYEVEIWETADCGVVYRGEKGCN

SEQ ID NO: 26539 - protein, 216 aa, Thermovibrio ammonificans
  REGION 1..216: note = tr|E8T2T8|E8T2T8_THEA1 Uncharacterized protein; OS = Thermovibrio ammonificans (strain DSM 15698 / JCM 12110 / HB-1) OX=648996 GN=Theam_1183 PE=4 SV=1
MFEISKVFEFSAAHSVHSQRLKPEWAGSSYPKCRRLPGHGHNYRLEVFLRAESLDSTQMVTDFGHLKWLKEFIDDCFDHKLLVGTDDPAFELLFGKLGYLENGEFKVPYGEATAVAVNRDFKVESFKVGSVALDLVKGSLNFLTFNGYTPKEESPLSDFYQRLTDGIALFCCSPTSENLAWFFYNFVNANIEPLGVICSKVAVYETPTSCAVYGEL

SEQ ID NO: 26540 - protein, 212 aa, Thermovibrio guaymasensis
  REGION 1..212: note = tr|A0A420W9P6|A0A420W9P6_9BACT 6-pyruvoyltetrahydropterin/6-carboxytetrahydropterin synthase OS=Thermovibrio guaymasensis OX=240167; GN = C7457_0944 PE=4 SV=1
MFVISKSFEFAAAHSVHSQRLNREWAGSDYPKCRRLPGHGHNYKLTVYLTGELSQSQMVTDFGHLKWLKEFIDDCFDHKLIIGVDDPAFELFFSKLELLDGKEIKFPFETRITIVDENFRLKSFFGRSLTLRKISTCNFVTFGSSPLQSDPILDFYQRLVDGIVLFKGSPTSENLARFFYYFVKENVKPLGVDCYKVSINETPNSCASYSER

SEQ ID NO: 26541 - protein, 215 aa, Thermovibrio sp.
  REGION 1..215: note = tr|A0A432UDI8|A0A432UDI8_9BACT 6-carboxytetrahydropterin synthase OS=Thermovibrio sp.; OX = 2231115 GN=DSZ25_02815 PE=4 SV=1
MFEISKTFEFSAAHSVHSQRLKPEWAGNTYPKCRRLPGHGHNYILKVFLKSKELDESQMVTDFGHLKWLKSFIDNCFDHKLIIGSDDPAFDFLFEKLGLIEGDDFLIPEGEAEFLAVNGEFKIESGRVKRLPIGKLRDFWFITFNNYKGEEESPLTDFYQRLIDGISIFKGSPTSENLAKFFFNFVSRNVEPLGVRCSRVEIYETPTSCAAYYEE

SEQ ID NO: 26542 - protein, 123 aa, Thermovirga lienii
  REGION 1..123: note = tr|G7V651|G7V651_THELD 6-carboxy-5,6,7,8-tetrahydropterin synthase OS=Thermovirga lienii (strain ATCC BAA-1197 / DSM 17291 / Cas60314); OX = 580340 GN=Tlie_1308 PE=3 SV =1
MTVMYVKKEFTFDAAHYLGKYHGKCERLHGHTYRLAVTVKGEPDSEGMVMDFLELKAIVQEKVLSALDHSCLNDLVAQPTTENMVLWIKEKLEPEFKGKSCSLAEIELWESPGSSVILRLEKI

SEQ ID NO: 26543 - protein, 167 aa, Thioalbus denitrificans
  REGION 1..167: note = tr|A0A369C8I3|A0A369C8I3_9GAMM 6-pyruvoyltetrahydropterin/6-carboxytetrahydropterin synthase OS=Thioalbus denitrificans OX=547122; GN = DFQ59_10531 PE=4 SV=1
MSPNPERFAVRVDPGELHFNAAHFITFGGTCENLHGHNFHVRVEAVGRNTGDAFVLDFVELTRLAAAICRTLHDRVLLPGESREVAITPEGDALRVESHGRRFVLPADSCRVLPVSNATAEMLAWHIGGELIRALREAGSNRGLETLEVAVEEADRQWGVCRREVAP

SEQ ID NO: 26544 - protein, 410 aa, Thioalbus denitrificans
  REGION 1..410: note = tr|A0A369CC82|A0A369CC82_9GAMM 6-pyruvoyl tetrahydropterin synthase/QueD family protein OS=Thioalbus denitrificans OX=547122 GN=DFQ59_10559 PE=4 SV=1
MQCLECHARLERLDSEHLLGCCGLTLQEYALRHHRPLELLLAPDQVGAEDDPAAWTGPVAPPREHARAVLQGLRWAGLLRTEGAFAVIPGEVRRLDLLFWDLAWLRDFGFRFRQEYHYEGHRVMARNRLKAPAANLRRPRAVQLSPVPPPGFRDSLAVYLAHAAEPQAGYLFLPFPDARDGESVAETLQRAHGVALVRLDAADHPGGVLLRTRARADGERLLGLLESRLREMPGAWERFTDATPELAVAKELVFDAAHFITDHPAKCSNLHGGRYRLHVEIHGRVDPVTGCVVDYGYLKRVVTRQVVERFDHHTLNYADGALAWRSSTELLCIHIWERLIDYLPGLRALTLYETPQSWCTYRGPDLARFQAEGEAALLGHFRDPALGRSPLRALAAEPGARLRVVGEALS

SEQ ID NO: 26545 - protein, 127 aa, Thioalkalivibrio denitrificans
  REGION 1..127: note = tr|A0A1V3NDH7|A0A1V3NDH7_9GAMM 6-carboxy-5,6,7,8-tetrahydropterin synthase; OS = Thioalkalivibrio denitrificans OX=108003 GN=B1C78_12320; PE = 3 SV=1
MAAKYTLRVVTDFASAHTLREYPGACSRMHGHNWKVEAEVVATRLDDVGMGLDFRDIKQAAREIAGRLDHRYLNDLEPFREVNPTAENIAAWFYREMADKLNGPRVRVHAITLWETERACVRYTEED

SEQ ID NO: 26546 - protein, 127 aa, Thioalkalivibrio halophilus
  REGION 1..127: note = tr|A0A1V2ZW64|A0A1V2ZW64_9GAMM 6-carboxy-5,6,7,8-tetrahydropterin synthase; OS = Thioalkalivibrio halophilus OX=252474 GN=B1A74_11455; PE = 3 SV=1
MSARYTLRVLTDFASAHTLRDYPGQCANMHGHNWKVEAEVEAETLDDTGMAVDFKVVKNAAREIAGQLDHRYLNDVPPFDTVNPTAENIARWFFRELAERLNRPGLRVSSLTLWETDRACVRYSEDG

SEQ ID NO: 26547 - protein, 132 aa, Thioalkalivibrio halophilus
  REGION 1..132: note = tr|A0A1V3A058|A0A1V3A058_9GAMM Uncharacterized protein OS=Thioalkalivibrio halophilus OX=252474; GN = B1A74_04015 PE=4 SV=1
MYSLNVRDHFMIAHSFAGEVFGPAQNLHGATYVVDVTFRRAELDDDGLVVDIGRAGEVLRSILAELNYQNLDDRPEFEGQNTTTEFLARAIHGRIATAIHEERLGASARGLDAVCVTLHESHVAWAAYEAAP

SEQ ID NO: 26548 - protein, 132 aa, Thioalkalivibrio nitratireducens
  REGION 1..132: note = tr|L0DYM8|L0DYM8_THIND PTPS-like type 4; OS = Thioalkalivibrio nitratireducens (strain DSM 14787 / UNIQEM 213 / ALEN2) OX=1255043 GN=TVNIR_1794 PE=4 SV=1
MYSVNVRDHFMIAHSFTGEAFGPAQRLHGATYVVDATFRRRELDADGVVVDIALAGAQLGAVLAGMNYQNLDDHPDFEGRNTTTEFLAREIHQRLADAIQRGKLGPSASGIDALCVTLHESHVAWASFEGPL

SEQ ID NO: 26549 - protein, 152 aa, Thioalkalivibrio nitratireducens
  REGION 1..152: note = tr|L0DYR4|L0DYR4_THIND Queuosine biosynthesis QueD, PTPS-I OS=Thioalkalivibrio nitratireducens (strain DSM 14787 / UNIQEM 213 / ALEN2) OX=1255043 GN=queD [H] PE=4 SV =1
MRITRKLEFDAGHRIPDHRSQCRHLHGHRYTIMITLRGEIIEASGEPVNGMVMDFSDVKAIAKTHLVDRWDHAFLVYRGDHRVVEFLASMPDHKTVVLDCVPTAENLAQLAFRILDPLYRDTYGNQLRLDRVRLYETPNCWADAVREDLENR

SEQ ID NO: 26550 - protein, 152 aa, Thioalkalivibrio paradoxus
  REGION 1..152: note = tr|W0DPL7|W0DPL7_9GAMM 6-carboxy-5,6,7,8-tetrahydropterin synthase; OS = Thioalkalivibrio paradoxus ARh 1 OX=713585; GN = THITH_13875 PE=4 SV=1
MRITRKLEFDAGHRIPDHRSQCRHLHGHRYTIMITLRGEIIEASGEPVNGMVMDFSDVKAIAKTHLVDHWDHAFLVYRGDHKVAEFLASMPDHKTVVLDCVPTAENLAQLAFRILDPLYRDTYGNQLRLDRVRLYETPNCWADAVRADLEDR

SEQ ID NO: 26551 - protein, 132 aa, Thioalkalivibrio paradoxus
  REGION 1..132: note = tr|W0DII9|W0DII9_9GAMM 6-pyruvoyl tetrahydropterin synthase OS=Thioalkalivibrio paradoxus ARh 1 OX=713585; GN = THITH_08025 PE=4 SV=1
MYSVNVRDHFMIAHSFTGEAFGPAQRLHGATYVVDATFRRRELDADGVVVDIALATAQLSAVLAGMNYQNLDDHPEFEGHNTTTEFLAREIHQRLADAIQRGKLGPSAPGLDALCVTLHESHVAWASFEAPL

SEQ ID NO: 26552 - protein, 132 aa, Thioalkalivibrio sp.
  REGION 1..132: note = tr|D3SFQ3|D3SFQ3_THISK Uncharacterized protein; OS = Thioalkalivibrio sp. (strain K90mix) OX=396595; GN = TK90_0768 PE=4 SV=1
MYSLNVRDHFMIAHSFSGETFGPAQNLHGATYVVDVTFRRAALDADGLVVDIGRASEVVRAILGELNYQNLDEREDFRGQNTTTEFLAHAIHQRVAQAIARGELGESARGLDAVAVTLHESHVAWASYEGAP

SEQ ID NO: 26553 - protein, 127 aa, Thioalkalivibrio sp.
  REGION 1..127: note = tr|A0A318VU06|A0A318VU06_9GAMM 6-carboxy-5,6,7,8-tetrahydropterin synthase; OS = Thioalkalivibrio sp. ALE21 OX=1158175 GN=D893_01292; PE = 3 SV=1
MSARYTLRVLTDFASAHTLRDYPGQCANMHGHNWKVEAEVEAETLDDTGMAVDFKVVKSAAREIAGQLDHRYLNDVPPFDTVNPTAENIARWFFRELAERLNRPGLRVSTLTLWETDRACVRYSEDG

SEQ ID NO: 26554 - protein, 126 aa, unidentified
  source 1..126: note = Thioalkalivibrio sulfidiphilus
  REGION 1..126: note = tr|B8GN61|B8GN61_THISH 6-carboxy-5,6,7,8-tetrahydropterin synthase; OS = Thioalkalivibrio sulfidiphilus (strain HL-EbGR7); OX = 396588 GN=Tgr7_0831 PE=3 SV=1
MAAQYTLKVLTDFASAHTLRDYPGACARMHGHNWKVEAEVIATRLDDIGMGMDFRDIKQIAREIAGRLDHRYLNELEPFTEVNPTAENIAAWFFREMAAQINGPHRRMHALTLWETERACVRYTED

SEQ ID NO: 26555 - protein, 132 aa, Thioalkalivibrio versutus
  REGION 1..132: note = tr|A0A1V3BUC5|A0A1V3BUC5_9GAMM Uncharacterized protein OS=Thioalkalivibrio versutus OX=106634; GN = B0684_03470 PE=4 SV=1
MYSLNVRDHFMIAHSFSGETFGPAQKLHGATYVVDVTFRRKALDADGLVVDIGRASEVVKALLADLNYQNLDEREEFRGQNTTTEFLAHALHQRVARAIHDGELGESARELDAVCVTLNESHVAWASYEAAP

SEQ ID NO: 26556 - protein, 127 aa, Thioalkalivibrio versutus
  REGION 1..127: note = tr|A0A0G3GAZ2|A0A0G3GAZ2_9GAMM 6-carboxy-5,6,7,8-tetrahydropterin synthase; OS = Thioalkalivibrio versutus OX=106634 GN=B0684_11390 PE=3; SV = 1
MSARYTLRVLTDFASAHTLRDYPGQCANMHGHNWKVEAEVQAETLDDSGMAVDFKVVKTAAREIAGQLDHRYLNDVPPFDTVNPTAENIAQWFYREMAGRLNRPGLRMHALTLWETDRACVRYSEDG

SEQ ID NO: 26557 - protein, 164 aa, Thiobaca trueperi
  REGION 1..164: note = tr|A0A4R3MW10|A0A4R3MW10_9GAMM 6-pyruvoyltetrahydropterin/6-carboxytetrahydropterin synthase OS=Thiobaca trueperi OX=127458 GN=EDC35_105179; PE = 4 SV=1
MQQTLTRIDISKEYLNFSAGHFTLFSATERENLHGHNFQVRCAVTAAVGDDGLAFDYALLKRVLKALCDQLDERVLLPQWSPYLRIERQDGLVFACFADERIPFLDRDVLLLPIRNVTIEELAPLLLTRLREQAELTAQTIRTIELGVSSGRGQWAFSQWESHP

SEQ ID NO: 26558 - protein, 364 aa, Thiobaca trueperi
  REGION 1..364: note = tr|A0A4R3N1X9|A0A4R3N1X9_9GAMM 6-pyruvoyltetrahydropterin/6-carboxytetrahydropterin synthase OS=Thiobaca trueperi OX=127458 GN=EDC35_103209; PE = 4 SV=1
MSERLLHVAAAPFEAACHIPILPEGHRSRRLHGHSFRARVRADLPSDWAPFPGAATGRLTEALKECIDALDYRNLNEILPVPTDENLARWVRARLTAPGIESVGIQSTHDQGADLDGADHVHLWHRFRFEAAHCLPNVPADHPCGRLHGHGFEVILHADQTLADEDMGMDFDRLAALWAPLQTELHYACLNDIAGLENPTSERLSHWIWQRLKPELPVLSWVTVYETATAGCHYDGTHYRIWKEQRFESALRLVAAPDGDPRRRLHGHSYLLRLHLTAPLDTVLGWTVDYGDVKRIFNPVYQLLDHHRLDALPGLDAADPGSLTRWIRARIADDLPQLDRIDLHETPGCGATLCWGELGPALPT

SEQ ID NO: 26559 - protein, 393 aa, unidentified
  source 1..393: note = Thiobacillaceae bacterium
  REGION 1..393: note = tr|A0A4R1B6L0|A0A4R1B6L0_9PROT 6-carboxytetrahydropterin synthase OS=Thiobacillaceae bacterium LSR1 OX=2528202 GN=EZJ19_13555 PE=4 SV=1
MAAPDNRHLHACSGLTLQEYALRHALPLDRLVGPDALGEAEVAPLSAGTVPDEPARAVLAGLRLAGRVAERGTVCRVEGEVAWLDLLFWDLARLAPYGFRYRQEYLAEPGSHRVMARNRLVAHKRNLVGAWPPATEPPPPPALKYATYVAHAAELHAGYLFLPFVSPDEADDAAQYLARDLAVRTRRLDAGQPLLRTLALTDTERLLAGLEAELTAMPGVWARFHPDTPTISVTKEVVFDAAHFLTDHPAKCRNLHGGRYVLQVEVRGPIDPATGCLLDYGYLKRVVNARVVEDFDHHTLNYATPDLAWRSTTELICVYIWERLIDYLPGLASLTLYETPQSWCRYSGPDLAAWQALGKNPLLGRFTDPALGRSPWRPWQDGPEPKARPAAPR

SEQ ID NO: 26560 - protein, 119 aa, unidentified
  source 1..119: note = Thiobacillaceae bacterium
  REGION 1..119: note = tr|A0A4R1B3V6|A0A4R1B3V6_9PROT 6-carboxy-5,6,7,8-tetrahydropterin synthase; OS = Thiobacillaceae bacterium LSR1 OX=2528202 GN=queD PE=3; SV = 1
MDIYNIFHLECARRLPNLPAEHPCARVHGHSFRVEVHVSGPLDERLAWVLDFADVETAWGPVKAALDHRYLNDVPGLDNPTSERMAIWIWDRLKPALPGLAKIVIQETAVSGCIYTGTG

SEQ ID NO: 26561 - protein, 149 aa, Thiobacillus denitrificans
  REGION 1..149: note = tr|Q3SGV6|Q3SGV6_THIDA 6-carboxy-5,6,7,8-tetrahydropterin synthase; OS = Thiobacillus denitrificans (strain ATCC 25259); OX = 292415 GN=Tbd_2184 PE=3 SV=1
MLITRRLEFDAGHRIPNHGSQCRHLHGHRYALEITLAGAIVATEGAREQGMVMDFSDVKAIAREVLVDRWDHAFLVYEGDRVVVDLLAALPEHKTVVLPVVPTAEHLAEEAFRVLDAAYRERYGGRLGLQRVRLYETPNNWADATRAAD

SEQ ID NO: 26562 - protein, 159 aa, Thiobacillus denitrificans
  REGION 1..159: note = tr|A0A106BW25|A0A106BW25_THIDE 6-carboxy-5,6,7,8-tetrahydropterin synthase; OS = Thiobacillus denitrificans OX=36861 GN=ABW22_00540 PE=4; SV = 1
MLITRRLEFDAGHRIPNHASQCRHLHGHRYALEITLSGEIIRTEGAAEQGMVMDFSDVKTIANTVLVDHWDHAFLVYQGDRAVVEFLASLPEHKTVVLPLVPTVENLAAEAFRILDAAYRDTYGNQLRLQRVRLYETPNNWADAVRQGSGPPSGMEPSC

SEQ ID NO: 26563 - protein, 399 aa, Thiobacillus sp.
  REGION 1..399: note = tr|A0A1Q4EHI9|A0A1Q4EHI9_9PROT Uncharacterized protein OS=Thiobacillus sp. 0-1251 OX=1895858; GN = BGP19_04120 PE=4 SV=1
MVSELDNEHLLACSGLTLQEYALRHALPLDLLVSPDRIEAGAAHAELPLMPVAVPDETARAVLAGLRLAGKVHDVGSVCFVEGEVSWLDLLFCDLAQLAPYGFRFHQEYHYAPGTHRVVAKNRLVTQKRNLVGPWLPARVPPPEQRLKYATYLAHAAELHAGFLFLPFASNDEAEAATEFLSRELNVRTRHLAAGTPLLRTLTKADTTRLLDSLRGELEAMPGVWSRFHPDTPEVTVSKEVVFDSAHFLTDHPAKCSNLHGGRYVLHVKVRGQIDPITGCVLDYGYLKRVVNTRVVERFDHHTLNYAGPELAWRSTTELLSVYIWEQLIDFLPELIELTLYETPQSWCQYSGPDLETWQRQGSQPLLGRFTDPALGHSPWRHWLRTWDGQHEKRQAQGD

SEQ ID NO: 26564 - protein, 117 aa, Thiobacillus sp.
  REGION 1..117: note = tr|A0A1E4NYN8|A0A1E4NYN8_9PROT 6-carboxy-5,6,7,8-tetrahydropterin synthase; OS = Thiobacillus sp. SCN 63-57 OX=1660145 GN=ABT23_09785; PE = 3 SV=1
MDIFRIFHLQCARRLPALPESHPCSRLHGHSFKIELTVSGDIDPVLGWVLDFADIETAWRPIHAALDHRCLNDIDGLDNPTSENLAVWLWRQLRPALPGLSAVSVMEAHDAGCIYRG

SEQ ID NO: 26565 - protein, 364 aa, Thiocapsa marina
  REGION 1..364: note = tr|F9UIC9|F9UIC9_9GAMM Uncharacterized protein; OS = Thiocapsa marina 5811 OX=768671 GN=ThimaDRAFT_4682 PE=4; SV = 1
MSEQLFHVAAVPFEAARRVSILPAGHRSRRLHGHGFLAKVRAQLPTDWAPFPGGETDALARVLADAIAPLDYSDLNEHLPIPTDENLARWVRAHLGIPGVVSVGVQSTRDQGVDLDGLEQAHVWRRFRFEAAHRLPNVPEGHQCGRMHGHGFEVILHANQDLAGSDMGIDFDRLEAIWGPLYAELDHACLNEIPGLENPTSEMLARWIWDRLRPVFPQLSVVTVYETATAGCHYDGVHYRIWKEQRFESALQLVQAPEGDRRRRLHGHSYLMRLHLTAPLDEVLGWTIDYGDVKRQFKPVYDRLDHHRLDALPRLRQADPSNLLLWIREEVAAALPRLDRIDLHETPGCGAVLCWGALGPALPL

SEQ ID NO: 26566 - protein, 164 aa, Thiocapsa marina
  REGION 1..164: note = tr|F9U893|F9U893_9GAMM Uncharacterized protein; OS = Thiocapsa marina 5811 OX=768671 GN=ThimaDRAFT_0951 PE=4; SV = 1
MDTDILTRIEISKEYLNFSAGHFTIFSATERENLHGHNFRIRCNVTAPIGADGMAFDYVMLKRVLKALCDELDERLLLPERSPHLRIERVDRMVIAWFGEERLTFLERDVLLLPIRNVTIEELAELLLARLRVRPELDGRDLRAIELGVSSGDGQWAFSSWSTP

SEQ ID NO: 26567 - protein, 364 aa, Thiocapsa rosea
  REGION 1..364: note = tr|A0A495VE59|A0A495VE59_9GAMM 6-pyruvoyltetrahydropterin/6-carboxytetrahydropterin synthase OS=Thiocapsa rosea OX=69360 GN=BDD21_5285 PE=4; SV = 1
MSEQLFHVAAVPFEAARRVSILPAGHRSRRLHGHGFVAKVRAELPIAWAPFPGGETDALVRALADAIGPLDYSDLNEHLPIPTDENLARWVRAQLGVPGVVSVGVQSTRDQGVDLDGREQAHVWRRFRFEAAHRLPNVPEGHQCGRMHGHGFEVILHANQDLAGNDMGIDFDRLEAIWAPLSTELDHVCLNDIPGLENPTSEMLARWIWDRLRPVFPQLSVVTVYETATAGCHYDGVHYRIWKEQRFESALALMQAPKGDRRRRLHGHSYLMRLHLTAPLDEVLGWTIDYGDVKRQFKSVYDRLDHHRLDALPRLRQADPANLLLWIREEVAAALPQLDRIDLHETPGCGAVLCWGASGPALPL

SEQ ID NO: 26568 - protein, 407 aa, Thiocapsa rosea
  REGION 1..407: note = tr|A0A495VCI6|A0A495VCI6_9GAMM 6-pyruvoyl tetrahydropterin synthase/QueD family protein OS=Thiocapsa rosea OX=69360 GN=BDD21_4671 PE=4 SV=1
MSLPDSRADPAQSSPRHPPEPLGLTLQEQAIRRHLPLELLVDRSALTHRDRLGDYPSPGGFPSEAARAVLLGLRWAGLLREDADFVWIPGEIRRLELLLWDLSSLQDYGFRFRQDYVYAGSTHRVVALNGLKAPKANVEHFRSLGVCPIAPPDFLASLAVFLAHVGELHAGYLFLPFQRADQGRAVAVELTRHGIGFQELDAADEPQGLLLRSATLADARCLLDLLRDRLQPMPGALERFEQTTPEVTVSKELVFDAAHFITDHPAKCSNLHGGRYRLHVKVTGRIDPVTGCVVDYGYLKRVVSRRVVERFDHHTLNYCAPELAWRSSTELLCVYIWEQLIDYLPGLDELELYETPQSWCRYRGPTLEHLQRHGPDPVLTYFQQDLGSSPLRRQIQPLPVRDSGLER

SEQ ID NO: 26569 - protein, 364 aa, Thiocapsa roseopersicina
  REGION 1..364: note = tr|A0A1H2SV65|A0A1H2SV65_THIRO 6-pyruvoyltetrahydropterin/6-carboxytetrahydropterin synthase OS=Thiocapsa roseopersicina OX=1058; GN = SAMN05421783_103138 PE=4 SV=1
MREHLYHVAAVPFEAARRVSILPAGHRSRRLHGHGFLAKVRAELPVDWAPFPGGETEALARALADCIAPLDYSDLNAHLPIPTDENLARWVRAQLGVPGVVSLGIQSTRDQGVDLDGLEQAHVWRRFRFEAAHRLPNVPEGHQCGRMHGHGFEVILHANQDLAGSDMGVDFDRLEEIWAPLYAELDHACLNDIPGLENPTSEMLARWIWDRLQPVFPHLSCVTVYETATAGCHYDGVHYRIWKEQRFESALQLVQAPEGDRRRRLHGHSYLMRLHLTAPLDEVLGWTIDYGDVKRQFKPVYDRLDHHRLDALPRLRQADPANLLLWIREEVAAALPQLDRIDLHETPGCGAVLCWGALGPALPL

SEQ ID NO: 26570 - protein, 164 aa, Thiocapsa roseopersicina
  REGION 1..164: note = tr|A0A1H3C7Q8|A0A1H3C7Q8_THIRO 6-pyruvoyltetrahydropterin/6-carboxytetrahydropterin synthase OS=Thiocapsa roseopersicina OX=1058; GN = SAMN05421783_13121 PE=4 SV=1
MDTDTLTRIEISKEFLNFSAGHFTIFSATERENLHGHNFRIRCNVTAPVGADGMAFDYVMLKRVLKALCDELDERLLLPELSPHLRIERGDGMVIAWFGEERLTFLERDVLLLPIRNVTIEELAELLLARLRVRPELAGRDLRAIELGVSSGDGQWALSSWRTP

SEQ ID NO: 26571 - protein, 138 aa, Thiocapsa sp.
  REGION 1..138: note = tr|A0A0U5IBZ5|A0A0U5IBZ5_9GAMM Uncharacterized protein OS=Thiocapsa sp. KS1 OX=610332 GN=THIOKS11020038; PE = 4 SV=1
MYSVCVRDHIMIAHSFRGDVFGPAQRLHGATYVVDVEFSRPELDADGLVVDIGLASQTLRALLADLDYRNLDEEPAFQGRNTTTEFLARVIFDRMAAQVSAGALGAGAGGITALRVQLSESHVAWAAYTAELPQRSRP

SEQ ID NO: 26572 - protein, 164 aa, Thiocapsa sp.
  REGION 1..164: note = tr|A0A0U5J8Q7|A0A0U5J8Q7_9GAMM Uncharacterized protein OS=Thiocapsa sp. KS1 OX=610332 GN=THIOKS12340069; PE = 4 SV=1
MDTDTLTRIEISKEYLNFSAGHFTIFSATERENLHGHNFRIRCNVTAPVGTDGMAFDYVMLKRVLKALCDELDERLLLPERSPHLRIERGVGMVIAWFGEERLPFLERDVLVLPIRNVTIEELADLLLTRLRVRPELVGRDLRAIELGVSSGDGQWAFSSWRTP

SEQ ID NO: 26573 - protein, 117 aa, unidentified
  source 1..117: note = Thioclava atlantica
  REGION 1..117: note = tr|A0A085TSC8|A0A085TSC8_9RHOB 6-carboxy-5,6,7,8-tetrahydropterin synthase OS=Thioclava atlantica OX=1317124 GN=DW2_16541 PE=3 SV=1
MYRISKEFHFSASHQLSHLPADHQCARLHGHNYIVVVELASAELNSDGFVRDYHELKPLKTYIDEIFDHRHLNDVLDVPSTAENLARHFFDWCRARWPETAAVKVSETPKTWAEFRP

SEQ ID NO: 26574 - protein, 117 aa, unidentified
  source 1..117: note = Thioclava dalianensis
  REGION 1..117: note = tr|A0A074TKR5|A0A074TKR5_9RHOB 6-carboxy-5,6,7,8-tetrahydropterin synthase OS=Thioclava dalianensis OX=1185766 GN=DL1_12915 PE=3 SV=1
MYKISKEFHFSASHQLSHLPDDHQCARLHGHNYVVVVELAAAELNADGFVRDYGELKPLKSYIDAQFDHRHLNEVMERPSTAENMARHFYDWCVARWPETSAVRVSETPKTWAEYRP

SEQ ID NO: 26575 - protein, 117 aa, unidentified
  source 1..117: note = Thioclava electrotropha
  REGION 1..117: note = tr|A0A1W9XV20|A0A1W9XV20_9RHOB 6-carboxy-5,6,7,8-tetrahydropterin synthase OS=Thioclava electrotropha OX=1549850 GN=AKL02_02545 PE=3 SV=1
MFRIRKEFHFSASHQLSHLREDHQCARLHGHNYIVVVELAAATLDENGFVRDYHDLKPLKAYIDDTFDHRHLNDVMEVPSTAENMAKHFYDWCKARWPETSAALVSETPKTWAEYRP

SEQ ID NO: 26576 - protein, 117 aa, Thioclava sp.
  REGION 1..117: note = tr|A0A4R7KK97|A0A4R7KK97_9RHOB 6-carboxy-5,6,7,8-tetrahydropterin synthase OS=Thioclava sp. ES.032 OX=1798206 GN=AXZ80_4235 PE=3 SV=1
MFRIRKEFHFSASHQLSHLPDDHQCARLHGHNYIVVVELAAATLDENGFVRDYHDLKPLKTYIDESFDHRHLNDVMEVPSTAENMAKHFYDWCKARWPETSAALVSETPKTWAEYRP

SEQ ID NO: 26577 - protein, 117 aa, Thioclava sp.
  REGION 1..117: note = tr|A0A1T2A6T5|A0A1T2A6T5_9RHOB 6-carboxy-5,6,7,8-tetrahydropterin synthase OS=Thioclava sp. F28-4 OX=1915315 GN=BMI87_00245 PE=3 SV=1
MFRIRKEFHFSASHQLSHLPEDHQCARLHGHNYIVVVELAAATLDENGFVRDYHDLKPLKTYIDDTFDHRHLNDVMDVPSTAENMAKHFYDWCKARWPETSAALVSETPKTWAEYRP

SEQ ID NO: 26578 - protein, 364 aa, Thiocystis violascens
  REGION 1..364: note = tr|I3Y5B2|I3Y5B2_THIV6 6-pyruvoyl-tetrahydropterin synthase OS=Thiocystis violascens (strain ATCC 17096 / DSM 198 / 6111) OX=765911 GN=Thivi_0093 PE=4 SV=1
MTERLFHVAAAPFEAARRVAILPEGHRARRLHGHGFLARVRADPPSDWAAFPGAATGMLTAALQACVGALDYRDLNEFLPVPTDENLARWVRDRLGVPGVASIGIQSTRDQGADLDGADHAHVWRRFRFEAAHRLPNVPPGHQCGRMHGHGFEVILHADQALAGRDMGSDFDRLDTLWAPLQAELHHACLNDIPGLENPTSELLASWLWQRLKPELPALSWVTVYETATAGCHYDGRHYRIWKEQRFESALQFPAAPEGDSRRRLHGHSYLLRLHLTAPLDTVLGWTVDYGDVKALFAPVYRQLDHHRLDALPRLDAADPGRLALWIREECAAVLPQLDRIDLHETPGCGASLCWGELGPALPT

SEQ ID NO: 26579 - protein, 166 aa, Thiocystis violascens
  REGION 1..166: note = tr|I3YDS2|I3YDS2_THIV6 6-pyruvoyl-tetrahydropterin synthase OS=Thiocystis violascens (strain ATCC 17096 / DSM 198 / 6111) OX=765911 GN=Thivi_3266 PE=4 SV=1
MTPQQPLTRIEISKDYLNFSAGHFTLFSATERENLHGHNFQVRCAVTAAVGTDGLAFDYVLLKRVLKNLCDQLDERVLLPQRSPHLCIEHRDGMVFALFADERIPFLERDVLPLPIRNVTIEELAALLLARLRERPELAGRDLRAIELGVSSGLGQWAFSSWESRI

SEQ ID NO: 26580 - protein, 365 aa, Thioflavicoccus mobilis
  REGION 1..365: note = tr|L0H0S8|L0H0S8_9GAMM 6-pyruvoyl-tetrahydropterin synthase OS=Thioflavicoccus mobilis 8321 OX=765912; GN = Thimo_2970 PE=4 SV=1
MMGEQLFHVAAAPFEAARRVAILPSGHRARRLHGHSFIARVWAAVPLGWASSPGGEGDALAAALGERVAQLDYRDLNEHLPVPTDENLARWLRRHLDVPGLTSVGIQSTREQGADLDGRDHVHVWRRFRFEAAHWLPRVAPDHQCGRLHGHGFEVIIHADQDLAGGDMGVDYDRLAALWAPLHDELQHACLNDIPGLENPTSELLARWLWQRLKPQLPALSWVSVYETATAGCHYDGERFRIWKELRFEAALQLRRAPDGDPRRRWHGHSYLLRLHLTAPLDEVLGWTLDYGDVKALFQPIYRQLDHQRLNALPHLSDADPASLAGWVREQAVACLPQLDRIDLYETPGCGVVLSWGGNGPALPL

SEQ ID NO: 26581 - protein, 140 aa, unidentified
  source 1..140: note = Thioflexothrix psekupsii
  REGION 1..140: note = tr|A0A251X6Y3|A0A251X6Y3_9GAMM 6-carboxy-5,6,7,8-tetrahydropterin synthase; OS = Thioflexothrix psekupsii OX=1570016 GN=TPSD3_10905 PE=3; SV = 1
MYSIITKVTYEYAHRLMYHQGKCRHVHGHSGEVTVELTASVLNENGFVMDFNDIKTPLKQWINEHWDHAYLANRHDPLLPTLQANGMKIFIFDAEPSAEVMAAFLYWKINDFITRPEVRVKRVTVRETCTGSASYEPEHH

SEQ ID NO: 26582 - protein, 128 aa, unidentified
  source 1..128: note = Thiogranum longum
  REGION 1..128: note = tr|A0A4R1H6R3|A0A4R1H6R3_9GAMM 6-carboxy-5,6,7,8-tetrahydropterin synthase OS=Thiogranum longum OX=1537524 GN=DFR30_0674 PE=3 SV=1
MAACYTLKIVTDFASAHTLREYPGACARMHGHNWKVETEVRASSLDKMGMGVDFKVIKQATRDIAAKLDHRYLNDLEPFTDINPTAENIAAYFYQELSAQLNNESIRVHAVTLWETERACVRYAEDES

SEQ ID NO: 26583 - protein, 127 aa, Thiohalobacter thiocyanaticus
  REGION 1..127: note = tr|A0A426QHB1|A0A426QHB1_9GAMM 6-carboxy-5,6,7,8-tetrahydropterin synthase; OS = Thiohalobacter thiocyanaticus OX=585455 GN=queD PE=3; SV = 1
MAARYTLKVLTEFASAHTLREYPGACARMHGHNWKVETEVDAGALDDVGMGVDFKVIKDAARRIGERLDHRYLNEVEPFTEVNPTAENIAAYFYRELAAELNNDRIHVRSVTLWETDRACVRYTEDH

SEQ ID NO: 26584 - protein, 127 aa, Thiohalobacter thiocyanaticus
  REGION 1..127: note = tr|A0A1Z4VPS2|A0A1Z4VPS2_9GAMM 6-carboxy-5,6,7,8-tetrahydropterin synthase; OS = Thiohalobacter thiocyanaticus OX=585455 GN=FOKN1_1192; PE = 3 SV=1
MPARYTLKVLTEFASAHTLREYPGACARMHGHNWKVETEVDASALDEVGMGVDFKVIKNAARRIGERLDHRYLNEIEPFTEVNPTAENIAAYFYRELAAELNNDRIRIRSVTLWETDRACVRYTEDQ

SEQ ID NO: 26585 - protein, 127 aa, Thiohalomonas denitrificans
  REGION 1..127: note = tr|A0A1G5Q095|A0A1G5Q095_9GAMM 6-carboxy-5,6,7,8-tetrahydropterin synthase; OS = Thiohalomonas denitrificans OX=415747; GN = SAMN03097708_01072 PE=3 SV=1
MTAQYTLKVVTDFAAAHSLRDYPGDCQHLHGHNWKVEVEVAAPALDRMGMVVDFKRIKQAAREVTEELDHRYLNEIPPFDELNPTAENMAAYIYRQIGERLNDQRVKVCAITLWETERACVRYTEEG

SEQ ID NO: 26586 - protein, 126 aa, Thiohalophilus thiocyanatoxydans
  REGION 1..126: note = tr|A0A4R8ILL1|A0A4R8ILL1_9GAMM 6-carboxy-5,6,7,8-tetrahydropterin synthase; OS = Thiohalophilus thiocyanatoxydans OX=381308; GN = EDC23_1591 PE=3 SV=1
MAPRYTMTIVTDFAAAHYLRDYEGVCNRLHGHNWKVEVHVQASALDRVGMGMDFKDIKDATRGLLGGLDHYNLNDIAPFDQINPTAENIAAFFYSKLSDVLNSDVVKVSAVTIWETDRACVTYTED

SEQ ID NO: 26587 - protein, 175 aa, Thiohalorhabdus denitrificans
  REGION 1..175: note = tr|A0A0P9CXE1|A0A0P9CXE1_9GAMM 6-pyruvoyltetrahydropterin/6-carboxytetrahydropterin synthase OS=Thiohalorhabdus denitrificans OX=381306; GN = SAMN05661077_1760 PE=4 SV= 1
MFTLAFTRRYSMSHRLLSLYNGPCGVPHGHNEHVTVRLQARHPEPLDGEANLVTPFHAAKKRWHAWIDERVDHALQLSDRDPLLTYFQAQEPALLDRILVTPGDPSTEALAACFMAKVNAFLAEQGGDLRCVEVTIEETPTNTVTFDGDPELVLPGVRFPDPPWWRRPDGSINDL

SEQ ID NO: 26588 - protein, 129 aa, Thiohalospira halophila
  REGION 1..129: note = tr|A0A1I1U6M7|A0A1I1U6M7_9GAMM 6-carboxy-5,6,7,8-tetrahydropterin synthase; OS = Thiohalospira halophila DSM 15071 OX=1123397; GN = SAMN05660831_02013 PE=3 SV=1
MTARYTMTIRTEFAAAHWLRDYDGPCNRLHGHNWKVDVEVDASGLDELGMGVDFGDIKAATREITDGLDHRNLNDLPPFDRLNPTAENIAAHLHGELSERLNDERVRVRAVTLWETDRACVRYTEDEPA

SEQ ID NO: 26589 - protein, 284 aa, unidentified
  source 1..284: note = Thiolapillus brandeum
  REGION 1..284: note = tr|W0TNR8|W0TNR8_9GAMM Uncharacterized protein; OS = Thiolapillus brandeum OX=1076588 GN=TBH_C2352 PE=4 SV=1
MRLFVHQLSVLDFSYLHPSRGLVGESWHVDIELEGGLDDQGMVLDFGEVKRQVKQLIDENFDHRLLVPADHKGLTLADRQLSFVLDNGQRIRHQGPAEALLLIPGETISTRSVAQAIHQTLLPTLPDNVESLQISLYPESEEGAWYQYSHGLKLHYGNCQRIAHGHRSRIRIWRDGARNEMLEQLWAERLRDIYIGTEEDLVAITSWNDQSCFRFAYTAEQGSFELELDAGRCYLMNTESTVENIARHIRERLEEEHPDSHFRVQAFEGIGKGAISESIGPAPQ

SEQ ID NO: 26590 - protein, 126 aa, unidentified
  source 1..126: note = Thiomicrorhabdus sp.
  REGION 1..126: note = tr|A0A4P9K4W0|A0A4P9K4W0_9GAMM 6-carboxy-5,6,7,8-tetrahydropterin synthase; OS = Thiomicrorhabdus sp. G1 OX=2580412 GN=queD PE=3 SV=1
MAQRFVLKTLLDFASAHSLRGYPGDCAKLHGHNWKIEVQVRGEKLNEIGMVIDFKEIKRHAKEVIKELDHSFLNDHEHFQEVNPTAENIAVYLFDEINKRISTDAVAMHSITVWENDRNCVTYSND

SEQ ID NO: 26591 - protein, 128 aa, unidentified
  source 1..128: note = Thiomicrospira aerophila
  REGION 1..128: note = tr|W0DQX7|W0DQX7_9GAMM 6-carboxy-5,6,7,8-tetrahydropterin synthase; OS = Thiomicrospira aerophila AL3 OX=717772 GN=THIAE_03760; PE = 3 SV=1
MKKNFILTTQLDFAAAHRLIGYEGDCAKLHGHNWKIEVSVIGHTLNDIGMVIDFKQVKQHAKDVVAELDHSYLNDHPHFQRTNPTAENIAHYLYNELAKRLDQDAFKMHQIRVWENDRNYVTYSETDH

SEQ ID NO: 26592 - protein, 128 aa, unidentified
  source 1..128: note = Thiomicrospira cyclica
  REGION 1..128: note = tr|F6D8E6|F6D8E6_THICA 6-carboxy-5,6,7,8-tetrahydropterin synthase; OS = Thiomicrospira cyclica (strain DSM 14477 / JCM 11371 / ALM1) OX=717773 GN=Thicy_1030 PE=3 SV=1
MKKNFILTTQLDFAAAHRLIGYEGDCAKLHGHNWKIEVSVIGYSLNDIGMVVDFKLVKHHAKAVVAELDHSYLNDHPHFQRTNPTAENIAHYLYNELAKRLNQDQFKMHQVRVWENDRNYVTYSETEH

SEQ ID NO: 26593 - protein, 128 aa, Thiomicrospira sp.
  REGION 1..128: note = tr|A0A0X3T924|A0A0X3T924_9GAMM 6-carboxy-5,6,7,8-tetrahydropterin synthase; OS = Thiomicrospira sp. WB1 OX=1685380 GN=AVO41_05610 PE=3; SV = 1
MPQTYFLNTQLEFASAHRLHGYPGDCANLHGHNWKVEVTVKGHQLDDVGMVMDFKAIKREAKTIIDELDHTYLNDHPAFQSDNPTAENIARFIYQTLAKRINSEQVQMHRLTLWENDRNSVTYEQTDD

SEQ ID NO: 26594 - protein, 127 aa, Thiomicrospira sp.
  REGION 1..127: note = tr|A0A0X3TM05|A0A0X3TM05_9GAMM 6-carboxy-5,6,7,8-tetrahydropterin synthase; OS = Thiomicrospira sp. XS5 OX=1775636 GN=AVO42_08930 PE=3; SV = 1
MAQQFVLKTLLDFAAAHSLKNYPGDCAKLHGHNWKIEVQVQGSKLNEIGMLVDFKEIKKHAKQVVAELDHTFLNDHPSFQAQNPTAENIAVFLYREIESRIQSDTVKMHSLTVWENDRNCVIYSEND

SEQ ID NO: 26595 - protein, 121 aa, Thiomonas delicata
  REGION 1..121: note = tr|A0A238D4H9|A0A238D4H9_THIDL 6-carboxy-5,6,7,8-tetrahydropterin synthase OS=Thiomonas delicata OX=364030 GN=THIARS_60931 PE=3 SV=1
MKFELSQRFFFEAAHTLDRSIDREGSLRVHGHTYWAEISVAGVPDPVTGMVVDLAYIRREIERVRDALDHRFLDDVDGLGPATLEGLCSYLWRQFRPALPHLSRVEVWREASGDRCRLTDD

SEQ ID NO: 26596 - protein, 81 aa, Thiomonas delicata
  REGION 1..81: note = tr|A0A238D188|A0A238D188_THIDL 6-pyruvoyl tetrahydrobiopterin synthase (PTPS) (Modular protein); OS = Thiomonas delicata OX=364030 GN=THIARS_50271 PE=4 SV=1
MGWTVDFGDVKQIFEPIFKSIDHHPLFEVEGIRDGDTASIAAWVFENAARKPPELTQVDLYETPGCGSILAIDKDGPILPI

SEQ ID NO: 26597 - protein, 121 aa, Thiomonas sp.
  REGION 1..121: note = tr|A0A259Q1L9|A0A259Q1L9_9BURK 6-carboxy-5,6,7,8-tetrahydropterin synthase OS=Thiomonas sp. 14-66-4 OX=1970450 GN=B7X42_02595 PE=3 SV=1
MKFELSQRFFFEAAHTLDRSIDREGSLRVHGHTYWAEISVAGVPDPVTGMVVDLAYIRREIERVRDALDHRFLDDVDGLGPATLEGLCAYLWRQFRPALPHLSRVEVWREASGDRCRFTDG

SEQ ID NO: 26598 - protein, 121 aa, Thiomonas sp.; identical to SEQ ID NO: 26597
  REGION 1..121: note = tr|A0A259QGJ5|A0A259QGJ5_9BURK 6-carboxy-5,6,7,8-tetrahydropterin synthase OS=Thiomonas sp. 13-66-29 OX=1970448 GN=B7X31_12550 PE=3 SV=1

SEQ ID NO: 26599 - protein, 119 aa, Thioploca ingrica
  REGION 1..119: note = tr|A0A090APW6|A0A090APW6_9GAMM 6-carboxy-5,6,7,8-tetrahydropterin synthase OS=Thioploca ingrica OX=40754 GN=THII_3323 PE=3 SV=1
MEIYKQFNIEAAHHLPNVPTGHKCARLHGHSFQVTIHVAGTVNEQMGWITDFADIKTAFAPLYEQLDHHYLNEIAGLENPTSENIARWIWQHLKPRLPNLWKITLQETCTSGCIYIGDN

SEQ ID NO: 26600 - protein, 118 aa, unidentified
  source 1..118: note = Thiopseudomonas denitrificans
  REGION 1..118: note = tr|A0A4R6U356|A0A4R6U356_9GAMM 6-carboxy-5,6,7,8-tetrahydropterin synthase; OS = Thiopseudomonas denitrificans OX=1501432; GN = DFQ45_101230 PE=3 SV=1
MYRISKEFHFSASHQLVNMPAGHPCARLHGHNYVVRLELASEELDQYGFVVDYTALKAFKDYIDDAFDHRHLNEVLDSDLPTAELLARHLHDWAKARWPQVCAVAVSETPKTWARYQP

SEQ ID NO: 26601 - protein, 397 aa, unidentified
  source 1..397: note = Thiorhodococcus drewsii
  REGION 1..397: note = tr|G2DX08|G2DX08_9GAMM Uncharacterized protein; OS = Thiorhodococcus drewsii AZ1 OX=765913; GN = ThidrDRAFT_0569 PE=4 SV=1
MTMQDMGEVRSVGLEQWLDAEGLTLQEYAIRHHVPLDLLVERNDLNRPDRISDYPPPSHYPGERARAVLRGLGWAGLLREEGDFSVLPGEVRRLDLLFWNLDALSDYGFRFRQEYRYSDRSHRVVAHNRLKAPKSNLSLLDAVPHCPVPPPDFWLALATFVAHVAEWHAGYLFMPFQQASQAHWVAVELERQGITVIELDAADQPGGALLRTHALADTQCLLDRLRPHLSAMPGALERFEQETPTLTVCKNLVFDSAHFITDHPAKCSNLHGGRYALNVKVRGRMDPVTGCVIDYGYLKRVVGRRVIERFDHATLNYAASELAWRSSTEMLCVFIWEQLIDYLPGLVELELHETTQSWCNYSGPSLADFQRDGSDPVLTHFQRQIGASSWRASVAAI

SEQ ID NO: 26602 - protein, 136 aa, unidentified
  source 1..136: note = Thiorhodococcus drewsii
  REGION 1..136: note = tr|G2E2T5|G2E2T5_9GAMM Uncharacterized protein; OS = Thiorhodococcus drewsii AZ1 OX=765913; GN = ThidrDRAFT_2598 PE=4 SV=1
MYGIRVRDHIMIAHSFQGEVFGPAQRLHGATYVVDVEFRRETLDEANLVVDIGLASQALRQVLDAFDYRNLDELPELTGQNTTTEFLARHIFDAMAQRIASGELGATALALNGMRVELAESHRAWAFFEGSLPGAT

SEQ ID NO: 26603 - protein, 126 aa, Thiorhodospira sibirica
  REGION 1..126: note = tr|G4E4P2|G4E4P2_9GAMM 6-carboxy-5,6,7,8-tetrahydropterin synthase; OS = Thiorhodospira sibirica ATCC 700588 OX=765914; GN = ThisiDRAFT_1271 PE=3 SV=1
MPATYVLKVCVDFSAAHVLNGYDGGCAHLHGHNWQVEVEVKATALDDLGMGLDFKVIKQAAREVVAMLDHRYLNDLAAFSQQNPTAENIAAWIFGELATRLNRPHVRMHAVTLWETPRACVRYSET

SEQ ID NO: 26604 - protein, 370 aa, Thiorhodovibrio sp.
  REGION 1..370: note = tr|H8Z4H3|H8Z4H3_9GAMM 6-pyruvoyl-tetrahydropterin synthase OS=Thiorhodovibrio sp. 970 OX=631362; GN = Thi970DRAFT_03854 PE=4 SV=1
MDALLFTAAETFHAARRLANLPAGHRARAVHGHGFGVKIHADLRERGDLGAGTETRALGDVLRQASAALDYQDLNAFIAEPGDLGIATWLGERLVESLHPGRLAALGLNSTAWQGVTTVAEAPTRGWRRYRFEAAHRLPSVPEGHPCGRMHGHGFEVTLHADLAPDDPTGLSGYDKLDAAWAPLARQLHHSCLNLLSGLENPTSELLCLWLWQRLEPELPGLRQVMVRETRTAGCCYDGQRFRIWKDLFFESALRFGELPEADPWHGLHGHSYALRLMLGAPLDEVLGWTVDFGDVKVLFKPVYARLDHFDLSTLPGLQRPGVAELLHWIAGQVADVLPQIDGIALNPTPGCGASLSLAGADHGLTLPAL

SEQ ID NO: 26605 - protein, 362 aa, Thiothrix caldifontis
  REGION 1..362: note = tr|A0A1H4FV87|A0A1H4FV87_9GAMM 6-pyruvoyltetrahydropterin/6-carboxytetrahydropterin synthase OS=Thiothrix caldifontis OX=525918; GN = SAMN05660964_03141 PE=4 SV=1
MNETLFYVAAAPFEAACRVENALGQSPLSAAHPARRLHGHSFLAKVRAIGASSVEALRQQLAHSVAPLDYNDLNQFLPMPTDENLARWIRARLALPSVASVGVQSTQHQGADLDLADNAHIWRRFRFEAAHRLPNVAPGHQCGRMHGHGFEVILHANQNLQAQDMGVDFDRLAAVWQPLHDQLHHHCLNDIQGLDNPTSETLAAWLWERLKPELDALSWVSVYETVTAGCHYDGQHYRIWKDQRFESALTLSRADPADSVRRLHGHSYLLRLHLTAPLDTVMGWTVDYGDVKAQFKPIYQQLDHHNLNDLTGLDEPDPASVARWIRTQATAGLPQLDRIDLYETPGCGVVLSWGEHEPGLPV

SEQ ID NO: 26606 - protein, 125 aa, Thiothrix lacustris
  REGION 1..125: note = tr|A0A1Y1QVN2|A0A1Y1QVN2_9GAMM 6-carboxy-5,6,7,8-tetrahydropterin synthase OS=Thiothrix lacustris OX=525917 GN=BWK73_08180 PE=3 SV=1
MALYTLKVIADFASAHTLRDYPGACSRMHGHNWKVEAEVEANTLNSIGMAIDFKDIKREVRAIAEELDHQYLNDLAPFQTINPTAEHIARYFFQTLSQRLNDERVRVCALTIWETERACVRYAEG

SEQ ID NO: 26607 - protein, 126 aa, Thiothrix sp.
  REGION 1..126: note = tr|A0A432UYE2|A0A432UYE2_9GAMM 6-carboxy-5,6,7,8-tetrahydropterin synthase OS=Thiothrix sp. OX=1032 GN=queD PE=3 SV=1
MTEKYTLKIVTDFASAHTLRDYPGACSRMHGHNWKVEAEVTATQLDELGMGIDFKDIKRATREITARLDHRYLNDIAPFTEKNPTAENIAAYLYSELSKALNSDQVKVRSITLWETERACVRYSKD

SEQ ID NO: 26608 - protein, 128 aa, unidentified
  source 1..128: note = Thiotrichaceae bacterium
  REGION 1..128: note = tr|A0A2A4WK78|A0A2A4WK78_9GAMM 6-carboxy-5,6,7,8-tetrahydropterin synthase; OS = Thiotrichaceae bacterium OX=2030882 GN=queD PE=3 SV=1
  VARIANT 55: note = Xaa can be any naturally occurring amino acid
MPARYTLKIVTDFAAAHSLRNYPGDCCRLHGHNWKVEAEVVCTQLDDLGIGIDFXTIKKETNAIADQLDHRYLNEVPPFDEINPTAENIAAFLFKRLSEKLNSEVLRVSAITLWETERACVRYSEDET

SEQ ID NO: 26609 - protein, 128 aa, unidentified
  source 1..128: note = Thiotrichaceae bacterium
  REGION 1..128: note = tr|A0A2A5FX99|A0A2A5FX99_9GAMM 6-carboxy-5,6,7,8-tetrahydropterin synthase; OS = Thiotrichaceae bacterium OX=2030882 GN=queD PE=3 SV=1
MAARYQLKVVTEFASAHTLRGYPGACSRMHGHNWKVELEAVSTQLDAVGMGVDFKIMKNAANEIGNRLDHRYLNDLEPFKKVNPTAENIAAYMYKEISTRINSDTVKVTALTIWETERACVRYSEENE

SEQ ID NO: 26610 - protein, 118 aa, unidentified
  source 1..118: note = Thiotrichales bacterium
  REGION 1..118: note = tr|A0A1H6F9K8|A0A1H6F9K8_9GAMM 6-carboxy-5,6,7,8-tetrahydropterin synthase; OS = Thiotrichales bacterium HS_08 OX=1899563 GN=queD_2 PE=3; SV = 1
MEIFKDFSFDAAHHLPNVPEGHKCARLHGHTYRIRIYICGEVGEDSGWVMDFGDIKQIFQPIYQQLDHYYLNEIPGLENPTAENLARWIWQHLKPTLPLLSKIMVKETCTAGCVYSGD

SEQ ID NO: 26611 - protein, 127 aa, unidentified
  source 1..127: note = Thiotrichales bacterium
  REGION 1..127: note = tr|A0A259KBE1|A0A259KBE1_9GAMM 6-carboxy-5,6,7,8-tetrahydropterin synthase; OS = Thiotrichales bacterium 34-46-19 OX=1970605; GN = B7X52_03390 PE=3 SV=1
MAMAFTLTTQLEFAAAHRLRGYDGNCARLHGHNWKVEISLTGSQLNDVGMLIDFKEIKRTGKQILTQLDHYYLNDISPFDAELNPTAENIAFYLFQQLSEALNDERISVSAVTVWENERNSATFSLD

SEQ ID NO: 26612 - protein, 125 aa, unidentified; identical to SEQ ID NO: 18212
  source 1..125: note = Bathymodiolus puteoserpentis
  REGION 1..125: note = tr|A0A483AP05|A0A483AP05_9BACT 6-carboxy-5,6,7,8-tetrahydropterin synthase OS=thiotrophic endosymbiont of Bathymodiolus puteoserpentis (Logatchev); OX = 343240 GN=BPUTE OSOX_455 PE=3 SV=1

SEQ ID NO: 26613 - protein, 193 aa, Thiovulum sp.
  REGION 1..193: note = tr|J0UWS8|J0UWS8_9HELI 6-pyruvoyl-tetrahydropterin synthase OS=Thiovulum sp. ES OX=1177931 GN=ThvES_00016710; PE = 4 SV=1
MIIRKLFKFENAHIVRKCTSRRCRESIHGHSYKTEIFLESNFLDNGHMVYDFGLMKSYIKDLIDSFDHSISIWNGDKSEYISDMQKYSERWILLPVSPSAEQLSRIIFVLIDSFFKSNKMINGEKGVKLQSVIVHETDTGYAQCFREDAYSENMGKIELSEIIFSKDIISDWKDINLFENLKSGKPFANPKTL

SEQ ID NO: 26614 - protein, 134 aa, Tistlia consotensis
  REGION 1..134: note = tr|A0A1Y6BPR0|A0A1Y6BPR0_9PROT 6-pyruvoyl-tetrahydropterin synthase OS=Tistlia consotensis USBA 355 OX=560819 GN=SAMN05428998_10546 PE=4; SV = 1
MFSLTVRDHVMIAHSFEGAIFGPAQALHGATYVVDAEFRRAELDADGLVVDIGKAAEALKAVLAEINYRNLDALEAFRGRNTTTEFLANWVWRQLAARIAEGGLGPAATGLTGLKVTLAESHVAWAAYEAALPA

SEQ ID NO: 26615 - protein, 139 aa, Tistrella mobilis
  REGION 1..139: note = tr|A0A162LY66|A0A162LY66_9PROT 6-pyruvoyl tetrahydropterin synthase OS=Tistrella mobilis OX=171437; GN = AUP44_19665 PE=4 SV=1
MFTLGVRDHVMIAHSFRGEIFGPAQRLHGATYVVDVEFKRRALDDDGLVVDIGLAHQALKAALEPLAYRNLDDLPEFAGQNTTTEFLARHIHGRMAAAIDAGDLGASAAGIDAIRIVLHESHVAWAAFEGPVGDAARAG

SEQ ID NO: 26616 - protein, 139 aa, Tistrella mobilis
  REGION 1..139: note = tr|I3TR87|I3TR87_TISMK Uncharacterized protein; OS = Tistrella mobilis (strain KA081020-065) OX=1110502; GN = TMO_3437 PE=4 SV=1
MFTLGVRDHVMIAHSFRGEIFGPAQRLHGATYVVDVEFKRRALDDDGLVVDIGLAHQALKAALEPLAYRNLDDLPEFAGRNTTTEFLARHIHGRMAAAIDAGDLGASASGIDAIRIVLHESHVAWAAFEGPVGDAARAG

SEQ ID NO: 26617 - protein, 139 aa, Tistrella sp.
  REGION 1..139: note = tr|A0A2E3EVH3|A0A2E3EVH3_9PROT Uncharacterized protein OS=Tistrella sp. OX=2024861 GN=CMO30_23320 PE=4; SV = 1
MFTLGVRDHVMIAHSFRGEIFGPAQRLHGATYVVDVEFKRRALDDDGLVVDIGLAHQALKAALEPLAYRNLDDLPEFAGQNTTTEFLARYIHGRMAAAIDAGDLGASAAGIDAIRIVLHESHVAWAAFEGPVGDAARAG

SEQ ID NO: 26618 - protein, 128 aa, Tistrella sp.
  REGION 1..128: note = tr|A0A2E3EHR5|A0A2E3EHR5_9PROT 6-carboxy-5,6,7,8-tetrahydropterin synthase OS=Tistrella sp. OX=2024861 GN=CMO30_00530 PE=3 SV=1
MFELSKQFRFEAAHTLHRVIDAEPSRRIHGHSYRAEVVIRGRPDPVTGMVLDLGLFERALAGARDGLDHRLLDEVPDLGPATMENLAAWIWRRLAGQLPGLARVIVHRDSTGDICTCFGPDAGSGVAA

SEQ ID NO: 26619 - protein, 292 aa, Tolumonas auensis
  REGION 1..292: note = tr|C4LBF3|C4LBF3_TOLAT Uncharacterized protein; OS = Tolumonas auensis (strain DSM 9187 / TA4) OX=595494; GN = Tola_0760 PE=4 SV=1
MILFVRDLTVIDAAYLCPHRGVVGESWLVDVELTGELNEMSMLFDFSRVKKQLKAIIDAEVDHRLLIPQKASETMIEPAAAGYLFVDFLSEEHTIHLNCPEQAFAVIPAAEISTETVTDYLLTLIRHQLPGNIDGLKITLRHEHIPTPNYHYTHGLKKHDGNCQRIAHGHRSMIELWVDGARDHALEQYWATRWQDIYLGTEEDLVSVAELELSETGQELVSDQQHYCFRYTSAQGDFQLAIPKESCEIIDTDTTVELLASYIAAQLKPQLGEKELKVVAYEGVGKGAIEVL

SEQ ID NO: 26620 - protein, 289 aa, unidentified
  source 1..289: note = Tolypothrix bouteillei
  REGION 1..289: note = tr|A0A0C1N195|A0A0C1N195_9CYAN 6-pyruvoyl tetrahydropterin synthase OS=Tolypothrix bouteillei VB521301 OX=1479485 GN=DA73_0227130 PE=4 SV=1
MQCIVNRRAQFSASHRYWLPELSDAENIKQFGACSKFPGHGHNYVLYVSLFGELDKYGMVLNLSDVKQVIKREVTSQLDFSYLNDVWSEFQQTLPTTENIARVIWHKLAPYLPVARVQLYEHPELWADYLGNAMEAYLTLSTHFSAAHRLAHPDISNEANFEIYGKCARPNGHGHNYHLEVTVKGEINPRTGMIVDLGELNQIIEDYVVEPFDHTFLNKDIPYFAEVVPTAENIALHISQLLRSPIQELGAKLYKVKLIESPNNSCEIYCNDSDSNANTLQNESVLVRV

SEQ ID NO: 26621 - protein, 131 aa, unidentified
  source 1..131: note = Tolypothrix bouteillei
  REGION 1..131: note = tr|A0A0C1N613|A0A0C1N613_9CYAN 6-carboxy-5,6,7,8-tetrahydropterin synthase OS=Tolypothrix bouteillei VB521301 OX=1479485 GN=DA73_0215640 PE=3 SV=1
MPKWKLVTEFTFDSAHYIRDYDGPCGRLHGHTYKVKIEATSSKLHSSQYCPHEVMVADFRTLRWAKQDVKKGGLDHCVLNEVIPPEYETTAEMIAKYIYDETKKRVPPGVHLKVAVSETPNSWAEYEDDDD

SEQ ID NO: 26622 - protein, 290 aa, unidentified
  source 1..290: note = Tolypothrix campylonemoides
  REGION 1..290: note = tr|A0A0C2LTV7|A0A0C2LTV7_9CYAN 6-pyruvoyl tetrahydropterin synthase OS=Tolypothrix campylonemoides VB511288 OX=1245935 GN=SD81_02355 PE=4 SV=1
MQCIVNRRAQFSASHRYWLPELSEAENIEKFDASSKFPGHGHNYVLFVSLIGELDEYGMVLNLSDVKHVIKREVTSQLDFSYLNDVWSEFQQTLPTTENIARVIWQRLAPNLPLVRIQLFEHPQLWADYLGNGMEAYLTVSTHFSAAHRLAHPRLSSEENFEIYGKCARPNGHGHNYHLEVTVKGEIDARTGMIIDLGALNKVIEDYVVEPFDHTFLNKDIAHFAEVVPTAENIALHISQLLRSPIQELGAKLYKVKLIESPNNSCEIYCTESDPNSVNAAQNEPVLVRV

SEQ ID NO: 26623 - protein, 290 aa, Tolypothrix sp.; identical to SEQ ID NO: 20644
  REGION 1..290: note = tr|A0A0D6KFP1|A0A0D6KFP1_9CYAN Queuosine biosynthesis protein QueD OS=Tolypothrix sp. PCC 7601; OX = 1188 GN=FDUTEX481_03850 PE=4 SV=1

SEQ ID NO: 26624 - protein, 158 aa, Tolypothrix sp.
  REGION 1..158: note = tr|A0A218QMT0|A0A218QMT0_9CYAN Queuosine biosynthesis protein QueD OS=Tolypothrix sp. NIES-4075; OX = 2005459 GN=NIES4075_41950 PE=4 SV=1
MTNNQWLLAKEFRFEAAHQLPYHDGKCARLHGHSWRGVVYVAGGELVEKGAKQGMLIDYSDIKTYLKPLVENYLDHYHLNESTGLESPTSEQIAAWIYEKLEAAGLPGLLAVRIDETCTSICMYSKNRIAGWLNSGIDLNLHHSRSEEAVGINLTSIM

SEQ ID NO: 26625 - protein, 128 aa, Tolypothrix tenuis; identical to SEQ ID NO: 17729
  REGION 1..128: note = tr|A0A1Z4N7S8|A0A1Z4N7S8_9CYAN 6-carboxy-5,6,7,8-tetrahydropterin synthase OS=Tolypothrix tenuis PCC 7101 OX=231146 GN=NIES37_57800 PE=3 SV=1

SEQ ID NO: 26626 - protein, 290 aa, Tolypothrix tenuis; identical to SEQ ID NO: 17728
  REGION 1..290: note = tr|A0A1Z4N6X6|A0A1Z4N6X6_9CYAN Putative 6-pyruvoyl tetrahydropterin synthase OS=Tolypothrix tenuis PCC 7101; OX = 231146 GN=NIES37_54570 PE=4 SV=1

SEQ ID NO: 26627 - protein, 120 aa, Trabulsiella guamensis
  REGION 1..120: note = tr|A0A085A888|A0A085A888_9ENTR 6-carboxy-5,6,7,8-tetrahydropterin synthase; OS = Trabulsiella guamensis ATCC 49490 OX=1005994 GN=queD; PE = 3 SV=1
MSTTLFKDFTFEAAHHLPHVPEGHKCGRLHGHSFMVRLEITGEVDPHTGWIMDFADLKAAFKPTYDRLDHYYLNEIHGLENPTSEVLAKWIWDQVKPVVPLLSAVMVKETCTAGCVYRGE

SEQ ID NO: 26628 - protein, 120 aa, Trabulsiella odontotermitis
  REGION 1..120: note = tr|A0A0L0GZM5|A0A0L0GZM5_9ENTR 6-carboxy-5,6,7,8-tetrahydropterin synthase; OS = Trabulsiella odontotermitis OX=379893 GN=GM31_14620; PE = 3 SV=1
MSTTLFKDFTFEAAHHLPHVPEGHKCGRLHGHSFMVRLEITGDVDPHTGWIMDFADLKAAFKPTYDRLDHYYLNEIPGLENPTSEVLAKWIWDQIKPVVPLLSAVMVKETCTAGCVYRGE

SEQ ID NO: 26629 - protein, 117 aa, Tranquillimonas sp.
  REGION 1..117: note = tr|A0A438AL59|A0A438AL59_9RHOB 6-carboxy-5,6,7,8-tetrahydropterin synthase; OS = Tranquillimonas sp. M0103 OX=2486419 GN=EKE94_01935; PE = 3 SV=1
MFRIRKEFHFSASHRLAHLPDDHQCARLHGHNYIVVVELAAESLTRDGFVRDYHDLAPFKAYIDGTFDHRHLNDVLDVPSTAEHLARHFHDWCRARWRETAAVFVSETPKTWAEYRP

SEQ ID NO: 26630 - protein, 123 aa, Treponema azotonutricium
  REGION 1..123: note = tr|F5YE12|F5YE12_TREAZ Uncharacterized protein; OS = Treponema azotonutricium (strain ATCC BAA-888 / DSM 13862 / ZAS-9) OX=545695 GN=TREAZ_1543 PE=4 SV=1
MEGEVNSKNGFVVACNSIKNHAWEYLVNFDHAIILQKEDPILPELLKVYEAQGIKGGSTWNTSVGIAFDTELAKAYPECRLVVVKKVATVENLIEVFYSLLKDTLNIKKLTFTSGDNAASFSV

SEQ ID NO: 26631 - protein, 124 aa, Treponema azotonutricium
  REGION 1..124: note = tr|F5YFK2|F5YFK2_TREAZ 6-carboxy-5,6,7,8-tetrahydropterin synthase OS=Treponema azotonutricium (strain ATCC BAA-888 / DSM 13862 / ZAS-9); OX = 545695 GN=TREAZ_0075 PE=3SV=1
MYSVRVEADFAAAHFLSHYHGKCENLHGHNYRVRAWARGESLSDGGMLLDFGVLKKCLREACAGLDHTNLNDKGIFANDPSAERIAKYIFDQTKALLPPEAAGLLHAVDVYETPTSMARYKPDK

SEQ ID NO: 26632 - protein, 130 aa, Treponema berlinense
  REGION 1..130: note = tr|A0A1T4NSV5|A0A1T4NSV5_9SPIO 6-carboxy-5,6,7,8-tetrahydropterin synthase OS=Treponema berlinense OX=225004 GN=SAMN02745152_01315 PE=3 SV=1
MFEVRITDDFAAAHFLRDYNGKCENLHGHNYKVYVHVEGNELDEGGMLLDFTLLKTALKEVLSKIDHTNLNDIAIFDQNPSAERIAVYIYKNMLKVLSEKGLDLSKNSNRRISKVDVFETDKNRARYIPE

SEQ ID NO: 26633 - protein, 132 aa, Treponema brennaborense
  REGION 1..132: note = tr|F4LIE6|F4LIE6_TREBD 6-carboxy-5,6,7,8-tetrahydropterin synthase OS=Treponema brennaborense (strain DSM 12168 / CIP 105900 / DD5/3); OX = 906968 GN=Trebr_0750 PE=3 SV =1
MYEVRIEADFAAAHFLKEYHGKCERLHGHNYKVFAHVRGSRLDEGGMLLDFSELKRVVRSVCAELDHTNLNDMQCDGVDVFDQNPSAEHIAQWIFRRIQSQLAGNAGMQSGTALYAVDVFETDTSRARYCEP

SEQ ID NO: 26634 - protein, 133 aa, Treponema bryantii
  REGION 1..133: note = tr|A0A1I3JKP0|A0A1I3JKP0_9SPIO 6-pyruvoyltetrahydropterin/6-carboxytetrahydropterin synthase OS=Treponema bryantii OX=163; GN = SAMN04487775_10389 PE=4 SV=1
MFEVRVTADFAAAHFLRDYNGKCENLHGHNYKVYAHVRGEVLNEGGMLLDFTKLKAALRKVCKELDHTNLNDKEVFDQNPSAERIAMYIFHGIINELKDEGVDLSFVQGKKDPYLFAVDVFETDTSRARYSIL

SEQ ID NO: 26635 - protein, 134 aa, Treponema bryantii
  REGION 1..134: note = tr|A0A1H9HWU6|A0A1H9HWU6_9SPIO 6-carboxy-5,6,7,8-tetrahydropterin synthase OS=Treponema bryantii OX=163 GN=SAMN04487977_10815 PE=3 SV=1
MFEVRVTADFAAAHFLRDYNGKCENLHGHNYKVYAHVKGPKLNEGGMLLDFSKLKAALREVCKQLDHTNLNDLAVFDQNPSAERIAMYIYDGIIALLKKEGIDLSYSAGKTEPALYCVDVFETETSRARYRVDE

SEQ ID NO: 26636 - protein, 125 aa, unidentified
  source 1..125: note = Treponema caldarium
  REGION 1..125: note = tr|F8F2M0|F8F2M0_TRECH 6-carboxy-5,6,7,8-tetrahydropterin synthase OS=Treponema caldarium (strain ATCC 51460 / DSM 7334 / H1) OX=744872; GN = Spica_0985 PE=3 SV=1
MYEVRVETDFAAAHFLSHYHGKCERLHGHNYRVRLWARGSELDTGGMLIDFGVLKGLLREVCGRLDHQNLNEFSVFSGDPSAERIAKYIFDEMLTLLSHGGYNAKLLYAVDVYETPTNMARYVRD

SEQ ID NO: 26637 - protein, 127 aa, unidentified
  source 1..127: note = Treponema phagedenis
  REGION 1..127: note = tr|E7NTZ7|E7NTZ7_TREPH 6-carboxy-5,6,7,8-tetrahydropterin synthase OS=Treponema phagedenis F0421 OX=754027 GN=queD PE=3 SV=1
MYEVRVEADFAAAHFLTDYHGKCERLHGHNYRVLAHAQGTELDEGGMLFDFGILKKALREVCAQLDHRNLNDFSFFNGNPSAERIAEFIFTEIKKLSPDCPLVAVDVYETPTSRARFYQENRLVLKS

SEQ ID NO: 26638 - protein, 127 aa, unidentified; identical to SEQ ID NO: 26637
  source 1..127: note = Treponema phagedenis
  REGION 1..127: note = tr|A0A5D5BHP1|A0A5D5BHP1_TREPH 6-carboxy-5,6,7,8-tetrahydropterin synthase OS=Treponema phagedenis OX=162 GN=queD PE=3 SV=1

SEQ ID NO: 26639 - protein, 137 aa, Treponema porcinum
  REGION 1..137: note = tr|A0A1T4LXD0|A0A1T4LXD0_9SPIO 6-pyruvoyltetrahydropterin/6-carboxytetrahydropterin synthase OS=Treponema porcinum OX=261392; GN = SAMN02745149_01762 PE=4 SV=1
MYEVRVTADFAAAHFLKDYNGKCENLHGHNYKVYAHVRGNRLDEGGMLLDFTKLKSVLRGVCAELDHTNLNDMPVFKQNPSAERIAKYIFDAIIERELLSGEDLRKGEGKTSVWLQAVDVFETDTSRARYMPDDLPE

SEQ ID NO: 26640 - protein, 187 aa, Treponema porcinum
  REGION 1..187: note = tr|A0A1T4KUM9|A0A1T4KUM9_9SPIO 6-pyruvoyltetrahydropterin/6-carboxytetrahydropterin synthase OS=Treponema porcinum OX=261392; GN = SAMN02745149_01316 PE=4 SV=1
MRSITTLDLQYAHRFYGFKGEAQYLHGHTGKLTIEVEDSVEAGVNMVFPCNEIQKTAWEVLKNFDHALILREDDPLLPAILKVYEEQGIKDGAPTNKMKGPAFKTELATAYPDCRLVVTKETMTVEGMIKIVYDLLKDKLNIAKLTFTSGVNAASQEYDVTGTKDRCPLCGIALNENGVCPKCGYKK

SEQ ID NO: 26641 - protein, 206 aa, Treponema primitia
  REGION 1..206: note = tr|F5YKX2|F5YKX2_TREPZ Putative rubredoxin; OS = Treponema primitia (strain ATCC BAA-887 / DSM 12427 / ZAS-2) OX=545694 GN=TREPR_3243 PE=4 SV=1
MGVIKMKQWVCSKCGYVYTGESAPAQCPVCHVPSSAFKEKALGGEKRVLTSITKLNIQYAHRFLGYIGEAQYLHGHTGTLTLEVEGEVNTSNGFVVACNSIKNHAWEYLVNFDHAIILQKEDPILPELLKVYEAQGIKGGSPWNTSTGRAFDTDLAKAYPECRLVVVKKVATVENLIEVFYTLLKDTLNIKKLTFTSGDNAASFSV

SEQ ID NO: 26642 - protein, 128 aa, Treponema saccharophilum
  REGION 1..128: note = tr|H7EKE0|H7EKE0_9SPIO 6-carboxy-5,6,7,8-tetrahydropterin synthase OS=Treponema saccharophilum DSM 2985 OX=907348 GN=TresaDRAFT_1780 PE=3; SV = 1
MFEVRVNTDFAAAHFLRDYNGKCENLHGHNYKVYAHVRGNALNEGGMLLDFTELKRALKSVCARLDHTNLNDMEVFDQNPSAERIAKFIFDSILAMIPSLVKTDGDKAFLQAVDVFETDTNRARYSVD

SEQ ID NO: 26643 - protein, 145 aa, Treponema socranskii
  REGION 1..145: note = tr|U1GPT5|U1GPT5_TRESO 6-carboxy-5,6,7,8-tetrahydropterin synthase OS=Treponema socranskii subsp. socranskii VPI DR56BR1116 = ATCC 35536; OX = 1125725 GN=queD PE=3 SV=1
MSFEGFYAILTVMFEVRVEANFSAAHFLRDYNGKCESLHGHNYTVFAHVQGTALGSGGMLIDFGKLKASLRAVCAELDHTNLNDNAVFLQNPSAERIAKYIYDALIAEVRHAGVDLSYIDGKTTAFLSAVDVFETDTSRARYSPA

SEQ ID NO: 26644 - protein, 133 aa, Treponema socranskii
  REGION 1..133: note = tr|S3JS46|S3JS46_TRESO Queuosine biosynthesis protein QueD OS=Treponema socranskii subsp. paredis ATCC 35535 OX=1125701 GN=HMPREF1221_00106 PE=4 SV=1
MFEVRVETNFSAAHFLRDYNGKCENLHGHNYTVRAHVKGATLGSGGMLIDFVKLKKALRAVCDELDHTNLNEYAVFLQNPSAERIAKYIYDALIAEVRHAGVDLSYTRGKEGAFLSAVDVFETDTSRARYSPE

SEQ ID NO: 26645 - protein, 119 aa, Treponema sp.
  REGION 1..119: note = tr|A0A521IFW7|A0A521IFW7_9SPIO 6-carboxy-5,6,7,8-tetrahydropterin synthase OS=Treponema sp. OX=166 GN=queD PE=3 SV=1
MFEVRVEAEFAAAHFLADYHGKCERLHGHNYRVLAHARGTELDAGGMLVDFGVLKKALRDVCSSLDHSNLNDMEAFSNNPSAERIARYVFKRLRELLPGCPLAAVDVYETPTSRARYSE

SEQ ID NO: 26646 - protein, 134 aa, Treponema sp.
  REGION 1..134: note = tr|I0X6C6|I0X6C6_9SPIO Queuosine biosynthesis protein QueD OS=Treponema sp. JC4 OX=1124982 GN=MSI_23630; PE = 4 SV=1
MFEVRVEADFSAAHFLRDYNGKCENLHGHNYKVYAHVRGSQLNEGGMLLDFTKLKAALRAVCKELDHTNLNDFEYFDQNPSAERIAMYIAAGILNRLSQEGEDLSKPAAGDGRAFLYAVDVFETETSRARYILE

SEQ ID NO: 26647 - protein, 128 aa, Treponema succinifaciens
  REGION 1..128: note = tr|F2NXX1|F2NXX1_TRES6 6-carboxy-5,6,7,8-tetrahydropterin synthase OS=Treponema succinifaciens (strain ATCC 33096 / DSM 2489 / 6091); OX = 869209 GN=Tresu_0491 PE=3 SV= 1
MFEVRVTADFSAAHFLRDYNGKCENLHGHNYKVYAHVRGTELDRGGMLLDFTKLKKTLREVCGKIDHTNLNDIEFFEQNPSAERIAVYIYNHIIEGIPLLKKTDGKKAWLYAIDVFETETSRARYIAE

SEQ ID NO: 26648 - protein, 143 aa, Trichococcus collinsii
  REGION 1..143: note = tr|A0A143YYE4|A0A143YYE4_9LACT 6-carboxy-5,6,7,8-tetrahydropterin synthase; OS = Trichococcus collinsii OX=157076 GN=Tcol_1660 PE=3 SV=1
MYILKTEHSFDSAHFLAGYEGKCANIHGHRWRVEIQVQAEELVTSGQLDGMVVDFGDLKKDLKAAVDHLDHALIIEQGTMREQTLQCIKEDGFAVLEFPFRPTAENFAAHFYRTMADLGYDVKRATVYETPTNSAAYEESGVR

SEQ ID NO: 26649 - protein, 143 aa, unidentified
  source 1..143: note = Trichococcus ilyis
  REGION 1..143: note = tr|A0A143YHG4|A0A143YHG4_9LACT 6-carboxy-5,6,7,8-tetrahydropterin synthase; OS = Trichococcus ilyis OX=640938 GN=TR210_900 PE=3 SV=1
MYILKTEHSFDSAHFLAGYEGKCANIHGHRWRVEIEVQAEELINSGQLDGMVVDFGDLKKDLKAVVDRFDHALIIEQGTMRELTLQCIKEDGFNVIEFPARPTAENFAAHFYRTMKNLGYDVRRATVYETPTNSAAYEESGVR

SEQ ID NO: 26650 - protein, 143 aa, Trichococcus palustris
  REGION 1..143: note = tr|A0A143YDY6|A0A143YDY6_9LACT 6-carboxy-5,6,7,8-tetrahydropterin synthase; OS = Trichococcus palustris OX=140314 GN=Tpal_751 PE=3 SV=1
MYILKTEHSFDSAHFLADYDGKCGNIHGHRWRVEIEVQSEELVASGQLGGMVVDFGDLKKDLKAAVDYFDHSLIIEQGTMREKTLQCIKEDGFSVIEFPTRPTAENFAAHFYRTMAGLGYDVKRAIIYETPTNSATYEESGVK

SEQ ID NO: 26651 - protein, 143 aa, Trichococcus pasteurii
  REGION 1..143: note = tr|A0A1W1IGH9|A0A1W1IGH9_9LACT 6-carboxy-5,6,7,8-tetrahydropterin synthase; OS = Trichococcus pasteurii OX=43064 GN=TPAS_1573 PE=3 SV=1
MYILKTEHSFDSAHFLAGYAGKCANIHGHRWRVEIEVQAEALVASGQLDGMVVDFGDLKRDLKTAVDHLDHALIIEQGTMREQTLQCIKEDGFAVIEFPFRPTAENFAAHFYRTMAGLGYEVKRATVYETPTNSAVYEESGVR

SEQ ID NO: 26652 - protein, 143 aa, Trichococcus patagoniensis
  REGION 1..143: note = tr|A0A2T5IJ18|A0A2T5IJ18_9LACT 6-carboxy-5,6,7,8-tetrahydropterin synthase; OS = Trichococcus patagoniensis OX=382641 GN=C8U37_11293; PE = 3 SV=1
MYILKTEHSFDSAHFLAGYEGKCANIHGHRWRVEIEVQAEELIASGQLDGMVVDFGDLKKDLKAAVDHFDHALIIEQGTMRAQTLQCIKEDGFNVIEIPSRPTAENFAEHFYRTMQVLGYDVKRATVYETPTNSAAYEESEVR

SEQ ID NO: 26653 - protein, 143 aa, Trichococcus sp.
  REGION 1..143: note = tr|A0A383TCB4|A0A383TCB4_9LACT 6-carboxy-5,6,7,8-tetrahydropterin synthase; OS = Trichococcus sp. ART1 OX=2094020 GN=TART1_0575 PE=3 SV=1
MYILKTEHSFDSAHFLAGYAGKCANIHGHRWRVEIEVQAEALVASGQLDGMVVDFGDLKRDLKTAVDHLDHALIIEQGTMREQTLQCIKEDGFAVIEFPFRPTAENFAAHFYRMMAGLGYDVKRATVYETPTNSAAYEESGVR

SEQ ID NO: 26654 - protein, 128 aa, unidentified
  source 1..128: note = Trichormus variabilis
  REGION 1..128: note = tr|Q3MD58|Q3MD58_TRIV2 6-carboxy-5,6,7,8-tetrahydropterin synthase OS=Trichormus variabilis (strain ATCC 29413 / PCC 7937) OX=240292; GN = Ava_1455 PE=3 SV=1
MPKWKVVTEFSFNSAHYIKDYNGPCGRMHGHNYQVRIEAISTQLHSSQYCPHPVMVADFRTLRWAKQDVTKGGLDHGILNEVMPPEYETTAEMIAKYIYDETKKRVPPDVQLKVHVSETPNSWVEYED

SEQ ID NO: 26655 - protein, 130 aa, unidentified
  source 1..130: note = Trichormus variabilis
  REGION 1..130: note = tr|A0A433UTX5|A0A433UTX5_ANAVA 6-carboxy-5,6,7,8-tetrahydropterin synthase OS=Trichormus variabilis SAG 1403-4b OX=447716 GN=DSM107003_20520 PE=3; SV = 1
MPKWKLLTEFTFDSAHYIKDYKGPCGRMHGHTYKVKIEAKSSQLHSSEYCPHPVMVADFRSLRWAKKDVTQGGLDHCVLNEVLPPEYETTAEMIAKYIYDETKKRLPADVKLKVAVSETPNSWVEYEDDE

SEQ ID NO: 26656 - protein, 153 aa, unidentified
  source 1..153: note = Trinickia caryophylli
  REGION 1..153: note = tr|A0A1X7FA83|A0A1X7FA83_TRICW 6-pyruvoyltetrahydropterin/6-carboxytetrahydropterin synthase OS=Trinickia caryophylli OX=28094; GN = SAMN06295900_10877 PE=4 SV=1
MIPAVLTITRKLEFDAGHRIPDHRSQCRNLHGHRYVLEITLQGDVVETEGAPDRGMVMDFADVKSLAMEHLVSRWDHAFLVYSGDTQVRGFLESMPDHKTVVLDRVPTVENLAAIAFETLAEVYDAHYGVNLRLERVRLYETPNCWADFVRAA

SEQ ID NO: 26657 - protein, 150 aa, unidentified
  source 1..150: note = Trinickia soli
  REGION 1..150: note = tr|A0A2N7VLJ0|A0A2N7VLJ0_9BURK 6-carboxytetrahydropterin synthase QueD OS=Trinickia soli; OX = 380675 GN=queD PE=4 SV=1
MTITRKLEFDAGHRIPDHRSQCRNLHGHRYVLEITLHGEIVETEGAPDRGMVMDFADVKSLAMEHLVSRWDHAFLVFEGDTRVREFLQSMPDHKTVVIDRIPTVEHLAAIAFETLSQVYDAHYGVNLQLHHVRLYETPNCWADVVRDGAR

SEQ ID NO: 26658 - protein, 148 aa, unidentified
  source 1..148: note = Trinickia sp.
  REGION 1..148: note = tr|A0A4U1HQA8|A0A4U1HQA8_9BURK 6-carboxy-5,6,7,8-tetrahydropterin synthase OS=Trinickia sp. 7GSK02 OX=2571161 GN=queD PE=3 SV=1
MLTITRKLEFDAGHRIPDHRSQCRNLHGHRYVIEITLQGDVVETEGAPDRGMVMDFADVKSLAMEHLVNRWDHAFLVFEGDTKVREFLDSMPGHKTVVLDRIPTVENLAAVAFDVLANVYDAHYGVNLRLHRVRLYETPNCWADVVRG

SEQ ID NO: 26659 - protein, 148 aa, unidentified
  source 1..148: note = Trinickia symbiotica
  REGION 1..148: note = tr|A0A2N7X8M7|A0A2N7X8M7_9BURK 6-carboxytetrahydropterin synthase QueD OS=Trinickia symbiotica OX=863227 GN=queD PE=4 SV=1
MTITRKLEFDAGHRIPDHRSQCRNLHGHRYVLEITLQGDVIETEGAPDRGMVMDFADVKSLAMEHLVSRWDHAFLVYEGDERVRDFLQSMPDHKTVVLERVPTVENLAAIAFETLSHVYDAHYGVNLRLTRVRLFETPNCWADFVRDA

SEQ ID NO: 26660 - protein, 148 aa, unidentified
  source 1..148: note = Trinickia symbiotica
  REGION 1..148: note = tr|A0A2T3XYW9|A0A2T3XYW9_9BURK 6-carboxytetrahydropterin synthase QueD OS=Trinickia symbiotica OX=863227 GN=queD PE=4 SV=1
MTITRKLEFDAGHRIPDHRSQCRNLHGHRYVLEITLQGDVIETEGAPDRGMVMDFADVKSLAMEHLVSRWDHAFLVYEGDERVRDFLASMPDHKTVVLERVPTVENLAAIAFETLSHVYDAHYGVNLRLTRVRLFETPNCWADFVRDA

SEQ ID NO: 26661 - protein, 121 aa, unidentified
  source 1..121: note = Tropicibacter phthalicicus
  REGION 1..121: note = tr|A0A238JF20|A0A238JF20_9RHOB 6-carboxy-5,6,7,8-tetrahydropterin synthase; OS = Tropicibacter phthalicicus OX=1037362 GN=queD PE=3 SV=1
MFRICKEFHFCASHSLETLPLGHKCAGLHGHNYIVYLELESETLDETGFIIDFHELSAFKDYIDDAFDHRHLNDVMDIPPTTENVAFHFYTWCKARWPQTSAVRVSETPKTWAEYRPKSAA

SEQ ID NO: 26662 - protein, 129 aa, unidentified
  source 1..129: note = Tumebacillus algifaecis
  REGION 1..129: note = tr|A0A223D7B0|A0A223D7B0_9BACL 6-carboxy-5,6,7,8-tetrahydropterin synthase; OS = Tumebacillus algifaecis OX=1214604 GN=queD PE=3 SV=1
MSVTKSFTFDSAHRLDDYIGKCANLHGHTYKLEVTIKGRTDHRGIVVDFGDIKGIVNEQIIAKYDHRFLNDLMPFNTTAENMVFHFFEIIDTYLKQLIDNTPCRLMKVRLWETPTAYAELTREDYDAAE

SEQ ID NO: 26663 - protein, 129 aa, unidentified
  source 1..129: note = Tumebacillus avium
  REGION 1..129: note = tr|A0A1Y0IVC9|A0A1Y0IVC9_9BACL 6-carboxy-5,6,7,8-tetrahydropterin synthase; OS = Tumebacillus avium OX=1903704 GN=CBW65_12650 PE=3 SV=1
MSVTKIFTFDSAHRLDDYIGKCANLHGHTYKLEVTIKGRTDHRGIVVDFGDIKKIVNEQIIGVYDHRFLNDLMEFNTTAENMVFHFFEIIDTFLGKIVDDTPCRLMRLRLWETPTAYAELTREDYDAAE

SEQ ID NO: 26664 - protein, 140 aa, unidentified
  source 1..140: note = Tumebacillus flagellatus
  REGION 1..140: note = tr|A0A074LM26|A0A074LM26_9BACL 6-carboxy-5,6,7,8-tetrahydropterin synthase; OS = Tumebacillus flagellatus OX=1157490 GN=EL26_17090 PE=3; SV = 1
MMTQVPYHMKEVAVTKIFTFDSAHRLDDYIGKCANLHGHTYKLEVTIKGRTDHRGIVVDFGDIKSIVNEQIIGKYDHRFLNDLMDFNTTAENMVVHFFEIIDSYLQQIDNATPVRLVKCRLWETPSAYAEVTWEDFHAAQ

SEQ ID NO: 26665 - protein, 139 aa, Tumebacillus permanentifrigoris
  REGION 1..139: note = tr|A0A316D705|A0A316D705_9BACL 6-carboxy-5,6,7,8-tetrahydropterin synthase; OS = Tumebacillus permanentifrigoris OX=378543; GN = C7459_11248 PE=3 SV=1
MTQVPYHTKEVAVTKIFTFDSAHRLDDYIGKCANLHGHTYKLEVTIKGLTDHRGIVVDFGDIKSIVNDQIIGKYDHRFLNDLMDFNTTAENMVVHFFEIIDSYLQQLDNATPVRLMKCRLWETPSCYAEINREDFYAAQ

SEQ ID NO: 26666 - protein, 139 aa, Tumebacillus sp.
  REGION 1..139: note = tr|A0A4V2SUQ7|A0A4V2SUQ7_9BACL 6-carboxy-5,6,7,8-tetrahydropterin synthase; OS = Tumebacillus sp. BK434 OX=2512169 GN=EV586_103199 PE=3; SV = 1
MTKQPYHNREVSVTKIFTFDSAHRLDDYIGKCANLHGHTYKLEVTIKGRTDHRGIVVDFGDIKKIVNEQIIGVYDHRFLNDLMAFNTTAENMVFHFFEIIDTYLRKIADDTPCRLLRVRLWETPTAYAELTREDYDAAE

SEQ ID NO: 26667 - protein, 142 aa, Turicibacter sanguinis
  REGION 1..142: note = tr|A0A173SMT9|A0A173SMT9_9FIRM 6-carboxy-5,6,7,8-tetrahydropterin synthase; OS = Turicibacter sanguinis OX=154288 GN=queD PE=3 SV=1
MFTLKSEIEFDAAHYLSDYEGKCHNIHGHRYRVVIKVSADSLHETGQCRGMVDDFSTIKQALKKIHDLFDHRLILEENEEGKELAKKIAETKLGFEIYFVPYRPTAEEMSRDIYQRLQNLGIKVTEVELFETPKNSCIYTEV

SEQ ID NO: 26668 - protein, 143 aa, Turicibacter sanguinis
  REGION 1..143: note = tr|A0A173YSC0|A0A173YSC0_9FIRM 6-carboxy-5,6,7,8-tetrahydropterin synthase; OS = Turicibacter sanguinis OX=154288 GN=ERS852422_01364; PE = 3 SV=1
MFTLKSEIQFDMAHYLSGYVGKCKNIHGHRYRLVVKVSSQTLHESGQLRGMVDDFSEVKAVLKEVHDLFDHKLVIEENEEGKRVVEKLNESGKVFEILFVPYRPTAEEMSRHIFNEIKKRGVRVTEVELFETPTNSCIYTEED

SEQ ID NO: 26669 - protein, 143 aa, Turicibacter sp.; identical to SEQ ID NO: 26668
  REGION 1..143: note = tr|A0A120IDS5|A0A120IDS5_9FIRM 6-carboxy-5,6,7,8-tetrahydropterin synthase; OS = Turicibacter sp. H121 OX=1712675 GN=AT726_11395 PE=3; SV = 1

SEQ ID NO: 26670 - protein, 118 aa, Turneriella parva
  REGION 1..118: note = tr|I4BC21|I4BC21_TURPD 6-carboxy-5,6,7,8-tetrahydropterin synthase OS=Turneriella parva (strain ATCC BAA-1111 / DSM 21527 / NCTC 11395 / H); OX = 869212 GN=Turpa_0026 P E=3 SV=1
MQIEKEFIFDSAHFLPLVPENHKCRKLHGHTYRVTIAVSGEINPQGWIMDFADIGDIVKPIVRSIDHTLLNSVEGLENPTAENIARWLFDRIKEKLPELAFVIVQEGESSRVIYPQRQ

SEQ ID NO: 26671 - protein, 290 aa, unidentified
  source 1..290: note = Tychonema bourrellyi
  REGION 1..290: note = tr|A0A2G4F5L1|A0A2G4F5L1_9CYAN 6-pyruvoyl tetrahydropterin synthase OS=Tychonema bourrellyi FEM_GT703 OX=2040638 GN=CP500_002240 PE=4 SV=1
MQCIINRRAQFSASHRYWLPELSEAENFERFGPTARAPGHGHNYVLYVSMIGKLDEYGMVLNLSDVKHVIKREVTKDLDFSYLNEAWPEFEQTLPTTENIARQIWLRLAPHLPLSKIQLFEHPELWAEYLGNGMEAYLTLSTHFSAAHRLARPDLSFEENSEIYGKCARPSGHGHNYHLEVTVKGEIDARTGMIADLGALQKAIDDYVVEPFDHTFLNKDIAYFENVVPTAENIAVRIGQLLRSPIRELGAELHKIKLIESPNNSCEIYGADLEELVAERQQPEAVLAGV

SEQ ID NO: 26672 - protein, 139 aa, unidentified
  source 1..139: note = Tyzzerella sp.
  REGION 1..139: note = tr|A0A1Y4UDN2|A0A1Y4UDN2_9FIRM 6-carboxy-5,6,7,8-tetrahydropterin synthase OS=Tyzzerella sp. An114 OX=1965545 GN=B5E58_11575 PE=3 SV=1
MYMLQTEQSFDAAHFLKDYNGKCSNIHGHRWRVVVCISAEKLSTEQQTKGMIIDFSDLKKALKNICDYFDHTFIYEENSLKSETVIALQSENFRLITVPFRPTAENFARFIYEKLKKEKYTVCRVEVYETPNNCAIYEE

SEQ ID NO: 26673 - protein, 146 aa, Uliginosibacterium sp.
  REGION 1..146: note = tr|A0A2N4XKD1|A0A2N4XKD1_9RHOO 6-carboxy-5,6,7,8-tetrahydropterin synthase; OS = Uliginosibacterium sp. TH139 OX=2067453 GN=queD PE=3; SV = 1
MIITRRLEFDSGHRIPDHRSLCRHLHGHRYALEVTVSGDVTRMDGDPRNGMVLDFSEVKSLMRQYVVDVWDHAFLVYEGDKQIRDFLDSLPEHRTVVLNVVPTAENLAAKAFELLAPHINDLCDKALTLENVRIYETPNCWADARR

SEQ ID NO: 26674 - protein, 149 aa, Ulvibacter antarcticus
  REGION 1..149: note = tr|A0A3L9Z3S6|A0A3L9Z3S6_9FLAO 6-carboxy-5,6,7,8-tetrahydropterin synthase OS=Ulvibacter antarcticus OX=442714 GN=BXY75_0497 PE=3 SV=1
MSNIRITKLFSFETGHALYGYDGKCRNVHGHSYRLSVTVIGTPIDNSDNVKYGMVIDFTDLKKIVKEEIVDVFDHATVFNKNTPHVELAKELSDRGHNVLLVDYQPTSEMMVIDFAEKIKNRLPKSILLHSLRLQETASSYAEWFASDN

SEQ ID NO: 26675 - protein, 137 aa, Ulvibacter antarcticus
  REGION 1..137: note = tr|A0A3L9YVG1|A0A3L9YVG1_9FLAO 6-carboxy-5,6,7,8-tetrahydropterin synthase OS=Ulvibacter antarcticus OX=442714 GN=BXY75_1835 PE=3 SV=1
MSLTIFRKAHFNAAHRLYKASWDDAKNLEVFGKCSNPNYHGHNYELEVGLTGNIDPETGYLIDLKVLKDIIKSEVEDAFDHKNLNLEVEDFKELNPTVENIAIVIWKRLRNQLDSKYRITVKLYETPRNFVIYTGEE

SEQ ID NO: 26676 - protein, 149 aa, Ulvibacter litoralis
  REGION 1..149: note = tr|A0A1G7DDF6|A0A1G7DDF6_9FLAO 6-carboxy-5,6,7,8-tetrahydropterin synthase OS=Ulvibacter litoralis OX=227084 GN=SAMN05421855_101910 PE=3 SV=1
MSNIRITKQFSFETGHALYGYDGKCRNVHGHSYKLSVTVIGTPNNDTTHAKFGMVIDFSDLKKIVKEEIVDVFDHATVFNKNTPHVELAKELSDRGHNVLLVDYQPTSEMMVIDFAEKIKNRLPNTIQLHSLKLQETDSSYAQWFASDN

SEQ ID NO: 26677 - protein, 135 aa, Ulvibacter litoralis
  REGION 1..135: note = tr|A0A1G7IWL8|A0A1G7IWL8_9FLAO 6-carboxy-5,6,7,8-tetrahydropterin synthase OS=Ulvibacter litoralis OX=227084 GN=SAMN05421855_10758 PE=3 SV=1
MSLTIYRKAHFNAAHRLYKKEWSDAKNFEVFGKCSNPHYHGHNYDLEVGLTGTMDPETGFLIDLKILKTIIEEEILTPFDHKNLNVEVLEFKDLNPTVENIAIVIWNKLNTRLQSKYQISVKLYETPRNFVVYTG

SEQ ID NO: 26678 - protein, 149 aa, unidentified
  source 1..149: note = Ulvibacter marinus
  REGION 1..149: note = tr|A0A5J4IY75|A0A5J4IY75_9FLAO 6-carboxytetrahydropterin synthase QueD OS=Ulvibacter marinus OX=1397112 GN=ULMA_06860 PE=4 SV=1
MSNIRITKQFSFETGHALYGYDGKCRNVHGHSYKLSVTVIGTPISEKDNAKYGMVIDFSDLKKIVKEEIVDVFDHATVFNKNTPHVELAKELSDRGHQVLLVNYQPTSEMMVIDFAEKIKQRLPQNINLHSLRLQETATSFAEWYASDN

SEQ ID NO: 26679 - protein, 150 aa, Ulvibacter sp.
  REGION 1..150: note = tr|A0A167J3W4|A0A167J3W4_9FLAO 6-pyruvoyl tetrahydropterin synthase OS=Ulvibacter sp. LPB0005; OX = 1763537 GN=ULVI_06085 PE=4 SV=1
MSNIRITKQFSFETGHALYGYDGKCRNVHGHSYKLSVTVIGTPNSDSNHVKFGMVIDFSDLKKIVKEEIVDVFDHATVFNKNTPHVELAKELADRGHNVLLVAYQPTSEMMVIDFAEKIKARLPEGIQLHALKLQETATSYAEWFASENK

SEQ ID NO: 26680 - protein, 169 aa, Ulvibacter sp.
  REGION 1..169: note = tr|A0A2N0ESD0|A0A2N0ESD0_9FLAO 6-pyruvoyltetrahydropterin/6-carboxytetrahydropterin synthase OS=Ulvibacter sp. MAR_2010_11 OX=1250229; GN = ATE92_1138 PE=4 SV=1
MVVIKYDFSKYRIFTYQFKRMSNIRITKQFSFETGHALYGYDGKCRNVHGHSYKLSVTVVGNPISDTSHVKFGMVIDFGDLKKIVKEEIVDVFDHATVFNKNTPHVELAKELSDRGHSVLLVNYQPTSEMMVIDFAGKIKARLPKNIQLHSLKLQETATSYAEWFASEN

SEQ ID NO: 26681 - protein, 121 aa, Umboniibacter marinipuniceus
  REGION 1..121: note = tr|A0A3M0A7A7|A0A3M0A7A7_9GAMM 6-carboxy-5,6,7,8-tetrahydropterin synthase; OS = Umboniibacter marinipuniceus OX=569599 GN=DFR27_0821; PE = 3 SV=1
MELFKEFTFEAAHRLPNVPEGHKCARLHGHSFMVRIAVEGPVDPVMGWVIDFGDIKKAFKPIYDQLDHYYLNDIPGLENPTSEVLAEWIWEKLQPTLPLLSRVEIRETCTSGCSYLGPKAK

SEQ ID NO: 26682 - protein, 136 aa, Umezawaea tangerina
  REGION 1..136: note = tr|A0A2T0SP00|A0A2T0SP00_9PSEU 6-pyruvoyl-tetrahydropterin synthase OS=Umezawaea tangerina OX=84725 GN=CLV43_11455 PE=4 SV=1
MEVTLFSITVRDHVMIAHSFRGEVFGPAQRLHGATFVVDAKFNRTDLDSDNIVVDIGLATQELGAVLAEFNYRNLDEVPAFTGVNTSTEFLAKVIADRLADRVHAGALGEGARGLSAISVTLHESHVAWASYERPL

SEQ ID NO: 26683 - protein, 175 aa, unidentified
  source 1..175: note = Alphaproteobacteria bacterium
  REGION 1..175: note = tr|A0A212KJT9|A0A212KJT9_9PROT 6-pyruvoyl-tetrahydropterin synthase OS=uncultured Alphaproteobacteria bacterium OX=91750 GN=KL86APRO_20353; PE = 4 SV=1
MTLYHVTRRIGIDAGHRIRTHGSKCRNLHGHRYEIEATCAAPQPHAGGEQDGMVIDFGFLKEEMLEVIDAACDHGFIAELADDAVLEMLCPADAGFLDWKARIADAVGADGYALTHETRLGTKLYVIASTPTAEALAAHWFSRLAPRVAARSGGLARLVNLRVWETPNCHADYSA

SEQ ID NO: 26684 - protein, 190 aa, Anaerotruncus sp.
  REGION 1..190: note = tr|A0A1C6J9S5|A0A1C6J9S5_9FIRM Queuosine biosynthesis protein QueD OS=uncultured Anaerotruncus sp.; OX = 905011 GN=SAMEA3545359_02023 PE=4 SV=1
MRSITTLDLQYAHRFYGFKGEAQYLHGHTGVLTIEVEDTVEPGVNMVFPCNEIQKTAWGVLKNFDHALILRQDDPLLPAILDVYEKQGIRNGAPNNQMKGPAFKTELATAYPDCRLVVTKETMTVEGMIKIVYDLLKDKLNIAKITFTSGVNAASEEFSPNKVIDRCPLCGIALNENGVCPKCGYKKPQA

SEQ ID NO: 26685 - protein, 129 aa, Avibacterium sp.
  REGION 1..129: note = tr|A0A486XD77|A0A486XD77_9PAST 6-carboxy-5,6,7,8-tetrahydropterin synthase OS=uncultured Avibacterium sp. OX=1936169 GN=queD PE=3 SV=1
MAHLLDGHDGKCQNLHGHTYKLQVEVQGELHASGAKKGMVMDFSDLKQIVKEQILTPMDHAFIYDETSERESKIAQLLQDLNSKTFAMPTRTTAEEMARFIFQRLSAHLPISAIRLWETPTSFCEYREN

SEQ ID NO: 26686 - protein, 162 aa, unidentified
  source 1..162: note = Unknown
  REGION 1..162: note = tr|Q4JIS7|Q4JIS7_9BACT Putative 6-pyruvoyl tetrahydropterin synthase OS=uncultured bacterium BAC10-4; OX = 333425 GN=pts PE=4 SV=1
MAEYKIVVEKDYLVFACGHFITYEGSCETLHGHNYRARVELEGDLDENYYVWDFVSLKRLMRRLVDEMDHRMLLPLQNPALTLREEDGHVHVLYKDRRYVFPKQDVAFLPIPNTTAEMLARYLLGRVRDELRKLGGGRLKALAVEVEESFGQSGWCRERMSD

SEQ ID NO: 26687 - protein, 138 aa, unidentified
  source 1..138: note = Unknown
  REGION 1..138: note = tr|A0A1B2YQ65|A0A1B2YQ65_9BACT 6-carboxy-5,6,7,8-tetrahydropterin synthase OS=uncultured bacterium OX=77133 PE=3 SV=1
MNKVTVSRKAHFNAAHRLYRKDWSDSKNEEVFDKCSNPYYHGHNYELVVSVTGNIDPETGYVMDMKVLKNLIKKHIEYVFDHKNLNEQVPDFATLIPTAENIVVVIWNKLRPHITAAHDLSITLYETPRNFVHFSGPN

SEQ ID NO: 26688 - protein, 110 aa, Bacteroides sp.
  REGION 1..110: note = tr|A0A1C5LJ01|A0A1C5LJ01_9BACE 6-carboxy-5,6,7,8-tetrahydropterin synthase OS=uncultured Bacteroides sp. OX=162156 GN=queD PE=3 SV=1
MYTVIKRMEISASHSLQLSYQSKCEKLHGHNWIITVYCRSKELDENGMVVDFTHIKQAVEKQLDHNNLNDVLSFNPTAENIAFWVCNQVPHCFRVEVKESEGNTAIYEKD

SEQ ID NO: 26689 - protein, 110 aa, Bacteroides sp.; identical to SEQ ID NO: 18143
  REGION 1..110: note = tr|A0A1C6CIP6|A0A1C6CIP6_9BACE 6-carboxy-5,6,7,8-tetrahydropterin synthase OS=uncultured Bacteroides sp. OX=162156 GN=queD PE=3 SV=1

SEQ ID NO: 26690 - protein, 151 aa, unidentified
  source 1..151: note = Bacteroidetes bacterium
  REGION 1..151: note = tr|H5SK66|H5SK66_9BACT Hypothetical conserved protein OS=uncultured Bacteroidetes bacterium OX=152509; GN = HGMM_F40B03C40 PE=4 SV=1
MPPRVYVTRRFHFSAAHRVYNPAWSDEKNYEVFGPCSHPGFHGHNYELEVTVAGAPNPDTGYVLDLALLKKLIDSHLIAQLDHKNLNTDVPFLSGQIPSTENLIVALWKEIQRLLPPGVKLVRLRLQETPRNAFEYYGEEDPLPPAQHQTL

SEQ ID NO: 26691 - protein, 140 aa, Blautia sp.
  REGION 1..140: note = tr|A0A1C6JH10|A0A1C6JH10_9FIRM 6-carboxy-5,6,7,8-tetrahydropterin synthase OS=uncultured Blautia sp. OX=765821 GN=SAMEA3545380_03176 PE=3 SV=1
MYYLQTKASFDAAHFLWKYEGKCRNIHGHRWNVVAKIKSQELEQEGQTRGMVVDFGNLKKDLKVLCDYFDHSLIYETGSLKAETVAALQNEDFHLEEVSFRPTAENFAYYFYKKLTDLGYGVHYVEVYETPNNCAVYEEE

SEQ ID NO: 26692 - protein, 149 aa, Blautia sp.
  REGION 1..149: note = tr|A0A1C5S9D5|A0A1C5S9D5_9FIRM 6-carboxy-5,6,7,8-tetrahydropterin synthase OS=uncultured Blautia sp. OX=765821 GN=SAMEA2393092_02289 PE=3 SV=1
MYQLKTEADFDSAHFLSGYTGKCSNIHGHRWHVEIEIESRKLEKNGQGRGMLVDFGDLKKDLRELADSMDHTLIYEENTLRPKTLEALDEEGFHLVKVPFRPTAENFSEYFFRKMEEKGYPVKRAVVYETPNNCAAYRETEEETEAVWL

SEQ ID NO: 26693 - protein, 120 aa, Citrobacter sp.
  REGION 1..120: note = tr|A0A212IL61|A0A212IL61_9ENTR 6-carboxy-5,6,7,8-tetrahydropterin synthase OS=uncultured Citrobacter sp. OX=200446 GN=ygcM PE=3 SV=1
MSTTLFKDFTFEAAHRLPHVPEGHKCGRLHGHSFMVRLEITGEVDPHIGWIMDFAELKAAFKPTYDRLDHYYLNDIPGLENPTSEVLAKWIWDQIKPVVPLLSAVMVKETCTAGCVYRGE

SEQ ID NO: 26694 - protein, 142 aa, Clostridium sp.
  REGION 1..142: note = tr|A0A1C6FLL6|A0A1C6FLL6_9CLOT 6-carboxy-5,6,7,8-tetrahydropterin synthase OS=uncultured Clostridium sp. OX=59620 GN=SAMEA3545367_02835 PE=3 SV=1
MFKVKSQIEFDMAHYLSGYDGKCSNIHGHRYKLIVSVKSETLHQEGQLRGMVDDFGNIKARLKEIEDLYDHKLVIEDNEDGRLVAQKLSELPNAFKVMLVPYRPTAEEMSRDIFYKLKDMGLNVSEVELFETPTNSCTYSED

SEQ ID NO: 26695 - protein, 118 aa, Clostridium sp.
  REGION 1..118: note = tr|A0A1C5UBT1|A0A1C5UBT1_9CLOT 6-carboxy-5,6,7,8-tetrahydropterin synthase OS=uncultured Clostridium sp. OX=59620 GN=queD PE=3 SV=1
MYEVKKRFEISAAHKLDLDYDSKCTNFHGHNWIIDVYLQSETLDKNGMVLDFTHIKRKIQDKFDHKVINEVVPFNPTAENLAKYICDELAPFCYRVDVQESQDNIASYIKDDVKIKLL

SEQ ID NO: 26696 - protein, 146 aa, Coprococcus sp.
  REGION 1..146: note = tr|A0A1C5QIW8|A0A1C5QIW8_9FIRM 6-pyruvoyl tetrahydropterin synthase-related domain OS=uncultured Coprococcus sp. OX=458253 GN=SAMEA3545228_00950 PE=4 SV=1
MIDYYKCQYHFNASHSFDGNKEQAHSHTFTMILYIRNHSGRDMDFKRLDRMIEIFLGRYEGMYLNELPCFAGNASIEAIGDYFYEQLKIKLSELNAELMQLDIGDTPLGVYQVCDRILLPTVNERRSRENLEAILFYKKQMPDQKK

SEQ ID NO: 26697 - protein, 147 aa, Coprococcus sp.
  REGION 1..147: note = tr|A0A1C5QID1|A0A1C5QID1_9FIRM 6-pyruvoyl tetrahydropterin synthase-related domain OS=uncultured Coprococcus sp. OX=458253 GN=SAMEA3545228_00945 PE=4 SV=1
MRYQQYKFKFYMDARHAIYIGGKLGEVHPHTWEIVLHVVKGKENFEPFHILEKAVEEFLEPFQNNYLNDIKPFDILNPTIENVCLYFKEKLQEILNAMGWIFLMIEMSETPGRTYVISMLDEQEMEQNQTVQTLTDLILDEIKHIGE

SEQ ID NO: 26698 - protein, 130 aa, unidentified
  source 1..130: note = Unknown
  REGION 1..130: note = tr|A0A212JK21|A0A212JK21_9DELT 6-carboxy-5,6,7,8-tetrahydropterin synthase OS=uncultured delta proteobacterium OX=34034 GN=KL86DPRO_11658 PE=3 SV=1
MTKSIWRLAVRSEFAAAHALRHYKGKCESIHGHNFSVEAVVEGDTLTPDTELLADFSDLKRDLAAVLETLDHKDLNAAPPFDAINPSSENLARHIYRALAPLVAARGVRMHAVTVSERGPQSATYMELQE

SEQ ID NO: 26699 - protein, 124 aa, unidentified
  source 1..124: note = Desulfobacteraceae bacterium
  REGION 1..124: note = tr|A0A484HG61|A0A484HG61_9DELT 6-carboxy-5,6,7,8-tetrahydropterin synthase OS=uncultured Desulfobacteraceae bacterium OX=218296 GN=EPICR_10147 PE=3; SV = 1
MFELTVKNRFAAAHQLKMVSQKCENLHGHNWEVEVCLAGESLDSAGVLMDFGEIKHMVADIMADLDHKFLNELECFPDQNPSSEHIAVYIAERMTGKVKNPGVSVRRVTVWESPGSGAAYIPPE

SEQ ID NO: 26700 - protein, 186 aa, unidentified
  source 1..186: note = Desulfobacteraceae bacterium
  REGION 1..186: note = tr|A0A484HL48|A0A484HL48_9DELT Rubredoxin; OS = uncultured Desulfobacteraceae bacterium OX=218296; GN = EPICR_30261 PE=4 SV=1
MSSVILMKKQKHKKEIIMSNDKYTSIVNLDFQYAHRFMNWPREAKHLHGHSGLLTIEIEDTVDPVTGYAHACKKGFKKAWQVCDHFHHATLFQEGDPLLDAVLAVYKKEGIHNDPEHCVPLTKIDHALAWSYPEYRIVVTKKVSTCENLCELFYALLKDKMPIKKITFRSSSMNAASKEFKGSLKN

SEQ ID NO: 26701 - protein, 123 aa, Desulfobacterium sp.
  REGION 1..123: note = tr|A0A445MRH0|A0A445MRH0_9DELT 6-carboxy-5,6,7,8-tetrahydropterin synthase OS=uncultured Desulfobacterium sp. OX=201089 GN=PITCH_A1150081 PE=3 SV=1
MYELEIISHFAAAHQLRGFEGGCENLHGHNWKVEVYVSGNKLEENGLLIDFKIIKAHTEKLLDSLDHKFLNELEPFSILNPSSENIACHLFRSLSGQLNTSNIKVSRVRVWESETACACYSEP

SEQ ID NO: 26702 - protein, 123 aa, Desulfobacterium sp.
  REGION 1..123: note = tr|E1YAN9|E1YAN9_9DELT 6-carboxy-5,6,7,8-tetrahydropterin synthase OS=uncultured Desulfobacterium sp. OX=201089 GN=N47_H24550 PE=3 SV=1
MFELKIITNFAAAHQLKLVAEKCENLHGHNWKIEACVTGDKLNDAGVVIDFGNLKIILSEIIAELDHKFLNDLEWFKGLNPSSETIAVRIAQELENRIDDPAVKVSSVTAWESDDACAKYICP

SEQ ID NO: 26703 - protein, 125 aa, Desulfofustis sp.; identical to SEQ ID NO: 19791
  REGION 1..125: note = tr|V4J9M5|V4J9M5_9DELT Uncharacterized protein; OS = uncultured Desulfofustis sp. PB-SRB1 OX=1385624; GN = N839_14200 PE=4 SV=1

SEQ ID NO: 26704 - protein, 127 aa, Desulfofustis sp.; identical to SEQ ID NO: 19792
  REGION 1..127: note = tr|V4J7C0|V4J7C0_9DELT 6-carboxy-5,6,7,8-tetrahydropterin synthase OS=uncultured Desulfofustis sp. PB-SRB1 OX=1385624 GN=N839_00370 PE=3; SV = 1

SEQ ID NO: 26705 - protein, 135 aa, Desulfovibrio sp.
  REGION 1..135: note = tr|A0A212KZZ4|A0A212KZZ4_9DELT 6-carboxy-5,6,7,8-tetrahydropterin synthase OS=uncultured Desulfovibrio sp. OX=167968 GN=KL86DES1_10692 PE=3 SV=1
MSKKLWRLTVRDDFSAGHALRHYEGKCERMHGHNFAVELTVEGSQLAAGTEMLLDFKVLKKGLKIVLDALDHRLLNETPPFDRINPSSENLARHIWQGMEAHLAAHDDPQARRVRLHSVTVSEKGAQSATYLETD

SEQ ID NO: 26706 - protein, 118 aa, Desulfovibrio sp.
  REGION 1..118: note = tr|A0A212IZQ8|A0A212IZQ8_9DELT 6-carboxy-5,6,7,8-tetrahydropterin synthase OS=uncultured Desulfovibrio sp. OX=167968 GN=ygcM PE=3 SV=1
MDIYVTMTFDAAHRLPAVPVGHKCGNLHGHTFVVEVYVQGEVSETNGWVVDFGDIKATAKSYVDQLDHTYLNDIEGLENPTSENIAIWLWGKLDPQIRGLSKIVVKESPTSGAVYTGK

SEQ ID NO: 26707 - protein, 150 aa, Dokdonia sp.
  REGION 1..150: note = tr|H8W428|H8W428_9FLAO Queuosine biosynthesis protein QueD OS=uncultured Dokdonia sp. OX=575653 GN=queD; PE = 4 SV=1
MSKIRITKQFTFETGHALYGYDGKCKNVHGHSYKLSVTVIGEPITDTGNAKLGMVIDFGDLKKIVNREIVNVFDHATVFNKNTPHVELAKELSDRGHDVLLVDYQPTSEMMVIDFAAKIQSFLPDTIKLHSLRLSETATSYAEWHAADQL

SEQ ID NO: 26708 - protein, 120 aa, Dysgonomonas sp.
  REGION 1..120: note = tr|A0A212JLD7|A0A212JLD7_9BACT 6-carboxy-5,6,7,8-tetrahydropterin synthase OS=uncultured Dysgonomonas sp. OX=206096 GN=KL86DYS1_20136 PE=3 SV=1
MYKISKQFSFSASHILEGLPLEHPCSRLHGHNYVVTVHLQAKQLNNVGFIKDYRELDSLKKYIDDTLDHRHLNDVLPFNPTAENMAKYLYDTFKKDIPELYAVEVSETPKTTAIYEADSE

SEQ ID NO: 26709 - protein, 120 aa, Dysgonomonas sp.; identical to SEQ ID NO: 20033
  REGION 1..120: note = tr|A0A212JSY3|A0A212JSY3_9BACT 6-carboxy-5,6,7,8-tetrahydropterin synthase OS=uncultured Dysgonomonas sp. OX=206096 GN=KL86DYS2_12259 PE=3 SV=1

SEQ ID NO: 26710 - protein, 142 aa, Eubacterium sp.
  REGION 1..142: note = tr|A0A1C6FMX4|A0A1C6FMX4_9FIRM 6-carboxy-5,6,7,8-tetrahydropterin synthase OS=uncultured Eubacterium sp. OX=165185 GN=SAMEA3545427_01085 PE=3 SV=1
MYILETEQSFDSAHFLSGYKGKCSNLHGHRWRVVARIAMDELNKEGQTRDMVIDFGDFKDALKKLTDALDHSFIFETGSLKETTLTALKEEGFLLHEVPFRPTAEQFSRYFYEQLQELDFPVYNISVYETPTNCSTYQEASL

SEQ ID NO: 26711 - protein, 142 aa, Eubacterium sp.; identical to SEQ ID NO: 17450
  REGION 1..142: note = tr|A0A1C5WND7|A0A1C5WND7_9FIRM Queuosine biosynthesis protein QueD OS=uncultured Eubacterium sp.; OX = 165185 GN=SAMEA3545253_02764 PE=4 SV=1

SEQ ID NO: 26712 - protein, 151 aa, unidentified
  source 1..151: note = Flavobacteriia bacterium
  REGION 1..151: note = tr|H6RDX0|H6RDX0_9BACT 6-pyruvoyl tetrahydrobiopterin synthase OS=uncultured Flavobacteriia bacterium OX=212695 GN=queD PE=4 SV=1
MAQKIRITKEFHFETGHALYGYDGLCKNVHGHSYKLAVTVMGSPIVDPSQTKNGMVLDFSDLKKIVKEEIVFPFDHATVLNVNSPHKELAEEMESRGHKVLKVTYQPTSEMMVLDFADKIKMRLPEGISLFALKLRETETSFAEWHAADNL

SEQ ID NO: 26713 - protein, 134 aa, unidentified
  source 1..134: note = Flavobacteriia bacterium
  REGION 1..134: note = tr|H6RGD7|H6RGD7_9BACT 6-carboxy-5,6,7,8-tetrahydropterin synthase OS=uncultured Flavobacteriia bacterium OX=212695 GN=ygcM PE=3 SV=1
MKVGRRETFNSAHRLFHPDWSDEKNLEVFGKCSNPNYHGHNYVLETWVEGPIDPVTGFVMDLKLLKNLIRTEVTDKFDHRNLNLDIDEFKDLNPTAENIAKVAWELISVKLPTQMKLTVRLWETENNIVEYSGK

SEQ ID NO: 26714 - protein, 119 aa, unidentified
  source 1..119: note = Unknown
  REGION 1..119: note = tr|A0A0H4TCL6|A0A0H4TCL6_9GAMM 6-carboxy-5,6,7,8-tetrahydropterin synthase OS=uncultured gamma proteobacterium Rifle_16ft_4_minimus_38164; OX = 1665199 PE=3 SV=1
MDLYKAFTVEAAHHLPNLPEGHKCRRLHGHSFRIEIHVTGTVDKKPGWVMDFAEISQYFKPLFEQLDHHYLNEVPGLENPTSENLAVWIWQRLKPALPRLSSVAIQETCTSGCVYRGED

SEQ ID NO: 26715 - protein, 119 aa, unidentified
  source 1..119: note = Unknown
  REGION 1..119: note = tr|A0A0H4T7Z5|A0A0H4T7Z5_9GAMM 6-carboxy-5,6,7,8-tetrahydropterin synthase OS=uncultured gamma proteobacterium Rifle_16ft_4_minimus_39789; OX = 1665200 PE=3 SV=1
MELYKAFTVEAAHHLPNLPEGHKCRRLHGHSFRIEIHVTGTVDKKPGWVMDFAEISQYFKPLFEQLDHHYLNEVPGLENPTSENLAVWIWQRLKPDLSQLSSVAIQETCTSGCVYRGED

SEQ ID NO: 26716 - protein, 125 aa, unidentified
  source 1..125: note = Gammaproteobacteria bacterium
  REGION 1..125: note = tr|A0A5E5QKV1|A0A5E5QKV1_9GAMM 6-carboxy-5,6,7,8-tetrahydropterin synthase OS=uncultured Gammaproteobacteria bacterium OX=86473 GN=BSPLISOX_2084; PE = 3 SV=1
MFVLKIVTDFASAHSLRDYPGDCSRLHGHNWQVEVSVESAVLDTLGIAIDFREIKKQTKEVVKRLDHQYLNEIPPFDELNPTAENIAKYFYQEVGVLINNQDVRVCEVIIWETPRASVTYSEPRL

SEQ ID NO: 26717 - protein, 125 aa, unidentified
  source 1..125: note = Gammaproteobacteria bacterium
  REGION 1..125: note = tr|A0A5E5Q660|A0A5E5Q660_9GAMM 6-carboxy-5,6,7,8-tetrahydropterin synthase OS=uncultured Gammaproteobacteria bacterium OX=86473 GN=BSPCLSOX_1722; PE = 3 SV=1
MFVLKIVTDFASAHSLRDYPGDCSRLHGHNWQVEVSVESAVLDALGIAIDFREIKKQTKEVVKRLDHQYLNEIPPFDELNPTAENIAKYFYQEVGVLINNQDVRVCEVIIWETPRASVTYSEPRL

SEQ ID NO: 26718 - protein, 137 aa, unidentified
  source 1..137: note = Unknown
  REGION 1..137: note = tr|Q2PY17|Q2PY17_9BACT 6-carboxy-5,6,7,8-tetrahydropterin synthase OS=uncultured marine bacterium Ant39E11 OX=360427 PE=3 SV=1
MIYIQRRAIFSAAHRLANPSWSDEKNQAVFGHCANEYSHGHNFQLIVTVKGEVNTDTGFVMNMVDLKAIMDSEIIQHVDHRNLNHDVPFMQGIMPSTENLAMIFWQQIEGPIAKHGAALHCIRIVETENNMVEYYGE

SEQ ID NO: 26719 - protein, 109 aa, Megasphaera sp.; identical to SEQ ID NO: 22394
  REGION 1..109: note = tr|A0A1C5MAQ7|A0A1C5MAQ7_9FIRM 6-carboxy-5,6,7,8-tetrahydropterin synthase OS=uncultured Megasphaera sp. OX=165188 GN=queD PE=4 SV=1

SEQ ID NO: 26720 - protein, 164 aa, unidentified
  source 1..164: note = Unknown
  REGION 1..164: note = tr|A9LH53|A9LH53_9BACT 6-pyruvoyl-tetrahydropterin synthase OS=uncultured planctomycete 13FN OX=455065; GN = 13FN_13 PE=4 SV=1
MIIQKQYKFYAAHRNETLQDKCSNLHGHRYGVKCHFQVERDGDISTLFGDFDAKVEPWLKQNYDHGMLINRHDSLYESLEMHMERTGESLRLNVFDGPTSVENLCHKLFTEITQLGFRLATLEVQETDTFVVSYTREDWVADNRYFGKKTSIAAAASETTAIGS

SEQ ID NO: 26721 - protein, 118 aa, unidentified
  source 1..118: note = Pseudomonadales bacterium
  REGION 1..118: note = tr|E0XYB4|E0XYB4_9GAMM 6-carboxy-5,6,7,8-tetrahydropterin synthase OS=uncultured Pseudomonadales bacterium HF0500_12O04 OX=710779 PE=3 SV=1
MEIFKEFTFESAHRLPFVPEGHKCGRLHGHSFKVAIHLSGDIDPATGWIRDFSEIKAIFKPLYEQLDHNYLNDIPGLENPTSEVLAKWIWQQLKPLLPELSAIRIHETCTSGCIYYGD

SEQ ID NO: 26722 - protein, 106 aa, Rhizobium sp.
  REGION 1..106: note = tr|E7C5Q2|E7C5Q2_9RHIZ Uncharacterized protein; OS = uncultured Rhizobium sp. HF0500_29J11 OX=723628 PE=4; SV = 1
MHGATFVVDAAFFTDSLDADGLAIDIGLATEILAGVVKPLNYQNLDELEIFAGKVTTTEFLAKHLFDAIAEKIAAGELGDGGARVKRLKIQLHESHVARAWYEADL

SEQ ID NO: 26723 - protein, 146 aa, Roseburia sp.
  REGION 1..146: note = tr|A0A1C5VYL1|A0A1C5VYL1_9FIRM 6-carboxy-5,6,7,8-tetrahydropterin synthase OS=uncultured Roseburia sp. OX=512314 GN=SAMEA3545351_00276 PE=3 SV=1
MYILKTEQSFDSAHFLYGYEGKCRNLHGHRWRVVAEICADTLQPQGQLKGMVTDFGDIKKDLQELADFYDHALIAEEGTLKPATKEAFKEEGFRIIWVPFRPTAENFSRHFYELLKEKGYQMHAVSVYETPNNCAVYCEQKERQNG

SEQ ID NO: 26724 - protein, 140 aa, Ruminococcus sp.
  REGION 1..140: note = tr|A0A1C6DMS3|A0A1C6DMS3_9FIRM 6-carboxy-5,6,7,8-tetrahydropterin synthase OS=uncultured Ruminococcus sp. OX=165186 GN=SAMEA3545397_02081 PE=3 SV=1
MYFLKTEAAFDSAHFLYGYEGKCSNIHGHRWKIEVTVQNAFLQRNGQNKGMIMDFTDLKKALQLIADHYDHSLIYEKNTLKPDTMELLKRDGFRLVELPFRPTAENLSRHFFMILKERGFRPHNVTVYETPNNCAMYEEG

SEQ ID NO: 26725 - protein, 109 aa, Ruminococcus sp.; identical to SEQ ID NO: 22394
  REGION 1..109: note = tr|A0A1C5W2M1|A0A1C5W2M1_9FIRM 6-carboxy-5,6,7,8-tetrahydropterin synthase OS=uncultured Ruminococcus sp. OX=165186 GN=queD PE=4 SV=1

SEQ ID NO: 26726 - protein, 92 aa, unidentified
  source 1..92: note = Unknown
  REGION 1..92: note = tr|A0A3P3XUA3|A0A3P3XUA3_9SPIR 6-carboxy-5,6,7,8-tetrahydropterin synthase OS=uncultured spirochete OX=156406 GN=SPIRO4BDMA_51018 PE=4 SV=1
MWVSGKELGEGGMLVDFSIVKAALKKLIDEALDHRDLNGLPEFEDDPSAERIAKFIYDRLRGVLPEVPLSAVDVFETDTSMARYVPDSVERF

SEQ ID NO: 26727 - protein, 122 aa, unidentified; identical to SEQ ID NO: 25745
  source 1..122: note = Unknown
  REGION 1..122: note = tr|A0A3P3XFK6|A0A3P3XFK6_9SPIR 6-carboxy-5,6,7,8-tetrahydropterin synthase OS=uncultured spirochete OX=156406 GN=queD PE=3 SV=1

SEQ ID NO: 26728 - protein, 125 aa, Sporomusa sp.; identical to SEQ ID NO: 25784
  REGION 1..125: note = tr|A0A212LR70|A0A212LR70_9FIRM 6-carboxy-5,6,7,8-tetrahydropterin synthase OS=uncultured Sporomusa sp. OX=307249 GN=queD PE=3 SV=1

SEQ ID NO: 26729 - protein, 118 aa, Stenotrophomonas sp.; identical to SEQ ID NO: 25898
  REGION 1..118: note = tr|A0A1Y5Q4D9|A0A1Y5Q4D9_9GAMM 6-carboxy-5,6,7,8-tetrahydropterin synthase OS=uncultured Stenotrophomonas sp. OX=165438 GN=ygcM PE=3 SV=1

SEQ ID NO: 26730 - protein, 178 aa, unidentified
  source 1..178: note = Unknown
  REGION 1..178: note = tr|A0A483A8H3|A0A483A8H3_9GAMM Potential queD like; OS = uncultured SUP05 cluster bacterium OX=655186; GN = CRYPA_1751 PE=4 SV=1
MLELFKEMHIIWVVTLIVVIAIMLFSSGFVQAGNTYQYQKQQAVFTKAEINLLKVLEQVVINPNLAIYGKIRVADILKPAIQKNANRKKWWSAFSKISQKHVDFVIVDKHDYSVVSVIELNDKSHNRKDRQDRDKFIRKAYASANIELVEIKAARHYFVSDLLGQFSETTQRKLQGNN

SEQ ID NO: 26731 - protein, 123 aa, unidentified
  source 1..123: note = Unknown
  REGION 1..123: note = tr|A0A482ZS03|A0A482ZS03_9GAMM 6-carboxy-5,6,7,8-tetrahydropterin synthase OS=uncultured SUP05 cluster bacterium OX=655186 GN=SPONL_889 PE=3 SV=1
MFVLKIVTDFGAAHSLRNYPGDCARLHGHNWGVETEVCAQELDENGIAIDFREIKKQTKVVVKRLDHRYLNEIAPFDKLNPTAENIAKYFFEEIGILINNNDVKVKAVTIWETPRASVTYSNE

SEQ ID NO: 26732 - protein, 122 aa, unidentified
  source 1..122: note = Unknown
  REGION 1..122: note = tr|B1GYR9|B1GYR9_UNCTG 6-carboxy-5,6,7,8-tetrahydropterin synthase OS=Uncultured termite group 1 bacterium phylotype Rs-D17 OX=471821; GN = TGRD_679 PE=3 SV=1
MKYKLSVTRSFSSAHCLREYKGRCENLHGHNWKIRAAFYGTELDDTGVLIDFMDIKMHLNKVINYLDHKFLNEIVPFDRVNPTAENIAAFILGRLKDIETKNAKVCEVEIWESESSSAVVCI

SEQ ID NO: 26733 - protein, 390 aa, Thiohalocapsa sp.
  REGION 1..390: note = tr|V4J475|V4J475_9GAMM Uncharacterized protein; OS = uncultured Thiohalocapsa sp. PB-PSB1 OX=1385625; GN = N838_20635 PE=4 SV=1
MHRPNGQHKTTAGMLHARNNNKMSERLFHVAAAPFEAARRVLTVPDQHPAHRLHGHSFVARLRAELPPGWAAFAGGETDALKAALDHCIATLDYSDLNQHLAIPTDENLARWVRRCLHVPGIKSVGIQSTRDQGANLDADEHASIWRRFRFEAAHQLPNVRRGHPCGRMHGHGFEVVLHAKQAQSDADRGIDLDALDVLWEPIQEELQYACLNDIPGLENPTSEMIAGWLWRRLKPQLPALCWITVYETITAGCHYDGTHYRIWKERRFESALRLMQAPQGDRRRRLHGHSYLLRLHLSAPLDQVLGWTVDYGDVKQCFEPVYKQLDHHLLNELPGLDRSDPASLARWMRETIGARLPRLDRIDLHQTPGCGAVLCWGASGPADAALVEG

SEQ ID NO: 26734 - protein, 168 aa, Thiohalocapsa sp.
  REGION 1..168: note = tr|V4JYH3|V4JYH3_9GAMM Uncharacterized protein; OS = uncultured Thiohalocapsa sp. PB-PSB1 OX=1385625; GN = N838_03860 PE=4 SV=1
MPAERITRIEISKQYLGFSAGHFTIFSATRRENLHGHNFAVRCAVTAVVGADGLIFDYGILKRTLKSLCDELDERVLLPEASPHLQIERDAGLVFARLADERIPFLERDVLLLPIRNTTIEELAAFLLEQLSIHPDLGERGIRGMELGVSSGDGQWAYAYHTMDENRR

SEQ ID NO: 26735 - protein, 147 aa, Undibacterium parvum
  REGION 1..147: note = tr|A0A3S5HM33|A0A3S5HM33_9BURK 6-carboxy-5,6,7,8-tetrahydropterin synthase; OS = Undibacterium parvum OX=401471 GN=queD PE=3 SV=1
MLTITRKVEFDTGHRIPDHNSQCRNLHGHRYTLLITLTGDVVEKDGESDNGMIMDFGDIKALANQYLVDLWDHAFIVYEKDSVVREFLESMPNHKTVVIDRVPTVENLAKIAFDILKNVYHDRYGRHMSLSKVTLYETPNCWAEIDA

SEQ ID NO: 26736 - protein, 147 aa, Undibacterium pigrum
  REGION 1..147: note = tr|A0A318JCF0|A0A318JCF0_9BURK 6-pyruvoyltetrahydropterin/6-carboxytetrahydropterin synthase OS=Undibacterium pigrum OX=401470 GN=DFR42_101855; PE = 4 SV=1
MLTITRKLEFDAGHRIPDHGSQCRNLHGHRYTLQITLTGEVVQKDGESDNGMIMDFGDIKALANEHLVNLWDHSFIVYEKDYIIKNFLEKLPGHKTVVIDRVPTVENLAKIAFDILKVVYHGRFGRTLELTKVTLYETPNCWAEIDG

SEQ ID NO: 26737 - protein, 147 aa, Undibacterium sp.
  REGION 1..147: note = tr|A0A3S0JFI7|A0A3S0JFI7_9BURK 6-carboxytetrahydropterin synthase QueD OS=Undibacterium sp. S11R28 OX=2495591 GN=queD PE=4 SV=1
MLTITRKVEFDSGHRIPDHNSQCRNLHGHRYTLLITLTGDVVEKDGESDNGMIMDFGDIKSLANQYLVNLWDHAFIVYEKDTMVRTFLDSMPGHKTVVIDRVPTVENLAKIAFDILKDVYHDRYGRHMSLSKVTLYETPNCWAEVDA

SEQ ID NO: 26738 - protein, 150 aa, unidentified
  source 1..150: note = Unknown
  REGION 1..150: note = tr|A6EKZ4|A6EKZ4_9BACT Conserved possible 6-pyruvoyl tetrahydrobiopterin synthase OS=unidentified eubacterium SCB49 OX=50743 GN=SCB49_05542 PE=4 SV=1
MSKIRITKQFSFETGHALYGYDGKCRNVHGHSYKLSVTVIGTPIADSNHVKFGMVIDFTDLKKIVTEEIVDVFDHATVFNKNTPHVELAKELSDRGHCVLLVDYQPTSEMMVIDFAEKIKQRLPENISLFSLRLQETTTSFAEWFASDNE

SEQ ID NO: 26739 - protein, 135 aa, unidentified
  source 1..135: note = Unknown
  REGION 1..135: note = tr|A6ESX3|A6ESX3_9BACT 6-pyruvoyl tetrahydrobiopterin synthase OS=unidentified eubacterium SCB49 OX=50743 GN=SCB49_01097 PE=4 SV=1
MSLTVYRKAHFNAAHRLYKEEWSNEKNALIFGKCSNPNYHGHNYDLEVGVTGEIDEETGFLIDLKILKKVIYEEVEVPFDHKNLNLEVEAFKTVNPTVENIAIEIYNRIVKRLDSRFDISVKLYETPRNFVVYTG

SEQ ID NO: 26740 - protein, 156 aa, Ureibacillus terrenus
  REGION 1..156: note = tr|A0A540UX43|A0A540UX43_9BACL 6-carboxytetrahydropterin synthase QueD OS=Ureibacillus terrenus OX=118246 GN=queD PE=4 SV=1
MFEFRIVDRLQKLGEDIQKEQLRYHSKRVLVSKEFTFDAAHHLHTYEGKCKNLHGHTYKVIVGVSGYPDERGIVIDFADLKEIWKEKIEIYLDHRYLNETLPPMNTTAENMVVWIYEQFAEALEDAGLEGARVEFIRLYETPTSFAEARREWMELE

SEQ ID NO: 26741 - protein, 156 aa, Ureibacillus thermophilus
  REGION 1..156: note = tr|A0A4P6UVM6|A0A4P6UVM6_9BACL 6-carboxytetrahydropterin synthase QueD OS=Ureibacillus thermophilus OX=367743 GN=queD PE=4 SV=1
MLDFRIVDKLQKLDEDIQRDQLRYHSKRVLVSKEFTFDAAHHLHAYEGKCKNLHGHTYKVVLGVSGYPDDRGLVIDFADLKDIWKEKIEIYLDHRYLNETLPPMNTTAENMVVWIYEKLAEALQEKGFDGARVEFIRLYETPTSYAEARREWMESE

SEQ ID NO: 26742 - protein, 141 aa, Uruburuella suis
  REGION 1..141: note = tr|A0A4R2MGH7|A0A4R2MGH7_9NEIS 6-carboxy-5,6,7,8-tetrahydropterin synthase OS=Uruburuella suis OX=252130 GN=EV680_11413 PE=3 SV=1
MMKITKTFSFDMAHMLDHHDGKCKNLHGHTYKLEVEISGDLILGGAKDGMVIDFADLKTIVKKLVVEPFDHAFIYHTESARECEIAAMLEGWQLKTLPMAKRTTAENMAQYMFDLLRNEGRLNVSALRLWETPTSYCECSA

SEQ ID NO: 26743 - protein, 123 aa, unidentified
  source 1..123: note = Vampirococcus sp.
  REGION 1..123: note = tr|A0A410P3D1|A0A410P3D1_9BACT 6-carboxy-5,6,7,8-tetrahydropterin synthase; OS = Vampirococcus sp. LiM OX=1930593 GN=BU251_01605 PE=3; SV = 1
MYEVCVSMNFSAAHNLRGYQGKCEALHGHNWKVEVILRSALLDKIGMVEDFTLIKSKLKEVLALFDHKYLNTLSYFKKKNPTSENIAKIIYGKMKERMNGSSVLLEAVKVWETETTFASYREP

SEQ ID NO: 26744 - protein, 132 aa, unidentified
  source 1..132: note = Variibacter gotjawalensis
  REGION 1..132: note = tr|A0A0S3PX48|A0A0S3PX48_9BRAD 6-pyruvoyl tetrahydropterin synthase OS=Variibacter gotjawalensis; OX = 1333996 GN=GJW-30_1_03046 PE=4 SV=1
MFAVEVRDHIMIAHSFRGAVFGPAQALHGATFVVDACFIAKSLDDNGIVVDIGRALDVLKATLKPLNYSNLDDNPKFKGQNTTTEFMCKYIYDALAEAARSGGLGRDGKDLNSIRVTLSESHVARAWYEQAL

SEQ ID NO: 26745 - protein, 118 aa, unidentified
  source 1..118: note = Variibacter gotjawalensis
  REGION 1..118: note = tr|A0A0S3PVS0|A0A0S3PVS0_9BRAD 6-carboxy-5,6,7,8-tetrahydropterin synthase OS=Variibacter gotjawalensis OX=1333996 GN=queD PE=3 SV=1
MKISQAFRFEAAHRLPNVPATHRCHRMHGHSYRIEIQLEGATDPHTGFVVDFFDIEAVVGPLIAEIDHQCLNEIGGLENPTAENIAVWIWQRTKPSLAQLSAVRVYETPDCWAEYDGG

SEQ ID NO: 26746 - protein, 120 aa, Variovorax boronicumulans
  REGION 1..120: note = tr|A0A1E7U2E4|A0A1E7U2E4_9BURK 6-carboxy-5,6,7,8-tetrahydropterin synthase OS=Variovorax boronicumulans OX=436515 GN=AO062_14245 PE=3 SV=1
MRFTISQRFFFDAAHTLKREIEVEGSRRIHGHTYHAEVWLAGERDPVTGMVIDLGLLRRRLEDVREQLDHHLLDDVPGLHPPTLENLCVFIADALPDLRPSLARVRVWREALGDSCTVEF

SEQ ID NO: 26747 - protein, 120 aa, unidentified
  source 1..120: note = Variovorax gossypii
  REGION 1..120: note = tr|A0A431TK59|A0A431TK59_9BURK 6-carboxy-5,6,7,8-tetrahydropterin synthase OS=Variovorax gossypii OX=1679495 GN=EJP69_18755 PE=3 SV=1
MRFTISQRFFFDAAHTLKREIEVEGSRRIHGHTYHAEVWLTGERDPVTGMVIDLGLLRRRLEDVREQLDHHLLDDVAGLHPPTLENLCVFIADALPDLRPSLARVRVWREALGDSCTVDF

SEQ ID NO: 26748 - protein, 139 aa, unidentified
  source 1..139: note = Variovorax guangxiensis
  REGION 1..139: note = tr|A0A502DT73|A0A502DT73_9BURK 6-carboxytetrahydropterin synthase OS=Variovorax guangxiensis OX=1775474 GN=EAH82_06895 PE=4 SV=1
MYSVNVRDHFMIAHSFRGEAFGPAQRLHGATYVVDAEFRRRALDADGMVVDIALATEVLRRVLGELNLRNLDDDAAFAGQNTTTEFMARVVFDRIAARIAAGELGPHASGLDGLHVRLHESHVAWAAYEAALPGADTAR

SEQ ID NO: 26749 - protein, 120 aa, unidentified
  source 1..120: note = Variovorax guangxiensis
  REGION 1..120: note = tr|A0A3S0XI87|A0A3S0XI87_9BURK 6-carboxy-5,6,7,8-tetrahydropterin synthase OS=Variovorax guangxiensis OX=1775474 GN=EJP67_26570 PE=3 SV=1
MRFTISQRFFFDAAHTLKREIEAEGSRRIHGHTYHAEVWLSGERDPVTGMVIDLGLLRRRLAEVREQLDHHLLDDVPGLHPPTLENLCVFIADALPDLRPSLARVRVWREAMGDSCTVDF

SEQ ID NO: 26750 - protein, 120 aa, Variovorax paradoxus
  REGION 1..120: note = tr|E6UYM1|E6UYM1_VARPE 6-carboxy-5,6,7,8-tetrahydropterin synthase OS=Variovorax paradoxus (strain EPS) OX=595537 GN=Varpa_4763 PE=3 SV=1
MRFTISQRFFFDAAHTLKREIEVEGSRRIHGHTYHAEVWLAGERDPVTGMVIDLGLLRRRLEDVRELLDHHLLDDVAGLHPPTLENLCLFIADALPEFRASLARVRVWREALGDSCTLEF

SEQ ID NO: 26751 - protein, 120 aa, Variovorax paradoxus
  REGION 1..120: note = tr|A0A0P8YZI0|A0A0P8YZI0_VARPD 6-carboxy-5,6,7,8-tetrahydropterin synthase OS=Variovorax paradoxus OX=34073 GN=APR47_34140 PE=3 SV=1
MRFTISQRFFFDAAHTLKREIEAEGSRRIHGHTYHAEVWLAGERDPATGMVIDLGLLRRRLDDVRDRLDHRLLDEVPGLHPPTLENLCLFIAEALGELQASLARVRVWREALGDSCTLEF

SEQ ID NO: 26752 - protein, 120 aa, Variovorax sp.; identical to SEQ ID NO: 26747
  REGION 1..120: note = tr|A0A1H7MBW2|A0A1H7MBW2_9BURK 6-carboxy-5,6,7,8-tetrahydropterin synthase OS=Variovorax sp. YR750 OX=1884384 GN=SAMN05518845_104396 PE=3 SV=1

SEQ ID NO: 26753 - protein, 366 aa, Variovorax sp.
  REGION 1..366: note = tr|A0A1C6NQK2|A0A1C6NQK2_9BURK 6-pyruvoyltetrahydropterin/6-carboxytetrahydropterin synthase OS=Variovorax sp. HW608 OX=1034889; GN = VAR608DRAFT_2954 PE=4 SV=1
MSSPIRTLFTAALTFESACHVDVLPAGHRSRRLHGHSYLAKLRCALPPDWAAFPGGEVERLRDSLAAQVARLDYRLLNEVVTQPTDENLARWIRAHVDAPGIEQVGIQSTAHEGVDLDAAGHAHVWRRFAFQSAHRLPQVRPGHKCGRMHGHGFEVIVHADQDIGKSDLAIDYDRLEALWAPLSAQLDHACLNDVPGLENPTSELLSSWLWKRLEPALPALSWVTVYETGSSGAHYDGTRYRIWKEFSLDSALQLRRAPQGSVLRRIHGHTYVLRLHLSAPLDTVMGWTMDFGDVKELFSPIFDMLDHRPLHETAELEDCDTASLARWILGKAREVLPALDRVDLYETRGCGAIVLAGDEGPALPV

SEQ ID NO: 26754 - protein, 176 aa, unidentified
  source 1..176: note = Varunaivibrio sulfuroxidans
  REGION 1..176: note = tr|A0A4R3JGM8|A0A4R3JGM8_9PROT 6-pyruvoyltetrahydropterin/6-carboxytetrahydropterin synthase OS=Varunaivibrio sulfuroxidans OX=1773489; GN = EDD55_101416 PE=4 SV=1
MTYLVTRTIGIDAGHRIMTHGSKCRHLHGHRYTIEATCKARGDALQSNGEQTDMVIDFGFLKEEMERHIDAPCDHGFIAALGDVEVLAMFAPLDCDFEIWHQDIRAEIEKIGYCTTVDCRLQTKLYIVDFHPTAECLAKHWFMRLDEAVRARSGDAAVIDRVRVWETPNCWAEYGA

SEQ ID NO: 26755 - protein, 112 aa, Veillonella atypica
  REGION 1..112: note = tr|E1L5B2|E1L5B2_9FIRM 6-carboxy-5,6,7,8-tetrahydropterin synthase OS=Veillonella atypica ACS-049-V-Sch6 OX=866776 GN=queD PE=3 SV=1
MYTVSKRLEVSASHQLQLDYPSKCQNLHGHNWIITVHARSEELDHNGMVIDFTIIKEKIHGCLDHKHINDVLGGINPTAENMAKWIADELGPKCFKVEVQESEGNVAIYERD

SEQ ID NO: 26756 - protein, 112 aa, Veillonella atypica
  REGION 1..112: note = tr|E1LC18|E1LC18_9FIRM 6-carboxy-5,6,7,8-tetrahydropterin synthase OS=Veillonella atypica ACS-134-V-Col7a OX=866778 GN=queD PE=3 SV=1
MYTVSKRLEVSASHQLQLDYPSKCQNLHGHNWIITVHARSEELDHNGMVIDFTIIKEKIHGRLDHKHINDVLGGINPTAENMAKWIADELGPKCFKVEVQESEGNVAIYERD

SEQ ID NO: 26757 - protein, 112 aa, Veillonella criceti
  REGION 1..112: note = tr|A0A380NM76|A0A380NM76_9FIRM 6-carboxy-5,6,7,8-tetrahydropterin synthase OS=Veillonella criceti OX=103891 GN=queD PE=3 SV=1
MFTVVKKLEISASHQLKLTYKSKCQNLHGHNWIVHIYARSAELDENGMVIDFGHIKEAIHGRLDHKHVNDIMGDINPTAENMAKWIADELGEKCFKVVVQESEGNVAIYERD

SEQ ID NO: 26758 - protein, 112 aa, Veillonella denticariosi
  REGION 1..112: note = tr|A0A2S7Z7W1|A0A2S7Z7W1_9FIRM 6-carboxy-5,6,7,8-tetrahydropterin synthase OS=Veillonella denticariosi JCM 15641 OX=1298594 GN=VEHSUH05_08355 PE=3; SV = 1
MFTVCKRLEVSASHQLKLDYPSKCQQLHGHNWIITVYARSEELDHNGMVIDFTIIKEKIHGRLDHHHINDMLGDINSTAENMAKWIADELGSKCFKVEVQESEGNVAIYERD

SEQ ID NO: 26759 - protein, 112 aa, Veillonella dispar
  REGION 1..112: note = tr|W1UUG6|W1UUG6_9FIRM 6-carboxy-5,6,7,8-tetrahydropterin synthase OS=Veillonella dispar DORA_11 OX=1403949 GN=Q619_VDC00600G0101 PE=3 SV=1
MFTVTKRLEVSASHQLQLDYPSKCQNLHGHNWIITVHARSEELDHNGMVIDFTIIKEKIHGRLDHRHINDVLGDINPTAENMAKWIADELGPKCFKVEVQESEGNTAIYERD

SEQ ID NO: 26760 - protein, 112 aa, Veillonella dispar
  REGION 1..112: note = tr|C4FPK8|C4FPK8_9FIRM 6-carboxy-5,6,7,8-tetrahydropterin synthase OS=Veillonella dispar ATCC 17748 OX=546273 GN=queD PE=3 SV=1
MFTVTKRLEVSASHQLKLDYPSKCQNLHGHNWIITVHARSEELDHNGMVIDFTIIKEKIHGRLDHRHINDVLGDINPTAENMAKWIADELGPKCFKVEVQESEGNTAIYERD

SEQ ID NO: 26761 - protein, 112 aa, Veillonella montpellierensis
  REGION 1..112: note = tr|A0A096AMQ1|A0A096AMQ1_9FIRM 6-carboxy-5,6,7,8-tetrahydropterin synthase OS=Veillonella montpellierensis DNF00314 OX=1401067 GN=HMPREF0872_00340; PE = 3 SV=1
MYYVSKRMEIAGSHKLNLDYESKCQNLHGHNWIVTVFMSGKELNSNGMIMDFTHIKRAIHDRLDHAHINDVVGDINPTAENMAKWICDQLGECCYKVSVQESEGNIAIYERD

SEQ ID NO: 26762 - protein, 112 aa, Veillonella parvula
  REGION 1..112: note = tr|A0A418PGL8|A0A418PGL8_9FIRM 6-carboxy-5,6,7,8-tetrahydropterin synthase OS=Veillonella parvula OX=29466 GN=queD PE=3 SV=1
MFTVTKRLEVSASHQLKLDYPSKCQNLHGHNWIITVHARSEELDHNGMVIDFTIIKEKIHGRLDHRHINDVLGNINPTAENMAKWIADELGPKCFKVEVQESEGNTAIYERD

SEQ ID NO: 26763 - protein, 112 aa, Veillonella parvula; identical to SEQ ID NO: 26759
  REGION 1..112: note = tr|D1BNB7|D1BNB7_VEIPT 6-carboxy-5,6,7,8-tetrahydropterin synthase OS=Veillonella parvula (strain ATCC 10790 / DSM 2008 / JCM 12972 / Te3); OX = 479436 GN=Vpar_1194 PE= 3 SV=1

SEQ ID NO: 26764 - protein, 112 aa, Veillonella rodentium
  REGION 1..112: note = tr|A0A239ZDY1|A0A239ZDY1_9FIRM 6-carboxy-5,6,7,8-tetrahydropterin synthase OS=Veillonella rodentium OX=248315 GN=queD PE=3 SV=1
MFTVCKRLEVSASHQLKLDYPSKCQQLHGHNWIITVYARSEELDHNGMVIDFTIIKKKIHRRLDHHHINDVLGDINPTAENMAKWIADELGPKCFKVEVQESEGNVAIYERD

SEQ ID NO: 26765 - protein, 112 aa, unidentified
  source 1..112: note = Veillonella seminalis
  REGION 1..112: note = tr|K9D2X3|K9D2X3_9FIRM 6-carboxy-5,6,7,8-tetrahydropterin synthase OS=Veillonella seminalis ACS-216-V-Col6b OX=883156 GN=HMPREF9282_00490; PE = 3 SV=1
MFTVVKKLEISASHQLKLTYKSKCQNLHGHNWIVHIHARSAELDENGMVIDFGHIKEAIHGRLDHKHVNDIMGDINPTAENMAKWIADQLGEKCFKVVVQESEGNVAIYERD

SEQ ID NO: 26766 - protein, 112 aa, Veillonella sp.
  REGION 1..112: note = tr|A0A2S7Z9E9|A0A2S7Z9E9_9FIRM 6-carboxy-5,6,7,8-tetrahydropterin synthase OS=Veillonella sp. T34266-5 OX=2027457 GN=queD PE=3 SV=1
MYTVSKRLEVSASHQLQLDYPSKCQNLHGHNWIITVHARSEELDHNGMVIDFTIIKEKIHGRLDHKHINDVLGNINPTAENMAKWIADELGPKCFKVEVQESEGNVAIYERD

SEQ ID NO: 26767 - protein, 112 aa, Veillonella sp.
  REGION 1..112: note = tr|R5BS34|R5BS34_9FIRM 6-carboxy-5,6,7,8-tetrahydropterin synthase OS=Veillonella sp. CAG:933 OX=1262980 GN=BN814_02370 PE=3 SV=1
MFTVVKKLEISASHQLKLTYPSKCQNLHGHNWIVHIHARAAELDENGMVIDFGHIKEAIHGQLDHKHVNDVMGDINPTAENMAKWIADQLGEKCFKVVVQESEGNVAIYERD

SEQ ID NO: 26768 - protein, 112 aa, unidentified
  source 1..112: note = Veillonella tobetsuensis
  REGION 1..112: note = tr|A0A480B7S6|A0A480B7S6_9FIRM 6-carboxy-5,6,7,8-tetrahydropterin synthase OS=Veillonella tobetsuensis OX=1110546 GN=PAGU1579_01160 PE=3 SV=1
MYTVSKRLEVSASHKLTLDYPSKCQNLHGHNWIITVHARSEELDHNGMVIDFTIIKEKIHSRLDHKHINDVLGDINPTAENMAKWIADELGPKCFKVEVQESEGNVAIYERD

SEQ ID NO: 26769 - protein, 112 aa, unidentified
  source 1..112: note = Veillonella tobetsuensis
  REGION 1..112: note = tr|A0A2S7ZRA1|A0A2S7ZRA1_9FIRM 6-carboxy-5,6,7,8-tetrahydropterin synthase OS=Veillonella tobetsuensis OX=1110546 GN=queD PE=3 SV=1
MYTVSKRLEVSASHKLTLDYPSKCQNLHGHNWIITVHARSEELDHNGMVIDFTIIKEKIHGRLDHKHINDVLGDINPTAENMAKWIADELGPKCFKVEVQESEGNVAIYERD

SEQ ID NO: 26770 - protein, 109 aa, unidentified; identical to SEQ ID NO: 22389
  source 1..109: note = Veillonellaceae bacterium
  REGION 1..109: note = tr|A0A134CK79|A0A134CK79_9FIRM Putative queuosine biosynthesis protein QueD OS=Veillonellaceae bacterium DNF00751 OX=1384082 GN=HMPREF3033_00684 PE=4 SV=1

SEQ ID NO: 26771 - protein, 109 aa, unidentified
  source 1..109: note = Veillonellaceae bacterium
  REGION 1..109: note = tr|A0A134CB15|A0A134CB15_9FIRM Putative queuosine biosynthesis protein QueD OS=Veillonellaceae bacterium DNF00626 OX=1588754 GN=HMPREF3191_01292 PE=4 SV=1
MYTVTKRMEISGAHFLHLDYPSKCQSLHGHNWVVTVTVQNDSLDKNGMVVDFTQIKDVVNEFDHHLANDIMKDVNPTAENMAKWIYDRIPHCIRVSVQETEGNVATYEE

SEQ ID NO: 26772 - protein, 128 aa, Verminephrobacter eiseniae
  REGION 1..128: note = tr|A1WH97|A1WH97_VEREI 6-carboxy-5,6,7,8-tetrahydropterin synthase; OS = Verminephrobacter eiseniae (strain EF01-2) OX=391735; GN = Veis_1235 PE=3 SV=1
MQHTISQRFFFDAAHTLRREIEAEGSRRVHGHTYHAEVALTGACDPATGMVLDLGLLRQGLERVRAQLDHHMLDDVPGLGPPTLENLCVFIARALPDELRWRASRVRVWREALGDGCTLDLPASTQAP

SEQ ID NO: 26773 - protein, 128 aa, Verminephrobacter sp.; identical to SEQ ID NO: 26772
  REGION 1..128: note = tr|A0A4Q2LEH3|A0A4Q2LEH3_9BURK 6-carboxy-5,6,7,8-tetrahydropterin synthase; OS = Verminephrobacter sp. Larva24 OX=2509434 GN=ET532_10070; PE = 3 SV=1

SEQ ID NO: 26774 - protein, 129 aa, unidentified
  source 1..129: note = Verrucomicrobia bacterium
  REGION 1..129: note = tr|A0A1Q6V3D5|A0A1Q6V3D5_9BACT 6-carboxy-5,6,7,8-tetrahydropterin synthase; OS = Verrucomicrobia bacterium 13_2_20CM_55_10 OX=1805420; GN = AUH19_10470 PE=3 SV=1
MESDGIFPTVTARLTKDFTFEAAQTLPNAPQGHKCRRVHGHSFKVEVSVEGRVDPKTGWVYDHADISAAMKPILHMLDHTYLNDIEGLENPTIEKMAEWFWQKLESQCPGLCEVVVHETPTARCVYRGD

SEQ ID NO: 26775 - protein, 149 aa, unidentified
  source 1..149: note = Verrucomicrobia bacterium
  REGION 1..149: note = tr|A0A3R7P253|A0A3R7P253_9BACT 6-carboxytetrahydropterin synthase OS=Verrucomicrobia bacterium TMED71 OX=1986878 GN=CBC31_005150 PE=4 SV=1
MFTCQKTYSEIPFAHRQHRHDGHCAKIHGHNWSFTFTFGCNQLDDCGFVVDFGKLKELRAWLEENLDHACVFNQDDPLLESFMKLKDENGNSVFKSLVVEQCSSEGMAKCLFNVAKPMIQEMSGGRAFLISVTVKEDFRNSATYCPELD

SEQ ID NO: 26776 - protein, 121 aa, unidentified
  source 1..121: note = Verrucomicrobia subdivision
  REGION 1..121: note = tr|A0A5C9DVL9|A0A5C9DVL9_9BACT 6-carboxy-5,6,7,8-tetrahydropterin synthase; OS = Verrucomicrobia subdivision 3 bacterium OX=2052186; GN = FD140_240 PE=3 SV=1
MKMELRKSFQFEAAHLLPLLPEAHKCRRLHGHSFKVDIVVAGECDPKLGWLMDYADITAAFKPLWEQLDHRYLNEVPGLENPTSEIVAVWIWEQLKPALPLLTEVVVAETCTAQAVYRGGQ

SEQ ID NO: 26777 - protein, 118 aa, unidentified; identical to SEQ ID NO: 23833
  source 1..118: note = Verrucomicrobia subdivision
  REGION 1..118: note = tr|A0A520RVI7|A0A520RVI7_9BACT 6-carboxy-5,6,7,8-tetrahydropterin synthase; OS = Verrucomicrobia subdivision 3 bacterium OX=2052186; GN = queD PE=3 SV=1

SEQ ID NO: 26778 - protein, 121 aa, unidentified
  source 1..121: note = Verrucomicrobiaceae bacterium
  REGION 1..121: note = tr|A0A1Z9FMR5|A0A1Z9FMR5_9BACT 6-carboxy-5,6,7,8-tetrahydropterin synthase; OS = Verrucomicrobiaceae bacterium TMED137 OX=1986879; GN = CBC97_01070 PE=3 SV=1
  VARIANT 28: note = Xaa can be any naturally occurring amino acid
  VARIANT 53: note = Xaa can be any naturally occurring amino acid
  VARIANT 67: note = Xaa can be any naturally occurring amino acid
  VARIANT 94: note = Xaa can be any naturally occurring amino acid
MRARIIKDFRFEAAHTLPSLPADHKCRXMHGHSFKVEIHVEGEVNPEIGWVYXHKCISDAMTPLIDXMDHSYLNDIKGLESPTIEVMAAWFWRXLEEDLPGLCEIVIYETPTARCSFRGEF

SEQ ID NO: 26779 - protein, 163 aa, unidentified
  source 1..163: note = Verrucomicrobiaceae bacterium
  REGION 1..163: note = tr|A0A1Z8XWN4|A0A1Z8XWN4_9BACT Uncharacterized protein OS=Verrucomicrobiaceae bacterium TMED76 OX=1986880; GN = CBC36_05915 PE=4 SV=1
MGHRLISGAAKNCQIPHGHDEVVTVNITKRSNRVLDSKTNMLVEFEEAKRRWFEWIDESVDHSFHINNEDPIINYFIENEPELLPKLLITPGDPTTEIRAACYYAKLSNFLDENKTELFCTDLKIQETPTNAVCFSCENIESFLPSGECHWWNRPDLSINDLS

SEQ ID NO: 26780 - protein, 151 aa, unidentified
  source 1..151: note = Verrucomicrobiae bacterium
  REGION 1..151: note = tr|A0A2A2Q1X1|A0A2A2Q1X1_9BACT 6-pyruvoyl tetrahydropterin synthase OS=Verrucomicrobiae bacterium Tous-C2TDCM OX=1982329 GN=B9S36_01945 PE=4 SV=1
MPYRVCRIFEVENGHMLSKHPDKCRFPHGHSRKVECVLEAGDLDGREMVCDFKVLKLILSDYLDRYDHAVCMNTEDPAYGDFKARYGDRVIGYESEDPTTEVLARDIFHHLRDALADYRAREVSGFPLRESVRVVSVKVWETSGSWAEYLA

SEQ ID NO: 26781 - protein, 121 aa, unidentified
  source 1..121: note = Verrucomicrobiae bacterium
  REGION 1..121: note = tr|A0A2A2YB47|A0A2A2YB47_9BACT 6-carboxy-5,6,7,8-tetrahydropterin synthase; OS = Verrucomicrobiae bacterium AMD-G2 OX=1982328; GN = CAK88_06225 PE=3 SV=1
MRARLTKEFRFEAAHTLPSLPDGHKCRNMHGHSFKVTITVEGEVDESIGWIYDHKRISDAMNPLLELLDHGYLNDIEGLESPTIEKMCAWFWKKIESQLPGLFEICIYETPTASCSFRGEF

SEQ ID NO: 26782 - protein, 144 aa, unidentified
  source 1..144: note = Verrucomicrobiales bacterium
  REGION 1..144: note = tr|A0A3D0YM93|A0A3D0YM93_9BACT 6-pyruvoyl tetrahydropterin synthase OS=Verrucomicrobiales bacterium; OX = 2026801 GN=DEP88_06245 PE=4 SV=1
MIEVENGHLLSKHPDKCRFPHGHTRKVELVFEANSLDDREMVFDFKLIGRMIGDFLETYDHALCMNTEDPKFDFFKEAYGERIIGFESEDPTTEVMARTIYQHTKASLHQFVNDADPDYPVRADVRISKIRVWETTSSWAEYAE

SEQ ID NO: 26783 - protein, 121 aa, unidentified
  source 1..121: note = Verrucomicrobiales bacterium
  REGION 1..121: note = tr|A0A354FV80|A0A354FV80_9BACT 6-carboxy-5,6,7,8-tetrahydropterin synthase; OS = Verrucomicrobiales bacterium OX=2026801 GN=queD PE=3; SV = 1
MRARIIKDFRFEAAHTLPSLPADHKCRQMHGHSFKVEIHVEGEVNPEIGWVYDHKCISDAMTPLIDIMDHSYLNDIKGLESPTIEVMAAWFWRKLEEDLPGLCEIVIYETPTARCSFRGEF

SEQ ID NO: 26784 - protein, 120 aa, Verrucomicrobium sp.
  REGION 1..120: note = tr|A0A1H2GW01|A0A1H2GW01_9BACT 6-carboxy-5,6,7,8-tetrahydropterin synthase; OS = Verrucomicrobium sp. GAS474 OX=1882831; GN = SAMN05444156_2780 PE=3 SV=1
MKITLCKDFEFEAAQALPSFPEGHKCRAMHGHSFKLTISVTGEVDPKTGIFYDHALISEAMAPLMETLDHACLNDIPGLEIPSIENICHWLWTRLAPKLPGLSEIVLHETSRSRCVYRGD

SEQ ID NO: 26785 - protein, 140 aa, Verrucosispora maris
  REGION 1..140: note = tr|F4FHG0|F4FHG0_VERMA 6-pyruvoyl tetrahydropterin synthase OS=Verrucosispora maris (strain AB-18-032); OX = 263358 GN=VAB18032_20160 PE=4 SV=1
MFSVTVRDHIMIAHSFRGDVFGPAQRLHGATFVVDATFRRPDLDADGIVVDIGLATDQLKAVLGELNYRNLDDEPAFAGTNTTTEVLARTIADRLADRVHAGDLGAGAHGLTGITVTLHESHVAWASYERSLPGASGTGA

SEQ ID NO: 26786 - protein, 143 aa, Verrucosispora sediminis
  REGION 1..143: note = tr|A0A1I1HLM2|A0A1I1HLM2_9ACTN 6-pyruvoyl-tetrahydropterin synthase OS=Verrucosispora sediminis OX=547162 GN=SAMN05216284_103316 PE=4 SV=1
MFSVTVRDHIMIAHSFRGEVFGPAQRLHGATFVVDATFRRPDLDDDGIVVDIGLATEQLKAVLGELNYRNLDDEPAFAGQNTTTEVLARTIADRLAERVAAGQLGGGARGLTGITVTLHESHVAWASYERALPGSTAVGEGTA

SEQ ID NO: 26787 - protein, 141 aa, Verrucosispora sp.
  REGION 1..141: note = tr|A0A4Q9C4D2|A0A4Q9C4D2_9ACTN 6-carboxytetrahydropterin synthase OS=Verrucosispora sp. SN26_14.1 OX=2527879 GN=EYA84_30100 PE=4 SV=1
MFSVTVRDHIMIAHSFRGDVFGPAQRLHGATFVVDATFRRPDLDADGIVVDIGLATDQLKAVLGELNYRNLDDEPAFAGTNTTTEVLARTIADRLADAVAAGALGAGAHGLTGITVTLHESHVAWAAYERSLPGGSGGGAA

SEQ ID NO: 26788 - protein, 143 aa, Verrucosispora sp.
  REGION 1..143: note = tr|A0A2G7D2N5|A0A2G7D2N5_9ACTN 6-pyruvoyl-tetrahydropterin synthase OS=Verrucosispora sp. CNZ293 OX=2035249 GN=CLT74_1507 PE=4 SV=1
MFSVTVRDHIMIAHSFRGQVFGPAQRLHGATFVVDATFRRPDLDDDGIVVDIGLATDQLKAVLGELNYRNLDDEPAFTGMNTTTEVLARTIADRLAERVRAGQLGAGARGLTGITVTLHESHVAWASYERALPGSTAAGEGTA

SEQ ID NO: 26789 - protein, 129 aa, unidentified
  source 1..129: note = Verticiella sediminum
  REGION 1..129: note = tr|A0A556AWM1|A0A556AWM1_9BURK 6-carboxy-5,6,7,8-tetrahydropterin synthase OS=Verticiella sediminum OX=1247510 GN=FOZ76_06410 PE=3 SV=1
MKFELSQRFWFDAAHTLDREIEREGSLRIHGHTYHAEVFVEGVRNPRTGMVMDLGHLRRELAAVRDALDHRLLDEVPELGPPTLENLCVFIARKLSPQVPVTAVRVWRESVGDSCKLTLPPQPQADGTN

SEQ ID NO: 26790 - protein, 125 aa, unidentified
  source 1..125: note = Vesicomyosocius okutanii
  REGION 1..125: note = tr|A5CXA0|A5CXA0_VESOH 6-carboxy-5,6,7,8-tetrahydropterin synthase; OS = Vesicomyosocius okutanii subsp. Calyptogena okutanii (strain HA) OX=412965 GN=ptpS PE=3 SV=1
MFVLKIVTDFASAHSLRNYPGDCSRLHGHNWQVEVMVGSKELNNNGIVIDFRDIKKQTKTVVKRLDHQYLNKIVPFDKLNPTSENLAKYFFDEVGRLININDVKVKAVTIWETSRVSVTYSQGDL

SEQ ID NO: 26791 - protein, 144 aa, unidentified
  source 1..144: note = Vespertiliibacter pulmonis
  REGION 1..144: note = tr|A0A3N4VLB9|A0A3N4VLB9_9PAST 6-carboxy-5,6,7,8-tetrahydropterin synthase; OS = Vespertiliibacter pulmonis OX=1443036 GN=EDC46_0868; PE = 3 SV=1
MFKIAKEFSFDMAHMLDGHDGKCKNLHGHTYTLQVEITGKLHQNGAKSGMVMDYSDLKTTVKTHIIEKFDHAFIYDITSERECQVANLLNSLNSKTFGLSTRTTAEQMAKYIFDALKEQGLPVSLVRLWETPTSYCEYSNNASG

SEQ ID NO: 26792 - protein, 120 aa, Vibrio aerogenes
  REGION 1..120: note = tr|A0A1M5XR79|A0A1M5XR79_9VIBR 6-carboxy-5,6,7,8-tetrahydropterin synthase OS=Vibrio aerogenes CECT 7868 OX=1216006 GN=queD PE=3 SV=1
MILYKEFTFEAAHRLPHVPDGHKCGRLHGHSFLVRIYVEGDVDPQAGWVIDFSEIKQAFKPVYEQLDHHYLNEIEGLENPTSEVIARWIWQKLKPSLPLLSQVEIKETCTAGCIYQGEAE

SEQ ID NO: 26793 - protein, 121 aa, Vibrio agarivorans
  REGION 1..121: note = tr|A0A2K1CPT2|A0A2K1CPT2_9VIBR 6-carboxy-5,6,7,8-tetrahydropterin synthase OS=Vibrio agarivorans OX=153622 GN=queD PE=3 SV=1
MKTELYKEFMFEAAHHLPHVPEGHKCGRLHGHSFLVRIYVEGEVDPHTGWVVDFAEIKAAFKPIYDRLDHYYLNDIEGLENPTSEILAKWIWQQLKSDLPLLSKIEIKETCTAGCIYTGEK

SEQ ID NO: 26794 - protein, 120 aa, unidentified
  source 1..120: note = Vibrio alfacsensis
  REGION 1..120: note = tr|A0A347UR61|A0A347UR61_9VIBR 6-carboxy-5,6,7,8-tetrahydropterin synthase OS=Vibrio alfacsensis OX=1074311 GN=queD PE=3 SV=1
MKTELYKEFMFEAAHHLPHVPEGHKCGRLHGHSFLVRLYVEGDVNPHTGWVVDFAEIKAAFKPIYDRLDHYYLNDIEGLENPTSEVLAKWIWQQLKPKLTLLSKVEIKETCTAGCIYKGE

SEQ ID NO: 26795 - protein, 120 aa, Vibrio alginolyticus
  REGION 1..120: note = tr|A0A0H0Y7X0|A0A0H0Y7X0_VIBAL 6-carboxy-5,6,7,8-tetrahydropterin synthase OS=Vibrio alginolyticus OX=663 GN=queD PE=3 SV=1
MKTELYKEFMFEAAHHLPHVPEGHKCGRLHGHSFLVRLYVEGEVDPHTGWVVDFAEIKAAFKPIYNRLDHYYLNDIEGLENPTSEVLAKWIWQQLKPSLPLLSKVEIKETCTAGCIYKGE

SEQ ID NO: 26796 - protein, 219 aa, Vibrio alginolyticus
  REGION 1..219: note = tr|A0A0H0YIS7|A0A0H0YIS7_VIBAL DNA topoisomerase I; OS = Vibrio alginolyticus OX=663 GN=AT730_02060 PE=4 SV=1
MTNIFIIVVLLVLFFFVIQKYVIKHDDTRDYPYRSKGPLLRGQEGAFYNALRAAVGEHAVVFAKVNMSSLVTPKEIKNKKQFFVANNRISRSYFDYVICDPRTLEPRVIVELDNGQELNKGKIERQKLLIHVCKTANLPLIGASVKHSYQVGRLRRLLAAHIDLIEPDKEVRFCKKCGSPMIIKTASQGEFKGRRFFTCSRQPNCTYTENYNVVFEADD

SEQ ID NO: 26797 - protein, 119 aa, unidentified
  source 1..119: note = Vibrio algivorus
  REGION 1..119: note = tr|A0A557P8T2|A0A557P8T2_9VIBR 6-carboxy-5,6,7,8-tetrahydropterin synthase OS=Vibrio algivorus OX=1667024 GN=queD PE=3 SV=1
MTCEIYKDFIFEAAHHLPNVPEGHKCGRLHGHSFFVRLYIQGEVDPTTGWIIDFGDVKKIFAPIYDQLDHYYLNDIPGLENPTSEVLAKWIWEKVKPLLPQLSQVEIKETCTAGCIYRG

SEQ ID NO: 26798 - protein, 119 aa, Vibrio anguillarum
  REGION 1..119: note = tr|A0A191W427|A0A191W427_VIBAN 6-carboxy-5,6,7,8-tetrahydropterin synthase OS=Vibrio anguillarum OX=55601 GN=queD PE=3 SV=1
MKTELYKEFMFEAAHRLPHVPAGHKCGRLHGHSFLVRLYVEGEVDPHTGWVIDFSEIKAIFKPIYDRLDHYYLNDIEGLENPTSEVLAKWIWQQLKPSLPLLSKVEIKETCTAGCIYKG

SEQ ID NO: 26799 - protein, 123 aa, Vibrio anguillarum
  REGION 1..123: note = tr|F7YIJ9|F7YIJ9_VIBA7 6-carboxy-5,6,7,8-tetrahydropterin synthase OS=Vibrio anguillarum (strain ATCC 68554 / 775) OX=882102; GN = VAA_01423 PE=3 SV=1
MRTKMKTELYKEFMFEAAHRLPHVPAGHKCGRLHGHSFLVRLYVEGEVDPHTGWVIDFSEIKAIFKPIYDRLDHYYLNDIEGLENPTSEVLAKWIWQQLKPSLPLLSKVEIKETCTAGCIYKG

SEQ ID NO: 26800 - protein, 120 aa, Vibrio atlanticus
  REGION 1..120: note = tr|A0A558H5W0|A0A558H5W0_9VIBR 6-carboxy-5,6,7,8-tetrahydropterin synthase OS=Vibrio atlanticus OX=693153 GN=queD PE=3 SV=1
MRSELYKEFMFEAAHHLPHVPEGHKCGRLHGHSFLVRLYVEGEVDPHTGWVIDFSEIKEVFKPIYDRLDHYYLNDIEGLENPTSEVLAKWIWNELKPNLPLLSKVEIKETCTAGCIYRGE

SEQ ID NO: 26801 - protein, 120 aa, Vibrio atlanticus
  REGION 1..120: note = tr|A0A1C3INL9|A0A1C3INL9_9VIBR 6-carboxy-5,6,7,8-tetrahydropterin synthase OS=Vibrio atlanticus OX=693153 GN=queD PE=3 SV=1
MRTELYKEFMFEAAHHLPHVPEGHKCGRLHGHSFLVRLYVEGEVDPHTGWVIDFSEIKAVFKPIYDRLDHYYLNDIEGLENPTSEVLAKWIWNELKPSLSLLSKVEIKETCTAGCIYRGE

SEQ ID NO: 26802 - protein, 121 aa, Vibrio azureus
  REGION 1..121: note = tr|U3C7D9|U3C7D9_9VIBR 6-carboxy-5,6,7,8-tetrahydropterin synthase OS=Vibrio azureus NBRC 104587 OX=1219077 GN=queD PE=3 SV=1
MKTELYKEFMFEAAHHLPHVPEGHKCGRLHGHSFLVRIYVEGEVDPHTGWVVDFAEIKAAFKPIYDRLDHYYLNDIEGLENPTSEVLAKWIWQQLKPSLPLLSKVEIKETCTAGCIYIGKQ

SEQ ID NO: 26803 - protein, 120 aa, unidentified
  source 1..120: note = Vibrio barjaei
  REGION 1..120: note = tr|A0A1J4QQI3|A0A1J4QQI3_9VIBR 6-carboxy-5,6,7,8-tetrahydropterin synthase OS=Vibrio barjaei OX=1676683 GN=AWH66_2020690 PE=3 SV=1
MKTELYKEFMFEAAHHLPHVPEGHKCGRLHGHSFLVRLYVEGEVDPHTGWVVDFAEIKAAFKPIYDRLDHYYLNDIEGLENPTSEVLAKWIWGQLKPNLPLLSKVEIKETCTAGCIYKGE

SEQ ID NO: 26804 - protein, 292 aa, unidentified
  source 1..292: note = Vibrio bivalvicida
  REGION 1..292: note = tr|A0A177XTM1|A0A177XTM1_9VIBR 6-pyruvoyl tetrahydropterin synthase OS=Vibrio bivalvicida OX=1276888; GN = APB76_21670 PE=4 SV=1
MNLFVRDLTVIDSSYICEHRGVVGDSWILDVTMSGELNEMSMVLDFGRVKKQIKQLVDQYVDHRLLVPKQSSAVVYKPSKAGYSTLDVLRGEKSIHLHCPNEAYCLIDAEEINLDSITSHVYQILRNNLPSNVTGIDITLRHENISGAFYHYTHGLKKHDGNCQRIAHGHRSPIEILVDGQRDSVKEAAFAQRWQDIYLGSKEDQVFVAELNLSETANGVTDETHFGFRYTAPQGEFELAIGKSETEILPTDTTVELLACYIADEVKPSLKDGQSLQIIAYEGVGKGAMAFK

SEQ ID NO: 26805 - protein, 220 aa, unidentified
  source 1..220: note = Vibrio bivalvicida
  REGION 1..220: note = tr|A0A177Y5Z0|A0A177Y5Z0_9VIBR Queuosine biosynthesis protein QueD OS=Vibrio bivalvicida OX=1276888; GN = APB76_00410 PE=4 SV=1
MESVFIVVAILVIFFVVIQRRYLNQDELKDSAYKKKGPLLNAQESAFYNALITAVGQHGVVMSKVNLSNVVTPLATDKKQWFIASNRISKSYFDYVVCDPRTLEVRVAIELDDGKELNKGKVDRQKLLIHVTKSAGVPLIGANIKHSYQVGRLRRLLAAHIDLIEPDKEIRFCKRCGSPMTIKTASQGEHKGRRFFTCSRQPHCTYTENYNVVFEEDSDS

SEQ ID NO: 26806 - protein, 220 aa, Vibrio brasiliensis
  REGION 1..220: note = tr|E8LT39|E8LT39_9VIBR QueD-like protein OS=Vibrio brasiliensis LMG 20546 OX=945543 GN=VIBR0546_00665 PE=4; SV = 1
MESVFIVVGILVIFFVVVQKRYLKQDELKDCAYKKKGPLLSGQESAFYNALIAAVGQHGVVMSKVNLSNVITPMATDKKQWFIANNRIAKSYFDYVVCDPRTLEVRVAIELDNGKELDKGKVDRQKLLIHVCKSAGIPLIGANIKHSYQVSRLRRLLAAHIDLIEPDKEVRFCKRCGSPMIIKIASQGEHKGRRFFTCSRQPHCTYTENYNVVFEEDQQG

SEQ ID NO: 26807 - protein, 260 aa, Vibrio brasiliensis
  REGION 1..260: note = tr|E8LY09|E8LY09_9VIBR Isocitrate dehydrogenase; OS = Vibrio brasiliensis LMG 20546 OX=945543; GN = VIBR0546_20058 PE=4 SV=1
MSGELNEMSMVLDFGRVKKQVKQLIDEYVDHRLLVPMQSSAIVYKPSKAGYSTLDVMRGEKSIHLNCPDQAYCLIDAETVTIESITDHVYRILRNNLPSNVTGIEITLRHENISGAFYHYSHGLKKHDGNCQRIAHGHRSPIEILVDGQRDSEREAAFARRWQDIYLGSKEDQVSVSELNLAQEANAVTDQSHYGFRYTAPQGEFELAIAKAETEILPTDTTVELLAGYIADEVKPSLAQGQSLQIVAYEGVGKGAMAFR

SEQ ID NO: 26808 - protein, 120 aa, Vibrio breoganii
  REGION 1..120: note = tr|A0A193KHT2|A0A193KHT2_9VIBR 6-carboxy-5,6,7,8-tetrahydropterin synthase OS=Vibrio breoganii OX=553239 GN=queD PE=3 SV=1
MTTEIYKEFMFEAAHKLPHVPEGHKCGRLHGHSFLVRLYLKGEVDAHTGWIIDFSDVKEKFKPIYDRLDHHYLNDIEGLENPTSEVLAKWVFEQTKPLLPLLSKVEIKETCTAGCIYTGE

SEQ ID NO: 26809 - protein, 292 aa, Vibrio campbellii
  REGION 1..292: note = tr|A0A1P8MJ02|A0A1P8MJ02_9VIBR Uncharacterized protein OS=Vibrio campbellii OX=680 GN=BWP24_17795 PE=4; SV = 1
MNLFVNDLTVIDASYLCQTRGMVGESWILDVVMHGDLNEMSMVLDFSKVKKQIKQLVDQYVDHRLLIPVKNEAVEITNGKAGYSQVDLMRGEKSIHLHCPDEAFCFVNAEDISIESVTQHIHDVLQGHLPSNVASIDLTLRHEKLDGAYYHYTHGLKKHDGNCQRIAHGHRSPIQILVDGQRDTAREQAFAQRWQDIYLASIEDLVEIGHLELSEHASLINCDTHFGFRYTTSQGDFQLAIAHSETEVLNTDTTVELLAVFIANEIAPSLDEGQSLQIIAYEGVGKGAMAFR

SEQ ID NO: 26810 - protein, 120 aa, Vibrio campbellii; identical to SEQ ID NO: 26795
  REGION 1..120: note = tr|A0A0A3ELK1|A0A0A3ELK1_9VIBR 6-carboxy-5,6,7,8-tetrahydropterin synthase OS=Vibrio campbellii OX=680 GN=queD PE=3 SV=1

SEQ ID NO: 26811 - protein, 167 aa, unidentified
  source 1..167: note = Vibrio caribbeanicus
  REGION 1..167: note = tr|A0A0A6QV34|A0A0A6QV34_9VIBR Queuosine biosynthesis protein QueD OS=Vibrio caribbeanicus; OX = 701175 GN=NM09_00365 PE=4 SV=1
MQIHTLDKASIINELQFGTGINHAVHEGRRADFALILSMFSDDVRDNTPVEKIEQPELTENVLRQRFELPEPQPLRSDQSSYDISATQASLFHSAGLPSAKLSHYLKPDALTYLPEDTHGLPEEVYHNLSGHQRRQLGEKEPKQLMPADLYNKLISAQRSFQISAQA

SEQ ID NO: 26812 - protein, 219 aa, unidentified
  source 1..219: note = Vibrio caribbeanicus
  REGION 1..219: note = tr|A0A0A6QVA5|A0A0A6QVA5_9VIBR Queuosine biosynthesis protein QueD OS=Vibrio caribbeanicus; OX = 701175 GN=NM09_02460 PE=4 SV=1
MESVFIVVAILVIFFFVVQQRYLKQDELKDSAYKKKGPLLNMQESAFYNALVTAVGQHGVVLAKVNMSNAIAPLATNKKEWFIANNRIAKSYFDFVVCDPRTLHPRVVIELDNGKELDKGKVERQKLLMHVCKSAGVPLIGASIKHSYQVGRLRRLLAAHIDLIEPEKEVRFCKRCGSPMVIKIASQGEHKGRRFFTCSRQPHCTYTENYNVVFDEEAS

SEQ ID NO: 26813 - protein, 120 aa, Vibrio casei
  REGION 1..120: note = tr|A0A368LHI6|A0A368LHI6_9VIBR 6-carboxy-5,6,7,8-tetrahydropterin synthase OS=Vibrio casei OX=673372 GN=queD PE=3 SV=1
MTCEIYKDFIFEAAHHLPNVPEGHKCGRLHGHSFFVRLYIQGEVDATTGWIIDFGDVKKIFSPIYDRLDHYYLNDIPGLENPTSEVIAKWIWEQVKPLLPELSKVEIKETCTAGCIYVGQ

SEQ ID NO: 26814 - protein, 292 aa, Vibrio celticus
  REGION 1..292: note = tr|A0A1C3JE28|A0A1C3JE28_9VIBR 6-pyruvoyl tetrahydropterin synthase OS=Vibrio celticus OX=446372; GN = VCE7224_02090 PE=4 SV=1
MNLFVRDLTVIDSSYICEHRGVVGDSWILDVTMSGELNEMSMVLDFSKVKKQIKQLVDEQVDHRLLLPMQNAAIVLQASKAGYSKVDVLRGDKSLHLHCPDEAYCLIDAEAITIESVTAHVYNILRDNLPSNVTGLEITLRHENINGAFYHYTHGLKKHDGNCQRIAHGHRSPVEIVVDGQRDEQREQAFAQRWEDIYLGSKEDQVSVSSLNLSEHAKSVNDESHYGFRYTAPQGEFELAIAKSETEILPTDTTVELLAGYIADQVEPSLAENQSLQIVAYEGVGKGAMAFR

SEQ ID NO: 26815 - protein, 292 aa, Vibrio chagasii
  REGION 1..292: note = tr|A0A2S7VRW2|A0A2S7VRW2_9VIBR Uncharacterized protein OS=Vibrio chagasii OX=170679 GN=BTO10_06235 PE=4; SV = 1
MNLFVRDLTVIDSSYICEHRGVVGDSWILDVTMSGELNEMSMVLDFSRVKKQIKNLVDQHVDHRLLLPMKNAVIVHQASKPGYAKVDVLRGDKSLHLHCPDEAYCLVDAEAITIESVTAHVYDILRDNLPSNVTGLEITLRHENINGAFYHYTHGLKKHDGNCQRIAHGHRSPVEIVVDGQRDEQRELAFAKRWEDIYLGSKEDQVSVSSLNLSERSQSVNDESHYGFSYTAPQGEFELAIAKSETEILPTDTTVELLAGYIADQVSPSLTENQSLQIVAYEGVGKGAMAFR

SEQ ID NO: 26816 - protein, 122 aa, Vibrio cholerae
  REGION 1..122: note = tr|A0A0H3AIV3|A0A0H3AIV3_VIBC3 6-carboxy-5,6,7,8-tetrahydropterin synthase OS=Vibrio cholerae serotype O1 (strain ATCC 39541 / Classical Ogawa 395 / O395) OX=345073GN=VC0395_A0917 PE=3 SV=1
MMMKTELYKEFMFEAAHHLPHVPAGHKCGRLHGHSFLVRLYVEGEVDPHTGWVVDFAEIKAAFKPIYDRLDHYYLNDIEGLENPTSEVLAKWIWQQLKPSLPLLSKVEIKETCTAGCIYRGE

SEQ ID NO: 26817 - protein, 122 aa, Vibrio cholerae; identical to SEQ ID NO: 26816
  REGION 1..122: note = tr|A0A2V4ND51|A0A2V4ND51_VIBCL 6-carboxy-5,6,7,8-tetrahydropterin synthase OS=Vibrio cholerae OX=666 GN=queD PE=3 SV=1

SEQ ID NO: 26818 - protein, 167 aa, unidentified
  source 1..167: note = Vibrio cidicii
  REGION 1..167: note = tr|A0A151KXE0|A0A151KXE0_9VIBR Queuosine biosynthesis protein QueD OS=Vibrio cidicii OX=1763883; GN = ATY37_16385 PE=4 SV=1
MQIHTLDKAGIINELQFGTGMNHAIHDGRRADFALLLSMFSNDARHITPVEETDSQPVTEQILRQQFALCEPQKLRSDQSSYTISAEQAKQFHRAGLAASKLSHYLIADALAYMPEETFDLPEEVYQNLSGHERRQLAQPNTPLLPEAGLYNQLSTAWAKARLGTSV

SEQ ID NO: 26819 - protein, 221 aa, unidentified
  source 1..221: note = Vibrio cidicii
  REGION 1..221: note = tr|A0A151JLF6|A0A151JLF6_9VIBR Queuosine biosynthesis protein QueD OS=Vibrio cidicii OX=1763883; GN = ATY37_09405 PE=4 SV=1
MTNIFIIVALLILFFFIIQKYVVKQDDSKDYAYRVKGPVLRSQEVAFFNALKTAVGEHGVVFSKVNMSSVIAPRDIVSKKQLFIASNKISRSHFDYLICDPRTFEPRVVIELDNGKELNKSKVEREKLLMQVCKSANIPLIGTSVKHSYQVGRLRRLLAAHIDLIEPDKEIRFCKKCGSPMVIKVASQGEFKGRRFFTCSRQPNCTYTENYNVVFDTDDDE

SEQ ID NO: 26820 - protein, 119 aa, Vibrio cincinnatiensis
  REGION 1..119: note = tr|A0A1T4LYD0|A0A1T4LYD0_VIBCI 6-carboxy-5,6,7,8-tetrahydropterin synthase OS=Vibrio cincinnatiensis DSM 19608 OX=1123491 GN=SAMN02745782_00797; PE = 3 SV=1
MKTEIYKEFMFEAAHRLPHVPEGHKCGRLHGHSFLVRLYVEGEVDPHTGWIVDFAEIKAVFKPIYERLDHYYLNDIEGLENPTSEVLAKWIWQQLKPNLPLLSKVEIKETCTAGCVYTG

SEQ ID NO: 26821 - protein, 120 aa, Vibrio comitans
  REGION 1..120: note = tr|A0A4Y3IMZ5|A0A4Y3IMZ5_9VIBR 6-carboxy-5,6,7,8-tetrahydropterin synthase OS=Vibrio comitans NBRC 102076 OX=1219078 GN=VCO01S_20720 PE=3 SV=1
MTTEIYKEFMFEAAHKLPHVPEGHKCGRLHGHSFLVRLYLKGEVDAHTGWIIDFSDVKEKFKPIYDRLDHHYLNDIEGLENPTSEVLAKWVYEQTKPLLPLLSKVEIKETCTAGCIYTGE

SEQ ID NO: 26822 - protein, 292 aa, Vibrio coralliilyticus
  REGION 1..292: note = tr|A0A2A2MX83|A0A2A2MX83_9VIBR Uncharacterized protein OS=Vibrio coralliilyticus OX=190893 GN=CKJ79_02005; PE = 4 SV=1
MNLFVRDLTVIDSSFICEHRGIVGDSWILDATLSGELNEMSMVLDFGKVKKQIKHLVDLHVDHRLLVPMKSAAVVHNTSKPGYATLDVMRDNKSIHLQCPDEAYCLIDAEAITIESLTEHVYHILRDNLPSNVTGLEITLRHENITGAFYHYTHGLKKHDGNCQRIAHGHRSPVEILVDGQRDNEKEAAFAKRWEDIYLGSIEDQVSVTKLNLSPRAQVISDESHYGFRYTAPQGEFELAIAKSETEILPTDTTVELLAGYIADQVKPSLESNQSLQIIAYEGVGKGAMAFR

SEQ ID NO: 26823 - protein, 292 aa, Vibrio coralliilyticus
  REGION 1..292: note = tr|A0A1V0IDE6|A0A1V0IDE6_9VIBR Uncharacterized protein OS=Vibrio coralliilyticus OX=190893 GN=B6A42_21315; PE = 4 SV=1
MNLFVRDLTVIDSSFICEHRGIVGDSWILDATLSGELNEMSMVLDFGKVKKQIKHLVDLHVDHRLLVPMKSAAVVHNTSKPGYATLDVMRDNKSIHLQCPDEAYCLIDAEAITIESLTEHVYHILRDNLPSNVTGLEITLRHENITGAFYHYTHGLKKHDGNCQRIAHGHRSPVEILVDGQRDNEKEAAFAKRWEDIYLGSIEDQVSVTKLNLSPRAQVISDENHYGFRYTAPQGEFELAIAKSETEILPTDTTVELLAGYIADQVKPSLESNQSLQIIAYEGVGKGAMAFR

SEQ ID NO: 26824 - protein, 292 aa, Vibrio crassostreae
  REGION 1..292: note = tr|A0A4V2RV25|A0A4V2RV25_9VIBR 6-pyruvoyl tetrahydropterin synthase-like protein OS=Vibrio crassostreae OX=246167 GN=EDB30_106180 PE=4 SV=1
MNLFVRDLTVIDSSYICEHRGVVGDSWILDVTMSGELNEMSMVLDFSRVKKQIKQLVDQHVDHRLLLPMKNAAIVHQASKPGYAKVDVLRGDKSLHLHCPDEAYCLIDAKAITIESVTAHVYNILRDNLPSNVTGLEITLRHENINGAFYHYTHGLKKHDGNCQRIAHGHRSPVEIVVDGQRDEQREQAFAQRWEDIYLGSKEDQVSVSSLNLSEHAKSVDDESHYGFRYTAPQGEFELAIAKSETEILPTDTTVELLAGYIADQVAPSLVENQSLQIVAYEGVGKGAMAFR

SEQ ID NO: 26825 - protein, 292 aa, Vibrio crassostreae
  REGION 1..292: note = tr|A0A4V2RSA6|A0A4V2RSA6_9VIBR 6-pyruvoyl tetrahydropterin synthase-like protein OS=Vibrio crassostreae OX=246167 GN=EDB37_101767 PE=4 SV=1
MNLFVRDLTVIDSSYICEHRGVVGDSWILDVTMSGELNEMSMVLDFSRVKKQIKQLVDQHVDHRLLLPMKNAAIVHQASKSGYSKVDVLRGDKSLHLHCPDEAYCLIDAKAITIESVTAHVYNILRDNLPSNVTGLEITLRHENINGAFYHYTHGLKKHDGNCQRIAHGHRSPVEIVVDGQRDEQREQAFAQRWEDIYLGSKEDQVSVSSLNLSEHAKSVDDESHYGFRYTAPQGEFELAIAKSETEILPTDTTVELLAGYIADQVAPSLVENQSLQIVAYEGVGKGAMAFR

SEQ ID NO: 26826 - protein, 120 aa, Vibrio diabolicus; identical to SEQ ID NO: 26795
  REGION 1..120: note = tr|A0A2L2K0V2|A0A2L2K0V2_9VIBR 6-carboxy-5,6,7,8-tetrahydropterin synthase OS=Vibrio diabolicus OX=50719 GN=queD PE=3 SV=1

SEQ ID NO: 26827 - protein, 121 aa, Vibrio diazotrophicus
  REGION 1..121: note = tr|A0A2J8GK23|A0A2J8GK23_VIBDI 6-carboxy-5,6,7,8-tetrahydropterin synthase OS=Vibrio diazotrophicus OX=685 GN=queD PE=3 SV=1
MKTEIYKEFMFEAAHHLPHVPEGHKCGRLHGHSFLVRLYVAGDVDPHTGWLVDFAEIKAAFKPIYDRLDHYYLNDIEGLENPTSEVLAKWIWQQLKPSLPLLSKVEIKETCTAGCIYTGEA

SEQ ID NO: 26828 - protein, 221 aa, unidentified
  source 1..221: note = Vibrio europaeus
  REGION 1..221: note = tr|A0A178JG08|A0A178JG08_9VIBR Queuosine biosynthesis protein QueD OS=Vibrio europaeus OX=300876; GN = AZ468_05075 PE=4 SV=1
MESVFIVVAILVIFFVVIQKRYLKQDELKDSTYKKKGPLLNAQESAFYNALITAVGQHGVVMSKVNLSNVITPLATDKKQWFIANNRISKSYYDYVVCDPRTLEVRVAIELDDGKELNKGKVDRQKLLIHVSKSAGIPLIGANIKHSYQVGRLRRLLAAHIDLIEPDKEIRFCKRCGSPMTIKTASQGEHKGRRFFTCSRQPQCTYTENYNVVFEEEDNEN

SEQ ID NO: 26829 - protein, 292 aa, unidentified
  source 1..292: note = Vibrio europaeus
  REGION 1..292: note = tr|A0A178JF92|A0A178JF92_9VIBR 6-pyruvoyl tetrahydropterin synthase OS=Vibrio europaeus OX=300876; GN = AZ468_05500 PE=4 SV=1
MNLFVRDLTVIDSSYICEQRGVVGDSWIVDVIMSGELNEMSMVLDFGRVKKQIKQLVDEFVDHRLLIPVQNAAIVYKPSKTGYSTLDVLRGEKSIHLNCPNEAYCLIDAEAVTIESITKHVYQILRNNLPSNVTGLEITLRHENIAGAFYHYTHGLKKHDGNCQRIAHGHRSPIEIIVDGERDIDKEVAFAKRWEDIYLGSKEDQVSVSMLNLSESAKAISDESHYGFRYTAPQGEFELAIAKSETEILPTDTTVELLAVYIADEVKPTVAEGQSLQVIAYEGVGKGAMAFR

SEQ ID NO: 26830 - protein, 120 aa, Vibrio ezurae
  REGION 1..120: note = tr|U3B123|U3B123_9VIBR 6-carboxy-5,6,7,8-tetrahydropterin synthase OS=Vibrio ezurae NBRC 102218 OX=1219080 GN=queD PE=3 SV=1
MTTEIYKEFMFEAAHKLPHVPEGHKCGRLHGHSFLVRLYLAGEVDQHTGWIIDFGDVKESFKPIYDRLDHHYLNDIEGLENPTSEVLAKWVYEQTKPLLPLLTKVEIKETCTAGCIYTGE

SEQ ID NO: 26831 - protein, 121 aa, Vibrio fluvialis
  REGION 1..121: note = tr|A0A0X8LLW9|A0A0X8LLW9_VIBFL 6-carboxy-5,6,7,8-tetrahydropterin synthase OS=Vibrio fluvialis OX=676 GN=queD PE=3 SV=1
MKTEIYKEFMFEAAHHLPHVPEGHKCGRLHGHSFLVRLYVAGDVDPHTGWLVDFAEIKAAFKPIYDRLDHYYLNDIEGLENPTSEVLAKWIWQELKPSLPMLSKVEIKETCTAGCIYSGEA

SEQ ID NO: 26832 - protein, 121 aa, Vibrio fluvialis; identical to SEQ ID NO: 26831
  REGION 1..121: note = tr|S7JFM1|S7JFM1_VIBFL 6-carboxy-5,6,7,8-tetrahydropterin synthase OS=Vibrio fluvialis PG41 OX=1336752 GN=L910_1427 PE=3 SV=1

SEQ ID NO: 26833 - protein, 167 aa, Vibrio fortis
  REGION 1..167: note = tr|A0A066UK13|A0A066UK13_9VIBR Queuosine biosynthesis protein QueD OS=Vibrio fortis OX=212667; GN = VFDL14_01925 PE=4 SV=1
MQVNTLDNNVIINELKFGTGINQAVEQGRRADFALLLSMFSDDVRDNTPLDVLSVEETTESKLRQQFGVAEPQPLRSNQSSYEISAKQSQGFHQAGLPSAKLNHYLTPEALAFMPEGTHDFPEEVYHNLSTHERRKLAKQPATELPHATLYNELTTAQRQFHIQAQA

SEQ ID NO: 26834 - protein, 292 aa, Vibrio fortis
  REGION 1..292: note = tr|A0A066ULK7|A0A066ULK7_9VIBR 6-pyruvoyl tetrahydropterin synthase OS=Vibrio fortis OX=212667; GN = VFDL14_02960 PE=4 SV=1
MNLFVRDLTVIDSSYICEHRGVVGDSWILDVIMSGELNEMSMVLDFSRVKKQIKHLVDEYVDHRLLVPMKNSAIIHNATKPGYSTLDVMRGDKSIHLQCPDEAYCLIDAEAITIESITAHVYDILRDNLPSNVSGLEITLRHEKIDGAFYHYTHGLKKHDGNCQRIAHGHRSPVEILVDGNRDAEREEAFAKRWEDIYLGSKEDVTTLDTLNLSEHAKAVTDESHYAFRYTAPQGEFELAIAKSETEILPTDTTVELLAGYIADQVKPSLNEGQSLQIVAYEGVGKGAMASR

SEQ ID NO: 26835 - protein, 121 aa, Vibrio furnissii
  REGION 1..121: note = tr|A0A0Q2SAG2|A0A0Q2SAG2_VIBFU 6-carboxy-5,6,7,8-tetrahydropterin synthase OS=Vibrio furnissii OX=29494 GN=AMR76_19035 PE=3 SV=1
MKTEIYKEFMFEAAHHLPHVPEGHKCGRLHGHSFLVRLYVAGDVDPHTGWLVDFAEIKAAFKPIYDRLDHYYLNDIDGLENPTSEVLAKWIWQQLKPSLPLLSKVEIKETCTAGCIYSGDA

SEQ ID NO: 26836 - protein, 121 aa, Vibrio furnissii; identical to SEQ ID NO: 26835
  REGION 1..121: note = tr|F0LTB7|F0LTB7_VIBFN 6-carboxy-5,6,7,8-tetrahydropterin synthase OS=Vibrio furnissii (strain DSM 14383 / NCTC 11218 / VL 6966); OX = 903510 GN=vfu_A01771 PE=3 SV=1

SEQ ID NO: 26837 - protein, 167 aa, unidentified
  source 1..167: note = Vibrio galatheae
  REGION 1..167: note = tr|A0A0F4NSW5|A0A0F4NSW5_9VIBR Queuosine biosynthesis protein QueD OS=Vibrio galatheae OX=579748; GN = TW81_00815 PE=4 SV=1
MHIHTLDKAAIISELQFGTGISNAVHEGRRADFALILSMFSDDVRDNTPLEKIDEVDNSEQALRKRFELQQPQQLRSDQSSYEVSAQQASLFHSAGLVSTKLSHYLVPDALSYMPEDTHDLPEEVYHNLSGHQRRAMGEKEPKELMPIDLYNQLIKAQRTFQIQAQA

SEQ ID NO: 26838 - protein, 292 aa, unidentified
  source 1..292: note = Vibrio galatheae
  REGION 1..292: note = tr|A0A0F4NP68|A0A0F4NP68_9VIBR 6-pyruvoyl tetrahydropterin synthase OS=Vibrio galatheae OX=579748; GN = TW81_02745 PE=4 SV=1
MNLFVRDLTVIDSSYICEQRGVVGDSWILDVTMSGELNEMSMVLDFGRVKKQIKRLVDEYVDHRLIVPARSSAIIHKESKAGYATLDLLRGSKSIHLHCPNEAYCLIDAEEVNIESLTEHVYLILRDNLPSNVTGIEITLRHEAISGAFYHYTHGLKKHDGNCQRIAHGHRSPIEILVDGQRDKEKESAFAKRWQDIYLGSKEDQVAVADLSFVEQTNSICDETHYGFRYTAPQGEFELAIAKSETEILPTDTTVELLACYIADQVKPSLNEDQSLQIIAYEGVGKGAMAFK

SEQ ID NO: 26839 - protein, 118 aa, Vibrio gazogenes
  REGION 1..118: note = tr|A0A1Z2SBK4|A0A1Z2SBK4_VIBGA 6-carboxy-5,6,7,8-tetrahydropterin synthase OS=Vibrio gazogenes OX=687 GN=BSQ33_01550 PE=3 SV=1
MIIYKEFTFEAAHHLPHVPEGHKCGRLHGHSFLVRVSVEGEVDPQTGWVIDFADIKAAFKPIYQRLDHYYLNEIEGLDNPTSEVLARWIWHELKPNLPLLSQIEVKETCTAGCVYRGE

SEQ ID NO: 26840 - protein, 118 aa, Vibrio gazogenes
  REGION 1..118: note = tr|A0A1M4Z9B0|A0A1M4Z9B0_VIBGA 6-carboxy-5,6,7,8-tetrahydropterin synthase OS=Vibrio gazogenes DSM 21264 = NBRC 103151 OX=1123492; GN = SAMN02745781_01524 PE=3 SV=1
MIIYKEFTFEAAHHLPHVPEGHKCGRLHGHSFLVRVSVEGEVDPQTGWVIDFADIKAAFKPIYQRLDHYYLNEIEGLENPTSEVLARWIWHELKPNLPLLSQIEVKETCTAGCVYRGE

SEQ ID NO: 26841 - protein, 112 aa, unidentified
  source 1..112: note = Vibrio genomosp.
  REGION 1..112: note = tr|A0A1B9R2L7|A0A1B9R2L7_9VIBR 6-carboxy-5,6,7,8-tetrahydropterin synthase OS=Vibrio genomosp. F10 OX=723171 GN=A6E14_17490 PE=3 SV=1
MFEAAHHLPHVPEGHKCGRLHGHSFLVRLFVEGEVDPHTGWVIDFSEIKEAFKPIYDRLDHYYLNDIKGLENPTSEVLAKWIWLELKPSLPLLSKVEIKETCTAGCIYVGEN

SEQ ID NO: 26842 - protein, 121 aa, unidentified
  source 1..121: note = Vibrio genomosp.
  REGION 1..121: note = tr|A0A4U1YWF6|A0A4U1YWF6_9VIBR 6-carboxy-5,6,7,8-tetrahydropterin synthase OS=Vibrio genomosp. F6 OX=723172 GN=queD PE=3 SV=1
MEMKTELYKDFMFEAAHHLPHVPEGHKCGRLHGHSFMVRLYVEGEVDPHTGWIIDFSEIKAAFKPIYDRLDHYYLNDIEGLENPTSEVLSKWIWQQLKPALPLLSKVEIKETCTAGCTYIG

SEQ ID NO: 26843 - protein, 120 aa, Vibrio halioticoli
  REGION 1..120: note = tr|V5FGV4|V5FGV4_9VIBR 6-carboxy-5,6,7,8-tetrahydropterin synthase OS=Vibrio halioticoli NBRC 102217 OX=1219072 GN=queD PE=3 SV=1
MTTEIYKEFMFEAAHKLPHVPDGHKCGRLHGHSFLVRLYLKGEVDQHTGWIIDFGDVKQSFKPIYDRLDHHYLNDIEGLENPTSEVLAKWVFEQTKPLLPLLSKVEIKETCTAGCIYTGE

SEQ ID NO: 26844 - protein, 120 aa, Vibrio hangzhouensis
  REGION 1..120: note = tr|A0A1H6BNC2|A0A1H6BNC2_9VIBR 6-carboxy-5,6,7,8-tetrahydropterin synthase OS=Vibrio hangzhouensis OX=462991 GN=SAMN04488244_12410 PE=3 SV=1
MKTELYKEFMFEAAHHLPNVPEGHKCGRLHGHSFLVRLYVEGEVDPHTGWVVDFAEIKAAFKPIYDRLDHYYLNDIEGLENPTSEVLAKWIWGQLKPSLPLLSKVEIKETCTAGCIYKGE

SEQ ID NO: 26845 - protein, 120 aa, Vibrio harveyi; identical to SEQ ID NO: 26795
  REGION 1..120: note = tr|K5UMD2|K5UMD2_VIBHA 6-carboxy-5,6,7,8-tetrahydropterin synthase OS=Vibrio harveyi OX=669 GN=queD PE=3 SV=1

SEQ ID NO: 26846 - protein, 120 aa, Vibrio harveyi; identical to SEQ ID NO: 26795
  REGION 1..120: note = tr|D0XBG9|D0XBG9_VIBH1 6-carboxy-5,6,7,8-tetrahydropterin synthase OS=Vibrio harveyi (strain 1DA3) OX=673519 GN=VME_24320 PE=3 SV=1

SEQ ID NO: 26847 - protein, 220 aa, Vibrio hepatarius
  REGION 1..220: note = tr|A0A0M0I236|A0A0M0I236_9VIBR Queuosine biosynthesis protein QueD OS=Vibrio hepatarius OX=171383; GN = AKJ31_07755 PE=4 SV=1
MESVFIVVVVLVVFFFVVQKRFLKQEELKDSEYKKKGALLNMQESAFYNALVTAVGEHGVVLTKVSMSNVVAPVATNKKHWFIANNRIAKSYFDYVVCDPRTLEPRVAIEFDNGKQLDKGKIERHKLLMHVCKSAGIPLIGATIKHSYQVGRLRRLLAAHIDLIEPDKEVRFCKRCGSPMVIKTASSGEHKGRRFFTCSRQPHCTYTENYNVVFEEDSSE

SEQ ID NO: 26848 - protein, 167 aa, Vibrio hepatarius
  REGION 1..167: note = tr|A0A0M0I2S1|A0A0M0I2S1_9VIBR Queuosine biosynthesis protein QueD OS=Vibrio hepatarius OX=171383; GN = AKJ31_06355 PE=4 SV=1
MQVHTLDKATIINELQFGNGINHAVHEGRRADFALILSMFSDDVRDNTPVEKVEAVNTTDQLLRQRFELQPPQPLRSDQSSYEISAQQANLFHTSGLPSAKLSHYLKPEVLAYLPEDTHDLPEEVYHNLSGHQRRKLSEAEPKQLLPADLYNKLVDAQRTFQISTRA

SEQ ID NO: 26849 - protein, 121 aa, Vibrio ichthyoenteri
  REGION 1..121: note = tr|F9S3U9|F9S3U9_9VIBR 6-carboxy-5,6,7,8-tetrahydropterin synthase OS=Vibrio ichthyoenteri ATCC 700023 OX=870968 GN=VII00023_07059 PE=3; SV = 1
MMKTELYKEFMFEAAHHLPHVPEGHKCGRLHGHSFLVRLYVEGEVDPYTGWVVDFAEIKAAFKPIYNRLDHYYLNDIEGLENPTSEVLAKWIWQQLKPSLPLLSKVEIKETCTAGCIYKGE

SEQ ID NO: 26850 - protein, 120 aa, Vibrio inusitatus
  REGION 1..120: note = tr|A0A4Y3HUE6|A0A4Y3HUE6_9VIBR 6-carboxy-5,6,7,8-tetrahydropterin synthase OS=Vibrio inusitatus NBRC 102082 OX=1219070 GN=VIN01S_14820 PE=3 SV=1
MTTEIYKEFMFEAAHKLPHVPAGHKCGRLHGHSFLVRLYLKGEVDAHTGWIIDFSDVKEKFKPIYDRLDHHYLNDIEGLENPTSEVLAKWVFEQTKPLLPLISKVEIKETCTAGCIYTGE

SEQ ID NO: 26851 - protein, 85 aa, unidentified
  source 1..85: note = Vibrio ishigakensis
  REGION 1..85: note = tr|A0A0B8PQW9|A0A0B8PQW9_9VIBR NADPH-dependent 7-cyano-7-deazaguanine reductase OS=Vibrio ishigakensis; OX = 1481914 GN=JCM19232_4880 PE=4 SV=1
MKLFVRDLTVIDSSYLCPQRGMVGESWILDVVMSGELNEMSMVLDFSRVKKQIKQIVDEYIDHRLIVPNQIQQSAPNQPSLATRP

SEQ ID NO: 26852 - protein, 173 aa, unidentified
  source 1..173: note = Vibrio ishigakensis
  REGION 1..173: note = tr|A0A0B8PLD1|A0A0B8PLD1_9VIBR NADPH dependent preQ0 reductase OS=Vibrio ishigakensis OX=1481914; GN = JCM19232_4879 PE=4 SV=1
MLKGKLPENVQGLEITLRHEDISGPFYHYSHGLKKHDGNCQRIAHGHRSPVELLVNGKRDLELEQEWAERWKDIYLGSQEDECELADLNLSPAANSLTEMTHHAFRYTAPQGEFELAIARSDVEMIDTDTTVELLAQYIAEEVSFSIEPDSTLEVVAYEGVGKGAMASSKGQA

SEQ ID NO: 26853 - protein, 292 aa, unidentified
  source 1..292: note = Vibrio jasicida
  REGION 1..292: note = tr|A0A2S7W6L1|A0A2S7W6L1_9VIBR Uncharacterized protein OS=Vibrio jasicida OX=766224 GN=BTO01_08070 PE=4; SV = 1
MNLFVKDLTVIDASYLCATRGMVGESWILDVVMHGDLNEMSMVLDFSKVKKQIKQLVDEHVDHRLLVPSKNSAVHSAHVKAGYSQVDLIRGEKSIHLNCPDEAFCFIETEAISIESVTEHIHKVLIGHLPSNVASIDVTLRHEQINGAYYHYTHGLKKHDGNCQRIAHGHRSPIEILTDGERDTAREHAFAQRWQDIYLASIEDLVEIGHLELSEHASLINCDTHFGFRYTTSQGDFQLAIAHSETEVLDTDTTVELLAVFIANDIAPSLAKGQSLQVIAYEGVGKGAMAFR

SEQ ID NO: 26854 - protein, 120 aa, unidentified
  source 1..120: note = Vibrio jasicida
  REGION 1..120: note = tr|A0A2S7VAX2|A0A2S7VAX2_9VIBR 6-carboxy-5,6,7,8-tetrahydropterin synthase OS=Vibrio jasicida OX=766224 GN=BTO01_21095 PE=3 SV=1
MKTELYKEFMFEAAHHLPHVPEGHKCGRLHGHSFLVRLYVEGEVDPHTGWVIDFSEIKAAFKPTYDRLDHYYLNDIEGLENPTSEVLAKWIWQELKPSLPLLSKVEIKETCTAGCIYKGE

SEQ ID NO: 26855 - protein, 121 aa, Vibrio kanaloae
  REGION 1..121: note = tr|A0A1E5DTR5|A0A1E5DTR5_9VIBR 6-carboxy-5,6,7,8-tetrahydropterin synthase OS=Vibrio kanaloae 5S-149 OX=1191299 GN=A132_12005 PE=3 SV=1
MRTELYKEFMFEAAHHLPHVPEGHKCGRLHGHSFLVRLYVEGEVDPHTGWVIDFSEIKAVFKPIYNRLDHYYLNDIKGLENPTSEVLAKWIWNELKPNLPLLSKVEIKETCTAGCIYIGEA

SEQ ID NO: 26856 - protein, 121 aa, Vibrio kanaloae; identical to SEQ ID NO: 26855
  REGION 1..121: note = tr|A0A2N7JGI7|A0A2N7JGI7_9VIBR 6-carboxy-5,6,7,8-tetrahydropterin synthase OS=Vibrio kanaloae OX=170673 GN=queD PE=3 SV=1

SEQ ID NO: 26857 - protein, 295 aa, Vibrio lentus
  REGION 1..295: note = tr|A0A2N7GU76|A0A2N7GU76_9VIBR Uncharacterized protein OS=Vibrio lentus OX=136468 GN=BCU02_10965 PE=4 SV=1
MNLFVKALTVIDASYLCDKRGMVGESWILDVTLSGQLNEMSMVLDFGQVKSQIKRLVDQFVDHRLLIPKRNPLIHSTQTNSGYTSIDLVRETKSIYLNCPDEAYCFIDAEEINIDSVTKHVYQLLKGYLPDNVDGLDITLRPEKIDGALYHYSHGLKKHDGNCQRIAHGHRSPIELIVDGQRDSIRELEFCKRWEDIYLGSLEDKVPVTSLTLSKNSQGISEESHYAFSYTSPQGKFELAISKCETEILDTDTTVELLANYISNEVQKSLSPIQTLKVVAYEGVGKGAMAFHNCK

SEQ ID NO: 26858 - protein, 292 aa, Vibrio lentus
  REGION 1..292: note = tr|A0A2N7GIG1|A0A2N7GIG1_9VIBR Uncharacterized protein OS=Vibrio lentus OX=136468 GN=BCU02_04885 PE=4 SV=1
MNLFVRDLTVIDSSYICEHRGVVGDSWILDVTMSGELNEMSMVLDFSKVKKQIKHLVDQHVDHRLLLPMQSAAIVHQASKAGYSKVDVLRGDKSLHLHCPDEAYCLIDAEAITIESVTAHVYHILRDNLPSNVTGLEITLRHENINGAFYHYTHGLKKHDGNCQRIAHGHRSPVEIVVDGQRDEQREQAFAQRWEDIYLGSKEDQVSVSSLNLSEHANSVNDESHYGFCYTAPQGEFELAIAKSETEILPTDTTVELLAGYIADQVAPSLAENQSLQIVAYEGVGKGAMAFL

SEQ ID NO: 26859 - protein, 118 aa, Vibrio mangrovi
  REGION 1..118: note = tr|A0A1Y6IPT2|A0A1Y6IPT2_9VIBR 6-carboxy-5,6,7,8-tetrahydropterin synthase OS=Vibrio mangrovi OX=474394 GN=queD PE=3 SV=1
MIIYKEFTFEAAHHLPHVPEGHKCGRLHGHSFLVRVCVEGEVDPLTGWVIDFADIKSAFKPIYQRLDHYYLNEIEGLENPTSEVLARWIWDELKPNLPLLSQIEVKETCTAGCVYRGE

SEQ ID NO: 26860 - protein, 60 aa, Vibrio maritimus
  REGION 1..60: note = tr|A0A090SWZ1|A0A090SWZ1_9VIBR NADPH dependent preQ0 reductase OS=Vibrio maritimus OX=990268 GN=JCM19240_5642; PE = 4 SV=1
MDVVLSGELNEMSMVLDFGKVKKQIKHLIDEYVDHRLLVPMKSNAVRHQASNQLHQVRLS

SEQ ID NO: 26861 - protein, 150 aa, Vibrio maritimus
  REGION 1..150: note = tr|A0A090TLM7|A0A090TLM7_9VIBR NADPH dependent preQ0 reductase OS=Vibrio maritimus OX=990268 GN=JCM19240_5643; PE = 4 SV=1
MINGAFYHYTHGLKKHDGNCQRIAHGHRSPIELVVNGERDVEREAAFAARWQDIYLGSLEDKVSLAALSLSDNATGITDDTHYGFRYSAPQGEFELAISKLETEILDTDTTVELLANYVADEVNKTLAENQTLQVIAYEGVGKGAMAFRS

SEQ ID NO: 26862 - protein, 120 aa, Vibrio mediterranei; identical to SEQ ID NO: 26803
  REGION 1..120: note = tr|A0A2C9P709|A0A2C9P709_9VIBR 6-carboxy-5,6,7,8-tetrahydropterin synthase OS=Vibrio mediterranei OX=689 GN=queD PE=3 SV=1

SEQ ID NO: 26863 - protein, 122 aa, unidentified
  source 1..122: note = Vibrio metoecus
  REGION 1..122: note = tr|A0A271VVR0|A0A271VVR0_9VIBR 6-carboxy-5,6,7,8-tetrahydropterin synthase OS=Vibrio metoecus OX=1481663 GN=queD PE=3 SV=1
MMMKTELYKEFMFEAAHHLPHVPAGHKCGRLHGHSFLVRLYVEGEVNPHTGWVVDFAEIKAAFKPIYDRLDHYYLNDIEGLENPTSEVLAKWIWQQLKPSLPLLSKVEIKETCTAGCIYRGE

SEQ ID NO: 26864 - protein, 167 aa, unidentified
  source 1..167: note = Vibrio metoecus
  REGION 1..167: note = tr|A0A067BK61|A0A067BK61_9VIBR Queuosine biosynthesis protein QueD OS=Vibrio metoecus OX=1481663; GN = AAY55_15845 PE=4 SV=1
MQVHTLDKAGIISELHFGQGISQAVTQGRRADFALLLALFSNDVRDNTPIDKIHESPTTEQVLRQRFELAEPQPLENDESSYQISAKQAALFHEGGMASAKLSHYLTPEALTYRPQDTQGFPEEVYLNLSGHERRHLAEKTPTALLAKDFYHRLATAYRQDQFRLSV

SEQ ID NO: 26865 - protein, 119 aa, Vibrio metschnikovii
  REGION 1..119: note = tr|C9P4Z1|C9P4Z1_VIBME 6-carboxy-5,6,7,8-tetrahydropterin synthase OS=Vibrio metschnikovii CIP 69.14 OX=675813 GN=VIB_001363 PE=3 SV=1
MKTEIYKEFMFEAAHHLPHVPEGHKCGRLHGHSFLVRLYVAGEVDAHTGWLIDFAEIKAAFQPIYDRLDHYYLNDIEGLENPTSEVLAKWIWQQLKPSLPLLSKVEIKETCTAGCVYTG

SEQ ID NO: 26866 - protein, 119 aa, Vibrio metschnikovii; identical to SEQ ID NO: 26865
  REGION 1..119: note = tr|A0A380NVM6|A0A380NVM6_VIBME 6-carboxy-5,6,7,8-tetrahydropterin synthase OS=Vibrio metschnikovii OX=28172 GN=queD PE=3 SV=1

SEQ ID NO: 26867 - protein, 122 aa, Vibrio mimicus; identical to SEQ ID NO: 26816
  REGION 1..122: note = tr|A0A2J9V318|A0A2J9V318_VIBMI 6-carboxy-5,6,7,8-tetrahydropterin synthase OS=Vibrio mimicus OX=674 GN=queD PE=3 SV=1

SEQ ID NO: 26868 - protein, 122 aa, Vibrio mimicus
  REGION 1..122: note = tr|D2YJJ4|D2YJJ4_VIBMI 6-carboxy-5,6,7,8-tetrahydropterin synthase OS=Vibrio mimicus VM603 OX=671074 GN=VMB_36910 PE=3 SV=1
MMMKTELYKEFMFEAAHHLPHVPAGHKCGRLHGHSFLVRLYVEGEVDPYTGWVVDFAEIKAAFKPIYDRLDHYYLNDIEGLENPTSEVLAKWIWQQLKPSLPLLSKVEIKETCTAGCIYRGE

SEQ ID NO: 26869 - protein, 120 aa, Vibrio mytili
  REGION 1..120: note = tr|A0A0C3HNT1|A0A0C3HNT1_9VIBR 6-carboxy-5,6,7,8-tetrahydropterin synthase OS=Vibrio mytili OX=50718 GN=SU60_16760 PE=3 SV=1
MKTELYKEFMFEAAHHLPHVPEGHKCGRLHGHSFLVRLYVEGEVDPHTGWVVDFAEIKAAFNPIYDRLDHYYLNDIEGLENPTSEVLAKWIWQQLKPNLPLLSKVEIKETCTAGCIYKGE

SEQ ID NO: 26870 - protein, 167 aa, Vibrio mytili
  REGION 1..167: note = tr|A0A0C3E6D6|A0A0C3E6D6_9VIBR Queuosine biosynthesis protein QueD OS=Vibrio mytili OX=50718; GN = SU60_16600 PE=4 SV=1
MQIHTLDKASVINELHIGNGINHAVNEGRRADFALILSMFSNDVRDAVPIEEVDSVKTSDDILRQQFSLSQPQALRSDTSSYELAAEQAKQFQTSGLPSAKLCHYLKPDALTYLPEDTFNLPEEVYHNLSGHERRSLGERNKKLIPDANLYNQLVTAQRQYHIQAQV

SEQ ID NO: 26871 - protein, 120 aa, Vibrio natriegens
  REGION 1..120: note = tr|A0A1B1ED24|A0A1B1ED24_VIBNA 6-carboxy-5,6,7,8-tetrahydropterin synthase OS=Vibrio natriegens OX=691 GN=BA894_09350 PE=3 SV=1
MKTELYKEFMFEAAHHLPHVPEGHKCGRLHGHSFLVRLYVEGEVDPHTGWVVDFAEIKAAFKPIYDRLDHYYLNDIEGLENPTSEVLAKWIWQQLKPSLPLLSKVEIKETCTAGCIYKGE

SEQ ID NO: 26872 - protein, 167 aa, Vibrio navarrensis
  REGION 1..167: note = tr|A0A099MNZ3|A0A099MNZ3_9VIBR Queuosine biosynthesis protein QueD OS=Vibrio navarrensis OX=29495; GN = EA26_16475 PE=4 SV=1
MQIHTLDKAGIINELQFGTGINHAIHDGRRADFALLLSMFSNDARHITPVEETDSQPVTEQILRQQFALSEPQKLRSDQSSYTISAEQAKQFHRAGLASSKLSHYLIADALAYMPEETFDLPEEVYQNLSGHERRQLAQPNTPLLPEAGLYNQLSTAWAKARLSASV

SEQ ID NO: 26873 - protein, 221 aa, Vibrio navarrensis
  REGION 1..221: note = tr|A0A099LSS2|A0A099LSS2_9VIBR Queuosine biosynthesis protein QueD OS=Vibrio navarrensis OX=29495; GN = EA26_07500 PE=4 SV=1
MTNIFIIVALLILFFFIIQKYVVKQDNSKDYSYRVKGPVLRSQEVAFFNALKTAVGEHGVVFSKVNMSSVIAPRDIVSKKQLFIASNKISRSHFDYLICDPRTFEPRVVIELDNGKELNKSKVEREKLLMQVCKSANIPLIGTSVKHSYQVGRLRRLLAAHIDLIEPDKEIRFCKKCGSPMVIKVASQGEFKGRRFFTCSRQPNCTYTENYNVVFDTDDDE

SEQ ID NO: 26874 - protein, 120 aa, unidentified; identical to SEQ ID NO: 26795
  source 1..120: note = Vibrio neocaledonicus
  REGION 1..120: note = tr|A0A4P8G0I7|A0A4P8G0I7_9VIBR 6-carboxy-5,6,7,8-tetrahydropterin synthase OS=Vibrio neocaledonicus OX=1208308 GN=queD PE=3 SV=1

SEQ ID NO: 26875 - protein, 221 aa, Vibrio neptunius
  REGION 1..221: note = tr|A0A0F4PFN7|A0A0F4PFN7_9VIBR Queuosine biosynthesis protein QueD OS=Vibrio neptunius OX=170651; GN = TW84_01050 PE=4 SV=1
MESVFIIVVLLVLFFVFVQKRYLKQDELKDSSYKKKGPLMNMQESAFYNALITAVGQHGVVMSKVNMTNIVAPLATDKKQWFIANNRIAKSYFDYVVCDPRTLQVRVAIELDNGRALDKGKIERQKLLMHVCKSSGIPLIGTSVKHSYQVGKLRRLLASHIDLIEPEKEIRFCKRCGSPMVIKTASQGEFKGRRFFTCSRQPQCTYTENYNVVFDEDGVDE

SEQ ID NO: 26876 - protein, 169 aa, Vibrio neptunius
  REGION 1..169: note = tr|A0A0F4P9M1|A0A0F4P9M1_9VIBR Queuosine biosynthesis protein QueD OS=Vibrio neptunius OX=170651; GN = TW84_07225 PE=4 SV=1
MQTQIHTLDKAGIINELQFGKGINHAVHEGRRADFALILSMFSDDVRDNTPIEKVNEQDTTEKALRRRFEIQPPQQIRSDQSSYPISAIQADMFHRAGLPSAKLTHYLHPEVLAYMPEDTHDLPEEIYNNLSGHQRRQLDEKEAKELIPIDLYNQLIKAQRTFQIQTQV

SEQ ID NO: 26877 - protein, 222 aa, Vibrio nereis
  REGION 1..222: note = tr|A0A0M0HN49|A0A0M0HN49_VIBNE Queuosine biosynthesis protein QueD OS=Vibrio nereis OX=693; GN = AKJ17_09105 PE=4 SV=1
MESVFIVVGLLVLFFLVVQKRYLKQEELKDSAYKKKGPILSMQESAFFNALVTAVGSHGVVLTKVNMANVLSPLETDKKRWFIANNRIAKSYFDFVVCDPRTLDIRVIIEFDNGKPLDKGKIERQKLLMHVCKSASIPLIGTTIKHSYQVGRLRRLLAAHIDLIEPEKEVRFCKRCGSPMVIKIASVGDHKGRRFFTCSRQPQCTYTENYNVVFDEEDSPNQ

SEQ ID NO: 26878 - protein, 122 aa, Vibrio nereis
  REGION 1..122: note = tr|A0A0M0HNB9|A0A0M0HNB9_VIBNE 6-carboxy-5,6,7,8-tetrahydropterin synthase OS=Vibrio nereis OX=693 GN=AKJ17_09520 PE=3 SV=1
MRTELYKEFMFEAAHRLPHVPEGHKCGRLHGHSFLVRLYVEGEVDPHTGWVIDFSEIKTAFKPIYDRLDHYYLNDIEGLENPTSEVLAKWIWQQLKPGLPLLSKVEIKETCTAGCIYKGEEE

SEQ ID NO: 26879 - protein, 291 aa, Vibrio nigripulchritudo
  REGION 1..291: note = tr|U4DZX6|U4DZX6_9VIBR Putative 6-pyruvoyl-tetrahydropterin synthase OS=Vibrio nigripulchritudo FTn2 OX=1238441 GN=VIBNIFTn2_1590032 PE=4; SV = 1
MNLFVKNLTVIDSSYLCEKRGMVGDSWIVDVSLTGDLNEMSMILDFGKVKKIIKELIDEHVDHKLIVPASNPNIEYSETQPGYTKLGFLRGEQTLHLNCPNSAYCFIETSEIDNRALTAHIYQVLKQYLPNNVSDIDITLRHEDIKEHYYHYTHGLKKHDGNCQRIAHGHRSTLEIYVNGERDSKREEDFCERWKDIYLGSQEDKVSIASLDFIAQEDLVSDDSHYAFMYSTGQGDYELIISKEVTEIIDTDTTVELLAQFIQKEVKKTLNSEDSLSVVAYEGVGKGAKVF

SEQ ID NO: 26880 - protein, 291 aa, Vibrio nigripulchritudo
  REGION 1..291: note = tr|U4KCB3|U4KCB3_9VIBR Putative 6-pyruvoyl-tetrahydropterin synthase OS=Vibrio nigripulchritudo OX=28173 GN=VIBNI_A1958 PE=4 SV=1
MNLFVKNLTVIDSSYLCEKRGMVGDSWIVDVSLTGDLNEMSMILDFGKVKKIIKELIDEHVDHKLIVPASNPNIEYSETQPGYTKLGFLRGEQTLHLNCPNSAYCFIETSEIDNHALTAHIYQVLKQYLPNNVSDIDITLRHEDIKEHYYHYTHGLKKHDGNCQRIAHGHRSTLEIYVNGERDSKREEDFCERWKDIYLGSQEDKVSIASLDFIAQEDLVSDDSHYAFMYSTSQGDYELIISKEVTEIIDTDTTVELLAQFIQKEVKKTLDSEDSLSVVAYEGVGKGAKVF

SEQ ID NO: 26881 - protein, 292 aa, Vibrio orientalis
  REGION 1..292: note = tr|F9SW55|F9SW55_VIBOR Uncharacterized protein; OS = Vibrio orientalis CIP 102891 = ATCC 33934 OX=675816; GN = VIOR3934_15896 PE=4 SV=1
MNLFVRDLTVIDSSYICEQRGVVGDSWILDVTMSGELNEMSMVLDFGRVKKQIKHLVDEYVDHRLLVPAKSSAVTLKPTKVGYSTLDVKRGDKSIHLHCPNEAYCLIEAESISIESITEHVYQILRNNLPSNVTGIEITLRHENISGAFYHYTHGLKKHDGNCQRIAHGHRSPIEILIDGQRDSEIEARLAKRWQDIYLGSKEDQISVTQLNLSEQAKSVTDETHFGFRYTAPQGEFELAIAKSETEILPTDTTVELLACYIADVVKPDVDDGKSLQVIAYEGVGKGAMAFA

SEQ ID NO: 26882 - protein, 120 aa, Vibrio owensii; identical to SEQ ID NO: 26795
  REGION 1..120: note = tr|A0A0C1ZM08|A0A0C1ZM08_9VIBR 6-carboxy-5,6,7,8-tetrahydropterin synthase OS=Vibrio owensii CAIM 1854 = LMG 25443 OX=1229493 GN=H735_05100; PE = 3 SV=1

SEQ ID NO: 26883 - protein, 292 aa, Vibrio owensii
  REGION 1..292: note = tr|A0A3G2PUL7|A0A3G2PUL7_9VIBR Uncharacterized protein OS=Vibrio owensii OX=696485 GN=D0812_09585 PE=4; SV = 1
MNLFVRDLTVIDSSYLCETRGMVGESWILDISLSGELNEMSMVLDFGQVKKQIKRLVDEYVDHKLLVPTKNKKIFVANTKQGYSSVDLIRGDQGIHIHCPNEALCLVDADTITMFSVTKHLYTILKSHLPQNVNDLELTLRTESIDGAFYHYSHGLKKHDGNCQRIAHGHRSPIELIVNGMRDAQREARFATRWQDIYLGSKEDQVTLAELSLNIRNKEINDHTHYAFKYTAPQGKFELAIAKNETEILESDTTIELLVNYIADEVKKDLTAKDTLKVIGYEGVGKGAIATR

SEQ ID NO: 26884 - protein, 271 aa, unidentified
  source 1..271: note = Vibrio palustris
  REGION 1..271: note = tr|A0A1R4B104|A0A1R4B104_9VIBR 6-pyruvoyl tetrahydropterin synthase OS=Vibrio palustris OX=1918946; GN = VPAL9027_00530 PE=4 SV=1
MKTAMYIDDLTAIDFSVYDGTDIKGDSISLSVMVTGEENETGMISDFGKIKPKLKFICDEEVDHRLVCDSRYLTVDNDRSAGEFPVSGGIIHAQGPSVMFCAIPMVSEDYVADIKHYLITKFCQAMPEFEFEIELTRSTTASFQYNHGLKLHDGNCQRIIHGHSSDLEIQINGQTCPKHHDWMAANLNGKHFFNANDVAVGEERTTVRYSASQGDFEVQIPNQLVEIVQGEPSIENISKHIAVLVKDLNPDAHSVRVKVSEGLSKGAVTLA

SEQ ID NO: 26885 - protein, 120 aa, unidentified
  source 1..120: note = Vibrio panuliri
  REGION 1..120: note = tr|A0A1Q9HIY7|A0A1Q9HIY7_9VIBR 6-carboxy-5,6,7,8-tetrahydropterin synthase OS=Vibrio panuliri OX=1381081 GN=BIY22_04540 PE=3 SV=1
MKSELYKEFMFEAAHRLPHVPEGHKCGRLHGHSFLVRLYVEGEVDPHTGWVIDFSEIKAAFKPIYDRLDHYYLNDIEGLENPTSEVLAKWIWQQLKPSLALLSKVEIKETCTAGCIYRGE

SEQ ID NO: 26886 - protein, 219 aa, Vibrio parahaemolyticus
  REGION 1..219: note = tr|A0A0L8UR56|A0A0L8UR56_VIBPH Queuosine biosynthesis protein QueD OS=Vibrio parahaemolyticus; OX = 670 GN=CA163_01360 PE=4 SV=1
MTNIFIIVVLLVVFFIIIQKYVIKHDDTRDYPYRAKGPLLRGQEGAFFNALRAAVGEHAVVFAKVNMSTLVAPKDIKNKKQFFVANNRIARSYFDYVICDPRTLEPRVIIEFDNGQQLNKGKAERQKLLMHVCKSANLPLIGTSVKHSYQVGRLRRLLAAHIDLIEPEKEVRFCKKCGSPMIIKTASQGEFKGRRFFTCSRQPNCTYTENYNVVFESDD

SEQ ID NO: 26887 - protein, 120 aa, Vibrio parahaemolyticus
  REGION 1..120: note = tr|A0A0D1FWD8|A0A0D1FWD8_VIBPH 6-carboxy-5,6,7,8-tetrahydropterin synthase OS=Vibrio parahaemolyticus 49 OX=1288779 GN=H320_21750 PE=3 SV=1
MKTELYKEFMFEAAHHLPHVPEGHKCGRLHGHSFLVRLYVEGEVDPHTGWVVDFAEIKAAFKPIYNRLDHYYLNDIEGLENPTSEVLAKWIWQQLKPNLPLLSKVEIKETCTAGCIYKGE

SEQ ID NO: 26888 - protein, 120 aa, Vibrio pectenicida
  REGION 1..120: note = tr|A0A427U7B8|A0A427U7B8_9VIBR 6-carboxy-5,6,7,8-tetrahydropterin synthase OS=Vibrio pectenicida OX=62763 GN=queD PE=3 SV=1
MKTELYKEFMFEAAHHLPNVPEGHKCGRLHGHSFLVRLYVEGEVDPHTGWLIDFAELKAAFKPIYEQLDHYYLNDIEGLENPTSEVLARWIWLKLKPTLPLLSKVEIKETCTAGCIYAGG

SEQ ID NO: 26889 - protein, 120 aa, Vibrio penaeicida
  REGION 1..120: note = tr|A0A432D8P7|A0A432D8P7_9VIBR 6-carboxy-5,6,7,8-tetrahydropterin synthase OS=Vibrio penaeicida OX=104609 GN=queD PE=3 SV=1
MKTELYKEFMFEAAHRLPHVPEGHKCGRLHGHSFLVRLYVEGEVDQYTGWVIDFSEIKAAFKPIYDRLDHYYLNDIPGLENPTSEVLAKWIWNELKPSLPLLSKVEIKETCTAGCIYKGE

SEQ ID NO: 26890 - protein, 120 aa, Vibrio ponticus
  REGION 1..120: note = tr|A0A3N3DVH3|A0A3N3DVH3_9VIBR 6-carboxy-5,6,7,8-tetrahydropterin synthase OS=Vibrio ponticus OX=265668 GN=queD PE=3 SV=1
MKTELYKEFMFEAAHHLPNVPEGHKCGRLHGHSFLVRLYVEGEVDPHTGWVVDFAEIKAAFKPIYDRLDHYYLNDIEGLENPTSEVLAKWIWQQLKPSLPLLSKVEIKETCTAGCIYRGE

SEQ ID NO: 26891 - protein, 228 aa, Vibrio ponticus
  REGION 1..228: note = tr|A0A090P6E6|A0A090P6E6_9VIBR QueD-like protein; OS = Vibrio ponticus OX=265668 GN=JCM19238_2170 PE=4 SV=1
MEYVAILLVVFVAFYLFIHQRYLKQDALKDSAYKKKGPILNQKESAFYNALLSAVGQQAVVMPKVTMSKVIAPKATDKKQWFIANNRIAKSYFDFVVCDPRNLEARVVLELDDGAPLNKGKVERQKLLMHACKSAGIPLIGATVKHSYQVGKLRRLLAAHIDLIEADKEVRFCKRCGSPMNIKTASQGDYKGVASSPVAASLSVITPRTTMWCLTKSRLTTRRTNICV

SEQ ID NO: 26892 - protein, 121 aa, Vibrio proteolyticus
  REGION 1..121: note = tr|U2ZWZ4|U2ZWZ4_VIBPR 6-carboxy-5,6,7,8-tetrahydropterin synthase OS=Vibrio proteolyticus NBRC 13287 OX=1219065 GN=queD PE=3 SV=1
MKTELYKEFMFEAAHRLPHVPEGHKCGRLHGHSFLVRLYVEGEVDPHTGWVVDFSEIKAAFKPIYDRLDHYYLNDIEGLENPTSEVLAKWIWQQLKPALPLLSKVEIKETCTAGCIYIGEE

SEQ ID NO: 26893 - protein, 119 aa, unidentified; identical to SEQ ID NO: 26798
  source 1..119: note = Vibrio qinghaiensis
  REGION 1..119: note = tr|A0A223MXM9|A0A223MXM9_9VIBR 6-carboxy-5,6,7,8-tetrahydropterin synthase OS=Vibrio qinghaiensis OX=2025808 GN=queD PE=3 SV=1

SEQ ID NO: 26894 - protein, 119 aa, unidentified
  source 1..119: note = Vibrio quintilis
  REGION 1..119: note = tr|A0A1M7Z2C8|A0A1M7Z2C8_9VIBR 6-carboxy-5,6,7,8-tetrahydropterin synthase OS=Vibrio quintilis OX=1117707 GN=queD PE=3 SV=1
MILYKEFTFEAAHRLPHVPEGHKCGRLHGHSFLVRIYVEGDVDPQAGWVIDFAEIKQAFKPVYEQLDHHYLNEVEGLENPTSEVIARWIWQKLKPSLPLLSQVEIKETCTAGCIYKGEA

SEQ ID NO: 26895 - protein, 167 aa, unidentified
  source 1..167: note = Vibrio renipiscarius
  REGION 1..167: note = tr|A0A0C2NWQ7|A0A0C2NWQ7_9VIBR Queuosine biosynthesis protein QueD OS=Vibrio renipiscarius; OX = 1461322 GN=OJ16_04490 PE=4 SV=1
MHVETINNINPVSELHFSNGINHAVHEGRRADFALLVSMFSHDLRDNTPVEQIDAVEISDTSLRQRFDLPSPQQLKSDQSSYQISAQQAHQFHHGGLASAKLAHYLMPEALVYLPEQTHDLPEEVYHNLSVHQQSQLGSKTPKKLMPFDLYNQLVTAQRTYQIQAQA

SEQ ID NO: 26896 - protein, 218 aa, unidentified
  source 1..218: note = Vibrio renipiscarius
  REGION 1..218: note = tr|A0A0C2NN89|A0A0C2NN89_9VIBR Queuosine biosynthesis protein QueD OS=Vibrio renipiscarius; OX = 1461322 GN=OJ16_06635 PE=4 SV=1
MEYIAVVVLLFIGFYLFVQKRYLNQDDLKDSTYKKNGPLLNSKESAFYAALMTAVGDHGVVMSKVVMSKVVVPKASDKKGWFIANNRIAKSYFDYVVCDPRSLEVRVAIELDDGNPLNKGKIERQKLLMHVCKSAGIPLIGTSVKHSYQVGRLRRLLATHIDLIEPEKEVRFCKRCGSPMVIKTATQGDFKGRRFFTCSRQPHCTYTENYNIVFEDSE

SEQ ID NO: 26897 - protein, 292 aa, Vibrio rotiferianus
  REGION 1..292: note = tr|A0A510IBU5|A0A510IBU5_9VIBR Uncharacterized protein OS=Vibrio rotiferianus OX=190895 GN=queD PE=4 SV=1
MNLFVNDLTVIDASYLCQTRGMVGESWILDVVVHGDLNEMSMVLDFSKVKKQIKQLVDQYVDHRLLIPVKNEAVEITNGKAGYSQVDLMRGEKSIHLHCPDEAFCFVDAEDISIESVTQHIHKVLQGNLPSNVASIDLTLRHEKLDGAYYHYTHGLKKHDGNCQRIAHGHRSPIQILVDGQHDTAREHAFAQRWQDIYLASIEDLVEIGHLELSEHATLINSDTHFGFRYTTSQGDFQLAIAHSETEVLNTDTTVELLAVFIANEIASSLEEGQSLQVIAYEGVGKGAMAFR

SEQ ID NO: 26898 - protein, 120 aa, Vibrio rotiferianus
  REGION 1..120: note = tr|A0A2K7SZ99|A0A2K7SZ99_9VIBR 6-carboxy-5,6,7,8-tetrahydropterin synthase OS=Vibrio rotiferianus OX=190895 GN=BI375_13175 PE=3 SV=1
MRTELYKEFMFEAAHHLPHVPEGHKCGRLHGHSFLVRLYVEGEVDPHTGWVVDFAEIKAAFKPIYDRLDHYYLNDIEGLENPTSEVLSKWIWQQLKPNLPLLSKVEIKETCTAGCIYTGE

SEQ ID NO: 26899 - protein, 118 aa, Vibrio ruber
  REGION 1..118: note = tr|A0A1R4L879|A0A1R4L879_9VIBR 6-carboxy-5,6,7,8-tetrahydropterin synthase OS=Vibrio ruber DSM 16370 OX=1123498 GN=queD PE=3 SV=1
MIIYKEFTFEAAHHLPHVPEGHKCGRLHGHSFLVRVSVEGEVDPLTGWVIDFADIKAAFNPIYQRLDHYYLNEIEGLENPTSEVLARWIWHELKPNLPLLSQIEVKETCTAGCVYRGE

SEQ ID NO: 26900 - protein, 120 aa, Vibrio rumoiensis
  REGION 1..120: note = tr|A0A1E5E4C3|A0A1E5E4C3_9VIBR 6-carboxy-5,6,7,8-tetrahydropterin synthase OS=Vibrio rumoiensis 1S-45 OX=1188252 GN=A1QC_06190 PE=3 SV=1
MTCEIYKDFIFEAAHHLPNVPEGHKCGRLHGHSFFVRLYILGEVDATTGWVIDFGDVKKIFAPIYDRLDHYYLNDIPGLENPTSEVLAKWIWNEVKPLLPELSKVEIKETCTAGCIYVGQ

SEQ ID NO: 26901 - protein, 121 aa, Vibrio sagamiensis; identical to SEQ ID NO: 26793
  REGION 1..121: note = tr|A0A511QAZ3|A0A511QAZ3_9VIBR 6-carboxy-5,6,7,8-tetrahydropterin synthase OS=Vibrio sagamiensis NBRC 104589 OX=1219064 GN=VSA01S_05930 PE=3; SV = 1

SEQ ID NO: 26902 - protein, 120 aa, Vibrio scophthalmi
  REGION 1..120: note = tr|A0A1B1NPK1|A0A1B1NPK1_9VIBR 6-carboxy-5,6,7,8-tetrahydropterin synthase OS=Vibrio scophthalmi OX=45658 GN=queD PE=3 SV=1
MKTELYKEFMFEAAHHLPHVPEGHKCGRLHGHSFLVRLYVEGEVDPYTGWVVDFAEIKAAFKPIYNRLDHYYLNDIEGLENPTSEVLAKWIWQQLKPALPLLSKVEIKETCTAGCIYKGE

SEQ ID NO: 26903 - protein, 120 aa, Vibrio scophthalmi; identical to SEQ ID NO: 26902
  REGION 1..120: note = tr|F9RTK2|F9RTK2_9VIBR 6-carboxy-5,6,7,8-tetrahydropterin synthase OS=Vibrio scophthalmi LMG 19158 OX=870967 GN=VIS19158_13362 PE=3 SV=1

SEQ ID NO: 26904 - protein, 120 aa, Vibrio shilonii; identical to SEQ ID NO: 26803
  REGION 1..120: note = tr|A6D4Z2|A6D4Z2_9VIBR 6-carboxy-5,6,7,8-tetrahydropterin synthase OS=Vibrio shilonii AK1 OX=391591 GN=VSAK1_07224 PE=3 SV=1

SEQ ID NO: 26905 - protein, 292 aa, Vibrio sinaloensis
  REGION 1..292: note = tr|E8MDE4|E8MDE4_9VIBR Uncharacterized protein; OS = Vibrio sinaloensis DSM 21326 OX=945550; GN = VISI1226_08384 PE=4 SV=1
MNLFVRDLTVIDSSFICERRGVVGDSWILDVTMSGELNEMSMVLDFGRVKKQIKHLVDEHVDHRLLVPMKSDAISYQSTKPGYATLDVQRGAKSIHLQCPDEAYCLIDAEEITLESVTQHVYDILRDNLPSNVTGIEITLRNEHIAGAFYHYTHGLKKHDGNCQRIAHGHRSPIEIVVDGKRDSDKEAAFAKRWQDIYLGSQEDKVMVGELELSELAQSISDQSHYGFRYTAPQGEFQLAIPKEDTEILPTDTTVELLAGYIADQVKPTLAGGESLQIIAYEGVGKGAMAFR

SEQ ID NO: 26906 - protein, 219 aa, Vibrio sinaloensis; identical to SEQ ID NO: 26812
  REGION 1..219: note = tr|A0A0A5JRS8|A0A0A5JRS8_9VIBR Queuosine biosynthesis protein QueD OS=Vibrio sinaloensis OX=379097; GN = NM06_01015 PE=4 SV=1

SEQ ID NO: 26907 - protein, 198 aa, Vibrio sp.
  REGION 1..198: note = tr|A0A3N9TKI0|A0A3N9TKI0_9VIBR 6-carboxytetrahydropterin synthase OS=Vibrio sp. LJC006; OX = 2487322 GN=EES38_07180 PE=4 SV=1
MIIRKLFKFEGAHIVRNCSSERCKKSIHGHSYTVEIFVKSQGFDNGMMVMDFGLMKDNMKDFIDGFDHAYSMWNKESDEFQTFMKNHSDRWIEMPVSPSAEAYSLMFFKVLDEMIKATEFNNGEKNVELHSVRVHETATGYAESFRDDLDWINFELKDIVLSEGIKAEFKDPQMFDKLIQASINGTKCFINPIVDQQV

SEQ ID NO: 26908 - protein, 167 aa, Vibrio sp.
  REGION 1..167: note = tr|A0A084T7A1|A0A084T7A1_9VIBR Queuosine biosynthesis protein QueD OS=Vibrio sp. ER1A OX=1517681; GN = HW45_21785 PE=4 SV=1
MQIHSLDKANLISELQCGTSLCRAVEQGRRADFALMLSMFSDDCRETSFIEDIDTAITDETVLRQRFNVPTAQKLQGELDDYQTSAAIANQFHRGGLASAKLQHYSTPEPLNYQPTDTIGLSEEVYQNLSGHTRRQLAQGSVNTPNIDYLYNHLSTAYRKDTLAIQA

SEQ ID NO: 26909 - protein, 118 aa, unidentified
  source 1..118: note = Vibrio spartinae
  REGION 1..118: note = tr|A0A1N6M3S8|A0A1N6M3S8_9VIBR 6-carboxy-5,6,7,8-tetrahydropterin synthase OS=Vibrio spartinae OX=1918945 GN=queD PE=3 SV=1
MIIYKEFTFEAAHHLPYVPEGHKCGRLHGHSFLVRVSVEGEVDPQTGWVIDFADIKAAFKPIYQRLDHYYLNEIEGLENPTSEVLARWIWHELKPTLPLLSQLEVKETCTAGCVYRGE

SEQ ID NO: 26910 - protein, 222 aa, Vibrio splendidus
  REGION 1..222: note = tr|A0A1A6LZW8|A0A1A6LZW8_VIBSP DUF2726 domain-containing protein OS=Vibrio splendidus OX=29497; GN = A9262_05845 PE=4 SV=1
MTNIFIVVIVLVVFFYFIQKYLVKHDDTKDHAYQKKGSLMSAQQATFYNALKSAVGNHGEVFAKVSMSNVLVPAKANNKKNWFIANNKISRSYFDFVVCDPRTLEPRVIIELDNGKELNKGKADREKLLIHVCKSAGLPLIGASIKHSYQVSRLKRLLAAHIDLIEPSKEVRFCKKCGSPMIIKLASQGDYKGRRFFTCSRQPNCTYTENYNVVFDVDEDSN

SEQ ID NO: 26911 - protein, 120 aa, Vibrio splendidus; identical to SEQ ID NO: 26800
  REGION 1..120: note = tr|A0A1E5B1K3|A0A1E5B1K3_VIBSP 6-carboxy-5,6,7,8-tetrahydropterin synthase OS=Vibrio splendidus ZS-139 OX=617140 GN=A143_21755 PE=3 SV=1

SEQ ID NO: 26912 - protein, 120 aa, Vibrio superstes; identical to SEQ ID NO: 26808
  REGION 1..120: note = tr|A0A511QU32|A0A511QU32_9VIBR 6-carboxy-5,6,7,8-tetrahydropterin synthase OS=Vibrio superstes NBRC 103154 OX=1219062 GN=VSU01S_31230 PE=3 SV=1

SEQ ID NO: 26913 - protein, 120 aa, Vibrio tapetis
  REGION 1..120: note = tr|A0A2N8ZA85|A0A2N8ZA85_9VIBR 6-carboxy-5,6,7,8-tetrahydropterin synthase OS=Vibrio tapetis subsp. tapetis OX=1671868 GN=ygcM PE=3 SV=1
MTTELYKEFMFEAAHHLPHVPEGHKCGRLHGHSFLVRLFVEGEVDAHTGWVIDFSEIKAAFKPIYDRLDHYYLNDIPGLENPTSEVLAKWIWNELKPSLPLLSKIEIKETCTAGCIYRGE

SEQ ID NO: 26914 - protein, 136 aa, Vibrio tasmaniensis
  REGION 1..136: note = tr|B7VPP0|B7VPP0_VIBTL 6-carboxy-5,6,7,8-tetrahydropterin synthase OS=Vibrio tasmaniensis (strain LGP32) OX=575788 GN=VS_1806 PE=3 SV=1
MVLRNIACHFFSLRNTMRTELYKEFMFEAAHHLPHVPEGHKCGRLHGHSFLVRLYVEGEVDPHTGWVIDFSEIKAVFKPIYDRLDHYYLNDIDGLENPTSEVLAKWIWNELKPSLPLLSKVEIKETCTAGCIYRGE

SEQ ID NO: 26915 - protein, 120 aa, Vibrio tasmaniensis
  REGION 1..120: note = tr|A0A2N7HWM6|A0A2N7HWM6_9VIBR 6-carboxy-5,6,7,8-tetrahydropterin synthase OS=Vibrio tasmaniensis OX=212663 GN=queD PE=3 SV=1
MRTELYKEFMFEAAHHLPHVPEGHKCGRLHGHSFLVRLYVEGEVDPHTGWVIDFSEIKAVFKPIYDRLDHYYLNDIEGLENPTSEVLAKWIWNELKPSLPLLSKVEIKETCTAGCIYRGE

SEQ ID NO: 26916 - protein, 120 aa, unidentified; identical to SEQ ID NO: 26803
  source 1..120: note = Vibrio thalassae
  REGION 1..120: note = tr|A0A240EKP1|A0A240EKP1_9VIBR 6-carboxy-5,6,7,8-tetrahydropterin synthase OS=Vibrio thalassae OX=1243014 GN=queD PE=3 SV=1

SEQ ID NO: 26917 - protein, 220 aa, unidentified
  source 1..220: note = Vibrio toranzoniae
  REGION 1..220: note = tr|A0A120DGQ0|A0A120DGQ0_9VIBR Queuosine biosynthesis protein QueD OS=Vibrio toranzoniae OX=1194427; GN = APQ14_05905 PE=4 SV=1
MTNIFIVVIVLVVFFYFIQKYLVKHDDTKDHAYQKKGSLMSAQQATFYNALKSAVGNHGEVFAKVSMSNVLVPAKANNKKNWFIANNKISRSYFDFVVCDPRTLEPRVIIELDNGKELNKGKADREKLLIHVCKSAGLPLIGASIKHSYQVSRLKRLLAAHIDLIEPSKEVRFCKKCGSPMIIKLASQGDHKGRRFFTCSRQPNCTYTENYNVVFDVDDE

SEQ ID NO: 26918 - protein, 171 aa, unidentified
  source 1..171: note = Vibrio toranzoniae
  REGION 1..171: note = tr|A0A109DAR1|A0A109DAR1_9VIBR Queuosine biosynthesis protein QueD OS=Vibrio toranzoniae OX=1194427; GN = APQ14_03015 PE=4 SV=1
MRGVMQIHTLDKAGVINELKFGIGISQAVEQGRRADFSLLLSMFSNDVRDCTPIDTLQVIETSEDRLRNQFGVAEPQQLRSTQSSYEISAQQSDHFHQASLASAKLSHYLKPEALAFRPEDTADFPEEVYQNLSGHDRRKLANKHVPDLPHATLYNALSTAQRQYQIQAQV

SEQ ID NO: 26919 - protein, 167 aa, Vibrio tubiashii
  REGION 1..167: note = tr|F9TCK2|F9TCK2_9VIBR Queuosine biosynthesis protein QueD OS=Vibrio tubiashii ATCC 19109 OX=1051646; GN = IX91_10785 PE=4 SV=1
MQIHTLDKAAIISELQFGTGINHAVHEGRRADFALILSMFSDDVRDNTPLEKVDEIDTSEQALRKKFELQAPQQLRSDQSSYQVSATQASLFHSSGLPSTKLSHYLTPDALTYLPEDTHNLPEEVYHNLSGHQRRAMGEKEPKELMPIDLYNQLIKAQRTFQIQAQA

SEQ ID NO: 26920 - protein, 221 aa, Vibrio tubiashii
  REGION 1..221: note = tr|A0A0A5I391|A0A0A5I391_9VIBR Queuosine biosynthesis protein QueD OS=Vibrio tubiashii OX=29498; GN = NM22_13445 PE=4 SV=1
MESVFIVVAILVIFFVIIQKRYLKQDELKDSSYKKKGALLNAKESAFYNALIAAVGQHGVVMSKVSLANVIVPLATDKKQWFIANNRISKSYFDYVVCDPRTFEVRVAIELDDGKELNKGKVDRQKLLMHTCKSAGIPLIGANIKHSYQVGRLRRLLAAHIDLIEPDKEVRFCKRCGSPMTIKIASQGEHKGRRFFTCSRQPHCTYTENYNVVFDEEEDRS

SEQ ID NO: 26921 - protein, 226 aa, Vibrio variabilis
  REGION 1..226: note = tr|A0A090TF95|A0A090TF95_9VIBR NADPH dependent preQ0 reductase OS=Vibrio variabilis OX=990271 GN=JCM19239_6810; PE = 4 SV=1
MVGESWILDVSLSGKLNEMSMVLDFGKVKSQIKRLVDQYVDHRLLIPSQSQHIRFSETQNGYATLDLIRPEKSIHLNCPEEAYCFIDAETITTESVQEHVYHILKSHLPDNVEGLEIVLRPEKIDGAYYHYSHGLKKHDGNCQRIAHGHRSPIELYVDGHRDETLEHSFAQRWKDIYLGSAEDQVSLQTLSLSEHASQCKEDTHYALDTKRHRVTLSLQLLKVKLK

SEQ ID NO: 26922 - protein, 151 aa, Vibrio variabilis
  REGION 1..151: note = tr|A0A090TH60|A0A090TH60_9VIBR Potential queD like 2; OS = Vibrio variabilis OX=990271 GN=JCM19239_260 PE=4 SV=1
MCTSLNRAVEQGRRADFALMLSMFSQDSRETSVTEDVDTKITDEAILRKRFDVPTAQKLQGELDDYEVSASIAKQFHDGGLPSAKLQHYSRPEPLNYAPVDTHGLAEEVYHNLSGHTRRQLGQKSAPKPTIDILYNQLSTAHRKDGLSIHL

SEQ ID NO: 26923 - protein, 120 aa, Vibrio vulnificus
  REGION 1..120: note = tr|A0A087JHX0|A0A087JHX0_VIBVL 6-carboxy-5,6,7,8-tetrahydropterin synthase OS=Vibrio vulnificus OX=672 GN=queD PE=3 SV=1
MRTELYKEFMFEAAHHLPHVPEGHKCGRLHGHSFLVRLYVEGEVDPHTGWVVDFAEIKAAFKPIYNRLDHYYLNDIEGLENPTSEVLAKWIWQQLKPNLPLLSKVEIKETCTAGCIYKGE

SEQ ID NO: 26924 - protein, 221 aa, Vibrio vulnificus
  REGION 1..221: note = tr|A0A087J7L7|A0A087J7L7_VIBVL DUF2726 domain-containing protein OS=Vibrio vulnificus OX=672; GN = CRN32_23105 PE=4 SV=1
MTNIFIIVALLILFFFVIQKYVVKQDDTKEYAYRSKGSVLKGHEVAFFNALKTAVGEHGVVFAKVNMSNVVAPRDINSKKQLFIASNRISRMYFDYVICDPRTFEPRVIIELDNGKELNKVKVEREKLLMQVCKTANIPLIGTSIKHSYQVGRLRRLLAAHIDLIEPDKEVRFCKKCGSPMIIKIASQGEFKGRRFFTCSRQPNCTYTENYNVVFDVDDDD

SEQ ID NO: 26925 - protein, 271 aa, unidentified
  source 1..271: note = Vibrio xiamenensis
  REGION 1..271: note = tr|A0A1G8HEC8|A0A1G8HEC8_9VIBR 6-pyruvoyl-tetrahydropterin synthase OS=Vibrio xiamenensis; OX = 861298 GN=SAMN04488136_1505 PE=4 SV=1
MKTAMYIDDLTAIDFSVYDGKEIRGDSVSLSVMVTGKLDESGMISDFGKIKPRLKAICDNQVDHKLVCDPKFLRAENGISRGEFHVASGVITSTGPSSMYCPIELKSSHYVADIKEYLHAKFLDAMPDFEFDIELARNANASFQYNHGLKLHDGNCQRIIHGHSAELEIVIDGQPNTDIHDRIAARLNGKHFFNQSDVEQGESLSTIRYQASQGDFEVSMPNALLEIVASEPSIENISKHVTLMVKEMYPDAGSIRVRVSEGLSKGAVTLL

SEQ ID NO: 26926 - protein, 121 aa, unidentified
  source 1..121: note = Vibrionales bacterium
  REGION 1..121: note = tr|A0A366XFS0|A0A366XFS0_9GAMM 6-carboxy-5,6,7,8-tetrahydropterin synthase OS=Vibrionales bacterium C3R12 OX=2267228 GN=queD PE=3 SV=1
MEMKTELYKDFMFEAAHHLPHVPEGHKCGRLHGHSFMVRLYVEGEVDPHTGWIIDFSEIKAAFKPIYDRLDHYYLNDIEGLENPTSEVLSKWIWQQLKPSLPLLSKVEIKETCTAGCTYIG

SEQ ID NO: 26927 - protein, 292 aa, unidentified
  source 1..292: note = Vibrionales bacterium
  REGION 1..292: note = tr|A5KVV3|A5KVV3_VIBBS Uncharacterized protein; OS = Vibrionales bacterium (strain SWAT-3) OX=391574; GN = VSWAT3_17818 PE=4 SV=1
MNLFVRDLTVIDSSYICERRGVVGDSWILDVTMSGELNEMSMVLDFSRVKKQIKNLVDQHVDHRLLLPMKNAAIVHQASKPGYAKVDVLRGDKSLHLHCPDEAYCLIDAEAITIESVTAHVYDILRDNLPSNVTGLEITLRHENINGAFYHYTHGLKKHDGNCQRIAHGHRSPVEIVVDGQRDEQRELAFAERWEDIYLGSKEDQVSVSSLNLSEHAKSANDESHYGFQYTAPQGEFELAIAKSETEILPTDTTVELLAGYIADQVAPSLAENQSLQIVAYEGVGKGAMAFR

SEQ ID NO: 26928 - protein, 136 aa, unidentified; identical to SEQ ID NO: 21163
  source 1..136: note = Vibrionimonas magnilacihabitans
  REGION 1..136: note = tr|A0A2S8SIC7|A0A2S8SIC7_9BACT 6-pyruvoyltetrahydropterin/6-carboxytetrahydropterin synthase OS=Vibrionimonas magnilacihabitans OX=669455; GN = CLV53_10629 PE=4 SV=1

SEQ ID NO: 26929 - protein, 137 aa, unidentified; identical to SEQ ID NO: 21164
  source 1..137: note = Vibrionimonas magnilacihabitans
  REGION 1..137: note = tr|A0A2S8SIN6|A0A2S8SIN6_9BACT 6-pyruvoyltetrahydropterin/6-carboxytetrahydropterin synthase OS=Vibrionimonas magnilacihabitans OX=669455; GN = CLV53_10628 PE=4 SV=1

SEQ ID NO: 26930 - protein, 146 aa, unidentified
  source 1..146: note = Vicingus serpentipes
  REGION 1..146: note = tr|A0A5C6RU74|A0A5C6RU74_9FLAO 6-carboxytetrahydropterin synthase OS=Vicingus serpentipes; OX = 1926625 GN=FRY74_04190 PE=4 SV=1
MSVIRITKEFDFEMAHALLGYDGPCKNIHGHSYKLKVSVKGDVKTGSSDSDEGMVVDFGIIKKIVKDLVVDVYDHALVLNEKMEINVSQFEFMNKLIRVPFQPTCENLLIYYADLIKKELPENLSLTYLFLRETPTSYAEWFESDN

SEQ ID NO: 26931 - protein, 136 aa, unidentified
  source 1..136: note = Vicingus serpentipes
  REGION 1..136: note = tr|A0A5C6RYQ1|A0A5C6RYQ1_9FLAO 6-carboxy-5,6,7,8-tetrahydropterin synthase OS=Vicingus serpentipes OX=1926625 GN=FRY74_02610 PE=3 SV=1
MKTAIYRLEHFSASHRLHNPRWDDKKNKEVFGKCNNPNYHGHNYELEVCVIGDCDEDTGYVIDTKILSTIIKDEVLDKLDHNNLNLDVEEFKNLNPTTENVARVIYEILRKKIDTNLELKIKLYETRKNYVEYPIY

SEQ ID NO: 26932 - protein, 187 aa, unidentified
  source 1..187: note = Victivallales bacterium
  REGION 1..187: note = tr|A0A2S0KSZ5|A0A2S0KSZ5_9BACT Rubredoxin; OS = Victivallales bacterium CCUG 44730 OX=2094242; GN = C5Q97_05310 PE=4 SV=1
MRSITKFELQYAHRFYKFQGEAQYLHGHTGVLTIEVEDAIEPGVNMVYPCNEIQKVAWNVLKNFDHALVLREDDPLLPAILDVYEKQGIRNGAPANKMKGEAFRTGLATAYPDCRLVVTKETMTVEGMIKIVYDLLKDKLNIAKITFTSGVNAATQEYAPGKTIDRCPLCGVALIDGVCPKCGYRKH

SEQ ID NO: 26933 - protein, 123 aa, unidentified
  source 1..123: note = Victivallales bacterium
  REGION 1..123: note = tr|A0A2S0KU25|A0A2S0KU25_9BACT 6-carboxy-5,6,7,8-tetrahydropterin synthase; OS = Victivallales bacterium CCUG 44730 OX=2094242 GN=queD; PE = 3 SV=1
MFEIEIDRTFSAAHQLRGYNGDCCKLHGHNYKVTVVVRSPEQDEIGIALDFKKLKSELDSLLAVYDHSNLSELPEFREINPTSENLAKTIYRKISEKMNGGAIRVHRVRIGESDHSAVTYFEE

SEQ ID NO: 26934 - protein, 187 aa, Victivallis vadensis
  REGION 1..187: note = tr|A0A2U1B065|A0A2U1B065_9BACT 6-pyruvoyltetrahydropterin/6-carboxytetrahydropterin synthase OS=Victivallis vadensis OX=172901 GN=C8D82_11277; PE = 4 SV=1
MRSITKIELQYAHRFYKFQGEAQYLHGHTGVLTIEVEDTVDPGVNMVFPCNEIQKVAWDVLKNFDHALVLREDDPLLPAILDVYDKQGIRNGSPNNKMKGAAFKTELATAYPDCRLVVTKETMTVEGMIKIVYDLLKDKLNIARLTFTSGVNAATQEYAPDKTVDRCPLCGVALVNGVCPKCGYRKH

SEQ ID NO: 26935 - protein, 123 aa, Victivallis vadensis
  REGION 1..123: note = tr|A0A2U1B4J4|A0A2U1B4J4_9BACT 6-carboxy-5,6,7,8-tetrahydropterin synthase OS=Victivallis vadensis OX=172901 GN=C8D82_108120 PE=3 SV=1
MFEIEIDRSFSAAHQLRGYNGDCCKLHGHNYKITVTVRSSELDEIGIALDFKKLKAELDALLAEYDHSNLSELADFQAVNPTSENLARTIYRKISEKMNSGTIRVHRVRVGESDHSAVTYFED

SEQ ID NO: 26936 - protein, 144 aa, unidentified
  source 1..144: note = Virgibacillus massiliensis
  REGION 1..144: note = tr|A0A024QE52|A0A024QE52_9BACI 6-carboxy-5,6,7,8-tetrahydropterin synthase; OS = Virgibacillus massiliensis OX=1462526 GN=queD PE=3 SV=1
MIQQIYPFINHNYTYEINKDFHFAAAHYIPHQDTGKCQSMHGHTYFTNITIVGEELNHTGFLVDFKQIKNLIHKRFDHVVMNQDVAFSDHNPNAFPTTEIVARTIYELVQEYLDTLSHSPRCMQVYLRETPSSYCVYRPKKGDR

SEQ ID NO: 26937 - protein, 144 aa, Virgibacillus necropolis
  REGION 1..144: note = tr|A0A221MA78|A0A221MA78_9BACI 6-carboxy-5,6,7,8-tetrahydropterin synthase; OS = Virgibacillus necropolis OX=163877 GN=CFK40_05535 PE=3; SV = 1
MMQQIYPAATHDYSFEINKDFHFAAAHYIAHADAGKCKQTHGHTYFANITIVGDELGSTGFLVNFKTVKELIERRFDHGVLNEDPAFSNKQSEFFPTTEVIARTIYEIIQDHLNTLQNKPLCLQVYLRETPTSYCVYRPRKVDK

SEQ ID NO: 26938 - protein, 145 aa, unidentified
  source 1..145: note = Virgibacillus phasianinus
  REGION 1..145: note = tr|A0A220U370|A0A220U370_9BACI 6-carboxy-5,6,7,8-tetrahydropterin synthase; OS = Virgibacillus phasianinus OX=2017483 GN=queD PE=3 SV=1
MMQQIYPVTPHPYSFEINKDFHFAAAHYIAHDDAGKCKHTHGHTYFVNITIAGDELDHTGFLVDFKAVKNLIHKRFDHGLLNDDQAFSDDEPNYFPTTEVIARTIYEVVQAHLNTLANQPACIQVYLRETPTSYCVYRPGKGDKE

SEQ ID NO: 26939 - protein, 145 aa, Virgibacillus soli; identical to SEQ ID NO: 17852
  REGION 1..145: note = tr|A0A0Q9XYS6|A0A0Q9XYS6_9BACI 6-carboxy-5,6,7,8-tetrahydropterin synthase; OS = Virgibacillus soli OX=480284 GN=ACA30_13885 PE=3 SV=1

SEQ ID NO: 26940 - protein, 145 aa, Virgibacillus sp.
  REGION 1..145: note = tr|A0A268I0E4|A0A268I0E4_9BACI 6-carboxy-5,6,7,8-tetrahydropterin synthase; OS = Virgibacillus sp. 7505 OX=2022548 GN=queD PE=3 SV=1
MIQQIYPQVQHDYSYELNKDLHFAAAHSIQHPDAGKCQQVHGHTYFANVTIAGNELDDSGFLFNFSTIKALIHKKFDHTLLNDHTDVFGKDDFPTTEVMARKIYELIQQELDQLPHQPKCLQVFLRETPTSYCVYRPKRGTENGK

SEQ ID NO: 26941 - protein, 149 aa, unidentified
  source 1..149: note = Vitellibacter aquimaris
  REGION 1..149: note = tr|A0A137RKP4|A0A137RKP4_9FLAO 6-carboxy-5,6,7,8-tetrahydropterin synthase; OS = Vitellibacter aquimaris OX=1548749 GN=LS48_05060 PE=3; SV = 1
MRQIRITKIFSFETGHALYGYDGKCRNVHGHSYKLSVTVIGTPISDNDNVKFGMVIDFGDLKKIVKEEIVDVFDHATVFNKNTPHVELAKELSDRGHSVLLVDYQPTSEMMVIDFSEKIKKRLPKNIMLHSLRLQETDSSYAEWFAGDN

SEQ ID NO: 26942 - protein, 136 aa, unidentified
  source 1..136: note = Vitellibacter aquimaris
  REGION 1..136: note = tr|A0A137REE8|A0A137REE8_9FLAO 6-carboxy-5,6,7,8-tetrahydropterin synthase; OS = Vitellibacter aquimaris OX=1548749 GN=LS48_14440 PE=3; SV = 1
MSLTVYRKAHFNAAHRLFKKEWNDAKNLQVFGKCSNPNYHGHNYELEVGVSGEIDPETGFLIDLKILSDIIKEEVEDSFDHKNLNIEVPEFKNLNPTVENIAVVIWNKIRNRIDSNYGISVKLYETPRNFVFYNGN

SEQ ID NO: 26943 - protein, 120 aa, unidentified
  source 1..120: note = Vitiosangium sp.
  REGION 1..120: note = tr|A0A2T4VVS7|A0A2T4VVS7_9DELT 6-carboxy-5,6,7,8-tetrahydropterin synthase; OS = Vitiosangium sp. GDMCC 1.1324 OX=2138576 GN=queD PE=3; SV = 1
MEIFKEFTFEAAHRLPNVPPGHKCARLHGHSYRVTLHVEGSVGADSGWVMDFSEITEAFKPLQAQLDHYYLNEIEGLSNPTSENLARWIWQRVRPRLPQLTQVMVRETCTSGCIYRGEAD

SEQ ID NO: 26944 - protein, 165 aa, unidentified
  source 1..165: note = Vitiosangium sp.
  REGION 1..165: note = tr|A0A2T4VM17|A0A2T4VM17_9DELT Folate biosynthesis protein OS=Vitiosangium sp. GDMCC 1.1324 OX=2138576; GN = DAT35_18745 PE=4 SV=1
MARTTTIELHKEEMKFSAGHFTIFSATHRENLHGHNFTVYVALTGEVADNGMLADYGPLKKAVIERCRSWNEHFLLPGLSPHLKIERDARGDVLARFHDEELRFLARDVLVLPVENVTLEELARVFGEELVGEGLALRADRIKHVVVKCASGPGQWSSWEWRADG

SEQ ID NO: 26945 - protein, 126 aa, Vitreoscilla filiformis
  REGION 1..126: note = tr|A0A221KI25|A0A221KI25_VITFI 6-carboxy-5,6,7,8-tetrahydropterin synthase; OS = Vitreoscilla filiformis OX=63 GN=VITFI_CDS2792 PE=3 SV=1
MKAARMKYELSQTFFFEAAHTLRRQVEVEPSLRIHGHTYVAEVCVGGTPDPVSGMVVDLALLRRSIAALRETLDHRFLDHVEGLGPATLENLSTYIWHAMAREYPTQLQWVEVRREVSGDRCRIQR

SEQ ID NO: 26946 - protein, 336 aa, Vogesella indigofera
  REGION 1..336: note = tr|A0A495B1G2|A0A495B1G2_VOGIN 6-pyruvoyltetrahydropterin/6-carboxytetrahydropterin synthase OS=Vogesella indigofera OX=45465 GN=C8E02_3037; PE = 4 SV=1
MNSSHILAGASFEAARNLAGIGEHGHSFRVLARADAHPGSEAVLHADLAAAVAPFHYAHVNATLADGSDLSIARYLASQCGQAVSLQLASAADRGVLLAEDGSEYVYVDTRFEAAHQLPHVAPGHKCGRLHGHGFGVRIVADASRSSLNDILLKAWPPLFARLNHKYLNDIAGLDNPTSEVMAAWLYRELAANLAGLAWVEVRETHTAGSQFDGQTYRIWKEQHFESAVPFDAAGNYTGHSYLIRLMLQGSVDRVMGWVLDFGDVKDRFKPVYRQLDHNPLDKLPGIRAADAASVAEWVHGELKPLVPELARIDLMETPQRGVSLTFRGDMQWPLL

SEQ ID NO: 26947 - protein, 338 aa, Vogesella sp.
  REGION 1..338: note = tr|A0A1C6MHL6|A0A1C6MHL6_9NEIS 6-pyruvoyltetrahydropterin/6-carboxytetrahydropterin synthase OS=Vogesella sp. LIG4 OX=1192162; GN = PSELUDRAFT_1984 PE=4 SV=1
MNSHNQLAAAGFEAARTLPGVGEHGHSFRVLARANAVPGQLTLAAELQRAAAALDYSHLNHKLEHCSDLALAQHLAAQCSLPVDLHLASAPDRGVLLGENGDAYVYLDTRFEAAHHLPHVPPGHKCGRLHGHGFGVRIVAAADKAGVNDILLKAWPPLFARLNHRYLNDIPGLGNPTSEVLAAWLYHELQPALAGLAWVEVRETHTAGSQFDGQNFRIWKEQHFESAVPFNDEGMYTGHSYLIRLMLQGKLDQVMGWVLDFGDVKERFKPIYRQLDHNPLDKLPDIQGHDAASVAEWVHGQLKGRVPELARIDLMSTPQHGASLTWHGDMRWPLLFGH

SEQ ID NO: 26948 - protein, 336 aa, Vogesella sp.
  REGION 1..336: note = tr|A0A0J5GIC5|A0A0J5GIC5_9NEIS 6-pyruvoyl tetrahydrobiopterin synthase OS=Vogesella sp. EB; OX = 1526735 GN=ACG97_04565 PE=4 SV=1
MNSSHILAGASFEAARNLAGIGEHGHSFRVLARADAHPGSEAALHAELAAAVAPFHYAHVNATLADGSDLSIARYLASQCGQAVSLQLASAADRGVLLAEDGSEYIYVDTRFEAAHQLPHVAPGHKCGRLHGHGFGVRIVADASRSSLNDILLKAWPPLFARLNHKYLNDIAGLDNPTSEVMAAWLYRELAANLAGLAWVEVRETHTAGSQFDGQTYRIWKEQHFESAVPFDAAGNYTGHSYLIRLLLQGSVDRVMGWVLDFGDVKDRFKPVYRQLDHNPLDKLPGIRAADAASVAEWVHGELKPLVPELARIDLMETPQRGVSLTFRGDMQWPLL

SEQ ID NO: 26949 - protein, 142 aa, Volucribacter psittacicida
  REGION 1..142: note = tr|A0A4R1FTH9|A0A4R1FTH9_9PAST 6-carboxy-5,6,7,8-tetrahydropterin synthase; OS = Volucribacter psittacicida OX=203482 GN=EV694_0976 PE=3; SV = 1
MAFKISKEFSFDMAHLLDGHDGKCQNLHGHTYKLQVEVSQPLQQTGAKKGMVMDFSDIKSIVKRAILDPLDHAFIYDQHSERESQIAQLLNQLNSKTFAFPTRTTAEEMARFIFNRLKYEENLPVSAIRLWETPTSFCEYQE

SEQ ID NO: 26950 - protein, 142 aa, Vulcanibacillus modesticaldus
  REGION 1..142: note = tr|A0A1D2YW91|A0A1D2YW91_9BACI 6-carboxy-5,6,7,8-tetrahydropterin synthase; OS = Vulcanibacillus modesticaldus OX=337097 GN=BHF71_07350; PE = 3 SV=1
MYVLKAEHSFDSAHFLANYDGKCGNIHGHRWRVVIEVQSETLIEEGQLDGMVIDFGDLKRDIKELVDYYDHAFIIQEGTLRKETLQNLLDEGFRIIELGFRPTAENFAKFFFTSMEKKGYNVKRATVYETPSNCAIYEKDGV

SEQ ID NO: 26951 - protein, 118 aa, unidentified
  source 1..118: note = Vulcaniibacterium tengchongense
  REGION 1..118: note = tr|A0A3N4VRY4|A0A3N4VRY4_9GAMM 6-carboxy-5,6,7,8-tetrahydropterin synthase; OS = Vulcaniibacterium tengchongense OX=1273429; GN = EDC50_2711 PE=3 SV=1
MKIFKAFTIEAAHRLPNVPEGHKCARLHGHSFRIELHVEGELDPRLGWVMDFADLKAAFQPLYERLDHHYLNEIEGLENPTSERLAQWIWQRLKPSLPLLAEVVVHETCTSGCRYRGD

SEQ ID NO: 26952 - protein, 122 aa, unidentified
  source 1..122: note = Vulgatibacter incomptus
  REGION 1..122: note = tr|A0A0K1PBT3|A0A0K1PBT3_9DELT 6-carboxy-5,6,7,8-tetrahydropterin synthase; OS = Vulgatibacter incomptus OX=1391653 GN=AKJ08_1372 PE=3; SV = 1
MPKVELRVEFLFSAAHRLPFHKGVCFRMHGHNYKLLVTVEREVDPATGMVMDFEDLRLQVWEHALDRCDHHTLNDFLENPTAENIVVWMWGELAPKIPGLKEIVLFETPEYSVVYRGAGHGS

SEQ ID NO: 26953 - protein, 176 aa, Waddlia chondrophila
  REGION 1..176: note = tr|D6YVR6|D6YVR6_WADCW Putative 6-pyruvoyl tetrahydrobiopterin synthase OS=Waddlia chondrophila (strain ATCC VR-1470 / WSU 86-1044) OX=716544 GN=ptpS PE=4; SV = 1
MSAILEKCFGVATEAPPNFMINVLTTDSCAWNDNLSCVILSYLFRINFKSSNLFTIIKTFRFEAGHQLAHHDGACKHPHGHSYVLEIQVKSGTLIDDGPKKNMVIDFHHISDIVKPMINTYFDHKWLNDTLETDSPTSEFIARWIYRHLDRQIPGLHAIGLSETATSKVIYTETDS

SEQ ID NO: 26954 - protein, 121 aa, unidentified
  source 1..121: note = Waddliaceae bacterium
  REGION 1..121: note = tr|A0A2E3LWX9|A0A2E3LWX9_9BACT 6-carboxy-5,6,7,8-tetrahydropterin synthase OS=Waddliaceae bacterium OX=2026802 GN=queD PE=3 SV=1
MYELEKTFTFEAGHVLTHHDGKCSRPHGHSYGLTVTLRGNNLHKNGPKTNMLIDFSDVSSIVKQMIKDYLDHHWLNDTLKTDSPTAEFIAKWIFDFLNPLLDDLHCITLEETATSRVRYFG

SEQ ID NO: 26955 - protein, 152 aa, Weeksella virosa
  REGION 1..152: note = tr|F0P1Y8|F0P1Y8_WEEVC Uncharacterized protein; OS = Weeksella virosa (strain ATCC 43766 / DSM 16922 / JCM 21250 / NBRC 16016 / NCTC 11634 / CL345/78) OX=865938; GN = Weev i_0989 PE=4 SV=1
MKIIRLSKAFTFETAHALYGYDGKCKNIHGHSYKLYVTLKGQPSEKEGDVKLGMVMDFGDLKKIVNKAVVDIFDHAILLNENSPHKSLGDQLLAEGHKVIFTAYQPSCENMILWIVDQLKPLLPSHTELVALKLYETENSYCEWLASDNQSE

SEQ ID NO: 26956 - protein, 136 aa, Weeksella virosa
  REGION 1..136: note = tr|F0NZC1|F0NZC1_WEEVC 6-carboxy-5,6,7,8-tetrahydropterin synthase OS=Weeksella virosa (strain ATCC 43766 / DSM 16922 / JCM 21250 / NBRC 16016 / NCTC 11634 / CL345/7 8) OX=865938 GN=Weevi_0531; PE = 3 SV=1
MKVTVNRKAHFNAAHRLYNPKWTDEKNREIFGKCSNPNYHGHNYELIVSVRGDIDPDTGFVMNLDDLRKIIEVEVEDYLDHKNLNLDIVDFQNLNPTAENIVIIIYNRIRAKLENHLDLKVTLFETPRNFVEYSGD

SEQ ID NO: 26957 - protein, 317 aa, Weissella cibaria
  REGION 1..317: note = tr|A0A2S1KQV0|A0A2S1KQV0_9LACT Uncharacterized protein OS=Weissella cibaria OX=137591 GN=B6254_0896 PE=4; SV = 1
METLIYEFIGDHMIAKLLCLPSIIGAIFIVQFGLQRRFMNSQTMYLVTYTLNFVAWLVIAKIVFNDFFQDVVVINPYVNDGSLILIIMFYFVMIDTQRYTIIPITISTLLFDAVLLVSSHFNVRIGLLVIGTIIFLGVRYYLSKNRHRIIVTFVEYELATFVFSAAAWLIVLAVRRDMPHSFAIAFVLKFMILMTIVHYGIVFVRELVTRSNDYEIEVNTDPLTNMKNRRLLGKVLNEVVPFTDYEKKIGTFLAQYDGQVLNDVPPFDQINPTVENFATEIFQRLRVHPELIGAHVMLEKLEVSEGPTRSYILMNID

SEQ ID NO: 26958 - protein, 122 aa, Weissella cibaria
  REGION 1..122: note = tr|A0A1X4JNA8|A0A1X4JNA8_9LACT 6-pyruvoyl tetrahydropterin synthase OS=Weissella cibaria OX=137591; GN = B9D04_01990 PE=4 SV=1
MEARYRLKFYINAYHFIRWQGHDGAVHPHTWEIVSDFSCLTDEEVPFTDYEKKIGTFLAQYDGQVLNDVPPFDQINPTVENFATEIFQRLRVHPELIGAHVMLEKLEVSEGPTRSYILMNID

SEQ ID NO: 26959 - protein, 122 aa, Weissella confusa
  REGION 1..122: note = tr|A0A4Z0RWL2|A0A4Z0RWL2_WEICO 6-pyruvoyl tetrahydropterin synthase OS=Weissella confusa OX=1583; GN = C6P11_05610 PE=4 SV=1
MEAHYRLKFYINAYHFIRWNGRDGETHPHTWEIVSDFACDMEEKVPFYEYETKINTFLSTYDGQVLNDIAPFDKINPSLENFATELFDRLQTHPELIGSAVKLEELAVSEGPTRTYVLTNRD

SEQ ID NO: 26960 - protein, 123 aa, Weissella koreensis
  REGION 1..123: note = tr|J0WBI0|J0WBI0_9LACT Uncharacterized protein; OS = Weissella koreensis KCTC 3621 OX=1123721; GN = JC2156_06650 PE=4 SV=1
MQTMYRLKFYINAYHAVEWNGKMGQLHPHTWEIISDFSTSSDANIQFNEYEKDIMDYLKRYEDSTLNEVKPFDKLNPTVENFAEVVFNDLRYHSKLIENKIILQKLEVSEGPTRTYIIVNDDI

SEQ ID NO: 26961 - protein, 123 aa, Weissella koreensis; identical to SEQ ID NO: 26960
  REGION 1..123: note = tr|F8I116|F8I116_WEIKK 6-pyruvoyl-tetrahydropterin synthase-like protein OS=Weissella koreensis (strain KACC 15510) OX=1045854 GN=WKK_01860 PE=4 SV=1

SEQ ID NO: 26962 - protein, 123 aa, Weissella sp.
  REGION 1..123: note = tr|A0A139RA54|A0A139RA54_9LACT 6-pyruvoyl-tetrahydropterin synthase related domain / membrane protein OS=Weissella sp. DD23 OX=1777865; GN = WEIDD23_00070 PE=4 SV=1
MIEARYRLKFYINAYHFIRWQGHDGAVHPHTWEIVSDFSCLTDEEVPFTDYEKKIGTFLAQYDGQVLNDVPPFDQINPTVENFATEIFQRLRVHPELIGAHVMLEKLEVSEGPTRSYILMNID

SEQ ID NO: 26963 - protein, 150 aa, unidentified
  source 1..150: note = Wenyingzhuangia fucanilytica
  REGION 1..150: note = tr|A0A1B1Y8H9|A0A1B1Y8H9_9FLAO 6-pyruvoyl tetrahydropterin synthase OS=Wenyingzhuangia fucanilytica; OX = 1790137 GN=AXE80_12695 PE=4 SV=1
MNRKIRITKKFDFETGHALHGYDGKCRNVHGHSYKLYVTVIGTPIQDPNHVKNGMVIDFTDLKEIVKSEVEDVFDHATVFNKNTPHVELAKELQDRGHNVILVDYQPTSEMMILDFAEKIKNRLPNHIQLHSLKLQETSSSFAEWYASDQ

SEQ ID NO: 26964 - protein, 136 aa, unidentified
  source 1..136: note = Wenyingzhuangia fucanilytica
  REGION 1..136: note = tr|A0A1B1Y571|A0A1B1Y571_9FLAO 6-carboxy-5,6,7,8-tetrahydropterin synthase; OS = Wenyingzhuangia fucanilytica OX=1790137 GN=AXE80_06365; PE = 3 SV=1
MEITVHRVAYFNAAHRLFRPDWDDAKNFEVFGKCSNPNYHGHNYELVVSVTGPIDQETGFVMDLKILKKLIKLEVEDTLDHKNLNLEIPEFKSTNPTAENISIYIWNKLRTHIPSHLKLAITLYETPRNYVTYSGK

SEQ ID NO: 26965 - protein, 136 aa, unidentified
  source 1..136: note = Wenyingzhuangia marina
  REGION 1..136: note = tr|A0A1M5U2T3|A0A1M5U2T3_9FLAO 6-carboxy-5,6,7,8-tetrahydropterin synthase; OS = Wenyingzhuangia marina OX=1195760 GN=SAMN05444281_0994; PE = 3 SV=1
MEITVHRVAYFNAAHRLFRADWDDAKNFEVFGKCSNPNYHGHNYELVVSVTGAIDPETGFVMDLKVLKRLIKTEVEDVLDHKNLNLEIAEFKTTNPTAENISIYIWNKLRIHIPNHLKLAITLYETPRNYVTYSGK

SEQ ID NO: 26966 - protein, 151 aa, unidentified
  source 1..151: note = Wenyingzhuangia marina
  REGION 1..151: note = tr|A0A1M5T547|A0A1M5T547_9FLAO 6-pyruvoyltetrahydropterin/6-carboxytetrahydropterin synthase OS=Wenyingzhuangia marina OX=1195760; GN = SAMN05444281_0684 PE=4 SV=1
MNRKIRITKKFDFETGHALHGYDGKCRNVHGHSYKLYVTVIGSPIQDPNHVKNGMVIDFTDLKEIVKSEVEDVFDHATVFNKNTPHVELAKELQERGHNVILVDYQPTSEMMILDFAEKIKKRLPNHIQLHSLKLQETSSSFAEWYASDQE

SEQ ID NO: 26967 - protein, 132 aa, unidentified
  source 1..132: note = Wenzhouxiangella marina
  REGION 1..132: note = tr|A0A0K0Y083|A0A0K0Y083_9GAMM 6-pyruvoyl tetrahydropterin synthase OS=Wenzhouxiangella marina; OX = 1579979 GN=WM2015_2942 PE=4 SV=1
MYTLTVRDHLMIAHSFTGEVFGPAQRLHGATYLVDARFHRGELDSDGLVVDIGLATTVLGEILAEFNYRNLDELEEFEGRNTTTEFMARVIADRLAEAIREGRLGPQAGGVDALHVELHESDRARASYERAL

SEQ ID NO: 26968 - protein, 118 aa, unidentified
  source 1..118: note = Wenzhouxiangella marina
  REGION 1..118: note = tr|A0A0K0XTI3|A0A0K0XTI3_9GAMM 6-carboxy-5,6,7,8-tetrahydropterin synthase; OS = Wenzhouxiangella marina OX=1579979 GN=WM2015_550 PE=3; SV = 1
MELFKIFTLESAHFLPRVPEGHKCRRMHGHSFRVEVHVSAPVDEDAGWVMDFADLKRAFQPIHDQLDHRLLNEVDGLENPTSENLARWIWQRLKPELPALSAILIQETCTSGCVYRGD

SEQ ID NO: 26969 - protein, 361 aa, unidentified
  source 1..361: note = Wenzhouxiangella sediminis
  REGION 1..361: note = tr|A0A3E1K9Z3|A0A3E1K9Z3_9GAMM 6-pyruvoyl tetrahydropterin synthase OS=Wenzhouxiangella sediminis; OX = 1792836 GN=DZC52_05680 PE=4 SV=1
MNAHSLFLTALRPFEAARRLAVADGERLHGHGFEARIFAAAASCPGDFPGDETRALGAILDEAVAPLDYALVNELIGAPDDARIAEWLLERAASAQPHAIVLRSAPDRGAVVEPGKHPLAWRRFRFESAHRLPSVPRGHKCGRMHGHGFEAVIHARVDAGQDAWRTQDRIAEAWQPVHEQIHFACLNDLPGLDNPTSEVLARWLWQNLTDVLPGLTGISVLETASAGCHYDGRTWRIWKAMSFDSAVRLARAPQGDPRRLLHGHTFTTRLHLAGGLDEVMGWVHDYGDVKQRFDPLFRELDHQPLHQKAGLEDNDPAAIARHIEARMAAELPGLSRIDVLEKPGHGALLLRGGSTRGLLVP

SEQ ID NO: 26970 - protein, 132 aa, unidentified
  source 1..132: note = Wenzhouxiangella sediminis
  REGION 1..132: note = tr|A0A3E1K682|A0A3E1K682_9GAMM 6-carboxytetrahydropterin synthase OS=Wenzhouxiangella sediminis OX=1792836 GN=DZC52_12845 PE=4 SV=1
MFSLTVRDHFMIAHSFTGEIFGPAQKLHGATYVVEASFMRPELDDDDLVVDIGLAGEVLGKILGEFNFRNLDELEQFEGRNTTTEFMARVVFDRLAEAIENGRLGPTGQGLTRLRVELHESHVARAAYEASI

SEQ ID NO: 26971 - protein, 362 aa, unidentified
  source 1..362: note = Wenzhouxiangella sp.
  REGION 1..362: note = tr|A0A372BVD0|A0A372BVD0_9GAMM 6-pyruvoyl tetrahydropterin synthase OS=Wenzhouxiangella sp. 15181; OX = 2301224 GN=DZK25_08015 PE=4 SV=1
MNPHSLFITALRPFEAARYLPSTGPEKSLHGHGFRARIVVPRSACRPRFPGIETQWLNDCLGKTTTVLDYSLLNDRIPEPCDASVAEWLLDRSGLSGTAGLALQSAPDRGAIVRPEGSRLAWQRFRLEAAHRLPNVPAGHKCGRMHGHGFEVVLFSALDPEADSRTAQRDIADAWDPLHRQLHLTCLNDLPGLENPTSEVLAQWIWQSITDVLPGLAGVTVMETDLAGCHFDGQGWRIWKSMSFDSAVRLTRAPEGDPRRMIHGHTFTTRLHLSGGLDEVMGWVYDYGDVKRRFDPVFRALDHRPLYENPQLTDNDAASIAAYIDAEMSADLPGLSRIDVLSTPGCGALLCRQPDDRGLLVP

SEQ ID NO: 26972 - protein, 132 aa, unidentified
  source 1..132: note = Wenzhouxiangella sp.
  REGION 1..132: note = tr|A0A372BVU1|A0A372BVU1_9GAMM 6-carboxytetrahydropterin synthase OS=Wenzhouxiangella sp. 15181 OX=2301224 GN=DZK25_07375 PE=4 SV=1
MYTLTVRDHFMIAHSFAGEIFGPAQRLHGATYVVDASFSRPELDDDDLVVDIGLAGKVLGEILAEFNHRNLDEIDEFSGRNTTTEFMARVVFDRLAGAISEGRLGSAADGLGYLKVELKESHQAWASFEGAL

SEQ ID NO: 26973 - protein, 290 aa, unidentified
  source 1..290: note = Westiellopsis prolifica
  REGION 1..290: note = tr|A0A4Q9JBE0|A0A4Q9JBE0_9CYAN 6-pyruvoyl tetrahydropterin synthase OS=Westiellopsis prolifica IICB1; OX = 1970206 GN=B4U84_06995 PE=4 SV=1
MQCVVNRRAQFSASHRYWLPELSEAENLEKFGVCSRFPGHGHNYVLFVSLIGELDKYGMVLNLSDVKHVIKQEVTSQLDFSYLNDVWAEFQQILPTTENIARVIWQKLAPHLPLVRVQLFENPELWADYMGNGMEAYLSVSTHFSAAHRLAHPDLSDQDNFEIYGKCARPNGHGHNYHLEVTVKGEIDPRTGMIVDLGALNQVIEDYVVEPFDHTFLNKDIPYFSEVVPTAENIALHISNLLRSPIEKLGAKLYKVKLIESPNNSCEIYCTDTESNSVNIAETQPVLARI

SEQ ID NO: 26974 - protein, 325 aa, unidentified
  source 1..325: note = Westiellopsis prolifica
  REGION 1..325: note = tr|A0A4Q9J214|A0A4Q9J214_9CYAN Uncharacterized protein OS=Westiellopsis prolifica IICB1 OX=1970206; GN = B4U84_26075 PE=4 SV=1
MLNEVSIFLSGVTVVDHAYIDNQGNIVGGSFNPGFLVTGKIDPVEKVVVDFSTIKKTIKGLLDERLTGFDHKLWILEGYSKCKKEFQEDRVSIQSASLQLNIPSNALKVFDANKYSIKEIELAFDQYLNQKLAVLYPGVKVKCFNTINSQQLIPSQYPVSYFTYCHGLKNSTSWGCQNNSHGHLSFISLLGEQTDKQQVGSTELFTLQKEIAKELDRTIFLWKDNLTLQKNDWVTIEYATEDRGYFLAEYCTKRNKLAFLNTETTVEFLANYVCYRWKNELNSTGATVVALSEGLSKGGYVDFRSQFKEECIIKDSFYLCSTGVQ

SEQ ID NO: 26975 - protein, 150 aa, unidentified
  source 1..150: note = Williamwhitmania taraxaci
  REGION 1..150: note = tr|A0A1G6GZY1|A0A1G6GZY1_9BACT 6-pyruvoyltetrahydropterin/6-carboxytetrahydropterin synthase OS=Williamwhitmania taraxaci OX=1640674; GN = SAMN05216323_100574 PE=4 SV=1
MALIRLTKEFNFEMAHYLSGYDGACKNIHGHSYRLFVTVIGEPISEEKHSKLGMVMDFGQLKELVHRRIISKLDHALLIHDTPESKELQPLLTKNFEKVEIVAYQPTCENLLIHFAAVIKAELPSNIRLHHLRLNETITSFAEWYDEDNK

SEQ ID NO: 26976 - protein, 139 aa, unidentified
  source 1..139: note = Williamwhitmania taraxaci
  REGION 1..139: note = tr|A0A1G6HPI0|A0A1G6HPI0_9BACT 6-pyruvoyltetrahydropterin/6-carboxytetrahydropterin synthase OS=Williamwhitmania taraxaci OX=1640674; GN = SAMN05216323_101250 PE=4 SV=1
MAEVLITRRERFNAAHRLFRPELSNDENYNVYGKCSNPNWHGHNYILFVTVKAQVNQKVGFAMNLKDLSTILKTEIIEKIDHKNMNLEVDFMRGKIASTENLTIAIWEVIAPLIEEKGATLHCVRVEETENNSAEYYGN

SEQ ID NO: 26977 - protein, 150 aa, Winogradskyella arenosi
  REGION 1..150: note = tr|A0A368ZIQ6|A0A368ZIQ6_9FLAO 6-pyruvoyltetrahydropterin/6-carboxytetrahydropterin synthase OS=Winogradskyella arenosi OX=533325; GN = DFQ08_101470 PE=4 SV=1
MSKIRITKQFSFETGHALYGYDGKCKNVHGHSYRLYVTVIGSPISDSSNVKYGMVIDFGDLKKIVKEDIVDVFDHATVFNKNTPHVELAKELADRDHNVLLVDYQPTSEMMVIDFADKIKKRLPDDIKLHSLRLSETASSYAEWFASDNE

SEQ ID NO: 26978 - protein, 136 aa, Winogradskyella arenosi
  REGION 1..136: note = tr|A0A368ZEC2|A0A368ZEC2_9FLAO 6-pyruvoyltetrahydropterin/6-carboxytetrahydropterin synthase OS=Winogradskyella arenosi OX=533325; GN = DFQ08_103433 PE=4 SV=1
MQVTVHRKAHFNAAHRLYRKDWSAEKNQAVFGLCNNPNFHGHNYEMIASVTGEIDPETGYVIDIKTLKGLIKSEVEDAFDHKNLNLDVPEFQDLNPTAENIVVVIYNKLKAKLNAKFQLEITLYETPRNFVTYSGN

SEQ ID NO: 26979 - protein, 136 aa, unidentified
  source 1..136: note = Winogradskyella aurantia
  REGION 1..136: note = tr|A0A265UQC0|A0A265UQC0_9FLAO 6-carboxy-5,6,7,8-tetrahydropterin synthase; OS = Winogradskyella aurantia OX=1915063 GN=CA834_11115 PE=3; SV = 1
MKVTVHRKAHFNAAHRLYRKDWSFEKNDTIFGKCNNPNFHGHNYELIASVTGEIDQETGYVIDVKILKDIIKAEVEDAFDHKNLNVEVPEFQDLNPTAENIAVVIYNKVKAKLDPKFHLEITLYETPRNFVTYSGD

SEQ ID NO: 26980 - protein, 150 aa, unidentified
  source 1..150: note = Winogradskyella aurantia
  REGION 1..150: note = tr|A0A265V027|A0A265V027_9FLAO 6-carboxytetrahydropterin synthase QueD OS=Winogradskyella aurantia OX=1915063 GN=CA834_02020 PE=4 SV=1
MSQIRITKQFSFETGHALYGYDGKCKNVHGHSYRLDVTVIGIPISDSTHVKFGMVIDFGDLKKIVKEEIVDVFDHATVFNKNTPHIELAKELENRGHNVLLVDYQPTSEMMVIDFAVKIKKRLPKNIKLHSLKLQETATSFAEWFASDNE

SEQ ID NO: 26981 - protein, 136 aa, Winogradskyella epiphytica
  REGION 1..136: note = tr|A0A2V4XC70|A0A2V4XC70_9FLAO 6-carboxy-5,6,7,8-tetrahydropterin synthase; OS = Winogradskyella epiphytica OX=262005 GN=DFQ11_10746; PE = 3 SV=1
MKVTVHRKAHFNAAHRLHRKDWSAEKNEAVFGLCNNPNYHGHNYELIASVTGEIDPETGYVIDIKTLKDLIKLEVEDAFDHKNLNLEVPEFENLNPTAENIAVIIYNKLKPKLKPEFQLEITLYETPRNFVTYSGD

SEQ ID NO: 26982 - protein, 150 aa, Winogradskyella epiphytica
  REGION 1..150: note = tr|A0A2V4XBG1|A0A2V4XBG1_9FLAO 6-pyruvoyltetrahydropterin/6-carboxytetrahydropterin synthase OS=Winogradskyella epiphytica OX=262005; GN = DFQ11_101819 PE=4 SV=1
MNKIRITKQFSFETGHALYGYDGKCKNVHGHSYSLFVTVIGTPISDNTNVKFGMVIDFGDLKKIVKEEIVDVFDHATVFNKNTPHVELAKELQQRDHNVLLVDYQPTSEMMVIDFAEKIKERLPKTIKLHSLKLQETTSSFAEWYASDNE

SEQ ID NO: 26983 - protein, 136 aa, Winogradskyella eximia
  REGION 1..136: note = tr|A0A3D9GZX1|A0A3D9GZX1_9FLAO 6-carboxy-5,6,7,8-tetrahydropterin synthase; OS = Winogradskyella eximia OX=262006 GN=DFQ10_108221 PE=3; SV = 1
MKVTVHRKAHFNAAHRLYRKDWSFEKNDAVFGLCNNPNFHGHNYELIASVTGEIDPETGYVIDVKILKDIIKSEVEDAFDHKNLNVEVPEFKDLNPTAENIAVVIYNKIKPKLDPKFQLKITLYETPRNFVTYSGD

SEQ ID NO: 26984 - protein, 150 aa, Winogradskyella eximia
  REGION 1..150: note = tr|A0A3D9H9V6|A0A3D9H9V6_9FLAO 6-pyruvoyltetrahydropterin/6-carboxytetrahydropterin synthase OS=Winogradskyella eximia OX=262006; GN = DFQ10_10127 PE=4 SV=1
MSKIRITKQFSFETGHALYGYDGKCKNVHGHSYHLFVTVIGTPIADSNHVKFGMVIDFGDLKKIVKEEIVDVFDHATVFNKNTPHVELARELEARDHNVLLVDYQPTSEMMVIDFAEKIKQRLPETIKLHSLRLSETTSSFAEWYASDND

SEQ ID NO: 26985 - protein, 149 aa, unidentified
  source 1..149: note = Winogradskyella jejuensis
  REGION 1..149: note = tr|A0A1M5N6M8|A0A1M5N6M8_9FLAO 6-carboxy-5,6,7,8-tetrahydropterin synthase; OS = Winogradskyella jejuensis OX=1089305; GN = SAMN05444148_1100 PE=3 SV=1
MSNIRITKQFSFETGHALYGYDGKCKNVHGHSYRLDVTVIGTPISDNTNVKFGMVIDFGDLKKIVKAEIVDVFDHATVFNKNTPHVELAKELQDRGHNVLLVDYQPTSEMMVIDFAEKIKRHLPSNIKLHSLKLQETATSYAEWFASDN

SEQ ID NO: 26986 - protein, 136 aa, unidentified
  source 1..136: note = Winogradskyella jejuensis
  REGION 1..136: note = tr|A0A1M5K3F9|A0A1M5K3F9_9FLAO 6-carboxy-5,6,7,8-tetrahydropterin synthase; OS = Winogradskyella jejuensis OX=1089305; GN = SAMN05444148_0217 PE=3 SV=1
MRVTVSRRAHFNAAHRLYRKDWSFEKNDAVFGKCNNPNFHGHNYELIASVTGNIDPETGYVIDVKILKDLIKSEVEDAFDHKNLNVEVPEFQDLNPTAENIVVVIYNKLKAKLDAKFDLEVTLYETPRNFVKYSGE

SEQ ID NO: 26987 - protein, 136 aa, Winogradskyella pacifica
  REGION 1..136: note = tr|A0A3D9MYN6|A0A3D9MYN6_9FLAO 6-carboxy-5,6,7,8-tetrahydropterin synthase; OS = Winogradskyella pacifica OX=664642 GN=DFQ09_10496 PE=3; SV = 1
MRVTVHRKAHFNAAHRLYRKEWSFEKNDAVFGLCNNPNFHGHNYELIASVTGEIDPETGYVIDIKILKDIIKSEVEDAFDHKNLNVEVPEFKDLNPTAENIAVVIYNKIKPKLDPKFHLEITLYETPRNFVTYSGD

SEQ ID NO: 26988 - protein, 150 aa, Winogradskyella pacifica
  REGION 1..150: note = tr|A0A3D9N7A2|A0A3D9N7A2_9FLAO 6-pyruvoyltetrahydropterin/6-carboxytetrahydropterin synthase OS=Winogradskyella pacifica OX=664642; GN = DFQ09_101795 PE=4 SV=1
MSKIRITKQFSFETGHALYGYDGKCKNVHGHSYRLYVTVIGTPISDASNVKFGMVIDFGDLKKIVKEDIVDVFDHATVFNKNTPHVDLAKELQDRDHNVLLVDYQPTSEMMVIDFAEKIKQRLPDNIKLHSLRLSETASSFAEWFASDNE

SEQ ID NO: 26989 - protein, 136 aa, unidentified
  source 1..136: note = Winogradskyella psychrotolerans
  REGION 1..136: note = tr|S7VPT6|S7VPT6_9FLAO 6-carboxy-5,6,7,8-tetrahydropterin synthase; OS = Winogradskyella psychrotolerans RS-3 OX=641526; GN = ADIWIN_2845 PE=3 SV=1
MKVTVHRKAHFNAAHRLYRKDWTFEKNDAVFGLCNNPNFHGHNYELIASVTGEIDPETGYVIDIKTLKDIIKLEVEDAFDHKNLNVEVPEFKDLNPTAENIAVVIYNKIKPKLNAKFHLEITLYETPRNFVTYSGN

SEQ ID NO: 26990 - protein, 150 aa, unidentified
  source 1..150: note = Winogradskyella psychrotolerans
  REGION 1..150: note = tr|S7X8Q3|S7X8Q3_9FLAO Queuosine biosynthesis QueD, PTPS-I OS=Winogradskyella psychrotolerans RS-3 OX=641526; GN = ADIWIN_2593 PE=4 SV=1
MSKIRITKQFSFETGHALYGYDGKCKNVHGHSYRLYVTVIGTPISDASNVKYGMVIDFGDLKKIVKEDIVDVFDHATVFNKNTPHVDLAKELQARDHNVLLVDYQPTSEMMVIDFAEKIKQRLPDNIKLHSLRLSETASSFAEWFASDNE

SEQ ID NO: 26991 - protein, 136 aa, Winogradskyella sp.
  REGION 1..136: note = tr|A0A024FIC4|A0A024FIC4_9FLAO 6-pyruvoyl tetrahydrobiopterin synthase OS=Winogradskyella sp. PG-2; OX = 754409 GN=WPG_2456 PE=4 SV=1
MRVTVHRKAHFNAAHRLYRKDWSFEKNETVFGLCNNPNFHGHNYELIASVTGEIDPETGYVIDVKILKDIIKAEVEDAFDHKNLNIEVPEFYNLNPTAENIAVVIYNKVKAKLDSKFHLEITLYETPRNFVTYSGH

SEQ ID NO: 26992 - protein, 150 aa, Winogradskyella sp.
  REGION 1..150: note = tr|A0A520L953|A0A520L953_9FLAO 6-carboxytetrahydropterin synthase OS=Winogradskyella sp.; OX = 1883156 GN=EVB11_03715 PE=4 SV=1
MSNIRITKQFSFETGHALYGYDGKCKNVHGHSYRLDVTVIGVPISDTSNVKFGMVIDFGDLKKIVKAEIVDVFDHATVFNKNTPHVELAKELQDRGHNVLLVDYQPTSEMMVIDFAEKIKKHLPPDIQLHSLKLQETATSFAEWFASDND

SEQ ID NO: 26993 - protein, 150 aa, Winogradskyella thalassocola
  REGION 1..150: note = tr|A0A1G7X649|A0A1G7X649_9FLAO 6-pyruvoyltetrahydropterin/6-carboxytetrahydropterin synthase OS=Winogradskyella thalassocola OX=262004; GN = SAMN04489796_101612 PE=4 SV =1
MSKIRITKQFSFETGHALYGYDGKCKNVHGHSYHLFVTVIGIPISDSTNVKFGMVIDFGDLKKIVKEEIVDVFDHATVFNKNTPHVELARELEARDHNVLLVDYQPTSEMMVIDFAEKIKQRLPETIKLHSLRLSETTSSFAEWYASDNE

SEQ ID NO: 26994 - protein, 136 aa, Winogradskyella thalassocola
  REGION 1..136: note = tr|A0A1G8H1W6|A0A1G8H1W6_9FLAO 6-carboxy-5,6,7,8-tetrahydropterin synthase; OS = Winogradskyella thalassocola OX=262004; GN = SAMN04489796_106102 PE=3 SV=1
MRVTVHRKAHFNAAHRLYRKDWSFEKNDAVFGLCNNPNFHGHNYELVASVTGEIDPETGYVIDIKTLKDIIKSEVEDAFDHKNLNVEVPEFKDLNPTAENIAVVIYNKIKPKLNPNFHLEITLYETPRNFVTYSGN

SEQ ID NO: 26995 - protein, 136 aa, unidentified
  source 1..136: note = Winogradskyella wandonensis
  REGION 1..136: note = tr|A0A4R1KP20|A0A4R1KP20_9FLAO 6-carboxy-5,6,7,8-tetrahydropterin synthase; OS = Winogradskyella wandonensis OX=1442586 GN=DFQ05_2073; PE = 3 SV=1
MRVTVSRRAHFNAAHRLYRKDWSFEKNDAVFGKCNNPNFHGHNYELIASVTGNIDPETGYVIDVKILKDFIKSEVEDAFDHKNLNLEVPEFQDLNPTAENIVVVIYNKLKAKLDSKLDLEVTLYETPRNFVTYSGE

SEQ ID NO: 26996 - protein, 149 aa, unidentified
  source 1..149: note = Winogradskyella wandonensis
  REGION 1..149: note = tr|A0A4R1KS83|A0A4R1KS83_9FLAO 6-carboxy-5,6,7,8-tetrahydropterin synthase; OS = Winogradskyella wandonensis OX=1442586 GN=DFQ05_1699; PE = 3 SV=1
MSNIRITKQFSFETGHALYGYDGKCKNVHGHSYRLDVTVIGTPISDNTNVKFGMVIDFGDLKKIVKAEIVDVFDHATVFNKNTPHVELAKELADRGHNVLLVDYQPTSEMMVIDFAEKIKKHLPENIKLHSLKLQETATSFAEWFASDN

SEQ ID NO: 26997 - protein, 136 aa, unidentified
  source 1..136: note = Woeseiaceae bacterium
  REGION 1..136: note = tr|A0A2D9M1Y5|A0A2D9M1Y5_9GAMM 6-pyruvoyl tetrahydrobiopterin synthase OS=Woeseiaceae bacterium; OX = 2026806 GN=CMP01_03005 PE=4 SV=1
  VARIANT 35: note = Xaa can be any naturally occurring amino acid
MYSVIKRIDFCYGHRLLDYEGICKHPHGHNAVAEXEIRTSALDKRSMVYDFGDVKRIVKGWIDQEIDHKMILREDDPLVEPLRQLGEPVFLVESNPTVERIARLIFEHVQNAGLPVVRVKVWETPTSSATYEPEPV

SEQ ID NO: 26998 - protein, 141 aa, Wohlfahrtiimonas chitiniclastica
  REGION 1..141: note = tr|L8XVR7|L8XVR7_9GAMM 6-carboxy-5,6,7,8-tetrahydropterin synthase; OS = Wohlfahrtiimonas chitiniclastica SH04 OX=1261130; GN = F387_00706 PE=3 SV=1
MLQQFYPTVTHAFRYELNKDMHFAAAHFIPNESAGVCQRVHGHTYFANVTIAGDQLDECGFLVNFQTLKHLVHGEYDHTLLNDHTDFNSAPPSTEIVAERIWRRIQDHLNQLDNQPRCVQILVRETPTSYVRYLPRAEDFA

SEQ ID NO: 26999 - protein, 141 aa, Wohlfahrtiimonas chitiniclastica
  REGION 1..141: note = tr|A0A162VSQ6|A0A162VSQ6_9GAMM 6-carboxy-5,6,7,8-tetrahydropterin synthase; OS = Wohlfahrtiimonas chitiniclastica OX=400946 GN=BMY_1714; PE = 3 SV=1
MLQQFYPTVTHAFRYELNKDMHFAAAHFIPNESAGVCQRVHGHTYFANVTIAGDQLDECGFLVNFQTLKHLVHGEYDHTLLNDHADFNSAPPSTEIVAERIWRRIQDHLNQLDNQPRCVQILVRETPTSYVRYLPRAEDFA

SEQ ID NO: 27000 - protein, 141 aa, Wohlfahrtiimonas sp.
  REGION 1..141: note = tr|A0A256C5M3|A0A256C5M3_9GAMM 6-carboxy-5,6,7,8-tetrahydropterin synthase; OS = Wohlfahrtiimonas sp. G9077 OX=1980118 GN=B9T20_06810; PE = 3 SV=1
MLQQFYPTVTHVFRYELNKDMHFAAAHFIPNDSAGVCQRVHGHTYFANVTIAGDQLDACGFLVNFQTLKHLVHGEYDHTLLNDHADFNGAPPSTEIVAERIWRRIQDHLNQLDNQPRCVQVLVRETPTSYVRYLPRAEDFV

SEQ ID NO: 27001 - protein, 180 aa, Wolinella succinogenes
  REGION 1..180: note = tr|Q7MR56|Q7MR56_WOLSU Uncharacterized protein; OS = Wolinella succinogenes (strain ATCC 29543 / DSM 1740 / LMG 7466 / NCTC 11488 / FDC 602W) OX=273121 GN=WS1659 PE=1 S V=1
MIYQIAKEFDFCYGHRVWSQELNPDFSLDPCLSCRHLHGHQGKVIVHLESRELQRGMVTDFAHLNWFKRFIDEVLDHRFIIDIDDPLFPTLLPHFADKSALVWMEEGYARVDFERIKGESSPILELYESFVVVRFVPTSESIASWLLELLRSRIQPLGVKVSSVEFLETPKSRARVYNEA

SEQ ID NO: 27002 - protein, 129 aa, Xanthobacter autotrophicus
  REGION 1..129: note = tr|A7IK78|A7IK78_XANP2 6-carboxy-5,6,7,8-tetrahydropterin synthase; OS = Xanthobacter autotrophicus (strain ATCC BAA-1158 / Py2); OX = 78245 GN=Xaut_3191 PE=3 SV=1
MSSSATPVPRRARITQGFTFEAAHFLPHVPETHRCRRMHGHSYRVDLTLEGPVDAVTGFVVDFFDVEAAFGPVLKQLDHYCLNEVEGLENPTAEIIAAWIWDRVKPVLPLLSSVRVYETPFSFAEFDGD

SEQ ID NO: 27003 - protein, 159 aa, Xanthobacter autotrophicus
  REGION 1..159: note = tr|A7IHR5|A7IHR5_XANP2 Uncharacterized protein; OS = Xanthobacter autotrophicus (strain ATCC BAA-1158 / Py2); OX = 78245 GN=Xaut_2315 PE=4 SV=1
MPPPSGTRRNPPRELRMYAVEVREHIMIAHSFKGALFGPAQALHGATFVVDVAFYRRELTVEGVVVDIGRAHDALKAVLGPLNYKNLDELPDFAGRNTTTEVLCRHVFDKMAQAARAGELGAGSEALARIRVTLHESHVARAWFEADLAADDATLQLMS

SEQ ID NO: 27004 - protein, 117 aa, Xanthobacter tagetidis
  REGION 1..117: note = tr|A0A3L7ABK9|A0A3L7ABK9_9RHIZ 6-carboxy-5,6,7,8-tetrahydropterin synthase; OS = Xanthobacter tagetidis OX=60216 GN=queD PE=3 SV=1
MRITQGFTFEAAHFLPRVPQTHRCFRMHGHSYRVDLTLEGEVDTATGFVVDFFDVEAAFAPLLAQLDHHCLNDIEGLENPTAELIAVWIWERVRPRLPQLAQVRVYETPLSFADYSG

SEQ ID NO: 27005 - protein, 133 aa, Xanthobacter tagetidis
  REGION 1..133: note = tr|A0A3L7AQ25|A0A3L7AQ25_9RHIZ 6-carboxytetrahydropterin synthase OS=Xanthobacter tagetidis OX=60216 GN=D9R14_00600 PE=4 SV=1
MYSVEVRDHIMIAHSFKGDLFGPAQKLHGATFVVDVAFFRPDLTPEGVVVDIGRAHEALKAILGPLNYQNLDEVPDFAGRNTTTEVLCRHVFDRMAEAARTGALGTGGDGIARIKVTLHESHVARAAYEAALS

SEQ ID NO: 27006 - protein, 45 aa, unidentified
  source 1..45: note = Xanthomarina gelatinilytica
  REGION 1..45: note = tr|A0A3D6BR20|A0A3D6BR20_9FLAO 6-pyruvoyl tetrahydrobiopterin synthase (Fragment) OS=Xanthomarina gelatinilytica OX=1137281 GN=DHV22_08895 PE=4 SV=1
KDLNPTAENIVVVIYNKLKPKLEPKLKLEVTLFETPRNFVSYSGA

SEQ ID NO: 27007 - protein, 136 aa, unidentified
  source 1..136: note = Xanthomarina gelatinilytica
  REGION 1..136: note = tr|M7N5Y5|M7N5Y5_9FLAO 6-carboxy-5,6,7,8-tetrahydropterin synthase; OS = Xanthomarina gelatinilytica OX=1137281 GN=D778_01507; PE = 3 SV=1
MKVTVSRKAHFNAAHRLYRKDWSNDKNNAVFGKCNNPNYHGHNYELIVSVTGEIDKETGYVIDMKVLKELIREEVEDAFDHKNLNEDVEDFKDLNPTAENIVVVIYNKLKPKLEPKLKLEVTLFETPRNFVSYSGA

SEQ ID NO: 27008 - protein, 136 aa, unidentified; identical to SEQ ID NO: 27007
  source 1..136: note = Xanthomarina sp.
  REGION 1..136: note = tr|A0A2D8CZ35|A0A2D8CZ35_9FLAO 6-carboxy-5,6,7,8-tetrahydropterin synthase; OS = Xanthomarina sp. OX=1931211 GN=CMP04_10790 PE=3 SV=1

SEQ ID NO: 27009 - protein, 150 aa, unidentified
  source 1..150: note = Xanthomarina sp.
  REGION 1..150: note = tr|A0A2D8CVE6|A0A2D8CVE6_9FLAO 6-carboxytetrahydropterin synthase OS=Xanthomarina sp.; OX = 1931211 GN=CMP04_03950 PE=4 SV=1
MSSKIRITKQFTFETGHALYGYDGKCKNVHGHSYKLSVTVIGHPISDTNHVKYGMVIDFGDLKKIVKNEIVDVFDHATVFNKNTPHVELAKELEHRGHNVLLVDYQPTSEMMVIDFAEKIKSQLPSHIVLHSLKLQETETSFAEWYASDN

SEQ ID NO: 27010 - protein, 122 aa, unidentified
  source 1..122: note = Xanthomonadaceae bacterium
  REGION 1..122: note = tr|A0A2A3VH13|A0A2A3VH13_9GAMM 6-carboxy-5,6,7,8-tetrahydropterin synthase; OS = Xanthomonadaceae bacterium NML93-0792 OX=2032566; GN = queD PE=3 SV=1
MDIFKVFTLEAAHRLPNVPPGHKCARLHGHSFQVEVHVSGTPGAESGWIMDFGDLKAAFAPLYAQLDHHYLNDIPGLENPTSEMLAIWIWDRLAPTLPGLSAIVIRETCTSGCRYTGPSKSA

SEQ ID NO: 27011 - protein, 163 aa, unidentified
  source 1..163: note = Xanthomonadaceae bacterium
  REGION 1..163: note = tr|A0A1E4L9F9|A0A1E4L9F9_9GAMM Uncharacterized protein OS=Xanthomonadaceae bacterium SCN 69-48 OX=1660171; GN = ABS98_06030 PE=4 SV=1
MSAAVTIRLAKQNMKFSAAHFTIFSATERERLHGHNFTVEVDIDARMLGNGMCFDYGIYKDRVVALCRELNEWTILPTRSPYLRIEEGDGHVYAHFDGQRIPFLRGDVLLLPIENATLEEFAYWFLQRLCEDREALRAHAIAAIEVRVFSGPGQSAGRRMALD

SEQ ID NO: 27012 - protein, 119 aa, unidentified
  source 1..119: note = Xanthomonadales bacterium
  REGION 1..119: note = tr|A0A3N5JTL1|A0A3N5JTL1_9GAMM 6-carboxytetrahydropterin synthase QueD OS=Xanthomonadales bacterium OX=2006849 GN=queD PE=4 SV=1
MDVFRVFQVEAAHHLPNVPEGHKCARMHGHSFRIEIHVSGPVGAETGWVMDFADLRRAFQPLHDQLDHHCLNDIAGLENPTSENLARWIWPRLAPQLPGLSKVVVQETCNAGCVFTGPA

SEQ ID NO: 27013 - protein, 120 aa, unidentified
  source 1..120: note = Xanthomonadales bacterium
  REGION 1..120: note = tr|A0A1Q4F7F9|A0A1Q4F7F9_9GAMM 6-carboxy-5,6,7,8-tetrahydropterin synthase; OS = Xanthomonadales bacterium 63-13 OX=1895867; GN = BGP25_02755 PE=3 SV=1
MEIFKKFRIEAAHRLPSVPQGHKCSRLHGHSFEIEIHLRGAIEPTLGWVCDFADVKAAFAPLFDQLDHHYLNDVPGLENPTSENLAVWIWNALQPRLPLLARVVIHETCTSGCSYAGPQA

SEQ ID NO: 27014 - protein, 120 aa, Xanthomonas albilineans
  REGION 1..120: note = tr|D2UFN7|D2UFN7_XANAP 6-carboxy-5,6,7,8-tetrahydropterin synthase OS=Xanthomonas albilineans (strain GPE PC73 / CFBP 7063) OX=380358; GN = ptpS PE=3 SV=1
MDIFKVFTLEAAHRLPNVPPGHKCARLHGHSFRVELHVSGEPDPETGWLVDFGDIKAAFLPLYEQLDHHYLNDIEGLENPTSERLAVWIWERLKPVLPILSEVVVHETCTSGCRYRGPAA

SEQ ID NO: 27015 - protein, 117 aa, Xanthomonas alfalfae
  REGION 1..117: note = tr|A0A1S1XKN5|A0A1S1XKN5_9XANT 6-carboxy-5,6,7,8-tetrahydropterin synthase OS=Xanthomonas alfalfae OX=366650 GN=BHL63_18795 PE=3 SV=1
MDIFKVFTLEAAHRLPNVPPGHKCARLHGHSFRVELHVSGEPGAETGWIMDFGDIKAAFQPIYDRLDHHYLNDIEGLENPTSERLAIWIWQQLKPALPQLSEIVVHETCTSGCRYRG

SEQ ID NO: 27016 - protein, 117 aa, Xanthomonas arboricola
  REGION 1..117: note = tr|A0A2S6YXD2|A0A2S6YXD2_9XANT 6-carboxy-5,6,7,8-tetrahydropterin synthase OS=Xanthomonas arboricola OX=56448 GN=queD PE=3 SV=1
MDIFKVFTLEAAHRLPNVPPGHKCARLHGHSFRVELHVSGEPGAETGWIMDFGDIKAAFQPIYDRLDHHYLNDIEGLENPTSERLAIWIWDQLKPALPQLSEIVVHETCTSGCRYRG

SEQ ID NO: 27017 - protein, 117 aa, Xanthomonas arboricola
  REGION 1..117: note = tr|A0A2S6YCR6|A0A2S6YCR6_9XANT 6-carboxy-5,6,7,8-tetrahydropterin synthase OS=Xanthomonas arboricola OX=56448 GN=queD PE=3 SV=1
MDIFKVFTLEAAHRLPNVPPGHKCARLHGHSFRVELHVSGEPGAETGWIMDFGDIKAAFQPIYDRLDHHYLNDIEGLENPTSERLAIWIWNQLKPALPQLSEIVVHETCTSGCRYRG

SEQ ID NO: 27018 - protein, 117 aa, Xanthomonas axonopodis
  REGION 1..117: note = tr|A0A2S6YBV0|A0A2S6YBV0_9XANT 6-carboxy-5,6,7,8-tetrahydropterin synthase OS=Xanthomonas axonopodis pv. begoniae OX=473403 GN=queD PE=3 SV=1
MDIFKVFTLEAAHRLPNVPPGHKCARLHGHSFRVELHVSGEPGAETGWIMDFGDIKAAFQPIYDRLDHHYLNDIEGLENPTSERLAIWIWQQLKPVLPQLSEIVVHETCTSGCRYRG

SEQ ID NO: 27019 - protein, 117 aa, Xanthomonas axonopodis
  REGION 1..117: note = tr|A0A1T1P0S9|A0A1T1P0S9_9XANT 6-carboxy-5,6,7,8-tetrahydropterin synthase OS=Xanthomonas axonopodis pv. melhusii OX=487834 GN=Xmlh_02505 PE=3 SV=1
MDIFKVFTLEAAHRLPNVPPGHKCARLHGHSFRVELHVSGEPGAETGWIMDFGDIKAAFQPIYDRLDHHYLNEIEGLENPTSERLAIWIWQQLKPALPQLSEIVVHETCTSGCRYRG

SEQ ID NO: 27020 - protein, 117 aa, Xanthomonas bromi
  REGION 1..117: note = tr|A0A1C3NRQ9|A0A1C3NRQ9_9XANT 6-carboxy-5,6,7,8-tetrahydropterin synthase OS=Xanthomonas bromi OX=56449 GN=XBLMG947_3859 PE=3 SV=1
MDIFKVFTLEAAHRLPNVPPGHKCARLHGHSFRVELHVSGEPGAETGWIMDFGDIKAAFQPIYDRLDHHYLNDIEGLENPTSERLAIWIWQQLKPALPQLSEVVVHETCTSGCRYRG

SEQ ID NO: 27021 - protein, 117 aa, Xanthomonas campestris; identical to SEQ ID NO: 27015
  REGION 1..117: note = tr|Q3BP48|Q3BP48_XANC5 6-carboxy-5,6,7,8-tetrahydropterin synthase OS=Xanthomonas campestris pv. vesicatoria (strain 85-10) OX=316273; GN = ptpS PE=3 SV=1

SEQ ID NO: 27022 - protein, 117 aa, Xanthomonas campestris
  REGION 1..117: note = tr|A0A2S4JK57|A0A2S4JK57_XANCA 6-carboxy-5,6,7,8-tetrahydropterin synthase OS=Xanthomonas campestris OX=339 GN=TR80_15770 PE=3 SV=1
MDIFKVFTLEAAHRLPNVPPGHKCARLHGHSFRVELHVSGEPGAETGWIMDFGDIKAAFQPIYDRLDHHYLNDIEGLENPTSERLAIWIWQQLKPALPALSEIVVHETCTSGCRYRG

SEQ ID NO: 27023 - protein, 117 aa, unidentified; identical to SEQ ID NO: 27015
  source 1..117: note = Xanthomonas cannabis
  REGION 1..117: note = tr|A0A0B2CNV6|A0A0B2CNV6_9XANT 6-carboxy-5,6,7,8-tetrahydropterin synthase OS=Xanthomonas cannabis pv. cannabis OX=1885894 GN=OZ10_04915 PE=3 SV=1

SEQ ID NO: 27024 - protein, 117 aa, Xanthomonas citri; identical to SEQ ID NO: 27019
  REGION 1..117: note = tr|A0A2R2WR40|A0A2R2WR40_XANCI 6-carboxy-5,6,7,8-tetrahydropterin synthase OS=Xanthomonas citri pv. aurantifolii OX=76802 GN=TP45_07765 PE=3 SV=1

SEQ ID NO: 27025 - protein, 117 aa, Xanthomonas citri; identical to SEQ ID NO: 27019
  REGION 1..117: note = tr|A0A220WDI6|A0A220WDI6_XANCI 6-carboxy-5,6,7,8-tetrahydropterin synthase OS=Xanthomonas citri pv. vignicola OX=473426 GN=queD PE=3 SV=1

SEQ ID NO: 27026 - protein, 117 aa, Xanthomonas codiaei; identical to SEQ ID NO: 27017
  REGION 1..117: note = tr|A0A2S7CRR5|A0A2S7CRR5_9XANT 6-carboxy-5,6,7,8-tetrahydropterin synthase OS=Xanthomonas codiaei OX=56463 GN=queD PE=3 SV=1

SEQ ID NO: 27027 - protein, 117 aa, Xanthomonas cucurbitae
  REGION 1..117: note = tr|A0A2S7DVQ7|A0A2S7DVQ7_9XANT 6-carboxy-5,6,7,8-tetrahydropterin synthase OS=Xanthomonas cucurbitae OX=56453 GN=queD PE=3 SV=1
MDIFKVFTLEAAHRLPNVPPGHKCARLHGHSFRVELHVSGEPGADTGWIMDFGDIKAAFQPIYDRLDHHYLNDIEGLENPTSEQLAIWIWNQLKPALPQLSEIVVHETCTSGCRYRG

SEQ ID NO: 27028 - protein, 117 aa, Xanthomonas cynarae
  REGION 1..117: note = tr|A0A2S7BTB1|A0A2S7BTB1_9XANT 6-carboxy-5,6,7,8-tetrahydropterin synthase OS=Xanthomonas cynarae OX=109214 GN=queD PE=3 SV=1
MDIFKVFTLEAAHRLPNVPPGHKCARLHGHSFRIELHVSGEPGAETGWIMDFGDIKAAFQPIYDRLDHHYLNDIEGLENPTSERLAIWIWQQLKPALPQLSEIVVHETCTSGCRYRG

SEQ ID NO: 27029 - protein, 117 aa, Xanthomonas dyei
  REGION 1..117: note = tr|A0A2S7C6U8|A0A2S7C6U8_9XANT 6-carboxy-5,6,7,8-tetrahydropterin synthase OS=Xanthomonas dyei OX=743699 GN=queD PE=3 SV=1
MDIFKVFTLEAAHRLPNVPPGHKCARLHGHSFRVELHVSGEPGADTGWIMDFGDIKAAFQPIYDRLDHHYLNDIEGLENPTSERLAIWIWQQLKPALPQLSEIVVHETCTSGCRYRG

SEQ ID NO: 27030 - protein, 117 aa, Xanthomonas euvesicatoria; identical to SEQ ID NO: 27015
  REGION 1..117: note = tr|A0A2S7EF28|A0A2S7EF28_XANEU 6-carboxy-5,6,7,8-tetrahydropterin synthase OS=Xanthomonas euvesicatoria pv. citrumelonis OX=189396 GN=queD PE=3 SV=1

SEQ ID NO: 27031 - protein, 117 aa, unidentified; identical to SEQ ID NO: 27017
  source 1..117: note = Xanthomonas floridensis
  REGION 1..117: note = tr|A0A1A9M8C5|A0A1A9M8C5_9XANT 6-carboxy-5,6,7,8-tetrahydropterin synthase OS=Xanthomonas floridensis OX=1843580 GN=A7D17_05130 PE=3 SV=1

SEQ ID NO: 27032 - protein, 123 aa, Xanthomonas fragariae
  REGION 1..123: note = tr|A0A1Y6H6Z9|A0A1Y6H6Z9_9XANT 6-carboxy-5,6,7,8-tetrahydropterin synthase OS=Xanthomonas fragariae OX=48664 GN=PD5205_03238 PE=3 SV=1
MFAHHAMDIFKVFTLEAAHRLPNVPPDHKCARLHGHSFRVELHVSGEPGAETGWIMDFGDIKAAFRPIYDRLDHHYLNDIEGLENPTSERLAIWIWQQLKPALPSLSEIVVHETCTSGCRYRG

SEQ ID NO: 27033 - protein, 120 aa, Xanthomonas gardneri
  REGION 1..120: note = tr|F0C5J3|F0C5J3_9XANT 6-carboxy-5,6,7,8-tetrahydropterin synthase OS=Xanthomonas gardneri ATCC 19865 OX=925777 GN=XGA_2156 PE=3 SV=1
MARMDIFKVFTLEAAHRLPNVPPGHKCARLHGHSFRIELHVSGEPGAETGWIMDFGDIKAAFQPIYDRLDHHYLNDIEGLENPTSERLAIWIWQQLKPALPQLSEIVVHETCTSGCRYRG

SEQ ID NO: 27034 - protein, 117 aa, Xanthomonas gardneri; identical to SEQ ID NO: 27028
  REGION 1..117: note = tr|A0A0G8L9R6|A0A0G8L9R6_9XANT 6-carboxy-5,6,7,8-tetrahydropterin synthase OS=Xanthomonas gardneri OX=90270 GN=BI317_04005 PE=3 SV=1

SEQ ID NO: 27035 - protein, 117 aa, Xanthomonas hortorum; identical to SEQ ID NO: 27028
  REGION 1..117: note = tr|A0A248YGA4|A0A248YGA4_9XANT 6-carboxy-5,6,7,8-tetrahydropterin synthase OS=Xanthomonas hortorum OX=56454 GN=XJ27_12155 PE=3 SV=1

SEQ ID NO: 27036 - protein, 117 aa, Xanthomonas hortorum
  REGION 1..117: note = tr|A0A2S7E7M9|A0A2S7E7M9_9XANT 6-carboxy-5,6,7,8-tetrahydropterin synthase OS=Xanthomonas hortorum pv. hederae OX=453603 GN=queD PE=3 SV=1
MDIFKVFTLEAAHRLPNVPPGHKCARLHGHSFRIELHVSGEPGAETGWIMDFGDIKAAFKPIYDRLDHHYLNDIEGLENPTSERLAIWIWQQLKPALPQLSEIVVHETCTSGCRYRG

SEQ ID NO: 27037 - protein, 120 aa, unidentified
  source 1..120: note = Xanthomonas hyacinthi
  REGION 1..120: note = tr|A0A2S7F3S1|A0A2S7F3S1_9XANT 6-carboxy-5,6,7,8-tetrahydropterin synthase OS=Xanthomonas hyacinthi OX=56455 GN=queD PE=3 SV=1
MVIFKVFTLEAAHRLPNVPPGHKCARLHGHSFRVELHVSGEPGAQTGWVMDFGDIKAAFRPIYDQLDHHYLNDIEGLENPTSERLAVWIWERLKPALPPLSEIVVHETCTSGCRYRGPGA

SEQ ID NO: 27038 - protein, 117 aa, unidentified; identical to SEQ ID NO: 27015
  source 1..117: note = Xanthomonas manihotis
  REGION 1..117: note = tr|A0A0W7XHX6|A0A0W7XHX6_XANMN 6-carboxy-5,6,7,8-tetrahydropterin synthase OS=Xanthomonas manihotis OX=43353 GN=AO826_13635 PE=3 SV=1

SEQ ID NO: 27039 - protein, 117 aa, Xanthomonas melonis
  REGION 1..117: note = tr|A0A2S7DM70|A0A2S7DM70_9XANT 6-carboxy-5,6,7,8-tetrahydropterin synthase OS=Xanthomonas melonis OX=56456 GN=queD PE=3 SV=1
MDIFKVFTLEAAHRLPNVPPGHKCARLHGHSFRVELHVSGEPGAETGWIMDFGDIKAAFQPIYERLDHHYLNDIEGLENPTSERLAIWIWNQLKPALPQLSEIVVHETCTSGCRYRG

SEQ ID NO: 27040 - protein, 117 aa, unidentified; identical to SEQ ID NO: 27029
  source 1..117: note = Xanthomonas nasturtii
  REGION 1..117: note = tr|A0A3E1KL65|A0A3E1KL65_9XANT 6-carboxy-5,6,7,8-tetrahydropterin synthase OS=Xanthomonas nasturtii OX=1843581 GN=queD PE=3 SV=1

SEQ ID NO: 27041 - protein, 117 aa, Xanthomonas oryzae
  REGION 1..117: note = tr|A0A0U4W7E5|A0A0U4W7E5_XANOO 6-carboxy-5,6,7,8-tetrahydropterin synthase OS=Xanthomonas oryzae pv. oryzae OX=64187 GN=BCR61_03975 PE=3 SV=1
MDIFKVFTLEAAHRLPNVPPGHKCARLHGHSFRVELHVSGEPGAETGWIMDFGDIKAAFQPIYDRLDHHYLNDIEGLENPTSERLAIWIWQQLKPTLPQLSEIVVHETCTSGCRYRG

SEQ ID NO: 27042 - protein, 117 aa, Xanthomonas oryzae; identical to SEQ ID NO: 27015
  REGION 1..117: note = tr|A0A0C5UWA6|A0A0C5UWA6_9XANT 6-carboxy-5,6,7,8-tetrahydropterin synthase OS=Xanthomonas oryzae pv. oryzicola OX=129394 GN=BE73_04300 PE=3 SV=1

SEQ ID NO: 27043 - protein, 117 aa, Xanthomonas perforans; identical to SEQ ID NO: 27015
  REGION 1..117: note = tr|A0A0G9EXM1|A0A0G9EXM1_9XANT 6-carboxy-5,6,7,8-tetrahydropterin synthase OS=Xanthomonas perforans OX=442694 GN=BJD13_21080 PE=3 SV=1

SEQ ID NO: 27044 - protein, 117 aa, Xanthomonas phaseoli
  REGION 1..117: note = tr|A0A1V9H6S9|A0A1V9H6S9_9XANT 6-carboxy-5,6,7,8-tetrahydropterin synthase OS=Xanthomonas phaseoli pv. syngonii LMG 9055 OX=1437878 GN=IA54_000670; PE = 3 SV=1
MDIFKVFTLEAAHRLPNVPPGHKCARLHGHSFRVELHVSGEPGAETGWIMDFGDIKAAFQPIYDRLDHHYLNDIEGLENPTSERLAIWIWQQLKPVLPQLSEIVVHETCTSGCRYRS

SEQ ID NO: 27045 - protein, 117 aa, Xanthomonas phaseoli; identical to SEQ ID NO: 27018
  REGION 1..117: note = tr|A0A1V9H6A6|A0A1V9H6A6_9XANT 6-carboxy-5,6,7,8-tetrahydropterin synthase OS=Xanthomonas phaseoli pv. dieffenbachiae OX=92828 GN=IM53_011885 PE=3; SV = 1

SEQ ID NO: 27046 - protein, 117 aa, Xanthomonas pisi
  REGION 1..117: note = tr|A0A2S7D3J1|A0A2S7D3J1_9XANT 6-carboxy-5,6,7,8-tetrahydropterin synthase OS=Xanthomonas pisi OX=56457 GN=queD PE=3 SV=1
MDIFKVFTLEAAHRLPNVPPGHKCARLHGHSFRVELHVSGEPDADSGWIMDFGDIKAAFKPIYDRLDHHYLNDIEGLENPTSERLAIWIWQQLKPALPQLSEIVVHETCTSGCRYRG

SEQ ID NO: 27047 - protein, 117 aa, Xanthomonas populi
  REGION 1..117: note = tr|A0A2S7EXK6|A0A2S7EXK6_9XANT 6-carboxy-5,6,7,8-tetrahydropterin synthase OS=Xanthomonas populi OX=53414 GN=queD PE=3 SV=1
MDIFKVFTLEAAHRLPNVPPGHKCARLHGHSFRIELHVSGEPGAETGWIMDFGDIKAAFKPIYERLDHHYLNEIEGLENPTSEHLAIWIWQQLKPALSALSEIVVHETCTSGCRYRG

SEQ ID NO: 27048 - protein, 117 aa, unidentified
  source 1..117: note = Xanthomonas prunicola
  REGION 1..117: note = tr|A0A2N3RQH9|A0A2N3RQH9_9XANT 6-carboxy-5,6,7,8-tetrahydropterin synthase OS=Xanthomonas prunicola OX=2053930 GN=queD PE=3 SV=1
MDIFKVFTLEAAHRLPNVPPGHKCARLHGHSFRVELHVSGEPDADTGWIMDFGDIKAAFQPIYDRLDHHYLNDIEGLENPTSERLAIWIWQQLKPALPQLSEIVVHETCTSGCRYRG

SEQ ID NO: 27049 - protein, 119 aa, Xanthomonas sacchari
  REGION 1..119: note = tr|A0A2P5Z2H9|A0A2P5Z2H9_9XANT 6-carboxy-5,6,7,8-tetrahydropterin synthase OS=Xanthomonas sacchari OX=56458 GN=queD PE=3 SV=1
MDIFKVFTLEAAHRLPNVPPGHKCARLHGHSFRIELHVSGEPGAESGWVMDFGDIKAAFRPLYDQLDHHYLNDIDGLDNPTSERLAMWIWERLKPALPLLSEVVVHETCTSGCRYRGPG

SEQ ID NO: 27050 - protein, 119 aa, Xanthomonas sacchari
  REGION 1..119: note = tr|A0A0A8DXB5|A0A0A8DXB5_9XANT 6-carboxy-5,6,7,8-tetrahydropterin synthase OS=Xanthomonas sacchari OX=56458 GN=SB85_09795 PE=3 SV=1
MDIFKVFTLEAAHRLPNVPPGHKCARLHGHSFRIELHVSGEPGAESGWVMDFGDIKAAFRPLYDQLDHHYLNDIEGLDNPTSERLAVWIWDRLKPALPLLSEVVVHETCTSGCRYRGPG

SEQ ID NO: 27051 - protein, 117 aa, Xanthomonas sp.; identical to SEQ ID NO: 27029
  REGION 1..117: note = tr|A0A0Q5IYI7|A0A0Q5IYI7_9XANT 6-carboxy-5,6,7,8-tetrahydropterin synthase OS=Xanthomonas sp. Leaf148 OX=1736275 GN=ASF90_07170 PE=3 SV=1

SEQ ID NO: 27052 - protein, 117 aa, Xanthomonas sp.; identical to SEQ ID NO: 27015
  REGION 1..117: note = tr|A0A3Q9Q2W4|A0A3Q9Q2W4_9XANT 6-carboxy-5,6,7,8-tetrahydropterin synthase OS=Xanthomonas sp. ISO98C4 OX=1680158 GN=AC801_18140 PE=3 SV=1

SEQ ID NO: 27053 - protein, 120 aa, Xanthomonas theicola
  REGION 1..120: note = tr|A0A2S6ZM52|A0A2S6ZM52_9XANT 6-carboxy-5,6,7,8-tetrahydropterin synthase OS=Xanthomonas theicola OX=56464 GN=queD PE=3 SV=1
MDIFKVFTLEAAHRLPNVPPGHKCARLHGHSFRIELHVSGEPGAETGWVMDFGDIKTAFRPIYDSLDHHYLNDIDGLENPTSERLAVWIWERLKPALPLLSEVVIHETCMSGCRYRGPDA

SEQ ID NO: 27054 - protein, 120 aa, Xanthomonas translucens
  REGION 1..120: note = tr|A0A1M4JDI7|A0A1M4JDI7_XANCT 6-carboxy-5,6,7,8-tetrahydropterin synthase OS=Xanthomonas translucens pv. graminis OX=134874 GN=XTGNCPPB3709_0288; PE = 3 SV=1
MDIFKSFTLEAAHRLPNVPPGHKCARLHGHSFRIELHVSGEPGADSGWVMDFGDIKAAFRPIYERLDHHYLNDIEGLENPTSERLAMWIWEQLKPALPLLSEIVVHETCTSGCRYRGPQA

SEQ ID NO: 27055 - protein, 120 aa, Xanthomonas translucens
  REGION 1..120: note = tr|A0A514EF97|A0A514EF97_XANCT 6-carboxy-5,6,7,8-tetrahydropterin synthase OS=Xanthomonas translucens pv. cerealis OX=152263 GN=queD PE=3 SV=1
MDIFKRFTLEAAHRLPNVPPGHKCARLHGHSFQIELHVSGEPGADTGWVMDFGDIKAAFGPIYDQLDHHYLNDIEGLENPTSERLAVWIWERLKPALPLLSEIVVHETCTSGCRYRGPQA

SEQ ID NO: 27056 - protein, 117 aa, Xanthomonas vasicola
  REGION 1..117: note = tr|A0A0A3HRT0|A0A0A3HRT0_XANVA 6-carboxy-5,6,7,8-tetrahydropterin synthase OS=Xanthomonas vasicola OX=56459 GN=queD PE=3 SV=1
MDIFKVFTLEAAHRLPNVPPGHKCARLHGHSFRVELHVSGEPGAETGWIMDFGDIKAAFQPIYDRLDHHYLNDIDGLENPTSERLAIWIWQQLKPALPQLSEIVVHETCTSGCRYRG

SEQ ID NO: 27057 - protein, 117 aa, Xanthomonas vesicatoria
  REGION 1..117: note = tr|A0A1L5QYD3|A0A1L5QYD3_9XANT 6-carboxy-5,6,7,8-tetrahydropterin synthase OS=Xanthomonas vesicatoria OX=56460 GN=BI313_11765 PE=3 SV=1
MDIFKVFTLEAAHRLPNVPPGHKCARLHGHSFRVELHVSGEPGADTGWIMDFGDIKAAFKPIYDRLDHHYLNDIEGLENPTSERLAIWIWDQLKPALPQLSEIVVHETCTSGCRYRG

SEQ ID NO: 27058 - protein, 122 aa, Xanthomonas vesicatoria
  REGION 1..122: note = tr|F0BCX1|F0BCX1_9XANT 6-carboxy-5,6,7,8-tetrahydropterin synthase OS=Xanthomonas vesicatoria ATCC 35937 OX=925775 GN=XVE_1950 PE=3 SV=1
MPITVMDIFKVFTLEAAHRLPNVPPGHKCARLHGHSFRVELHVSGEPGADTGWIMDFGDIKAAFKPIYDRLDHHYLNDIEGLENPTSERLAIWIWDQLKPALPQLSEIVVHETCTSGCRYRG

SEQ ID NO: 27059 - protein, 128 aa, Xenococcus sp.
  REGION 1..128: note = tr|L8M4A3|L8M4A3_9CYAN 6-carboxy-5,6,7,8-tetrahydropterin synthase OS=Xenococcus sp. PCC 7305 OX=102125 GN=Xen7305DRAFT_00037710 PE=3 SV=1
MEEWIIYKEFRFEAAHRLPTYNGKCNRLHGHSWVGRIHVKGNELIDQGSQQGMLIDYGEISDYIQPLLDNFLDHYYLNETTGLENPTSENLSRWIFEKLEKVGLPGLYAVEIRETCTSGCIYKKSVDS

SEQ ID NO: 27060 - protein, 292 aa, Xenococcus sp.
  REGION 1..292: note = tr|L8M3S3|L8M3S3_9CYAN 6-pyruvoyl-tetrahydropterin synthase OS=Xenococcus sp. PCC 7305 OX=102125; GN = Xen7305DRAFT_00027040 PE=4 SV=1
MKCIINRRAEFSASHRYCLSELTSAENIQLFGDGSRFPGHGHNYELYVSLEGELDDYGMVENLSTVKKVIKQEVTSQLNYSHLNDAWPEFQETLPTTENIARIIWQKLEPHLSLVNIKLYEHPKLWADYQGKNMEASLTVKTHFSAAHRLASPQLSLEENTEIYGKCARPHGHGHNYHLEVSVVGKIDSRTGMLVDLGALQQVIDDYVVEPFDHTFLNKDIPYFAQVVPTAENIALHIANLLSSPIQSLGAELDKVKLIESPNNSCEIYCRLGGSQNSNNTLTKELEPAISI

SEQ ID NO: 27061 - protein, 335 aa, Xenophilus sp.
  REGION 1..335: note = tr|A0A254VM02|A0A254VM02_9BURK 6-pyruvoyl tetrahydrobiopterin synthase OS=Xenophilus sp. AP218F; OX = 2014876 GN=CEK28_17785 PE=4 SV=1
MHASFVLAGAGFEAARRLPGQDRFHGHSFRALARCDSQNSSQSALQAALRQAAAAFDYAEINQALADADDLSLAHHLRAALPAPAALSLRAAPHSGVLLDNGQELSWINVQFEAAHQLPNVPPGHKCGRLHGHGFGVRLVADARRAGRAELEAAWAPLRQRLHHRYLNDIEGLANPTSEVLAHWLYQRLDGALPGLAWVEVRETHSAGSQYDGQRFRIWKEQRFESAMPLDAAGNYSGHSYLVRLMLTGSLDRTMGWVLDFGDVKDRFKPIYRQLDHNPLDKLAGLYRNDSAAVAEWVHAQLSPLVPELSRIDLMEDDDSGVSLLFRHDMRWPLL

SEQ ID NO: 27062 - protein, 120 aa, Xenorhabdus beddingii
  REGION 1..120: note = tr|A0A1Y2SS87|A0A1Y2SS87_9GAMM 6-carboxy-5,6,7,8-tetrahydropterin synthase OS=Xenorhabdus beddingii OX=40578 GN=Xbed_00236 PE=3 SV=1
MITTIFKDFQFEAAHHLPHVPEGHKCGRLHGHSFMVRLELTGEVDPLSGWLMDFADVKAAFKPIWERLDHYYLNDIPGLENPTSEVLAKWIWGQLKPTLSQLSAVMVKETCSAGCIYRGE

SEQ ID NO: 27063 - protein, 120 aa, Xenorhabdus bovienii
  REGION 1..120: note = tr|A0A0B6XFX1|A0A0B6XFX1_XENBV 6-carboxy-5,6,7,8-tetrahydropterin synthase OS=Xenorhabdus bovienii OX=40576 GN=queD PE=3 SV=1
MSTTIFKDFQFEAAHRLPHVPEGHKCGRLHGHSFMVRLEITGEVDPLSGWIMDFADVKSAFKPIWERLDHNYLNEIPGLENPTSEVLAKWIWEKLKPTLPQLSAVMVKETCSAGCIYRDE

SEQ ID NO: 27064 - protein, 120 aa, Xenorhabdus bovienii
  REGION 1..120: note = tr|A0A077NVD1|A0A077NVD1_XENBV 6-carboxy-5,6,7,8-tetrahydropterin synthase OS=Xenorhabdus bovienii str. oregonense OX=1398202 GN=sscR PE=3 SV=1
MSTTIFKDFQFEAAHRLPHVPEGHKCGRLHGHSFMVRLEITGEVDPLSGWIMDFSDVKAAFKPIWERLDHNYLNEIPGLENPTSEVLAKWIWEKLKPTLPQLSAVMVKETCSAGCIYRGE

SEQ ID NO: 27065 - protein, 120 aa, Xenorhabdus budapestensis
  REGION 1..120: note = tr|A0A2D0J0Y8|A0A2D0J0Y8_XENBU 6-carboxy-5,6,7,8-tetrahydropterin synthase OS=Xenorhabdus budapestensis OX=290110 GN=Xbud_01991 PE=3 SV=1
MSTTIFKDFQFEAAHRLPHVPEGHKCGRLHGHSFMVRLEITGQVDPHSGWLMDFADVKAAFKPIWERLDHNYLNEIPGLENPTSEVLAKWIWRELKPTLPQLSTVMVKETCSAGCIYRGE

SEQ ID NO: 27066 - protein, 120 aa, Xenorhabdus cabanillasii
  REGION 1..120: note = tr|W1J958|W1J958_9GAMM 6-carboxy-5,6,7,8-tetrahydropterin synthase OS=Xenorhabdus cabanillasii JM26 OX=1427517 GN=queD PE=3 SV=1
MSTTIFKDFQFEAAHRLPHVPEGHKCGRLHGHSFMVRLEITGEVDPHSGWLMDFADVKATFKPIWERLDHHYLNEIPGLENPTSEVLAKWIWKELKPTLPQLSAVMVKETCSAGCIYRGE

SEQ ID NO: 27067 - protein, 120 aa, Xenorhabdus cabanillasii
  REGION 1..120: note = tr|A0A3D9UGG0|A0A3D9UGG0_9GAMM 6-carboxy-5,6,7,8-tetrahydropterin synthase OS=Xenorhabdus cabanillasii OX=351673 GN=BDD26_1772 PE=3 SV=1
MSTTIFKDFQFEAAHRLPHVPEGHKCGRLHGHSFMVRLEITGEVDPHSGWLMDFADVKATFKPIWERLDHHYLNEIPGLENPTSEVLAKWIWRELKPTLPQLSAVMVKETCSAGCIYRGE

SEQ ID NO: 27068 - protein, 120 aa, Xenorhabdus doucetiae
  REGION 1..120: note = tr|A0A068QVR7|A0A068QVR7_9GAMM 6-carboxy-5,6,7,8-tetrahydropterin synthase OS=Xenorhabdus doucetiae OX=351671 GN=queD PE=3 SV=1
MSTTIFKDFQFEAAHHLPHVPEGHKCGRLHGHSFMVRLEITGEVDPLTGWLMDFADVKAVFKPIWEQLDHHYLNKIPGLENPTSEVLAKWIWEQLKPTLPQLSAIMVKETCSAGCIYRGQ

SEQ ID NO: 27069 - protein, 120 aa, unidentified
  source 1..120: note = Xenorhabdus eapokensis
  REGION 1..120: note = tr|A0A1Q5TSE2|A0A1Q5TSE2_9GAMM 6-carboxy-5,6,7,8-tetrahydropterin synthase OS=Xenorhabdus eapokensis OX=1873482 GN=Xedl_01212 PE=3 SV=1
MSTTIFKDFQFEAAHRLPHVPEGHKCGRLHGHSFMVRLEITGEVDPLSGWLMDFADVKAAFKPVWEQLDHHYLNEIPGLENPTSEVLARWIWEKLKPTLPQLSAVMVKETCSAGCIYRGE

SEQ ID NO: 27070 - protein, 120 aa, Xenorhabdus ehlersii
  REGION 1..120: note = tr|A0A2D0IVG2|A0A2D0IVG2_9GAMM 6-carboxy-5,6,7,8-tetrahydropterin synthase OS=Xenorhabdus ehlersii OX=290111 GN=Xehl_00948 PE=3 SV=1
MSTTIFKDFQFEAAHRLPHVPEGHKCGRLHGHSFMVRLEVTGEVDPLSGWLMDFADVKTAFKPVWEQLDHHYLNEIPGLENPTSEVLAKWIWEKLKPTLPQLSAVMVKETCSAGCIYRGE

SEQ ID NO: 27071 - protein, 120 aa, Xenorhabdus hominickii
  REGION 1..120: note = tr|A0A2G0Q4F3|A0A2G0Q4F3_9GAMM 6-carboxy-5,6,7,8-tetrahydropterin synthase OS=Xenorhabdus hominickii OX=351679 GN=Xhom_03165 PE=3 SV=1
MSTTIFKDFQFEAAHHLPHVPEGHKCGRLHGHSFMVRLEITGEVDPLTGWIMDFADVKTAFKPIWERLDHHYLNEIPGLENPTSEILAKWIWEQLKPTLTQLSAIMVKETCSAGCIYRGE

SEQ ID NO: 27072 - protein, 120 aa, Xenorhabdus innexi
  REGION 1..120: note = tr|A0A1N6MTN9|A0A1N6MTN9_9GAMM 6-carboxy-5,6,7,8-tetrahydropterin synthase OS=Xenorhabdus innexi OX=290109 GN=queD PE=3 SV=1
MSTTIFKDFQFEAAHRLPHVPEGHKCGRLHGHSFMVRLEITGEIDPHSGWLMDFADVKAAFKPIWERLDHNYLNEIPGLENPTSEVLAKWIWKEVQPALPQLSAVMVKETCSAGCIYRGE

SEQ ID NO: 27073 - protein, 120 aa, unidentified
  source 1..120: note = Xenorhabdus ishibashii
  REGION 1..120: note = tr|A0A2D0KE90|A0A2D0KE90_9GAMM 6-carboxy-5,6,7,8-tetrahydropterin synthase OS=Xenorhabdus ishibashii OX=1034471 GN=Xish_00895 PE=3 SV=1
MSTTIFKDFQFEAAHRLPHVPEGHKCGRLHGHSFMVRLEITGEIDPLSGWLMDFADVKAAFKPVWERLDHHYLNEIPGLENPTSEVLAKWIWEKLKPTLPQLSAVMVKETCSAGCIYRDE

SEQ ID NO: 27074 - protein, 120 aa, Xenorhabdus japonica
  REGION 1..120: note = tr|A0A1I5A7L2|A0A1I5A7L2_9GAMM 6-carboxy-5,6,7,8-tetrahydropterin synthase OS=Xenorhabdus japonica OX=53341 GN=SAMN05421579_11054 PE=3 SV=1
MSTTIFKDFQFEAAHHLPNVPDGHKCGRLHGHSFMVRLEVTGEIDPHSGWLMDFADVKVAFKPIWEQLDHHYLNEIPGLENPTSEVLAKWIWEKLQPTLPQLSAVMVKETCSAGCIYRGE

SEQ ID NO: 27075 - protein, 120 aa, unidentified
  source 1..120: note = Xenorhabdus khoisanae
  REGION 1..120: note = tr|A0A0J5FNZ1|A0A0J5FNZ1_9GAMM 6-carboxy-5,6,7,8-tetrahydropterin synthase OS=Xenorhabdus khoisanae OX=880157 GN=AB204_18350 PE=3 SV=1
MITTIFKDFQFEAAHHLPHVPEGHKCGRLHGHSFMVRVELTGEVDPLSGWLMDFADVKTAFKPIWEQLDHHYLNEIPGLENPTSEVLAKWIWGRLKPTLSQLSAVMVKETCSAGCIYRGE

SEQ ID NO: 27076 - protein, 120 aa, Xenorhabdus koppenhoeferi
  REGION 1..120: note = tr|A0A1I7ESR1|A0A1I7ESR1_9GAMM 6-carboxy-5,6,7,8-tetrahydropterin synthase OS=Xenorhabdus koppenhoeferi OX=351659 GN=SAMN05421784_10166 PE=3 SV=1
MNTTIFKDFQFEAAHHLPHVPEGHKCGRLHGHSFMVRLEITGDVDPFTGWIMDFADVKAAFKPIWERLDHHYLNEIPGLENPTSEVLAKWIWGQLKPTLSQLSAVMVKETCSAGCIYRGE

SEQ ID NO: 27077 - protein, 120 aa, Xenorhabdus kozodoii
  REGION 1..120: note = tr|A0A2D0LCE9|A0A2D0LCE9_9GAMM 6-carboxy-5,6,7,8-tetrahydropterin synthase OS=Xenorhabdus kozodoii OX=351676 GN=Xkoz_01985 PE=3 SV=1
MSTTIFKDFQFEAAHRLPHVPEGHKCGRLHGHSFMVRLEITGEVDPFSGWLMDFADVKAVFKPIWEQLDHHYLNEIPGLENPTSEVLAKWIWEKLTLTLPQLSAVMVKETCSAGCIYRGE

SEQ ID NO: 27078 - protein, 120 aa, Xenorhabdus mauleonii
  REGION 1..120: note = tr|A0A1I3WJZ6|A0A1I3WJZ6_9GAMM 6-carboxy-5,6,7,8-tetrahydropterin synthase OS=Xenorhabdus mauleonii OX=351675 GN=SAMN05421680_12734 PE=3 SV=1
MSTTIFKDFQFEAAHRLPHVPEGHKCGRLHGHSFMVRLEITGEVDPLTGWIMDFSDVKVAFKPIWEQLDHHYLNEIPGLENPTSEVLAKWIWEELKPVLPQLSSVMVKETCNAGCVYRGK

SEQ ID NO: 27079 - protein, 120 aa, Xenorhabdus miraniensis
  REGION 1..120: note = tr|A0A2D0JTC2|A0A2D0JTC2_9GAMM 6-carboxy-5,6,7,8-tetrahydropterin synthase OS=Xenorhabdus miraniensis OX=351674 GN=Xmir_01024 PE=3 SV=1
MITTIFKDFQFEAAHHLPHVPEGHKCGRLHGHSFMVRVELTGEVDPLSGWLMDFADVKTAFKPIWEQLDHHYLNEIPGLENPTSEVLAKWIWERLKPILSQLSAVMVKETCSAGCIYRGE

SEQ ID NO: 27080 - protein, 120 aa, Xenorhabdus nematophila
  REGION 1..120: note = tr|N1NNS3|N1NNS3_XENNE 6-carboxy-5,6,7,8-tetrahydropterin synthase OS=Xenorhabdus nematophila F1 OX=1306162 GN=queD PE=3 SV=1
MSITIFKDFQFEAAHHLPHVPEGHKCGRLHGHSFMVRLEITGELDPLSGWIMDFADVKAAFKPIWERLDHHYLNEIPGLENPTSEVLAKWIWKQLKPTLSPLSAVMVKETCSAGCIYRGE

SEQ ID NO: 27081 - protein, 120 aa, Xenorhabdus nematophila; identical to SEQ ID NO: 27080
  REGION 1..120: note = tr|A0A0A8NNB5|A0A0A8NNB5_XENNE 6-carboxy-5,6,7,8-tetrahydropterin synthase OS=Xenorhabdus nematophila str. Websteri OX=1437826 GN=sscR PE=3 SV=1

SEQ ID NO: 27082 - protein, 120 aa, Xenorhabdus poinarii
  REGION 1..120: note = tr|A0A068R686|A0A068R686_9GAMM 6-carboxy-5,6,7,8-tetrahydropterin synthase OS=Xenorhabdus poinarii G6 OX=1354304 GN=queD PE=3 SV=1
MSTTIFKDFQFEAAHRLPNVPEGHKCGRLHGHSFMVRLEITGEIDPVSGWLMDFADVKAAFKPIWEQLDHHYLNEIPGLENPTSEVLAKWIWAMLKSTLPQLSAVIVKETCSAGSIYQGK

SEQ ID NO: 27083 - protein, 120 aa, Xenorhabdus sp.
  REGION 1..120: note = tr|A0A2D0KYZ0|A0A2D0KYZ0_9GAMM 6-carboxy-5,6,7,8-tetrahydropterin synthase OS=Xenorhabdus sp. KJ12.1 OX=1851571 GN=Xekj_03211 PE=3 SV=1
MSTTIFKDFQFEAAHRLPHVPEGHKCGRLHGHSFMVRLEITGEIDPHSGWLMDFADVKAIFKPIWERLDHHYLNEIPGLENPTSEVLAQWIWRELQPALPQLSAVMVKETCSAGCIYRGK

SEQ ID NO: 27084 - protein, 120 aa, Xenorhabdus sp.
  REGION 1..120: note = tr|A0A0M0T677|A0A0M0T677_9GAMM 6-carboxy-5,6,7,8-tetrahydropterin synthase OS=Xenorhabdus sp. GDc328 OX=742178 GN=AFK69_16075 PE=3 SV=1
MSTTIFKDFQFEAAHHLPHVPEGHKCGRLHGHSFMVRLEVTGDVDPLSGWLMDFADVKAAFKPVWEQLDHHYLNEIPGLENPTSEVLATWIWEKLKPTLPQLSAVMVKETCSAGCIYRGE

SEQ ID NO: 27085 - protein, 120 aa, Xenorhabdus stockiae; identical to SEQ ID NO: 27083
  REGION 1..120: note = tr|A0A2D0KVI1|A0A2D0KVI1_9GAMM 6-carboxy-5,6,7,8-tetrahydropterin synthase OS=Xenorhabdus stockiae OX=351614 GN=Xsto_00257 PE=3 SV=1

SEQ ID NO: 27086 - protein, 120 aa, Xenorhabdus szentirmaii
  REGION 1..120: note = tr|W1IUM9|W1IUM9_9GAMM 6-carboxy-5,6,7,8-tetrahydropterin synthase OS=Xenorhabdus szentirmaii DSM 16338 OX=1427518 GN=queD PE=3 SV=1
MNTTIFKDFQFEAAHYLPHVPEGHKCGRLHGHSFMVRLEITGEVDPLSGWLMDFADVKAVFKPIWEQLDHHYLNEIPGLENPTSEVLAKWIWDKVKPTLPQLSAVMVKETCSAGCLYRGE

SEQ ID NO: 27087 - protein, 120 aa, unidentified
  source 1..120: note = Xenorhabdus thuongxuanensis
  REGION 1..120: note = tr|A0A1Q5U5Z0|A0A1Q5U5Z0_9GAMM 6-carboxy-5,6,7,8-tetrahydropterin synthase OS=Xenorhabdus thuongxuanensis OX=1873484 GN=Xentx_00941 PE=3 SV=1
MSTTIFKDFQFEAAHRLPHVPEGHKCGRLHGHSFMVRLEITGEVDPLSGWLMDFADVKAAFKPVWERLDHHYLNEIPGLENPTSEVLAKWIWEKLKPTLPQLSAVMVKETCSAGCIYRGE

SEQ ID NO: 27088 - protein, 122 aa, Xenorhabdus vietnamensis
  REGION 1..122: note = tr|A0A1Y2SGK5|A0A1Y2SGK5_9GAMM 6-carboxy-5,6,7,8-tetrahydropterin synthase OS=Xenorhabdus vietnamensis OX=351656 GN=Xvie_01260 PE=3 SV=1
MSMSTTIFKDFQFEAAHHLPNVPEGHKCGRLHGHSFMVRLEITGEIDPLSGWLMDFSDVKAAFKPIWEQLDHHYLNEIPGLENPTSEVLAMWIWEKLKPTLPQLSAVMVKETCSAGCIYRGE

SEQ ID NO: 27089 - protein, 142 aa, unidentified
  source 1..142: note = Xiangella phaseoli
  REGION 1..142: note = tr|A0A1H6UKD5|A0A1H6UKD5_9ACTN 6-pyruvoyl-tetrahydropterin synthase OS=Xiangella phaseoli; OX = 1144548 GN=SAMN05443287_102155 PE=4 SV=1
MFSVTVRDHIMIAHSFRGDVFGPAQRLHGATFVVDATFRRPDLDDDGIVVDIGLATDQLKAVLGELNYRNLDEEPAFAGTNTTTEVLARTIADRLADRVHAGDLGVGAHGLTGLTVTLHESHVAWASYERSLPAAVADEGTA

SEQ ID NO: 27090 - protein, 118 aa, Xylella fastidiosa
  REGION 1..118: note = tr|Q87EY7|Q87EY7_XYLFT 6-carboxy-5,6,7,8-tetrahydropterin synthase OS=Xylella fastidiosa (strain Temecula1 / ATCC 700964) OX=183190; GN = ygcM PE=3 SV=1
MDIFKVFIIEAAHRLPHVPPGHKCARLHGHSFRIEVHVSGALESDTGWIMDFSDLKRAFQPIYDQLDHHYLNEIEGLENPTSERLAIWVWDRLKPVLPALTEIVVHETCTSGCRYRGG

SEQ ID NO: 27091 - protein, 118 aa, Xylella fastidiosa; identical to SEQ ID NO: 27090
  REGION 1..118: note = tr|A0A060HCA7|A0A060HCA7_XYLFS 6-carboxy-5,6,7,8-tetrahydropterin synthase OS=Xylella fastidiosa MUL0034 OX=1401256 GN=P303_11105 PE=3 SV=1

SEQ ID NO: 27092 - protein, 117 aa, unidentified
  source 1..117: note = Xylella taiwanensis
  REGION 1..117: note = tr|Z9JIN6|Z9JIN6_9GAMM 6-carboxy-5,6,7,8-tetrahydropterin synthase OS=Xylella taiwanensis OX=1444770 GN=AF72_06040 PE=3 SV=1
MDIFKVFIIEAAHCLPHVPAGHKCARLHGHSFRIEVHVSGTLDPDTGWIMDFSDLKHAFQPIYDQLDHHYLNEIEGLENPTSERLAMWIWDRLKPVLPALSEIVVHETCTSGCRYRG

SEQ ID NO: 27093 - protein, 124 aa, Xylophilus ampelinus
  REGION 1..124: note = tr|A0A318SE75|A0A318SE75_9BURK 6-carboxy-5,6,7,8-tetrahydropterin synthase OS=Xylophilus ampelinus OX=54067 GN=DFQ15_11873 PE=3 SV=1
MQFTVHQRFFFEAAHTLQRAIDAAGSRRIHGHTYHAEVAVRGPRDPRTGMVVDLGHLRAKLQGVRDQLDHHLLDEVPGLGTPTLENLCLFIARALADLQPVPSQVRVWRDAMGDACTLDLVPGA

SEQ ID NO: 27094 - protein, 124 aa, Xylophilus sp.
  REGION 1..124: note = tr|A0A0Q4GPR6|A0A0Q4GPR6_9BURK 6-carboxy-5,6,7,8-tetrahydropterin synthase OS=Xylophilus sp. Leaf220 OX=1735686 GN=ASE76_03795 PE=3 SV=1
MQFTVHQRFFFDAAHTLQREIEAAGSRRIHGHTYHAEVAVRGPRDPATGMVIDLGHLRARLQEMRERLDHHLLDEVPGLGTPTLENLCLFIARALSDLQPAPSQVRVWRDAMGDACTLDLSPGA

SEQ ID NO: 27095 - protein, 122 aa, Yangia pacifica
  REGION 1..122: note = tr|A0A1I6TQH0|A0A1I6TQH0_9RHOB 6-carboxy-5,6,7,8-tetrahydropterin synthase OS=Yangia pacifica OX=311180 GN=SAMN04488050_106278 PE=3 SV=1
MFRISKEFHFSASHQLTHLPGDHQCARMHGHNYIVVVELAARELNSDGFVRDYHELAPLKAYIDECFDHRHLNDVLNVASTAENLALHFYEWCAARWPETTSVKVSETPKTWAEYRPAPLAA

SEQ ID NO: 27096 - protein, 122 aa, Yangia pacifica
  REGION 1..122: note = tr|A0A2U8HEH0|A0A2U8HEH0_9RHOB 6-carboxy-5,6,7,8-tetrahydropterin synthase OS=Yangia pacifica OX=311180 GN=CEW88_11330 PE=3 SV=1
MFRISKEFHFSASHQLTHLPSDHQCARMHGHNYIVVVELAARALNADGFVRDYHELAPLKAYIDECFDHRHLNDVLNVASTAENLALHFYEWCAARWPETASVKVSETPKTWAEYRPAPLAA

SEQ ID NO: 27097 - protein, 117 aa, Yangia sp.; identical to SEQ ID NO: 19297
  REGION 1..117: note = tr|A0A2E1DG33|A0A2E1DG33_9RHOB 6-carboxy-5,6,7,8-tetrahydropterin synthase OS=Yangia sp.; OX = 2024862 GN=queD PE=3 SV=1

SEQ ID NO: 27098 - protein, 122 aa, Yangia sp.
  REGION 1..122: note = tr|A0A1B1PMA8|A0A1B1PMA8_9RHOB 6-carboxy-5,6,7,8-tetrahydropterin synthase OS=Yangia sp. CCB-MM3 OX=1792508 GN=AYJ57_04710 PE=3 SV=1
MYRISKEFHFSASHQLVHLPEDHQCARMHGHNYIVVVELAAHELNADGFVRDYHELAPLKAYIDESFDHRHLNDVLNVASTAENLARHFYEWCAARWPETASVKVSETPKTWAEYRPAPLAA

SEQ ID NO: 27099 - protein, 120 aa, Yersinia aldovae
  REGION 1..120: note = tr|A0A0T9TZ90|A0A0T9TZ90_YERAL 6-carboxy-5,6,7,8-tetrahydropterin synthase OS=Yersinia aldovae OX=29483 GN=queD PE=3 SV=1
MSTTLFKDFQFEAAHRLPHVPEGHKCGRLHGHSFMIRIEVTGEVDAHSGWVMDFAELKAAFNPIWERLDHHYLNDIPGLENPTSEVLASWIWQQLKPQLPELSAVMVKETCSAGCVYRGE

SEQ ID NO: 27100 - protein, 120 aa, Yersinia bercovieri
  REGION 1..120: note = tr|A0A2G4U9N1|A0A2G4U9N1_YERBE 6-carboxy-5,6,7,8-tetrahydropterin synthase OS=Yersinia bercovieri OX=634 GN=queD PE=3 SV=1
MKTTLFKDFTFEAAHHLPHVPDGHKCGRLHGHSFVVRLEITGEVDKHTGWIIDFAELKAIFKRTLDRLDHYYLNDIVGLENPTSEVLAEWIWRQVKPQLPLLSAVMVKETCTAGCIYRGK

SEQ ID NO: 27101 - protein, 119 aa, Yersinia bercovieri
  REGION 1..119: note = tr|A0A2G4U7J2|A0A2G4U7J2_YERBE 6-carboxy-5,6,7,8-tetrahydropterin synthase OS=Yersinia bercovieri OX=634 GN=queD PE=3 SV=1
MSTTLFKDFQFEAAHRLPHVAAGHKCGRLHGHSFMVRIEVTGEVDAHSGWVMDFADLKAAFNPIWERLDHHYLNDIPGLENPTSEVLACWIWQQLKPQLPELSAVMVKETCSAGCVYRG

SEQ ID NO: 27102 - protein, 120 aa, Yersinia enterocolitica
  REGION 1..120: note = tr|A0A0H3NLA4|A0A0H3NLA4_YERE1 6-carboxy-5,6,7,8-tetrahydropterin synthase OS=Yersinia enterocolitica subsp. palearctica serotype O:3 (strain DSM 13030 / CIP 106945/ Y11) OX=930944 GN=Y11_22931 PE=3 SV=1
MSTTLFKDFQFEAAHLLPHVPEGHKCGRLHGHSFMVRIEVTGEVDAHSGWVMDFAELKAAFKPIWERLDHHYLNDIPGLENPTSEVLASWIWQQLKPQLPELSAVMVKETCSAGCIYRGE

SEQ ID NO: 27103 - protein, 121 aa, Yersinia enterocolitica
  REGION 1..121: note = tr|A0A447S6E5|A0A447S6E5_YEREN 6-carboxy-5,6,7,8-tetrahydropterin synthase OS=Yersinia enterocolitica subsp. enterocolitica OX=150052 GN=queD; PE = 3 SV=1
MMSTTLFKDFQFEAAHLLPHVPEGHKCGRLHGHSFMVRIEVTGEVDAHSGWVMDFAELKAAFKPIWERLDHHYLNDIPGLENPTSEVLASWIWQQLKPQLPELSAVMVKETCSAGCIYRGE

SEQ ID NO: 27104 - protein, 119 aa, Yersinia entomophaga
  REGION 1..119: note = tr|A0A3S6F3T0|A0A3S6F3T0_YERET 6-carboxy-5,6,7,8-tetrahydropterin synthase OS=Yersinia entomophaga OX=935293 GN=PL78_14370 PE=3 SV=1
MSTTLFKDFQFEAAHRLPNVAEGHKCGRLHGHSFMVRLEVTGEVDAHSGWVMDFAELKAAFQPIWERLDHHYLNDIPGLENPTSEVLAAWIWQQLKPQLPELSAVMVKETCSAGCVYRG

SEQ ID NO: 27105 - protein, 119 aa, Yersinia frederiksenii
  REGION 1..119: note = tr|A0A0T9TCV2|A0A0T9TCV2_YERFR 6-carboxy-5,6,7,8-tetrahydropterin synthase OS=Yersinia frederiksenii OX=29484 GN=queD_1 PE=3 SV=1
MSTTLFKDFQFEAAHLLPHVPEGHKCGRLHGHSFMVRIEVTGEVDAHSGWVMDFADLKAAFNPIWARLDHHYLNDIPGLENPTSEVLASWIWQQLKPQLPELSAVMVKETCSAGCVYRG

SEQ ID NO: 27106 - protein, 119 aa, Yersinia frederiksenii
  REGION 1..119: note = tr|A0A0B6FQN3|A0A0B6FQN3_YERFR 6-carboxy-5,6,7,8-tetrahydropterin synthase OS=Yersinia frederiksenii Y225 OX=1454377 GN=queD PE=3 SV=1
MSTTLFKDFQFEAAHLLPHVPEDHKCGRLHGHSFMVRIEVTGEVDAHSGWVMDFADLKAAFKPIWERLDHHYLNDIPGLENPTSEVLACWIWQQLKPQLPELSAVMVKETCSAGCVYRG

SEQ ID NO: 27107 - protein, 119 aa, unidentified
  source 1..119: note = Yersinia hibernica
  REGION 1..119: note = tr|A0A481QKS5|A0A481QKS5_9GAMM 6-carboxy-5,6,7,8-tetrahydropterin synthase OS=Yersinia hibernica OX=2339259 GN=queD PE=3 SV=1
MSTTLFKDFQFEAAHRLPHVPEGHKCGRLHGHSFMIRIEVTGEVDAHSGWVMDFADLKAAFKPVWERLDHHYLNDIPGLENPTSEVLASWIWQQLKPQLPELSAVMVKETCSAGCVYRG

SEQ ID NO: 27108 - protein, 120 aa, Yersinia intermedia
  REGION 1..120: note = tr|A0A0T9LKD9|A0A0T9LKD9_YERIN 6-carboxy-5,6,7,8-tetrahydropterin synthase OS=Yersinia intermedia OX=631 GN=queD PE=3 SV=1
MSTTLFKDFQFEAAHRLPHVAEGHKCGRLHGHSFMVRIEVTGEVDAHSGWVMDFADLKAAFKPIWERLDHYYLNDIPGLENPTSEVLASWIWQQLKPQLPELSAVMVKETCSAGCVYRGE

SEQ ID NO: 27109 - protein, 119 aa, Yersinia intermedia
  REGION 1..119: note = tr|A0A0U1ESB3|A0A0U1ESB3_YERIN 6-carboxy-5,6,7,8-tetrahydropterin synthase OS=Yersinia intermedia OX=631 GN=queD PE=3 SV=1
MSTTLFKDFQFEAAHRLPHVPEGHKCGRLHGHSFMVRLEVTGEVDAHSGWVMDFAALKAVFQPIWERLDHHYLNDIPGLENPTSEVLARWIWQQLKPQLPELSAVMIKETCSAGCVYRG

SEQ ID NO: 27110 - protein, 120 aa, Yersinia kristensenii
  REGION 1..120: note = tr|A0A0T9R0Q5|A0A0T9R0Q5_YERKR 6-carboxy-5,6,7,8-tetrahydropterin synthase OS=Yersinia kristensenii OX=28152 GN=queD_2 PE=3 SV=1
MKTTLFKDFTFEAAHHLPHVPDGHKCGRLHGHSFVVRLEITGEVDKHTGWIIDFAELKAIFKPTLDRLDHYYLNDIPGLENPTCEVLAEWIWNQVKPQLPILSAVVVRETCTAGCIYRCE

SEQ ID NO: 27111 - protein, 119 aa, Yersinia kristensenii
  REGION 1..119: note = tr|A0A0T9TU76|A0A0T9TU76_YERKR 6-carboxy-5,6,7,8-tetrahydropterin synthase OS=Yersinia kristensenii OX=28152 GN=queD PE=3 SV=1
MSTTLFKDFQFEAAHRLPHVPAGHKCGRLHGHSFMVRIEVTGEVDAHSGWVMDFADLKAAFNPIWERLDHHYLNDIPGLENPTSEVLASWIWQQLKPQLPELSAVMVKETCSAGCVYRG

SEQ ID NO: 27112 - protein, 119 aa, Yersinia massiliensis; identical to SEQ ID NO: 27105
  REGION 1..119: note = tr|A0A0T9NPT0|A0A0T9NPT0_9GAMM 6-carboxy-5,6,7,8-tetrahydropterin synthase OS=Yersinia massiliensis OX=419257 GN=queD PE=3 SV=1

SEQ ID NO: 27113 - protein, 119 aa, Yersinia mollaretii
  REGION 1..119: note = tr|A0A0U1I5A7|A0A0U1I5A7_YERMO 6-carboxy-5,6,7,8-tetrahydropterin synthase OS=Yersinia mollaretii OX=33060 GN=queD PE=3 SV=1
MSTTLFKDFQFEAAHLLPHVPEGHKCGRLHGHSFMVRIEVTGEVDAHSGWVMDFAELKAAFNPIWERLDHHYLNDIPGLENPTSEVLASWIWQQLKPQLPELSAVMVKETCSAGCIYRG

SEQ ID NO: 27114 - protein, 119 aa, Yersinia mollaretii
  REGION 1..119: note = tr|A0A0U1KAT8|A0A0U1KAT8_YERMO 6-carboxy-5,6,7,8-tetrahydropterin synthase OS=Yersinia mollaretii OX=33060 GN=queD PE=3 SV=1
MSTTLFKDFQFEAAHLLPHVPEGHKCGRLHGHSFMVRIEVTGEVDAHSGWVMDFAELKAAFNPIWERLDHHYLNDIPGLENPTSEVLASWIWQQLKPQLPELSAVMVKETCSAGCVYRG

SEQ ID NO: 27115 - protein, 119 aa, Yersinia nurmii; identical to SEQ ID NO: 27104
  REGION 1..119: note = tr|A0A0T9LMX2|A0A0T9LMX2_9GAMM 6-carboxy-5,6,7,8-tetrahydropterin synthase OS=Yersinia nurmii OX=685706 GN=queD PE=3 SV=1

SEQ ID NO: 27116 - protein, 119 aa, Yersinia pekkanenii
  REGION 1..119: note = tr|A0A0T9PY19|A0A0T9PY19_9GAMM 6-carboxy-5,6,7,8-tetrahydropterin synthase OS=Yersinia pekkanenii OX=1288385 GN=queD PE=3 SV=1
MSTTLFKDFQFEAAHRLPHVPQGHKCGRLHGHSFMIRIEVTGEVDAHSGWVMDFAELKAAFKPIWERLDHHYLNDIPGLENPTSEVLASWIWQQLKPQLSELSAVMVKETCSAGCIYRG

SEQ ID NO: 27117 - protein, 119 aa, Yersinia pestis; identical to SEQ ID NO: 27109
  REGION 1..119: note = tr|A0A384KEQ9|A0A384KEQ9_YERPE 6-carboxy-5,6,7,8-tetrahydropterin synthase OS=Yersinia pestis OX=632 GN=ygcM PE=3 SV=1

SEQ ID NO: 27118 - protein, 119 aa, Yersinia pestis; identical to SEQ ID NO: 27109
  REGION 1..119: note = tr|A0A454XIM9|A0A454XIM9_YERPE 6-carboxytetrahydropterin synthase QueD OS=Yersinia pestis; OX = 632 GN=queD PE=4 SV=1

SEQ ID NO: 27119 - protein, 119 aa, Yersinia pseudotuberculosis; identical to SEQ ID NO: 27109
  REGION 1..119: note = tr|A0A0T9JGZ6|A0A0T9JGZ6_YERPU 6-carboxy-5,6,7,8-tetrahydropterin synthase OS=Yersinia pseudotuberculosis OX=633 GN=queD PE=3 SV=1

SEQ ID NO: 27120 - protein, 119 aa, Yersinia pseudotuberculosis
  REGION 1..119: note = tr|A0A0H3B7R0|A0A0H3B7R0_YERPY 6-carboxy-5,6,7,8-tetrahydropterin synthase OS=Yersinia pseudotuberculosis serotype O:3 (strain YPIII) OX=502800; GN = YPK_3443 PE=3 SV=1
MSTTLFKDFQFEAAHRLPHVPEGHKCGRLHGHSFMVRLEVTGEVDAHSGWVMDFAALKAVFQPIWERLDHHYLNDIPGLENPTSEVLARWIWQQLKPQLSELSAVMIKETCSAGCVYRG

SEQ ID NO: 27121 - protein, 119 aa, Yersinia rohdei
  REGION 1..119: note = tr|A0A0U1HT53|A0A0U1HT53_YERRO 6-carboxy-5,6,7,8-tetrahydropterin synthase OS=Yersinia rohdei OX=29485 GN=queD PE=3 SV=1
MSTTLFKDFQFEAAHRLPHVPEGHKCGRLHGHSFMIRIEVTGEVDAHSGWVMDFADLKAAFKPIWERLDHHYLNDIPGLENPTSEVLASWIWQQLKPQLPELSAVMVKETCSAGCVYRG

SEQ ID NO: 27122 - protein, 119 aa, Yersinia ruckeri
  REGION 1..119: note = tr|A0A085U385|A0A085U385_YERRU 6-carboxy-5,6,7,8-tetrahydropterin synthase OS=Yersinia ruckeri OX=29486 GN=queD PE=3 SV=1
MSTTLFKDFQFEAAHRLPNVAEGHKCGRLHGHSFMVRLEVTGEVDAHSGWVMDFAELKAAFQPIWDRLDHHYLNDIAGLENPTSEVLAAWIWQQLKPQLPELSAVMVKETCSAGCIYRG

SEQ ID NO: 27123 - protein, 119 aa, Yersinia similis
  REGION 1..119: note = tr|A0A0T9NSK5|A0A0T9NSK5_9GAMM 6-carboxy-5,6,7,8-tetrahydropterin synthase OS=Yersinia similis OX=367190 GN=queD PE=3 SV=1
MSTTLFKDFQFEAAHRLPHVPEGHKCGRLHGHSFMVRLEVTGEVDAHSGWVMDFAALKAVFQPIWERLDHHYLNDIPGLENPTSEVLARWIWQQLKPELPELSAVMIKETCSAGCVYRG

SEQ ID NO: 27124 - protein, 119 aa, unidentified; identical to SEQ ID NO: 27109
  source 1..119: note = Yersinia wautersii
  REGION 1..119: note = tr|A0A0E8XIL0|A0A0E8XIL0_9GAMM 6-carboxy-5,6,7,8-tetrahydropterin synthase OS=Yersinia wautersii OX=1341643 GN=queD PE=3 SV=1

SEQ ID NO: 27125 - protein, 120 aa, unidentified
  source 1..120: note = Yersiniaceae bacterium
  REGION 1..120: note = tr|A0A2N5EKB1|A0A2N5EKB1_9GAMM 6-carboxy-5,6,7,8-tetrahydropterin synthase; OS = Yersiniaceae bacterium 2016Iso3 OX=2060066 GN=queD PE=3; SV = 1
MVTTLFKDFQFEAAHRLPHVPEGHKCGRLHGHSFMVRLEITGEVDPHTGWVMDFSELKALFKPTWERLDHFYLNDIPGLENPTSEVLAKWIWDELKPQLPILSAVLVKETCTAGCIYKGE

SEQ ID NO: 27126 - protein, 120 aa, unidentified
  source 1..120: note = Yersiniaceae bacterium
  REGION 1..120: note = tr|A0A2N5E9I7|A0A2N5E9I7_9GAMM 6-carboxy-5,6,7,8-tetrahydropterin synthase; OS = Yersiniaceae bacterium 2016Iso4 OX=2060068 GN=queD PE=3; SV = 1
MVTTLFKDFQFEAAHRLPHVPEGHKCGRLHGHSFMVRLEITGEVDPHTGWVMDFSELKALFKPTWERLDHFYLNDIPGLENPTSEVLAKWIWDELKPQLPILSAVLVKETCTAGCIYKGD

SEQ ID NO: 27127 - protein, 121 aa, Yokenella regensburgei
  REGION 1..121: note = tr|G9Z3D5|G9Z3D5_9ENTR 6-carboxy-5,6,7,8-tetrahydropterin synthase OS=Yokenella regensburgei ATCC 43003 OX=1002368 GN=HMPREF0880_02041; PE = 3 SV=1
MMSTTLFKDFTFEAAHHLPHVPKGHKCGRLHGHSFMVRLEITGDVDPHTGWIMDFADLKAAFKPTYDRLDHYYLNDIPGLENPTSEVLAKWIWDQVKPVVPLLSAVMIKETCTAGCVYRGE

SEQ ID NO: 27128 - protein, 121 aa, Yokenella regensburgei; identical to SEQ ID NO: 27127
  REGION 1..121: note = tr|A0A2X2Q764|A0A2X2Q764_9ENTR 6-carboxy-5,6,7,8-tetrahydropterin synthase OS=Yokenella regensburgei OX=158877 GN=queD PE=3 SV=1

SEQ ID NO: 27129 - protein, 131 aa, unidentified
  source 1..131: note = Yoonia maricola
  REGION 1..131: note = tr|A0A2M8W0I9|A0A2M8W0I9_9RHOB 6-pyruvoyl-tetrahydropterin synthase OS=Yoonia maricola; OX = 420999 GN=BC777_3490 PE=4 SV=1
MFAVEVRDHVMIAHSLPSPVFGPAQGMHGATFVVDAAFYTKDLDDNGLVVDIGLALEALAEALKPLKYANLDEVPAFKSKITTTEFLCHYIWQQLRDTAKTTGLGDGGRVCRIKVSLEESHVARGWYEADI

SEQ ID NO: 27130 - protein, 117 aa, unidentified
  source 1..117: note = Yoonia maritima
  REGION 1..117: note = tr|A0A2T0VT86|A0A2T0VT86_9RHOB 6-carboxy-5,6,7,8-tetrahydropterin synthase OS=Yoonia maritima OX=1435347 GN=CLV80_1203 PE=3 SV=1
MFRISKEFHFSASHQLSHLPQDHQCARLHGHNYIVVVELAAASLNSDGFVRDYHELKPLKDYIDGTFDHRHLNDVLDGPSTAENMAHHFYEWCKARWPEASAVKVSETPKTWAEYRP

SEQ ID NO: 27131 - protein, 117 aa, unidentified
  source 1..117: note = Yoonia sediminilitoris
  REGION 1..117: note = tr|A0A2T6KC40|A0A2T6KC40_9RHOB 6-carboxy-5,6,7,8-tetrahydropterin synthase OS=Yoonia sediminilitoris OX=1286148 GN=C8N45_110108 PE=3 SV=1
MYRITKEFHFSASHQLSHLPHDHQCARLHGHNYVVVVELASATLNSDGFVRDYGELKPLKTYIDDTFDHRHLNDVMAEASTGENMARHFYDWCVARWPETSAVKVSETPKTWAEYRP

SEQ ID NO: 27132 - protein, 118 aa, unidentified
  source 1..118: note = Yoonia vestfoldensis
  REGION 1..118: note = tr|A0A1Y0E729|A0A1Y0E729_9RHOB 6-carboxy-5,6,7,8-tetrahydropterin synthase OS=Yoonia vestfoldensis OX=245188 GN=queD PE=3 SV=1
MFRITKEFHFSASHQLCHLHQDHPCARLHGHNYIVVVELACDTLDEDGFVLDYNALAPLKRYIDDEMDHRHLNEVFGHDKVTSEWMAQMLYDWCKARWDQTSAVKVSETPKTWAEYRP

SEQ ID NO: 27133 - protein, 177 aa, Zavarzinia sp.
  REGION 1..177: note = tr|A0A317EG44|A0A317EG44_9PROT 6-carboxytetrahydropterin synthase OS=Zavarzinia sp. HR-AS; OX = 2211142 GN=DKG74_09710 PE=4 SV=1
MDFTITRQIAIDAGHRIASHGSKCRHLHGHRYVIEASCRPVSGELRAAGEQAGMVLDFGFLKDEMMALIDAPCDHGLIADIADRALLDLFTPEGRKGDDWHAALAATVAAGGFATTTDGRLGQKLYVVPFPPTAEGLARHWFHRLAPAVARRSDGLAALTRVTVHETPNCRADYAPL

SEQ ID NO: 27134 - protein, 150 aa, Zeaxanthinibacter enoshimensis
  REGION 1..150: note = tr|A0A4R6TN26|A0A4R6TN26_9FLAO 6-pyruvoyltetrahydropterin/6-carboxytetrahydropterin synthase OS=Zeaxanthinibacter enoshimensis OX=392009; GN = CLV82_0741 PE=4 SV=1
MEKIRVTKEFTFETGHALYGYDGKCRNVHGHSYKLSVTVIGEPITDQDHVKLGMVIDFGDLKKIVKEEVVDPFDHATVFNKNSPHIELANELESRGHKVILADYQPTSENMVLDFASKIKKRLPDNLSLHSLQLRETDTAYAEWYASDNA

SEQ ID NO: 27135 - protein, 135 aa, Zeaxanthinibacter enoshimensis
  REGION 1..135: note = tr|A0A4R6TJ02|A0A4R6TJ02_9FLAO 6-carboxy-5,6,7,8-tetrahydropterin synthase; OS = Zeaxanthinibacter enoshimensis OX=392009 GN=CLV82_1530; PE = 3 SV=1
MKVKVSRAAHFNAAHRLYRPDWDEEKNNAVFGKCNNPNFHGHNYELIVSVTGPIDKETGMVIDLKDLKDLIRSEVEDAFDHKNLNLEVPEFAKLNPTAENIAVIIWNKLKPHLKEEQELEVVLYETPRNFVTYSG

SEQ ID NO: 27136 - protein, 124 aa, unidentified
  source 1..124: note = Zetaproteobacteria bacterium
  REGION 1..124: note = tr|A0A2A5EED4|A0A2A5EED4_9PROT 6-carboxy-5,6,7,8-tetrahydropterin synthase; OS = Zetaproteobacteria bacterium OX=2026807 GN=queD PE=3; SV = 1
MPHYELSIETHFSAAHQLRDYPGDCARLHGHNWHVKLFVSCQDLDDLGLGIDYKTMKIQIKEALEKWDHYNLNDIAPFDTINPSSENVARLLFEEMCERLNNERLHVSRVSISETCTAKVSYWA

SEQ ID NO: 27137 - protein, 124 aa, unidentified
  source 1..124: note = Zetaproteobacteria bacterium
  REGION 1..124: note = tr|A0A3M1ZK67|A0A3M1ZK67_9PROT 6-carboxy-5,6,7,8-tetrahydropterin synthase; OS = Zetaproteobacteria bacterium OX=2026807 GN=queD PE=3; SV = 1
MSCFELCCKAHFSAAHFLRGYNGDCARLHGHNWHVRLYVKCEQLDKLGMGIDYAVMKRELKQALACWDHYHLNEIPPFDRINPTSENVAAELYKQLRPRLENERLTISRIEIAETCTASVTYWP

SEQ ID NO: 27138 - protein, 141 aa, unidentified
  source 1..141: note = Zhizhongheella caldifontis
  REGION 1..141: note = tr|A0A2S5SUH7|A0A2S5SUH7_9BURK Uncharacterized protein OS=Zhizhongheella caldifontis OX=1452508; GN = C1704_09550 PE=4 SV=1
MYSVNVRDHFMIAHSFQGAVFGPAQRLHGATYVVDLELRRPELDADGIVVDIGRATEVLREILSALNFRNLDEEAVFRGRNTTTEFLARVIFDRVAERIARGDLGASAAGLTHAKVTLHESHVAWAAYEAALPVPRPPLQA

SEQ ID NO: 27139 - protein, 165 aa, unidentified
  source 1..165: note = Zhongshania aliphaticivorans
  REGION 1..165: note = tr|A0A127M2Z7|A0A127M2Z7_9GAMM 6-pyruvoyl tetrahydropterin synthase OS=Zhongshania aliphaticivorans; OX = 1470434 GN=AZF00_04545 PE=4 SV=1
MPVKAYTCIEISKEDLKFSGAHFTIFSATERERLHGHNFKVSLLLTADVGDNGMCFSYVEIKTRLRKLCAQLDEYTLLPAASPFMQIRTEGAQYIAEFNGEEIPFLISDTLVLPVRNTTVEEFARYLLELLLRDAPFIEGNEIRELIMKVSSGPGQWGSASWSRD

SEQ ID NO: 27140 - protein, 118 aa, unidentified
  source 1..118: note = Zhongshania aliphaticivorans
  REGION 1..118: note = tr|A0A127M467|A0A127M467_9GAMM 6-carboxy-5,6,7,8-tetrahydropterin synthase OS=Zhongshania aliphaticivorans OX=1470434 GN=AZF00_06850 PE=3 SV=1
MEIYKDFTFEAAHLLPNVPQGHKCGRLHGHSFLIRLYIAGDIDPHTGWLMDFSDIKQIFKPIYEQLDHNYLNDIPGLENPTSENLAIWIWQQLKPILSALSQVEVRETCTSGCIYRGE

SEQ ID NO: 27141 - protein, 118 aa, Zhongshania sp.
  REGION 1..118: note = tr|A0A3N0CJH2|A0A3N0CJH2_9GAMM 6-carboxy-5,6,7,8-tetrahydropterin synthase OS=Zhongshania sp. DSW25-10 OX=2304603 GN=queD PE=3 SV=1
MEIYKEFTFEAAHRLPNVPEGHKCARLHGHSFLVRIFIAGDIDPHTGWLMDFSEVKKIFAPIYDQLDHHYLNDIPGLENPTSENLAIWIWKQLKPRLNALSQVEIRETCTSGCIYKGE

SEQ ID NO: 27142 - protein, 165 aa, Zhongshania sp.
  REGION 1..165: note = tr|A0A2S4HBP5|A0A2S4HBP5_9GAMM 6-pyruvoyl tetrahydropterin synthase OS=Zhongshania sp. ZX-21; OX = 2067667 GN=C0068_17365 PE=4 SV=1
MPVKAYTNIEISKEDLKFSGAHFTIFSATDRERLHGHNFKVSLLLTADVGDNGMCFSYVEIKTRLRKLCASLDEYTLLPAESPYMRVVERGNFYIAEFNGEEIPFLQSDTLVLPVRNTTVEEFARYLLELLLTDAPFIEGNEIRELVMKVSSGPGQWGSASWTRD

SEQ ID NO: 27143 - protein, 150 aa, Zhouia amylolytica
  REGION 1..150: note = tr|A0A1I6SB56|A0A1I6SB56_9FLAO 6-pyruvoyltetrahydropterin/6-carboxytetrahydropterin synthase OS=Zhouia amylolytica OX=376730; GN = SAMN04487906_1508 PE=4 SV=1
MSKIRITKQFDFETGHALYGYDGKCRNVHGHSYKLAVTVIGSPITDTSHVKLGMVIDFGDLKKIVKEDIVDIFDHATVFNKNTPHIELAKELQDRGHNVILVDYQPTSENMVIDFAHKISARLPENIKLHSLKLQETETSFAEWYASDNL

SEQ ID NO: 27144 - protein, 150 aa, Zhouia amylolytica; identical to SEQ ID NO: 27143
  REGION 1..150: note = tr|W2UKU4|W2UKU4_9FLAO 6-pyruvoyltetrahydrobiopterin synthase OS=Zhouia amylolytica AD3 OX=1286632; GN = P278_26930 PE=4 SV=1

SEQ ID NO: 27145 - protein, 118 aa, Zobellella denitrificans
  REGION 1..118: note = tr|A0A291HPW7|A0A291HPW7_9GAMM 6-carboxy-5,6,7,8-tetrahydropterin synthase OS=Zobellella denitrificans OX=347534 GN=AN401_10215 PE=3 SV=1
MYTIKKEFHFSASHQLKQMPDWHPCARLHGHNYVVVLELQSETLDQYGFVRDYLELKAFKDYIDERLDHRHLNEVLGDECTTAERLACHLFDWARARWPEVSAVLVSETPKTWAEYRP

SEQ ID NO: 27146 - protein, 118 aa, Zobellella denitrificans
  REGION 1..118: note = tr|A0A231MVE7|A0A231MVE7_9GAMM 6-carboxy-5,6,7,8-tetrahydropterin synthase OS=Zobellella denitrificans OX=347534 GN=CGX12_15695 PE=3 SV=1
MYTIKKEFHFSASHQLKQMPDWHPCARLHGHNYVVVLELQSETLDQYGFVRDYLELKAFKDYIDERLDHRHLNEVLGDECTTAERLACHLYDWARARWPEVSAVLVSETPKTWAEYRP

SEQ ID NO: 27147 - protein, 118 aa, unidentified
  source 1..118: note = Zobellella endophytica
  REGION 1..118: note = tr|A0A2P7RBG9|A0A2P7RBG9_9GAMM 6-carboxy-5,6,7,8-tetrahydropterin synthase OS=Zobellella endophytica OX=2116700 GN=C7H85_01560 PE=3 SV=1
MYTIKKEFHFSASHQLKQMPDHHPCSRLHGHNYVVVIELKSEHLDQYGFVRDYLELADFKRFIDHELDHRHLNEVLGDECTTAERLARYLFDWAHARWPEVSAMSVSETPKTWAEYRP

SEQ ID NO: 27148 - protein, 118 aa, Zobellella taiwanensis
  REGION 1..118: note = tr|A0A2P7RE09|A0A2P7RE09_9GAMM 6-carboxy-5,6,7,8-tetrahydropterin synthase OS=Zobellella taiwanensis OX=347535 GN=queD PE=3 SV=1
MYTIKKEFHFSASHQLKQMPDWHPCARLHGHNYVVVIELQSETLDQYGFVRDYLELKAFKDYIDDKLDHRHLNEVLGDECTTAERLARHLYDWACERWPEVSAVAVSETPKTWAEYRP

SEQ ID NO: 27149 - protein, 150 aa, Zobellia galactanivorans
  REGION 1..150: note = tr|G0L4A6|G0L4A6_ZOBGA 6-Pyruvoyl tetrahydrobiopterin synthase OS=Zobellia galactanivorans (strain DSM 12802 / CCUG 47099 / CIP 106680 / NCIMB 13871 / Dsij) OX=63186GN=ptsA PE=4 SV=1
MGIIRITKQFNFETGHALYGYDGKCRNVHGHSYKLSVTVIGRPITDTSHVKLGMVIDFGDLKKIVKEEIVDQFDHATVFNKNTPHVELAKELTDRGHNVILADYQPTSENMVIDFAKRIRARLPENISLHSLRLQETDTSFAEWYASDNQ

SEQ ID NO: 27150 - protein, 135 aa, Zobellia galactanivorans
  REGION 1..135: note = tr|G0L1H9|G0L1H9_ZOBGA 6-carboxy-5,6,7,8-tetrahydropterin synthase OS=Zobellia galactanivorans (strain DSM 12802 / CCUG 47099 / CIP 106680 / NCIMB 13871 / Dsij) OX=6 3186 GN=pts PE=3 SV=1
MRVKVSRKAHFNAAHRLYRKDWSDEKNTQVFGKCNNPNYHGHNYELVVSVTGKIDPETGFVMDMKVLKDLIAEKVEDALDHKNLNIEVPEFKDLNPTAENISIIIWNKLRPHINPNHDLEVVLYETPRNFVTYSG

SEQ ID NO: 27151 - protein, 135 aa, Zobellia uliginosa; identical to SEQ ID NO: 27150
  REGION 1..135: note = tr|A0A1N7NP41|A0A1N7NP41_9FLAO 6-carboxy-5,6,7,8-tetrahydropterin synthase OS=Zobellia uliginosa OX=143224 GN=SAMN05421766_106198 PE=3 SV=1

SEQ ID NO: 27152 - protein, 150 aa, Zobellia uliginosa
  REGION 1..150: note = tr|A0A1N7IQF1|A0A1N7IQF1_9FLAO 6-pyruvoyltetrahydropterin/6-carboxytetrahydropterin synthase OS=Zobellia uliginosa OX=143224; GN = SAMN05421766_101426 PE=4 SV=1
MGKIRITKQFNFETGHALYGYDGKCRNVHGHSYKLSVTVIGTPITDTSHVKWGMVIDFGDLKKIVKEEIVDQFDHATVFNKNTPHVELAQELISRGHNVILADYQPTSENMVIDFSKKIRARLPENISLHSLKLQETDTSFAEWYASDNQ

SEQ ID NO: 27153 - protein, 150 aa, Zoogloea ramigera
  REGION 1..150: note = tr|A0A4Y4CU58|A0A4Y4CU58_ZOORA 6-carboxytetrahydropterin synthase QueD OS=Zoogloea ramigera OX=350 GN=ZRA01_08660 PE=4 SV=1
MRITRRLEFDAGHRIPDHASQCRHLHGHRYALEITLSGDTIKRDGSPVNGMVMDFGDVKAIAKQQVVDVWDHAFLAYRGDTAVVAFLQSMPGHKTVILDVVPTAENLAAEAFRILDPAYRDIYGNHLRLERVRLFETPNCWADAVRAEQA

SEQ ID NO: 27154 - protein, 123 aa, Zoogloea sp.
  REGION 1..123: note = tr|A0A5C7KAL0|A0A5C7KAL0_9RHOO 6-carboxy-5,6,7,8-tetrahydropterin synthase OS=Zoogloea sp. OX=49181 GN=E6R15_07050 PE=3 SV=1
MHELSRAFLFEAAHTLQRDIGTEGSRRIHGHSYRATITLAGVPDPVTGMLIDIGHLDTLLADTRDALDHRFLDEVPGLGPATLENLCSFLWARLAPSLPQLHRVTVSRDLSGDACSFVGQAVC

SEQ ID NO: 27155 - protein, 150 aa, Zoogloea sp.
  REGION 1..150: note = tr|A0A5C7K370|A0A5C7K370_9RHOO 6-carboxytetrahydropterin synthase QueD OS=Zoogloea sp.; OX = 49181 GN=queD PE=4 SV=1
MRITRRLEFDAGHRIPDHASQCRHLHGHRYALEITLSGEIIQATGEAVNGMVMDFADVKAVAKQHVVDVWDHAFLAYRGDTAVVSFLQSMPGHKTVLLDVVPTAENLAAEAFRILDPLYRDVYGNHLRLERVRLFETPNCWADALRSELD

SEQ ID NO: 27156 - protein, 149 aa, unidentified
  source 1..149: note = Zoogloeaceae bacteirum
  REGION 1..149: note = tr|A0A2S0QZX4|A0A2S0QZX4_9RHOO 6-carboxy-5,6,7,8-tetrahydropterin synthase; OS = Zoogloeaceae bacteirum Par-f-2 OX=2080469 GN=queD PE=3; SV = 1
MRITRRLEFDAGHRIPDHASQCRHLHGHRYAIEVTLSGRIIDAAGQPVNGMVMDFADVKTIAKQHLVDLWDHAFLVYRGDTVVVDLLARIPGHKTVVLDVIPTAENLARLAFEILDPLYRDIYGNNLRLERVRLFETPNCWADAVRGAD

SEQ ID NO: 27157 - protein, 283 aa, Zooshikella ganghwensis
  REGION 1..283: note = tr|A0A4P9VTK7|A0A4P9VTK7_9GAMM 6-pyruvoyl tetrahydropterin reductase OS=Zooshikella ganghwensis; OX = 202772 GN=B9G39_19075 PE=4 SV=1
MASLFVEQLTVIDFSYLCPERGLVGESWLVDVVLDGSLNEQGMVFDFGNVKKDIKQAIDSTIDHTLVVPSKSKAIQLVDHGDIREVMLETSQNGILHCQAPSAAIVPIPVDVITPSTLKAVVEEHLKSVVPDNVDSVSVNLYPQSIQEAYYHYSHGLKKHHGDCQRIAHGHRSPLKVKLDGQTSPQLASQWAKKWQDIYLVTEADILDEFENKGFRYIKCGYQAPQGYFELTINKKCCYFFQTDTTVELIAQHLAQEIKKDYPSHQVTVHAYEGYKKGAIATA

SEQ ID NO: 27158 - protein, 149 aa, unidentified
  source 1..149: note = Zunongwangia atlantica
  REGION 1..149: note = tr|A0A1Y1T1E0|A0A1Y1T1E0_9FLAO 6-carboxy-5,6,7,8-tetrahydropterin synthase; OS = Zunongwangia atlantica 22II14-10F7 OX=1185767; GN = IIF7_13577 PE=3 SV=1
MAKIRITKQFSFETGHALYGYDGKCRNVHGHSYKLSVTVIGEPITDTENVKYGMVIDFGDLKKIVKSEIVDQFDHATVFNQNTPHLELAKELQDRGHHVILVDYQPTSENMVIDFAEKINKHLPDHIKLHSLKLQETETSFAEWYASDN

SEQ ID NO: 27159 - protein, 136 aa, unidentified
  source 1..136: note = Zunongwangia atlantica
  REGION 1..136: note = tr|A0A1Y1T9X8|A0A1Y1T9X8_9FLAO 6-carboxy-5,6,7,8-tetrahydropterin synthase; OS = Zunongwangia atlantica 22II14-10F7 OX=1185767; GN = IIF7_01985 PE=3 SV=1
MRLTVHRKAHFNAAHRLFKKEWSDEKNFEIFGKCSNPNFHGHNYELIVAVTGEIDPETGFVMDLKRLKDLIYTEVETPFDHKNLNVEVEEFKSLNPTAENIAVVIWNKLRDKLRANLELEVTLYETPRNYVSYKGE

SEQ ID NO: 27160 - protein, 136 aa, unidentified
  source 1..136: note = Zunongwangia mangrovi
  REGION 1..136: note = tr|A0A1I1LRM6|A0A1I1LRM6_9FLAO 6-carboxy-5,6,7,8-tetrahydropterin synthase; OS = Zunongwangia mangrovi OX=1334022 GN=SAMN04487907_108128; PE = 3 SV=1
MRLTVHRKAHFNAAHRLFKKEWSDEKNFEVFGKCSNPNFHGHNYELIVAVTGEVDPETGFVMDLKRLKDLIYTEVETPFDHKNLNVEVEEFKSLNPTAENIAVVIWNKLRDKLRANLDLEVTLYETPRNYVSYKGE

SEQ ID NO: 27161 - protein, 149 aa, unidentified
  source 1..149: note = Zunongwangia mangrovi
  REGION 1..149: note = tr|A0A1I1DIR5|A0A1I1DIR5_9FLAO 6-carboxy-5,6,7,8-tetrahydropterin synthase; OS = Zunongwangia mangrovi OX=1334022 GN=SAMN04487907_101408; PE = 3 SV=1
MAKIRITKQFSFETGHALYGYDGKCRNVHGHSYKLSVTVIGEPIADTENVKYGMVIDFGDLKKIVKSEIVDQFDHATVFNQNTPHLELAKELQDRGHHVILVDYQPTSENMVIDFAEKINKHLPDHIKLHSLKLQETETSFAEWYASDN

SEQ ID NO: 27162 - protein, 136 aa, Zunongwangia profunda
  REGION 1..136: note = tr|D5BIR3|D5BIR3_ZUNPS 6-carboxy-5,6,7,8-tetrahydropterin synthase; OS = Zunongwangia profunda (strain DSM 18752 / CCTCC AB 206139 / SM-A87) OX=655815 GN=ZPR_1175 PE=3SV=1
MRLTVHRKAHFNAAHRLFKKEWTDEKNFEVFGKCSNPNYHGHNYELTVSVTGEVDPETGFVMDLKRLKDLIYTEVETPFDHKNLNVEVEEFKTLNPTAENIAVVIWNKLREKLRENLDLQVTLYETPRNFVSYKGE

SEQ ID NO: 27163 - protein, 149 aa, Zunongwangia profunda
  REGION 1..149: note = tr|A0A3D5IUB8|A0A3D5IUB8_9FLAO 6-carboxy-5,6,7,8-tetrahydropterin synthase; OS = Zunongwangia profunda OX=398743 GN=DGQ38_00360 PE=3 SV=1
MAKIRITKQFSFETGHALYGYDGKCRNVHGHSYKLSVTVIGEPITDTENVKYGMVIDFGDLKKIVKSEIVDQFDHATVFNQNTPHIELAKELKNRGHHVILVDYQPTSENMVIDFAEKIKKHLPDHIQLHSLKLQETESSFAEWYAIDN

SEQ ID NO: 27164 - protein, 149 aa, Zunongwangia sp.
  REGION 1..149: note = tr|A0A2E0NXX4|A0A2E0NXX4_9FLAO 6-carboxy-5,6,7,8-tetrahydropterin synthase; OS = Zunongwangia sp. OX=1965325 GN=CMP13_08180 PE=3 SV=1
MAKIRITKQFSFETGHALYGYDGKCRNVHGHSYKLSVTVIGEPITDTENVKYGMVIDFGDLKKIVKSEIVDQFDHATVFNQNTPHIELAKELKNRGHHVILVDYQPTSENMVIDFAEKIKKHLPDHIQLHSLKLQETESSFAEWYASDN

SEQ ID NO: 27165 - protein, 136 aa, Zunongwangia sp.
  REGION 1..136: note = tr|A0A2E0NUC1|A0A2E0NUC1_9FLAO 6-carboxy-5,6,7,8-tetrahydropterin synthase; OS = Zunongwangia sp. OX=1965325 GN=CMP13_01820 PE=3 SV=1
MRLTVHRKAHFNAAHRLFKKEWTDEKNFEVFGKCSNPNYHGHNYELTVSVTGEVDPETGFVMDLKRLKDLIYTEVETPFDHKNLNVEVEEFKTLNPTAENITVVIWNKLREKLRENLDLQVTLYETPRNFVTYKGE

SEQ ID NO: 27166 - protein, 279 aa, Zymobacter palmae
  REGION 1..279: note = tr|A0A348HE35|A0A348HE35_9GAMM 6-pyruvoyl-tetrahydropterin synthase OS=Zymobacter palmae; OX = 33074 GN=ZBT109_1126 PE=4 SV=1
MSLFVHGLSALDLSWWCGERGLVGASWHVDLLLNGELGEDGMLFDFGEVKPWVKQHVDGTVDHTLLVPTKMAGVSVTECREGLCVRFSSPWPMEIRAPRQAFTLLPWQIIDADRIGRYLSEQLMKRPPARVTDIQLTLREEPIPEGFCYGYSHGLKRHIGNCQRIAHGHRSRLYIWRDGELDEALIQHWCERLADIYLADREDCIGAEDGDTLSLAYDAPQGHFRMTLPRQRAAILPTTTTVEQIAQWIANETARMQPGRIRVQAFEGIGKGAIAEAHR

SEQ ID NO: 27167 - protein, 118 aa, Zymomonas mobilis
  REGION 1..118: note = tr|A0A2R9NUN5|A0A2R9NUN5_ZYMMB 6-carboxy-5,6,7,8-tetrahydropterin synthase OS=Zymomonas mobilis subsp. mobilis NRRL B-12526 OX=1194424 GN=queD; PE = 3 SV=1
MRITQAFTFEAAHRLPHVPETHRCRRLHGHSYRVELRLEGAVNPETGFVVDFFDVEHIFGPVLKQLDHYCLNDIPGLENPTAENISQWIWRKIKNDLPLLAAVTVYETPHCWAEYLGD

SEQ ID NO: 27168 - protein, 118 aa, Zymomonas mobilis
  REGION 1..118: note = tr|A0A542W0Y5|A0A542W0Y5_ZYMMB 6-carboxy-5,6,7,8-tetrahydropterin synthase OS=Zymomonas mobilis OX=542 GN=FBY58_0812 PE=3 SV=1
MRITQAFTFEAAHRLPHVPETHRCHRLHGHSYRVELRLEGPVNPKTGFVVDFFDVEHIFGPVLKQLDHYCLNDIAGLENPTAEHIAQWIWRKIKSDLPLLSAVLVYETPHCWAEYLGD

SEQ ID NO: 27169 - protein, 121 aa, Escherichia coli; identical to SEQ ID NO: 16827
  REGION 1..121: note = sp|P65870|QUED_ECOLI 6-carboxy-5,6,7,8-tetrahydropterin synthase OS=Escherichia coli (strain K12) OX=83333 GN=queD PE=1 SV=1

SEQ ID NO: 27170 - protein, 121 aa, Escherichia coli; identical to SEQ ID NO: 16827
  REGION 1..121: note = tr|C3SXD2|C3SXD2_ECOLX 6-carboxy-5,6,7,8-tetrahydropterin synthase OS=Escherichia coli OX=562 GN=queD PE=3 SV=1

SEQ ID NO: 27171 - protein, 246 aa, unidentified
  source 1..246: note = Abditibacterium utsteinense
  REGION 1..246: note = tr|A0A2S8SSK5|A0A2S8SSK5_9BACT 7-carboxy-7-deazaguanine synthase OS=Abditibacterium utsteinense OX=1960156 GN=queE PE=3 SV=1
MKPILISEIFGPTIQGEGSLIGRPTVFVRTGGCDFRCAWCDTLYAVLPEFKSDWTPQSPAEIIAQVEHLSGGFPILITVSGGNPALQLLEDLLDLGHEHGHTFALETQASRPQSWFCKLDYLVLSPKPPSSGMEFRAEKLAQCIEAAIVQGIPTKNEGSATQVSLKVVVFDEDDYLFAWRVHALHPEIPFYLSVGNPSPQSGSEADAGDLVTRFEWLLARAARDGWFSATISPQLHVLLWGNKRGV

SEQ ID NO: 27172 - protein, 212 aa, unidentified
  source 1..212: note = Abyssibacter profundi
  REGION 1..212: note = tr|A0A363UPW7|A0A363UPW7_9GAMM 7-carboxy-7-deazaguanine synthase OS=Abyssibacter profundi; OX = 2182787 GN=queE PE=3 SV=1
MRLRITEIFRSVQGESTLAGLPTTFVRLTGCPLRCGYCDTAYAFQGGQWMTGSEILDTVQDFSVRHVCVTGGEPLAQKAAPALLSTLCDAGYTVSLETSGALPIEGLDRRVIVVMDVKTPSSGECSRNLATNPQALKSGDQVKFVVGESADLDWCRQWLRDAALPAGVEILWSPVWETMSLPELAEWVASSGVPGRLQLQMHKIIWGQEPGR

SEQ ID NO: 27173 - protein, 236 aa, unidentified
  source 1..236: note = Abyssicoccus albus
  REGION 1..236: note = tr|A0A3N5C577|A0A3N5C577_9STAP 7-carboxy-7-deazaguanine synthase OS=Abyssicoccus albus; OX = 1817405 GN=queE PE=3 SV=1
MIPVLEIFGPTIQGEGAVIGKKTMFVRTAGCDFRCSWCDSSFTWDGSQKHLIQRMTAEEVYNELNKLAPNNFNHVTISGGNPALIKSLDSLVRLLKIQHIEIAVETQGTVFHSWLNEVDDLTISPKPRSSGMNQSLEQLDQFINSTKAVKRRSLKVVVFDEDDIEDALIYHKRYPDIPFYIQVGNPFLNESVENHRDYLLSRYEWLIESVMNDERFLNVHILPQLHTILWSNKQKV

SEQ ID NO: 27174 - protein, 256 aa, unidentified
  source 1..256: note = Acaryochloris marina
  REGION 1..256: note = tr|B0C252|B0C252_ACAM1 7-carboxy-7-deazaguanine synthase OS=Acaryochloris marina (strain MBIC 11017); OX = 329726 GN=queE PE=3 SV=1
MKTASTANLVEIFSAIQGEGLNVGTRQIFIRFGGCDLRCHFCDSAHTWTPKSSCQIEKTPGCRDFARYPNPVTLPQILEWVQDQDLPGMHDSISLTGGEPLLQVAFLQNLLPLLRQQTSLPIYLETGGHHPEALDPLLPHLDSVGMDLKLPSVSGENHWPQHRQSLELCHQAHIDVFCKLIISEKTDWPELVQAAQMVADISPTVLMFLQPVTPLTAQHPVQPPTPDQVLAWQGQLKQMGRQIRVVPQTHKFLGQL

SEQ ID NO: 27175 - protein, 271 aa, unidentified
  source 1..271: note = Acaryochloris sp.
  REGION 1..271: note = tr|A0A2W1JVV7|A0A2W1JVV7_9CYAN 7-carboxy-7-deazaguanine synthase OS=Acaryochloris sp. RCC1774 OX=1764569 GN=queE_1 PE=3 SV=1
MSNAVPTSISTPDALTSSALTTAALVEIFSAIQGEGVNVGTRQIFIRFGGCDLRCRFCDSVHTWHPSETCRIEQTPGLRDFVTYPNPISQTQLLTWIAQQNQPNLHDSISLTGGEPLLHADFLRLFLPQLRDSIHLPIYLETGGHRPQDLQTLLPYLDLIGMDLKLPSVSGETHWREHSQCLKLCQQARIDVFCKVIVAQHTDPEDLQQVLQTIATISPNIPVYLQPVTPLPQSIMQPPTPAQVLQWQADLKQRLKTVRVVPQTHKMLDQL

SEQ ID NO: 27176 - protein, 219 aa, unidentified
  source 1..219: note = Accumulibacter phosphatis
  REGION 1..219: note = tr|C7RPH0|C7RPH0_ACCPU 7-carboxy-7-deazaguanine synthase OS=Accumulibacter phosphatis (strain UW-1); OX = 522306 GN=queE PE=3 SV=1
MKASGKPLSLKISEIFLSLQGETSRVGLPTVFVRLTGCPLRCVWCDTAYAFAGGRTMTLPDILAEVARHDVRHVCVTGGEPLAQPACLALLSELCDTGYAVSLETSGALDIGGVDQRVARIVDLKAPGSGESDRNLWANLSLLNSGDEIKFVLAHRADYEWARQVIVERRLADVCPLLFSPVAGELAASTLAEWILADRLPVRFQLQLHKVLWGNMRGK

SEQ ID NO: 27177 - protein, 224 aa, Acetitomaculum ruminis
  REGION 1..224: note = tr|A0A1I0YX15|A0A1I0YX15_9FIRM 7-carboxy-7-deazaguanine synthase OS=Acetitomaculum ruminis DSM 5522 OX=1120918 GN=queE PE=3 SV=1
MKVVEKFISINGEGERAGELAAFIRFWGCNLACTYCDTKWANETSCPYEDLSPKDIYDYILSCNVTNVTLTGGEPLLQKDMIKLLEILLKDKSLHIEIETNGAVSIEKVAKLRDELNAYDNLSFTMDYKLISSGFEDAMILENFDYLKPVDIVKFVCESTDLERAAFVIEKYKLTDKCIVYLSPVFGKIELEEMVEFMKKNCMNKVRLQIQMHKVIWEPDKKGV

SEQ ID NO: 27178 - protein, 211 aa, Acetobacter aceti
  REGION 1..211: note = tr|A0A0D6MZZ3|A0A0D6MZZ3_ACEAC 7-carboxy-7-deazaguanine synthase OS=Acetobacter aceti NBRC 14818 OX=887700 GN=queE PE=3 SV=1
MSYAVKELFHTLQGEGGQTGRPAVFCRFSGCNLWTGREVDREKAICRFCDTDFIGTDGEGGGRFADAAALAKAIVETWALPEHDQRFVVFTGGEPLLQLDKALIDAVHQEGFMIAVESNGTIAAPEGIDWLCISPKAGSEWVQKSGHELKLVYPQPELDPADMTALDFRQFWLQPMDGPDRVANTNAVVRYCLAHPRWRLSLQTHKLIGIP

SEQ ID NO: 27179 - protein, 211 aa, Acetobacter aceti
  REGION 1..211: note = tr|A0A1U9KJS9|A0A1U9KJS9_ACEAC 7-carboxy-7-deazaguanine synthase OS=Acetobacter aceti; OX = 435 GN=queE PE=3 SV=1
MSYSVKELFHTLQGEGGQAGRAAVFCRFSGCNLWTGREADREKATCRFCDTDFIGTDGDGGGRFADAASLARAIAETWALPEHAQRFVVFTGGEPLLQLDAALIEAVHLEGFMIAVESNGTIVAPDGIDWLCISPKAGSEWIQKSGHELKLVYPQPEFDPADMTALDFSQFWLQPMDGPDRIANTDAVVRYCLAHPRWRLSLQTHKLIGIP

SEQ ID NO: 27180 - protein, 216 aa, unidentified
  source 1..216: note = Acetobacter ascendens
  REGION 1..216: note = tr|A0A1D8QUS2|A0A1D8QUS2_9PROT 7-carboxy-7-deazaguanine synthase OS=Acetobacter ascendens; OX = 481146 GN=queE PE=3 SV=1
MTYSVKEIFLTLQGEGGQAGRAAVFCRFTGCNLWSGREEDRAKAICQFCDTDFIGTDGVNGGKFENAVELAATIASFWPQPTQDVKATGQKLVVFTGGEPLLQLDSALINAMHAQDFTIAVESNGTVIAPEGIDWLCISPKAGAELVQKAGTELKLVFPQSGIDPSTLENFDFQHFWLQPMDGPQQAANTQAAIEYCLEHPLWGLSLQTHKLIGIP

SEQ ID NO: 27181 - protein, 214 aa, Acetobacter cerevisiae
  REGION 1..214: note = tr|A0A149VBE2|A0A149VBE2_9PROT 7-carboxy-7-deazaguanine synthase OS=Acetobacter cerevisiae OX=178900 GN=queE PE=3 SV=1
MSYMVKEMFLTLQGEGGQAGRPAVFCRFAGCNLWSGREADRAEAICQFCDTDFVGTDGDGGGKFETAEKLAETIAGLWPVSGNAMTVPGLVVFTGGEPLLQLDAALIDAMHARNFTIAVESNGTLHAPEGIDWLCISPKEGAALAQTSGTELKLVYPQPGLDPATLEHLDFKHFWLQPMDGPNQNDNIQAAIRYCLAHPKWGLSLQTHKLTGIP

SEQ ID NO: 27182 - protein, 214 aa, Acetobacter cerevisiae
  REGION 1..214: note = tr|A0A149UZ28|A0A149UZ28_9PROT 7-carboxy-7-deazaguanine synthase OS=Acetobacter cerevisiae OX=178900 GN=queE PE=3 SV=1
MSYMVKEMFLTLQGEGGQAGRPAVFCRFAGCNLWSGREADRAEAICQFCDTDFVGTDGDGGGKFETAEKLAETIAGLWPESGSAMTVPGLVVFTGGEPLLQLDAALIDAMHARNFTIAVESNGTLHAPQGIDWLCISPKEGAALEQTSGTELKLVYPQPGLDPATVEHLDFKHFWLQPMDGPNQNDNIQAAIRYCLAHPKWGLSLQTHKLTGIP

SEQ ID NO: 27183 - protein, 211 aa, Acetobacter cibinongensis
  REGION 1..211: note = tr|A0A1Z5YS46|A0A1Z5YS46_9PROT 7-carboxy-7-deazaguanine synthase OS=Acetobacter cibinongensis OX=146475 GN=queE PE=3 SV=1
MTYSVKEVFLTLQGEGGQAGRAAIFCRFTGCNLWSGREADRATAICQFCDTDFIGTDGDGGGKFPTADNLAAHINALWPHSDIDHKLVVFTGGEPLLQLDDTLIQAMHQAGFKIAVESNGTVQAPEGIDWLCISPKAGGELVQTQGTELKLVYPQSGIDPASLETLDFQQFWLQPMDGPNQADNLQAAIRYCLKHPKWGLSLQTHKLTGIP

SEQ ID NO: 27184 - protein, 211 aa, Acetobacter cibinongensis
  REGION 1..211: note = tr|A0A0D6N6S1|A0A0D6N6S1_9PROT 7-carboxy-7-deazaguanine synthase OS=Acetobacter cibinongensis 4H-1 OX=1231339 GN=queE PE=3 SV=1
MTYSVKEVFLTLQGEGGQAGRAAIFCRFTGCNLWSGREADRATAICQFCDTDFIGTDGDGGGKFPTADDLAAHINALWPQSDIDHKLVVFTGGEPLLQLDDTLIQAMHQAGFKIAVESNGTVQAPEGIDWLCISPKAGGELVQTQGTELKLVYPQSGIDPASLETLDFQQFWLQPMDGPNQADNLQAAIRYCLKHPKWGLSLQTHKLTGIP

SEQ ID NO: 27185 - protein, 212 aa, Acetobacter fabarum
  REGION 1..212: note = tr|A0A269Y0Z3|A0A269Y0Z3_9PROT 7-carboxy-7-deazaguanine synthase OS=Acetobacter fabarum; OX = 483199 GN=queE PE=3 SV=1
MVYSVKEIFLTLQGEGGQAGRVAVFCRFTGCNLWSGREEDRAQAVCQFCDTDFIGTNGTGGGRFHNAAELATRIAGFWPASASPGRPLVVFTGGEPLLQLDAPLIAAMHDKGFAIAVESNGTVLAPEGIDWLCISPKACAQLVQTSGAELKLVYPQPGLDPADLAGLDFTNFWLQPMDGPEQAANTQAAIAYCLQNPRWALSLQTHKLTGIP

SEQ ID NO: 27186 - protein, 214 aa, Acetobacter ghanensis
  REGION 1..214: note = tr|A0A0U5F7U9|A0A0U5F7U9_9PROT 7-carboxy-7-deazaguanine synthase OS=Acetobacter ghanensis; OX = 431306 GN=queE PE=3 SV=1
MVYSVKEIFLTLQGEGGQAGRVAVFCRFTGCNLWSGREEDRQEAICQFCDTDFVGTDGSNGGRFQTAADLADCIANFWPAQAPATPQRRLIVFTGGEPLLQLDAPLIDAMHARGFSIAVESNGTIAAPQGIDWLCISPKAGAPLVQTSGTELKLVYPQEGLNPADVAGLDFTHFWLQPKDGPDQAANTQAAIAYCLQTPQWALSLQTHKLTGIP

SEQ ID NO: 27187 - protein, 214 aa, Acetobacter indonesiensis
  REGION 1..214: note = tr|A0A252AV34|A0A252AV34_9PROT 7-carboxy-7-deazaguanine synthase OS=Acetobacter indonesiensis OX=104101 GN=queE PE=3 SV=1
MTYSVKEIFLTLQGEGGQAGRAAVFCRFTGCNLWTGREEDRAKAVCQFCDTDFIGTDGDGGGKFETADTLADAILSQWPENPLTSSTPGLVVFTGGEPLLQLDATLIDAMHKRGFSIAVESNGTVVAPAGIDWLCISPKAGSTLEQTSGTELKLVFPQPGLDPASLSKLDFKHFWLQPMDGPNQSTNIQAAIAYCMTHPQWGLSLQTHKLTGIP

SEQ ID NO: 27188 - protein, 214 aa, Acetobacter indonesiensis; identical to SEQ ID NO: 27187
  REGION 1..214: note = tr|A0A0D6NCY4|A0A0D6NCY4_9PROT 7-carboxy-7-deazaguanine synthase OS=Acetobacter indonesiensis 5H-1 OX=1231340 GN=queE PE=3 SV=1

SEQ ID NO: 27189 - protein, 214 aa, Acetobacter malorum
  REGION 1..214: note = tr|A0A1Y3G480|A0A1Y3G480_9PROT 7-carboxy-7-deazaguanine synthase OS=Acetobacter malorum; OX = 178901 GN=queE PE=3 SV=1
MSYMVKEMFLTLQGEGGQAGRPAVFCRFAGCNLWSGREADRAEAICQFCDTDFVGTDGDGGGKFETAERLAETIARFWPESGAAMTVPGLVVFTGGEPLLQLDAALIDAMHARNFTIAVESNGTLRAPEGIDWLCISPKAGAALEQTSGTELKLVYPQPGLDPATVEHLDFRHFWLQPMDGPNQNDNIQAAIRYCLAHPKWGLSLQTHKLTGIP

SEQ ID NO: 27190 - protein, 214 aa, Acetobacter malorum
  REGION 1..214: note = tr|A0A149UHJ7|A0A149UHJ7_9PROT 7-carboxy-7-deazaguanine synthase OS=Acetobacter malorum; OX = 178901 GN=queE PE=3 SV=1
MSYMVKEMFLTLQGEGGQAGRPAVFCRFAGCNLWSGREADRAEAICQFCDTDFVGTDGDGGGKFETAEKLAETIAGFWPVSGNAMTVPGLVVFTGGEPLLQLDAALIDAMHARNFTIAVESNGTLHAPEGIDWLCISPKEGAALEQTSGTELKMVYPQPGLDPATVEHLDFKHFWLQPMDGPNQNDNIQAAIRYCLAHPKWGLSLQTHKLTGIP

SEQ ID NO: 27191 - protein, 211 aa, Acetobacter nitrogenifigens
  REGION 1..211: note = tr|A0A511X7N3|A0A511X7N3_9PROT 7-carboxy-7-deazaguanine synthase OS=Acetobacter nitrogenifigens DSM 23921 = LMG 23498 OX=1120919 GN=queE; PE = 3 SV=1
MTYAVKELFHTLQGEGGQTGRSAVFCRFAGCNLWTGREADRATAVCQFCDTDFIGTDGDGGGKFESAASLATAIAAAWPAPGQDRRFVVFTGGEPLLQLDEALIDAVHAEGFTIAVESNGTLTAPAGIDWLCVSPKAGSTLVQKSGQELKLVYPQAGFDPADFLKLDFEQFWLQPMDGPQQAANIAAATRYCLENPRWRLSLQTHKMIGIP

SEQ ID NO: 27192 - protein, 207 aa, Acetobacter oeni
  REGION 1..207: note = tr|A0A511XLS1|A0A511XLS1_9PROT 7-carboxy-7-deazaguanine synthase OS=Acetobacter oeni; OX = 304077 GN=queE PE=3 SV=1
MKELFHTLQGEGGQTGRAAVFCRFAGCNLWTGREADREKATCQFCDTDFIGTDGPGGGRFDNAKALAEAIAATWPAPGRDRRFVVFTGGEPLLQLDTPLIDAVHEQDFTIAVESNGTIAAPSGIDWLCISPKAGSTLLQKSGQELKLVYPQTTFDPQDFLALDFEQFWLQPMDGPDQKTNTDAATQYCLEHPRWRLSLQTHKLIGIP

SEQ ID NO: 27193 - protein, 214 aa, unidentified
  source 1..214: note = Acetobacter okinawensis
  REGION 1..214: note = tr|A0A252BX35|A0A252BX35_9PROT 7-carboxy-7-deazaguanine synthase OS=Acetobacter okinawensis OX=1076594 GN=queE PE=3 SV=1
MVYSVKEIFLTLQGEGGQAGRVAVFCRFTGCNLWSGREEDRAQATCQFCDTDFIGTNGTGGGRFNTAAALADRIAGFWPASAPPTPARRLVVFTGGEPLLQLDTALIAAMHDRGFSIAVESNGTVLAPPGIDWLCISPKAGAPLVQTSGTELKLVYPQSGLNPADVAGLDFAQFWLQPMDGPAQAANTQAAIAYCLQTPQWALSLQTHKLTGIP

SEQ ID NO: 27194 - protein, 211 aa, Acetobacter orientalis
  REGION 1..211: note = tr|A0A252B4Q1|A0A252B4Q1_9PROT 7-carboxy-7-deazaguanine synthase OS=Acetobacter orientalis OX=146474 GN=queE PE=3 SV=1
MTYSVKEIFLTLQGEGGQAGRAAVFCRFTGCNLWTGREEDRAKALCQFCDTDFIGTDGEGGGKFETATALAATIAAQWPASDANNKLVVFTGGEPLLQLDDALIDAMHHNGFSIAVESNGTIVAPAGIDWLCISPKAGTDFVQQRGMELKLVFPQTGLDPASLEHLDFKKFWLQPMDGPEQEDNIQAAIRYCLQHPQWGLSLQTHKLTGIP

SEQ ID NO: 27195 - protein, 211 aa, Acetobacter orientalis
  REGION 1..211: note = tr|A0A0D6NMR5|A0A0D6NMR5_9PROT 7-carboxy-7-deazaguanine synthase OS=Acetobacter orientalis 21F-2 OX=1231341 GN=queE PE=3 SV=1
MTYSVKEIFLTLQGEGGQAGRAAVFCRFTGCNLWTGREEDRAKALCQFCDTDFIGTDGEGGGKFETATALAATIAAQWPASDANNKLVVFTGGEPLLQLDDALIDAMHHNGFSIAVESNGTVIAPVGIDWLCISPKAGTDFVQQRGMELKLVFPQNGLDPASLEHLDFKKFWLQPMDGPEQEDNIQAAIRYCLQHPQWGLSLQTHKLTGIP

SEQ ID NO: 27196 - protein, 214 aa, Acetobacter orleanensis
  REGION 1..214: note = tr|A0A4Y3TIQ8|A0A4Y3TIQ8_9PROT 7-carboxy-7-deazaguanine synthase OS=Acetobacter orleanensis OX=104099 GN=queE PE=3 SV=1
MSYMVKEMFLTLQGEGGQAGRPAVFCRFAGCNLWSGREADRAEAICQFCDTDFIGTDGEGGGKFETAEKLADTIARFWPETGKAMTVPGLVVFTGGEPLLQLDAPLIEAMHARNFTIAVESNGTLPAPDGVDWLCISPKAGAPLEQTSGMELKLVYPQPGLDPATLEQLNFKHFWLQPMDGPNQHENTQAAIRYCLTHPKWGLSLQTHKLTGIP

SEQ ID NO: 27197 - protein, 216 aa, Acetobacter pasteurianus
  REGION 1..216: note = tr|A0A1Y0XYR9|A0A1Y0XYR9_ACEPA 7-carboxy-7-deazaguanine synthase OS=Acetobacter pasteurianus subsp. pasteurianus OX=481145 GN=queE PE=3; SV = 1
MTYSVKEIFLTLQGEGGQAGRAAVFCRFTGCNLWSGREEDRAKAICQFCDTDFIGTDGVNGGKFENAAELAATIASFWPQPTQDTKATGQKLVVFTGGEPLLQLDAALIDAMHAQGFSIAVESNGTVTAPAGIDWLCISPKAGAELVQKTGTELKFVFPQPDIDPAALENLDFQHFWLQPMDGPQQAANTQAAIEYCLAHPLWGLSLQTHKLIGIP

SEQ ID NO: 27198 - protein, 216 aa, Acetobacter pasteurianus
  REGION 1..216: note = tr|A0A1A0DDT9|A0A1A0DDT9_ACEPA 7-carboxy-7-deazaguanine synthase OS=Acetobacter pasteurianus OX=438 GN=queE PE=3 SV=1
MTYSVKEIFLTLQGEGGQAGRAAVFCRFTGCNLWSGREEDRAKAICQFCDTDFIGTDGVNGGKFENAAALAATIASFWPQPTEDTKATGQKLVVFTGGEPLLQLDTALIDAMHAQGFSIAVESNGTVMAPKGIDWLCISPKAGAELVQKAGTELKLVFPQPGIDPAALENLDFQHFWLQPMDGPQQAANTQAAIEYCLAHPLWGLSLQTHKLIGIP

SEQ ID NO: 27199 - protein, 213 aa, unidentified
  source 1..213: note = Acetobacter peroxydans
  REGION 1..213: note = tr|A0A4Y3TRX8|A0A4Y3TRX8_9PROT 7-carboxy-7-deazaguanine synthase OS=Acetobacter peroxydans OX=104098 GN=queE PE=3 SV=1
MSYTVKEIFLTLQGEGGQAGRVAVFCRFTGCNLWSGREQDRESAQCRFCDTDFVGTDGVNGGRFETAAELAGKIDSFWPAPSEDNGRKLVVFTGGEPLLQLDTPLIEAMHVLDFDIAVESNGTVSAPAGIDWLCISPKAGAPLRQTQGTELKLVYPQPGLNPADLAQLDFRLFWLQPMDGAHQAENLKAAIGYCLEHPQWGLSLQTHKLTGIP

SEQ ID NO: 27200 - protein, 214 aa, unidentified
  source 1..214: note = Acetobacter persici
  REGION 1..214: note = tr|A0A252APB1|A0A252APB1_9PROT 7-carboxy-7-deazaguanine synthase OS=Acetobacter persici; OX = 1076596 GN=queE PE=3 SV=1
MSYMVKEMFLTLQGEGGQAGRPAVFCRFAGCNLWSGREADRAEAICQFCDTDFIGTDGEGGGKFETAEKLAETIASFWPESGQAMTVPGLVVFTGGEPLLQLDAPLIKAMHARNFFIAVESNGTLTAPEGVDWLCISPKAGAPLEQKSGMELKLVYPQTGLDPATLEQLDFQYFWLQPMDGPNQQENTQAAIRYCLAHPKWGLSLQTHKLTGIP

SEQ ID NO: 27201 - protein, 216 aa, Acetobacter pomorum
  REGION 1..216: note = tr|A0A2G4RAN7|A0A2G4RAN7_9PROT 7-carboxy-7-deazaguanine synthase OS=Acetobacter pomorum; OX = 65959 GN=queE PE=3 SV=1
MTYSVKEIFLTLQGEGGQAGRAAVFCRFTGCNLWSGREEDRAKAICQFCDTDFIGTDGINGGKFENAAELANTIAGFWPHPTQDTKANGQKLVVFTGGEPLLQLDSALIDAMHARGFTIAVESNGTILAPEGIDWLCISPKAGAELVQKTGTELKLVFPQPGIDPAALENLDFQHFWLQPMDGPHQAANTQTAIEYCLEHPLWGLSLQTHKLIGIP

SEQ ID NO: 27202 - protein, 216 aa, Acetobacter pomorum
  REGION 1..216: note = tr|A0A346DUT2|A0A346DUT2_9PROT 7-carboxy-7-deazaguanine synthase OS=Acetobacter pomorum; OX = 65959 GN=queE PE=3 SV=1
MTYSVKEIFLTLQGEGGQAGRAAVFCRFAGCNLWSGREEDRATATCQFCDTDFIGTDGINGGKFENAADLAATIASFWPQPTQDVKATGQKLVVFTGGEPLLQLDTALINAMHAQGFTIAVESNGTIAAPKGIDWLCISPKAGSELVQKAGTELKLVFPQPGIDPASVENLDFQHFWLQPMDGPQQAANTQAAIEYCLEHPLWGLSLQTHKLIGIP

SEQ ID NO: 27203 - protein, 214 aa, Acetobacter senegalensis
  REGION 1..214: note = tr|A0A252EKB4|A0A252EKB4_9PROT 7-carboxy-7-deazaguanine synthase OS=Acetobacter senegalensis OX=446692 GN=queE PE=3 SV=1
MTYSVKEMFLTLQGEGGQAGRAAVFCRFTGCNLWTGREEDRAKATCQFCDTDFIGTDGSGGGKFENADALADAIASLWPDKPVSRSVPGLVVFTGGEPLLQLDTSLIDAMHQWGFKIAVESNGTVAAPDGIDWLCISPKAGAPLEQRHGTELKLVFPQSGLDPTTLENLDFSHFWLQPMDGPEQSANIQAAIRYCMAHPKWGLSLQTHKLTGIP

SEQ ID NO: 27204 - protein, 214 aa, Acetobacter senegalensis
  REGION 1..214: note = tr|A0A0U5EYW5|A0A0U5EYW5_9PROT 7-carboxy-7-deazaguanine synthase OS=Acetobacter senegalensis OX=446692 GN=queE PE=3 SV=1
MTYSVKEMFLTLQGEGGQAGRAAVFCRFTGCNLWTGREEDRAKATCQFCDTDFIGTDGSGGGKFENADALADAIASLWPDKPVSRSVPGLVVFTGGEPLLQLDTPLIDAMHQRGFKIAVESNGTVAAPDGIDWLCISPKAGAPLEQQHGTELKLVFPQSGLDPATLENLDFSHFWLQPMDGPEQSANIQAAIRYCMAHPKWGLSLQTHKLTGIP

SEQ ID NO: 27205 - protein, 216 aa, Acetobacter sp.
  REGION 1..216: note = tr|A0A368AGJ5|A0A368AGJ5_9PROT 7-carboxy-7-deazaguanine synthase OS=Acetobacter sp. BCRC 14118 OX=1868878 GN=queE PE=3 SV=1
MTYSVKEIFLTLQGEGGQAGRAAVFCRFTGCNLWSGREEDRAKAICQFCDTDFIGTDGVNGGKFENAVELAATIASFWPQPTQDVKATGQKLVVFTGGEPLLQLDSALINAMHAQDFTIAVESNGTVIAPEGIDWLCISPKAGAELVQKAGTELKLVFPQSGIDPSTLENLDFQHFWLQPMDGPQQAANTQAAIEYCLEHPLWGLSLQTHKLIGIP

SEQ ID NO: 27206 - protein, 214 aa, Acetobacter sp.
  REGION 1..214: note = tr|A0A5C1YSX1|A0A5C1YSX1_9PROT 7-carboxy-7-deazaguanine synthase OS=Acetobacter sp. KACC 21233 OX=2592655 GN=queE PE=3 SV=1
MSYAVKEMFLTLQGEGGQAGRVAVFCRFAGCNLWSGREEDRQSATCRFCDTDFVGTNGIDGGRFETADALADAVSRFWPNSPPQPHEEPLVVFTGGEPLLQLDPPLIEAMHDRGFSIAVESNGTLPAPPGIDWLCISPKAGASLQQTQGMELKLVFPQPDLDPADLTGLDFHHFWLQPMDGPDQQANVQAAIAYCLSHPQWGLSLQTHKLTGIP

SEQ ID NO: 27207 - protein, 214 aa, Acetobacter syzygii
  REGION 1..214: note = tr|A0A270BTJ9|A0A270BTJ9_9PROT 7-carboxy-7-deazaguanine synthase OS=Acetobacter syzygii; OX = 146476 GN=queE PE=3 SV=1
MVYSVKEIFITLQGEGGQAGHVAVFCRFTGCNLWSGREEDRAQAQCQFCDTDFIGTDGTNGGRFHTAAELADRIAGFWPEQPANSPARRLVVFTGGEPLLQLDAPLIAAMHERDFFIAVESNGTLSAPAGIDWLCISPKAGTPLVQTSGTELKLVYPQAELDPADVAGLDFAHFWLQPMDGPEQAANTQAAIAYCLQNPQWALSLQTHKLTGIP

SEQ ID NO: 27208 - protein, 214 aa, Acetobacter tropicalis
  REGION 1..214: note = tr|A0A511FJT6|A0A511FJT6_9PROT 7-carboxy-7-deazaguanine synthase OS=Acetobacter tropicalis OX=104102 GN=queE PE=3 SV=1
MTYSVKEMFLTLQGEGGQAGRAAVFCRFTGCNLWTGREEDRSKAICQFCDTDFIGTDGEGGGKFEHADALADAISSLWPDKPASAAIPGLVVFTGGEPLLQLDSALINAMHQRGFNIAVESNGTVEAPAGIDWLCISPKAGAQLEQKRGTELKLVFPQPGLDPALLESLDFKYFWLQPMDGPDQNANIQAAIRYCMAHPKWGLSLQTHKLTGIP

SEQ ID NO: 27209 - protein, 214 aa, Acetobacter tropicalis
  REGION 1..214: note = tr|A0A095AX61|A0A095AX61_9PROT 7-carboxy-7-deazaguanine synthase OS=Acetobacter tropicalis OX=104102 GN=queE PE=3 SV=1
MTYSVKEMFLTLQGEGGQAGRAAVFCRFTGCNLWTGREEDRSKAICQFCDTDFIGTDGEGGGKFEHADALADAISSLWPDKPASAAIPGLVVFTGGEPLLQLDSALINAMHQRGFNIAVESNGTVKAPAGIDWLCISPKAGALLEQKRGTELKLVFPQPGLDPALLESLDFKYFWLQPMDGPDQNANIQAAIRYCMAHPKWGLSLQTHKLTGIP

SEQ ID NO: 27210 - protein, 216 aa, unidentified
  source 1..216: note = Acetobacteraceae bacterium
  REGION 1..216: note = tr|A0A4P7W9H9|A0A4P7W9H9_9PROT 7-carboxy-7-deazaguanine synthase OS=Acetobacteraceae bacterium OX=1909293 GN=queE PE=3 SV=1
MTYSIKEIFLSLQGEGIQSGKISLFCRFSGCNLWNGLEKDREKSICKFCDTDFIGTNGAYGGKYASPENLAETIADIWEKETKSSAEKHVIFTGGEPLLQLDAPLLSALKDHGFKISLETNGSLMPSKDVLTLLDWICVSPKEEKLALTAGDELKFIYPQTHLTPESFQHLKFKHFILQPMDNENKKENTKQALNYCLTHPNWRLGLQLHKILDIE

SEQ ID NO: 27211 - protein, 210 aa, unidentified
  source 1..210: note = Acetobacteraceae bacterium
  REGION 1..210: note = tr|A0A327MG37|A0A327MG37_9PROT 7-carboxy-7-deazaguanine synthase OS=Acetobacteraceae bacterium DB1506 OX=2230885 GN=queE PE=3 SV=1
MSYAVKEIFPTLQGEGGQAGRAAVFCRFAGCNLWSGREEDRAAAVCRFCDTAFVGLDGEGGGRFADAAALAAAILAAWRGGAEGRHVVFTGGEPLLQLDAPLIAAMHAAGFAISVESNGTLEPPPGIDWLCVSPKAGAPLRATRGEELKLVYPQPGLMPEAVAHLDFRHFFLQPMDGPDRAAHTAAAVAYCLRHPRWRLSLQTHKLIGIP

SEQ ID NO: 27212 - protein, 228 aa, unidentified
  source 1..228: note = Acetobacteroides hydrogenigenes
  REGION 1..228: note = tr|A0A4R2EP31|A0A4R2EP31_9BACT 7-carboxy-7-deazaguanine synthase OS=Acetobacteroides hydrogenigenes OX=979970 GN=queE PE=3 SV=1
MSQASSGTLPIYEAFYAFQGEGSHIGRAAFFIRTIGCPVRCSWCDSPGTWHKDHQPESIQRLTVDELVGRVQESGAPLAVITGGEPTIYDLAPLTQALQQAGIRTHLETCGAFDIRGSFDWITVSPKWNLPPLRQNIQKAHEIKIVVDGPTAIEDWWEQIGSHCTTNDFRMGAPDIWLQPEANQVGTAIHDAITNAVKSYPTRYRAGVQLHKIYSCDALDPNSMPVVG

SEQ ID NO: 27213 - protein, 240 aa, Acetohalobium arabaticum
  REGION 1..240: note = tr|D9QQX8|D9QQX8_ACEAZ 7-carboxy-7-deazaguanine synthase OS=Acetohalobium arabaticum (strain ATCC 49924 / DSM 5501 / Z-7288) OX=574087 GN=queE PE=3 SV=1
MEMEGVKLPVVEIFNSISGEGISAGEIVTFVRVAGCNLRCDYCDTMYSYQDEEYELLTPQQIVNRINNFGTQQVICTGGEPLEEDKPKRYLPLYLAKQGFEVRIETNGSWSVYNQQELQKFGLDGEGINYTLDIKCPSSNMAEYNLFTNLEQLGLNDEIKFVVQDKSDIDYALKVIDDYKNELSKQEIVINFSPVFEELAPKKLVSILQEHQTYFAQFNLKVRLSIQLHKLIWDPEVTGV

SEQ ID NO: 27214 - protein, 198 aa, Acetonema longum
  REGION 1..198: note = tr|F7NNG7|F7NNG7_9FIRM 7-carboxy-7-deazaguanine synthase OS=Acetonema longum DSM 6540 OX=1009370 GN=queE; PE = 3 SV=1
MELITYPFVETFAGIQGEGTFMGMGATFIRLAGCNLRCAWCDTTHSFDVDRARRLTVNELLQECSLTQPLVVITGGEPTLYNLQPLVTAIHKLDKRVAIETNGTNPIPAEWDIDWVTASPKPGSNYAINCRPNELKYVVDDRLSVTDIAADRVPPGHVYLQIESCRPESARKAYKMVVEYPELKLRVGIQLHKILGVE

SEQ ID NO: 27215 - protein, 213 aa, Achromatium sp.
  REGION 1..213: note = tr|A0A0M1JJC5|A0A0M1JJC5_9GAMM 7-carboxy-7-deazaguanine synthase OS=Achromatium sp. WMS3; OX = 1604836 GN=queE PE=3 SV=1
MSYLRISEIFLSLQGETRTVGIPTIFIRLTGCPLRCQYCDTNYAFTGGTVISIKAIIAQVANYKVPYVTVTGGEPLAQPACLELLTNLCDQNYTVSLETNGAMDISMVDIRVSKVMDLKTPGSGVVNQNCYSNIELLTSNDQIKFVICNRQDYEWSKIKLQTYQLAKSCEVLFSPVAEILPASDLANWILRDQLPVRLQIQLHKLLWGNRPGC

SEQ ID NO: 27216 - protein, 270 aa, unidentified
  source 1..270: note = Achromobacter agilis
  REGION 1..270: note = tr|A0A446CIJ2|A0A446CIJ2_9BURK 7-carboxy-7-deazaguanine synthase OS=Achromobacter agilis; OX = 1353888 GN=queE_2 PE=4 SV=1
MNAASSSNAAPEGAQSGPACGPGAGPAARRLAARPAYPAPPQPVVQPLPRHAHAVGGLVPFSTVDWPGQLAAVVFISGCPWRCHYCHNTELQTRAARYDWREMRAFLETRKGLLDAVVFSGGEPLSEPRLPQMIRDVRRMGYRVGLHTAGIYPLRLADIMRHLDWVGLDIKADSQGYDDITGRRDSERPAQACLAQLLSAGRDFECRITWHPDWLDETRLLALARELARRGVRRFAVQGARRSPDSPPVRNLSAQAEALMRQWFQEFDYR

SEQ ID NO: 27217 - protein, 210 aa, unidentified
  source 1..210: note = Achromobacter agilis
  REGION 1..210: note = tr|A0A446CH03|A0A446CH03_9BURK 7-carboxy-7-deazaguanine synthase OS=Achromobacter agilis; OX = 1353888 GN=queE_1 PE=3 SV=1
MTYSAKEIFKTLQGEGAHAGRAAVFCRFAGCNLWTGRESDRASAACTFCDTDFVGTDGEGGGKFATPELLADTIAACWGPGTEDRYVVFTGGEPLLQLDALLLMAIHARGFTVAIETNGTIKPPAGIDWICVSPKGTAPVVLERGDELKLVYPQANALPEAFAHLDFDHFFLQPMDGPARAANTEQAVQYCMQHPQWRLSLQTHKYIGIP

SEQ ID NO: 27218 - protein, 210 aa, unidentified
  source 1..210: note = Achromobacter aloeverae
  REGION 1..210: note = tr|A0A4Q1HLL5|A0A4Q1HLL5_9BURK 7-carboxy-7-deazaguanine synthase OS=Achromobacter aloeverae OX=1750518 GN=queE PE=3 SV=1
MTYAAKEIFKTLQGEGAQAGRAAVFCRFAGCNLWSGRESDRASAACTFCDTDFVGTDGPGGGKFATPQALAATLAATWGPNRDRRYVVFTGGEPLLQLDAALLEAVHAEGFEVAIETNGTLLPPPGIDWICVSPKGTAPVALRSGNELKLVYPQLDAPPEAFAGLDFEHFFLQPMDGPQRAAHTERAVRYCTQHPQWRLSLQTHKYIGIP

SEQ ID NO: 27219 - protein, 210 aa, unidentified
  source 1..210: note = Achromobacter arsenitoxydans
  REGION 1..210: note = tr|H0F6C5|H0F6C5_9BURK 7-carboxy-7-deazaguanine synthase OS=Achromobacter arsenitoxydans SY8 OX=477184; GN = queE PE=3 SV=1
MTYSAKEIFKTLQGEGAHAGRAAVFCRFAGCNLWTGRESDRASAACTFCDTDFIGTDGDGGGKFASAELLADAIAAAWGPGLENRYVVFTGGEPLLQLDAPLLAAIHARGFTVAIETNGTIKPPAGIDWICVSPKGTAPVVIERGNELKLVYPQLNALPETFAGLDFEHFFLQPMDGPARAANTEQAVQYCMQHPQWRLSLQTHKYIGIP

SEQ ID NO: 27220 - protein, 210 aa, Achromobacter denitrificans
  REGION 1..210: note = tr|A0A427WHX6|A0A427WHX6_ACHDE 7-carboxy-7-deazaguanine synthase OS=Achromobacter denitrificans OX=32002 GN=queE PE=3 SV=1
MTYSAKEIFKTLQGEGAHAGRAAVFCRFAGCNLWTGRESDRASAACTFCDTDFVGTDGEGGGKFATPELLADAIAACWGPGADDRYVVFTGGEPLLQLDAPLLTAIHARGFTVAIETNGTIKPPAGIDWICVSPKGTAPVVLERGDELKLVYPQANALPEAFAHLDFDHFFLQPMDGPARAANTEQAVQYCMQHPQWRLSLQTHKYIGIP

SEQ ID NO: 27221 - protein, 210 aa, Achromobacter insolitus
  REGION 1..210: note = tr|A0A167CMQ2|A0A167CMQ2_9BURK 7-carboxy-7-deazaguanine synthase OS=Achromobacter insolitus OX=217204 GN=queE PE=3 SV=1
MTYSAKEIFKTLQGEGAHAGRAAVFCRFAGCNLWTGRESDRASAACTFCDTDFVGTDGEGGGKFATPDLLADAIAAAWGPGTDDRYVVFTGGEPLLQLDAPLLTAVHARGFTIAIETNGTIKPPAGIDWICVSPKGTAPVILERGDELKLVYPQANARPEAFAHLDFDHFFLQPMDGPARAANTEQAVQYCMQHPQWRLSLQTHKYIGIP

SEQ ID NO: 27222 - protein, 210 aa, unidentified
  source 1..210: note = Achromobacter insuavis
  REGION 1..210: note = tr|F7T6R6|F7T6R6_9BURK 7-carboxy-7-deazaguanine synthase OS=Achromobacter insuavis AXX-A OX=1003200; GN = queE PE=3 SV=1
MTYTAKEIFKTLQGEGAHAGRAAVFCRFAGCNLWTGRESDRASAACTFCDTDFIGTDGDGGGKFATPELLADAIEAAWGPDTANRYIVFTGGEPLLQLDAPLLAVVHARGFTVAIETNGTVQPPPGIDWICVSPKGTAPVVIERGNELKLVYPQANALPPRFEHLDFEHFFLQPMDGPARLANTEQAVQYCMQHPQWRLSLQTHKYIGIP

SEQ ID NO: 27223 - protein, 210 aa, Achromobacter marplatensis
  REGION 1..210: note = tr|J4YLM1|J4YLM1_9BURK 7-carboxy-7-deazaguanine synthase OS=Achromobacter marplatensis OX=470868 GN=queE; PE = 3 SV=1
MTYSAKEIFKTLQGEGAHAGRAAVFCRFAGCNLWTGRESDRASAACTFCDTDFIGTDGEGGGKFATADLLADAIAASWGAGTEDRYVVFTGGEPLLQLDAALLTAIHARGFTVAIETNGTVKPPAGIDWICVSPKGTAPIVIERGDELKLVYPQSNALPETFAHLDFEHFFLQPMDGPARVANTEQAVQYCMQHPQWRLSLQTHKYIGIP

SEQ ID NO: 27224 - protein, 210 aa, Achromobacter piechaudii
  REGION 1..210: note = tr|D4XE25|D4XE25_9BURK 7-carboxy-7-deazaguanine synthase OS=Achromobacter piechaudii ATCC 43553 OX=742159; GN = queE PE=3 SV=1
MTYTAKEIFKTLQGEGAHAGRAAVFCRFAGCNLWTGRESDRASAACTFCDTDFIGTDGEGGGKFATPDLLADTIAATWGPDTQDRYVVFTGGEPLLQLDAPLLTAIHARGFTVAIETNGTVKAPAGIDWICVSPKGTAPIVIDRGDELKLVYPQHNALPETFAHLDFEHFFLQPMDGPARVANTEQAVQYCMQHPQWRLSLQTHKYIGIP

SEQ ID NO: 27225 - protein, 210 aa, Achromobacter piechaudii
  REGION 1..210: note = tr|A0A0L6I586|A0A0L6I586_9BURK 7-carboxy-7-deazaguanine synthase OS=Achromobacter piechaudii OX=72556 GN=queE PE=3 SV=1
MTYTAKEIFKTLQGEGAHAGRAAVFCRFAGCNLWTGRESDRASAACTFCDTDFIGTDGEGGGKFATPDLLADTIAATWGPGTQDRYVVFTGGEPLLQLDAPLLTAIHARGFTVAIETNGTVKAPAGIDWICVSPKGTAPIVIDRGDELKLVYPQHNALPETFAHLDFEHFFLQPMDGPARVANTEQAVQYCMQHPQWRLSLQTHKYIGIP

SEQ ID NO: 27226 - protein, 210 aa, unidentified
  source 1..210: note = Achromobacter pulmonis
  REGION 1..210: note = tr|A0A2N8KA53|A0A2N8KA53_9BURK 7-carboxy-7-deazaguanine synthase OS=Achromobacter pulmonis OX=1389932 GN=queE PE=3 SV=1
MTYSAKEIFKTLQGEGAHAGRAAVFCRFAGCNLWSGRESDRASAACTFCDTDFVGTDGEGGGKFATAELLADTIAACWGPGAEDRYVVFTGGEPLLQLDAALLTAVHARGFTVAIETNGTIKPPAGIDWICVSPKGTAPVVLERGDELKLVYPQANALPEAFAHLDFDHFFLQPMDGPARAANTRQAVQYCMQHPQWRLSLQTHKYIGIP

SEQ ID NO: 27227 - protein, 210 aa, Achromobacter ruhlandii
  REGION 1..210: note = tr|A0A1D8IAB5|A0A1D8IAB5_9BURK 7-carboxy-7-deazaguanine synthase OS=Achromobacter ruhlandii OX=72557 GN=queE PE=3 SV=1
MTYTAKEIFKTLQGEGAHAGRAAVFCRFAGCNLWSGRESDRASAACTFCDTDFIGTDGDGGGKFATPELLADAIEAAWGPDTANRYIVFTGGEPLLQLDEALLAVVHARGFTVAIETNGTVQPPPGIDWICVSPKGTAPVVIERGNELKLVYPQANALPPRFEHLDFDHFFLQPMDGPARLANTEQAVQYCMQHPQWRLSLQTHKYIGIP

SEQ ID NO: 27228 - protein, 210 aa, Achromobacter sp.
  REGION 1..210: note = tr|A0A226Y0Q6|A0A226Y0Q6_9BURK 7-carboxy-7-deazaguanine synthase OS=Achromobacter sp. KAs 3-5 OX=1915388 GN=queE PE=3 SV=1
MTYSAKEIFKTLQGEGAHAGRAAVFCRFAGCNLWSGRESDRASAACTFCDTDFIGTDGDGGGKFATADLLADAIAAAWGPGADNRYVVFTGGEPLLQLDTPLLDAIHARGFTVAIETNGTIKPPAGVDWICVSPKGTAPVVVERGNELKLVYPQLNALPDAFAHLDFEHFFLQPMDGPARAANTEQAVQYCMQHPQWRLSLQTHKYIGIP

SEQ ID NO: 27229 - protein, 210 aa, Achromobacter sp.
  REGION 1..210: note = tr|A0A0Q8BU69|A0A0Q8BU69_9BURK 7-carboxy-7-deazaguanine synthase OS=Achromobacter sp. Root565 OX=1736564 GN=queE PE=3 SV=1
MTYSAKEIFKTLQGEGAHAGRAAVFCRFSGCNLWTGRESDRASAACTFCDTDFIGTDGDGGGKFASAERLADAIAAAWGPDAGNRYVVFTGGEPLLQLDAPLLDAIHARGFTVAIETNGTIKPPAGIDWICVSPKGTAPVVIERGNELKLVYPQLNALPDAFAHLDFEHFFLQPMDGPARAANTEQAVQYCMQHPQWRLSLQTHKYIGIP

SEQ ID NO: 27230 - protein, 210 aa, Achromobacter spanius
  REGION 1..210: note = tr|A0A2S0I763|A0A2S0I763_9BURK 7-carboxy-7-deazaguanine synthase OS=Achromobacter spanius; OX = 217203 GN=queE PE=3 SV=1
MTYSAKEIFKTLQGEGAHAGRAAVFCRFAGCNLWTGRESDRASAACTFCDTDFIGTDGDGGGKFATAERLADAIAAAWGPDAGNRYVVFTGGEPLLQLDAPLLDAIHARGFTVAIETNGTIKPPAGIDWICVSPKGTAPVVIERGNELKLVYPQLNALPDAFAHLDFEHFFLQPMDGPARAANTEQAVQYCMQHPQWRLSLQTHKYIGIP

SEQ ID NO: 27231 - protein, 210 aa, Achromobacter spanius
  REGION 1..210: note = tr|A0A448CDJ5|A0A448CDJ5_9BURK 7-carboxy-7-deazaguanine synthase OS=Achromobacter spanius; OX = 217203 GN=queE PE=3 SV=1
MTYSAKEIFKTLQGEGAHAGRAAVFCRFAGCNLWTGRESDRASAACTFCDTDFIGTDGEGGGKFATADLLADTIATTWGPGTQDRYVVFTGGEPLLQLDAALLTAIHARGFTVAIETNGTVKPPAGIDWICVSPKGTAPLVIERGDELKLVYPQLNALPETFAHLDFEHFFLQPMDGPARVANTERAVQYCMQHPQWRLSLQTHKYIGIP

SEQ ID NO: 27232 - protein, 226 aa, Achromobacter xylosoxidans
  REGION 1..226: note = tr|E3HK34|E3HK34_ACHXA 7-carboxy-7-deazaguanine synthase OS=Achromobacter xylosoxidans (strain A8); OX = 762376 GN=queE PE=3 SV=1
MPDLSEVRPYPAAGTTMTYSAKEIFKTLQGEGAHAGRAAVFCRFAGCNLWTGRESDRASAACTFCDTDFIGTDGEGGGKFATPELLADAIAAAWGPGATDRYVVFTGGEPLLQLDAPLLTAVHARGFTIAIETNGTIKPPAGIDWICVSPKGTAPVVLERGDELKLVYPQANARPEAFAHLDFDHFFLQPMDGPARAANTEQAVQYCMQHPQWRLSLQTHKYIGIP

SEQ ID NO: 27233 - protein, 222 aa, Acidaminobacter hydrogenoformans
  REGION 1..222: note = tr|A0A1G5RZ86|A0A1G5RZ86_9FIRM 7-carboxy-7-deazaguanine synthase OS=Acidaminobacter hydrogenoformans DSM 2784 OX=1120920 GN=queE PE=3 SV=1
MAQYKVVERFVSINGEGPSAGQLAVFIRFKGCNLACSYCDTAWANTENAAFTSMSEDDIYRYIKETAIKNVTLTGGEPLLQPAIIDLLKLLATDEALHVEIETNGSIDITPYTLMYNPPVFTMDYKLPGSLMESSMLVSNFERLTQKDTLKFVIGSLEDFNVARDIIHRHALVGKCNVYLSAVFGQIRLEEIVELMKDHHMNGVNLQLQMHKIIWDPNEKGV

SEQ ID NO: 27234 - protein, 218 aa, Acidaminococcus fermentans
  REGION 1..218: note = tr|A0A1I5GR87|A0A1I5GR87_ACIFE 7-carboxy-7-deazaguanine synthase OS=Acidaminococcus fermentans OX=905 GN=queE PE=3 SV=1
MKTETFPVVELFDSIEGEGKRTGAMAVFVRFAGCNLRCSYCDTGYALEPADAREHLTEEDLMGRIRRYPWKKVTLTGGEPLLQPLDSLCRTLSREGYEVNIETNGAVPLLEERPRGLFYTMDVKSPSSGMRGRMRMENLTRLTGEDVVKFVVGSREDLEDMDRVLREYTLRSQVYVSPVYGAIEPRELVEFVREHKLAQVRVQVQLHKIIWDPEMRGV

SEQ ID NO: 27235 - protein, 218 aa, Acidaminococcus fermentans
  REGION 1..218: note = tr|D2RLP6|D2RLP6_ACIFV 7-carboxy-7-deazaguanine synthase OS=Acidaminococcus fermentans (strain ATCC 25085 / DSM 20731 / VR4) OX=591001 GN=queE PE=3 SV=1
MKTETFPVVELFDSIEGEGKRTGAMAVFVRFAGCNLRCSYCDTGYALEPADAREHLTEEDLMGRIRRYPWKKVTLTGGEPLLQPLDSLCRTLSREGYEVNIETNGAVPLLEERPRGLFYTMDVKSPSSGMRGRMRMENLTRLTGEDVVKFVVGSREDLEDMDRVLREYTLRSQVYVSPVYGAIEPRELVEFVREHKLAQVRVQVQLHKIIWNPEMRGV

SEQ ID NO: 27236 - protein, 210 aa, Acidaminococcus intestini
  REGION 1..210: note = tr|G4Q907|G4Q907_ACIIR 7-carboxy-7-deazaguanine synthase OS=Acidaminococcus intestini (strain RyC-MR95); OX = 568816 GN=queE PE=3 SV=1
MEIFDSIDGEGKRTGYMATFVRFAGCNLRCSYCDTAYAWDASQAKEWLSEDNLFQQITAYPWKRVTLTGGEPMLQPIETLCRRLGDAGYEVNIETNGAAALFLERPDRLFYTMDIKSPSSGEKDRMRWENLSLLTADDVLKFVVGSVEDLRYMETILSTYSIKAQIYVSPVFGKIEPVALVDFVKHHQLSRVCVQVQLHKVIWDPEARGV

SEQ ID NO: 27237 - protein, 222 aa, Acidaminococcus intestini
  REGION 1..222: note = tr|C0WAE5|C0WAE5_9FIRM 7-carboxy-7-deazaguanine synthase OS=Acidaminococcus intestini OX=187327 GN=queE; PE = 3 SV=1
MWLFMKTERFPVVEIFDSIDGEGKRTGYMATFVRFAGCNLRCSYCDTAYAWDASQAKEWLSEDNLFQQITAYPWKRVTLTGGEPMLQPIETLCRRLGDAGYEVNIETNGAAALFLERPDRLFYTMDIKSPSSGEKDRMRWENLSLLTADDVLKFVVGSVEDLRYMETILSTYSIKAQIYVSPVFGKIEPVALVDFVKHHQLSRVCVQVQLHKVIWDPEARGV

SEQ ID NO: 27238 - protein, 222 aa, Acidaminococcus sp.
  REGION 1..222: note = tr|A0A3A5R7Y8|A0A3A5R7Y8_9FIRM 7-carboxy-7-deazaguanine synthase OS=Acidaminococcus sp. AM33-14BH OX=2292909 GN=queE PE=3 SV=1
MWLFMKTERFPVVEIFDSIDGEGKRTGYMATFVRFAGCNLRCSYCDTAYAWDASQAKEWLSEDNLFQQITAYPWKRVTLTGGEPMLQPIETLCRRLGDAGYEVNIETNGAAALFLDRPDRLFYTMDIKSPSSGEKDRMRWENLSLLTADDVLKFVVGSVEDLRYMETILSTYSIKAQIYVSPVFGKIEPVALVDFVKHHQLSRVCVQVQLHKVIWDPEARGV

SEQ ID NO: 27239 - protein, 218 aa, Acidaminococcus sp.
  REGION 1..218: note = tr|R7LWA2|R7LWA2_9FIRM 7-carboxy-7-deazaguanine synthase OS=Acidaminococcus sp. CAG:542 OX=1262687 GN=queE; PE = 3 SV=1
MKTETFPVVELFDSIEGEGKRTGYMAVFVRFAGCNLRCSYCDTGYALERSDARNHLTEGELLERIRSYPWKKVTLTGGEPLLQPLDGLCRALSREGYEVNIETNGAVPLLEERPKGLFYTMDVKSPSSGMRGRMRMENLTRLTGDDVVKFVVGSREDLLDMEQVLQEYTIRSQVYVSPVYGAIEPKELVEFVRDHKLAQVCIQVQLHKIIWDPEMRGV

SEQ ID NO: 27240 - protein, 235 aa, unidentified
  source 1..235: note = Acidibacillus ferrooxidans
  REGION 1..235: note = tr|A0A124IW13|A0A124IW13_9BACL 7-carboxy-7-deazaguanine synthase OS=Acidibacillus ferrooxidans OX=1765683 GN=queE PE=3 SV=1
MSGAETGRDTQAIRLPLVEIFETVEGEGTQAGYPTVFVRLFGCPLRCTWCDTPYSYAPAKAEFTMSIDEIVLRVASYKSARVCLTGGEPLMYRDHSATLLQALAELPRLVDVHVETSGAIDITPFLQDVKSSKVRYIVDYKLKESGETANMVEANFTALRPQDELKFVIASDDDFDEAMAVLDRFHPLCTVLVSPVFGAMEPDHLVDRLLKEGRPHVKLNLQIHKVIWDPNRRGV

SEQ ID NO: 27241 - protein, 235 aa, unidentified
  source 1..235: note = Acidibacillus ferrooxidans
  REGION 1..235: note = tr|A0A162TX24|A0A162TX24_9BACL 7-carboxy-7-deazaguanine synthase OS=Acidibacillus ferrooxidans OX=1765683 GN=queE PE=3 SV=1
MSEAAVGRETQAIRLPLVEIFETVEGEGTQAGYPTVFVRLFGCPLRCVWCDTPYSYAPAKAEFTMTIEQIVLRVASFKAARVCLTGGEPLMYHEHSAALLRALSELPRLVDVHVETSGAIDLTSFLKDVRSSKVRYIVDYKLKESGETAKMIAANFTVLRPQDELKFVIASDADFDEAMAVLDRFHPLCTVLVSPVFGAMEPEHLVDRLLKEGRPHVKLNLQIHKVIWDPNQRGV

SEQ ID NO: 27242 - protein, 235 aa, unidentified
  source 1..235: note = Acidibacillus sulfuroxidans
  REGION 1..235: note = tr|A0A2U3CVR3|A0A2U3CVR3_9BACL 7-carboxy-7-deazaguanine synthase OS=Acidibacillus sulfuroxidans OX=1765684 GN=queE PE=3 SV=1
MKIINTQEPEKLVRERGILDVHSIFHTIQGEGPFCGQPAVFVRLAGCNLQCPGCDTNYTSNRKKMSHCDIWQEIVRVTGEAKTNLVVITGGEPFRQPEVANFINYLIDMKGYRVQVETNGTMPIPRELNYNCVVVCSPKAAKIHPSVSARADAFKYVMKSGNVNEEDGLPLQALDHRATPFIARPPVHFKGKIYLQPMDEQDDDANKANAQAVVKYAMKHNYIVQLQIHKYLGVE

SEQ ID NO: 27243 - protein, 232 aa, unidentified
  source 1..232: note = Acidibacillus sulfuroxidans
  REGION 1..232: note = tr|A0A2U3D6R0|A0A2U3D6R0_9BACL 7-carboxy-7-deazaguanine synthase OS=Acidibacillus sulfuroxidans OX=1765684 GN=queE PE=3 SV=1
MEQGQAMRTLTLPLVEIFETVEGEGTAAGFPTIFIRLFGCPLRCSWCDTPYSYPPASAEMVLSVDEIIQRVKQFRAARICLTGGEPLLYTRPAIALLNELATLEAIVDIHVETSGAIDLAPFLREVASPKVRYILDYKLASSGETDKMQLSNLKDLRSQDELKFVIASRSDFDQACTVLTDYHVRGTPLFSPVWGALEPSELVKWMLEKGLAHVKLNLQIHKVIWDPAQRGV

SEQ ID NO: 27244 - protein, 204 aa, Acidiferrobacter sp.
  REGION 1..204: note = tr|A0A2D7VJP2|A0A2D7VJP2_9GAMM 7-carboxy-7-deazaguanine synthase OS=Acidiferrobacter sp.; OX = 1872107 GN=queE PE=3 SV=1
MKKEIYSIAPNGIFWSIQGEGHLRGVQMFFIRFSGCSVGCPGCDTDYSVAEKLKLDEILARLERMLPDRPRECWVWLTGGEPADRDLTPVILRLKRAGYSVAIATSGVHRISDPVDWLSVSPHSTGFVQKFGHEIKIIDSLNGADLEELSREADQADFFFRYVQPVTLPDGSECPESLSRCMEFLKERPDWALSRQDHRVWGVA

SEQ ID NO: 27245 - protein, 214 aa, Acidiferrobacter sp.
  REGION 1..214: note = tr|A0A2Z3R276|A0A2Z3R276_9GAMM 7-carboxy-7-deazaguanine synthase OS=Acidiferrobacter sp. SPIII_3 OX=1281578 GN=queE PE=3 SV=1
MLRDLRITEIFYSLQGEARTVGWPTVFVRLTGCPLRCRYCDTTYAFHGGERRSVESILEEVSHYSPRFVTVTGGEPLAQPTVLPLLQGLCDRGYEVSLETSGALATHDVDPRVAVVLDLKTPGSGESARNAYENIERLRAIDQVKFVITNADDYEWSRGIVEQYGLAGRCDVLFSPVHDGLAPRELADWILRDRLPVRFQIQLHKVLWGDVRGR

SEQ ID NO: 27246 - protein, 214 aa, Acidiferrobacter thiooxydans
  REGION 1..214: note = tr|A0A1C2G0W1|A0A1C2G0W1_9GAMM 7-carboxy-7-deazaguanine synthase OS=Acidiferrobacter thiooxydans OX=163359 GN=queE PE=3 SV=1
MLRDLRITEIFYSLQGEARTVGWPTVFVRLTGCPLRCRYCDTTYAFHGGERLSVEGVLEKVSDYSPRFVTVTGGEPLAQPAVLPLLRGLCDRGYEVSLETSGALPTHDVDPRVAVVLDLKTPGSGESARNAYANIERLRAIDQVKFVITNADDYEWSRGIVEKYDLAGRCDVLFSPVHDGLAPRDLADWILRDRLPVRFQIQLHKVLWGDVRGR

SEQ ID NO: 27247 - protein, 224 aa, unidentified
  source 1..224: note = Acidihalobacter ferrooxidans
  REGION 1..224: note = tr|A0A1P8UHQ4|A0A1P8UHQ4_9GAMM 7-carboxy-7-deazaguanine synthase OS=Acidihalobacter ferrooxidans OX=1765967 GN=queE PE=3 SV=1
MSTTIPIGSAESLRLRITEIFLSLQGEARSVGWPTVFVRLTGCPLRCSYCDTAYAFSGGEWMDIPDICSKVEAFGVRHVTVTGGEPLAQRNVHRFMTLLCDQGYVLSLETSGALDVAGVDPRVSKVIDLKTPGSGESERNLWDNLNYLSALDQIKLVIADRSDYEWARERLGEHGLMDRVEVLMSPVHGRLSPRELAEWILNDRLHVRMQVQLHKYLWGDEPGR

SEQ ID NO: 27248 - protein, 212 aa, unidentified
  source 1..212: note = Acidihalobacter prosperus
  REGION 1..212: note = tr|A0A1D8KA56|A0A1D8KA56_9GAMM 7-carboxy-7-deazaguanine synthase OS=Acidihalobacter prosperus OX=160660 GN=queE PE=3 SV=1
MQLRITEIFLSLQGEARDVGRPTVFVRLTGCPLRCHYCDTAYAFSGGLAMPVDEVLAKVEAYGVRHVTVTGGEPLAQRAVLPLLASLSDAGLAVSLETSGALDVSAVDPRVVKVMDLKCPDSGEADRNRLENLASIGPQDQIKFVIASRNDYIWSREMMSEHGLAERCEILFSPVHGRLEPQALAEWILEDRLPVRFQIQLHKYLWGEEQGR

SEQ ID NO: 27249 - protein, 223 aa, unidentified
  source 1..223: note = Acidihalobacter prosperus
  REGION 1..223: note = tr|A0A1D8ITP5|A0A1D8ITP5_9GAMM 7-carboxy-7-deazaguanine synthase OS=Acidihalobacter prosperus OX=160660 GN=queE PE=3 SV=1
MSAEPSATRGSAKLRITEIFLSLQGEARDVGWPTVFVRLTGCPLRCHYCDTAYAFSGGSAMSLDEVLSKVADYAVSHVTVTGGEPLAQRSVLPLLVALCDAGYTVSLETSGALDVSAVDPRVVKVVDLKCPDSGESGKNRLENLQHLGTRDQIKFVISGRKDYEWACTQLKAFDLVTRVEVLFSPVHDQLEPTMLAEWILEDRLPVRFQIQLHKYLWGEAAGR

SEQ ID NO: 27250 - protein, 210 aa, unidentified
  source 1..210: note = Acidimicrobiaceae bacterium
  REGION 1..210: note = tr|A0A2E9JA33|A0A2E9JA33_9ACTN 7-carboxy-7-deazaguanine synthase OS=Acidimicrobiaceae bacterium OX=2024894 GN=queE PE=3 SV=1
MMFQVKEMYYTLQGEGARSGRPSVFCRFTGCNLWSGREVDREKAVCNFCDTDFIGTDGPGGGKFIDEVSLSEIINNVWPKKEPNKYVVFTGGEPALQLTEALIDSLHKLDFEVAIETNGTLDLPSNIDWITVSPKGNSELKVKKGDELKLVFPQQELKPETFFKLDFDHFFLQPKDCKDEEDYTQKTIQYCLENPRWRLSLQTHKYIGID

SEQ ID NO: 27251 - protein, 214 aa, unidentified
  source 1..214: note = Acidimicrobiales bacterium
  REGION 1..214: note = tr|A0A520XKW5|A0A520XKW5_9ACTN 7-carboxy-7-deazaguanine synthase OS=Acidimicrobiales bacterium OX=2201156 GN=queE PE=3 SV=1
MKYSVKEIFLSVQGEGAQTGRPSVFVRFAGCNLWSGREKDRASAVCKFCDTEFVGTDGVGGGVFTTPEDLANEAMSYWPKRDGKPIGEPWVICTGGEPLLQLDAHLIAALHGAGFNIAVETNGTIEAPGGIDWLCVSPKANAELLQRSGDELKLVYPQKENSPPDFAELDFKRFSLQPLDDQRGDQHRQAAFEYCMQNPQWRLSLQTHKWLGVR

SEQ ID NO: 27252 - protein, 252 aa, unidentified
  source 1..252: note = Acidimicrobiales bacterium
  REGION 1..252: note = tr|A0A2W6C4N0|A0A2W6C4N0_9ACTN 7-carboxy-7-deazaguanine synthase OS=Acidimicrobiales bacterium OX=2201156 GN=queE PE=3 SV=1
MTPSSMLVTEVFSAIQGEAALVGERQVFLRLTGCNIRCRYCDQPEALEKRGGPCRLEQTPGRRDWAQATSPLLLAEVVEAVDRLWRALPHHSVSVTGGEPLLQAGRLARLLPLLAARGHRVMLETNATLPGRLAQVLPWVDHVSADIKLDSVDGQGTQLDTQRRFLELAGGHHLFVKVVIGPDTSRPQLEAAVAMVHRVAPTSEIFLQPVTPFAAVLTAPSPELVLELQDLALRLHPRVRVVPQTHRLIDQL

SEQ ID NO: 27253 - protein, 211 aa, Acidiphilium cryptum
  REGION 1..211: note = tr|A5G266|A5G266_ACICJ 7-carboxy-7-deazaguanine synthase OS=Acidiphilium cryptum (strain JF-5) OX=349163; GN = queE PE=3 SV=1
MAYSVKEIFPTLQGEGRNAGRAAVFCRFAGCNLWSGREEDRASATCRFCDTDFVGTDGPGGGRFADAAGLARAIQAAWSAACTRDALVVFTGGEPLLQLDAPLIEAVHDAGFEIAVETNGTIEPPPGIDWLCVSPKEGAELVVRQGSELKLVYPQKEATPERFAGLDFAHFLLQPMDGPDRAANTRAAIEYCLTHPQWRLSMQTHKYLGIP

SEQ ID NO: 27254 - protein, 211 aa, Acidiphilium multivorum
  REGION 1..211: note = tr|F0J5P0|F0J5P0_ACIMA 7-carboxy-7-deazaguanine synthase OS=Acidiphilium multivorum (strain DSM 11245 / JCM 8867 / NBRC 100883 / AIU301) OX=926570 GN=queE PE=3; SV = 1
MAYSVKEIFPTLQGEGRNAGRAAVFCRFAGCNLWSGREEDRASATCRFCDTDFVGTDGPGGGRFADAAGLARAIQAAWPAACTRDALVVFTGGEPLLQLDAPLIEAVHDAGFEIAVETNGTIEPPPGIDWLCVSPKEGAELVVRQGSELKLVYPQKEATPERFAGLDFAHFLLQPMDGPDRAANTRAAIEYCLTHPQWRLSTQTHKYLGIP

SEQ ID NO: 27255 - protein, 211 aa, Acidiphilium rubrum
  REGION 1..211: note = tr|A0A1N6VYV4|A0A1N6VYV4_ACIRU 7-carboxy-7-deazaguanine synthase OS=Acidiphilium rubrum; OX = 526 GN=queE PE=3 SV=1
MTYSVKEIFLTLQGEGSNAGRAAVFCRFAGCNLWTGREADRTTATCQFCDTDFIGTDGTGGGKFTDAASLAAAIRAAWTAPTTAHALVVITGGEPLLQLDEPLIAAIHAQGFSIAVETNGTITPPPGIDWLCVSPKARAPLALSQGDELKLVYPQPEAMPERFTSLDFKTFLLQPMDGPDRTANTQAAIAYCQTHPKWRLSMQTHKYLGIP

SEQ ID NO: 27256 - protein, 211 aa, Acidiphilium sp.
  REGION 1..211: note = tr|F7S5Z3|F7S5Z3_9PROT 7-carboxy-7-deazaguanine synthase OS=Acidiphilium sp. PM OX=1043206 GN=queE PE=3; SV = 1
MAYSVKEIFPTLQGEGRNAGRAAVFCRFAGCNLWSGREEDRASATCRFCDTDFVGTDGPGGGRFADAAGLARAIQAAWPAACTRDALVVFTGGEPLLQLDAPLIEAVHDAGFEIAVETNGTIEPPPGIDWLCVSPKEGAELVVRQGSELKLVYPQKEATPERFAGLDFAHFLLQPMDGPDRAANTRAAIEYCLAHPQWRLSTQTHKYLGIP

SEQ ID NO: 27257 - protein, 211 aa, Acidiphilium sp.
  REGION 1..211: note = tr|A0A257S9B1|A0A257S9B1_9PROT 7-carboxy-7-deazaguanine synthase OS=Acidiphilium sp. 21-60-14 OX=1970292 GN=queE PE=3 SV=1
MAYSVKEIFLTLQGEGRNAGRAAVFCRFTGCNLWSGREQDRAAAICQFCDTDFIGTDGPGGGRFATAEDLAAAVRAAWRGPSMAEAMVVCTGGEPLLQLDAPLIAALRAAGFHIAVETNGTIAPPDGIDWLCVSPKASAPLAVTGGDELKLVYPQVEAMPERFVGLDFAHFLLQPMDGPMREQNTAAAIEYCLAHPHWRLSMQTHKYLGIP

SEQ ID NO: 27258 - protein, 226 aa, unidentified
  source 1..226: note = Acidipila dinghuensis
  REGION 1..226: note = tr|A0A4Q1SI83|A0A4Q1SI83_9BACT 7-carboxy-7-deazaguanine synthase OS=Acidipila dinghuensis; OX = 1560006 GN=queE PE=3 SV=1
MYLIEIYKSVQGESSFAGVPCIFVRLAGCNLRCSWCDSEYTFTGGYKLTQDEVMAEIEKLAPVKLVEFTGGEPLLQEREVVPLMQRLLAAGYELMIETSGERPVVNVPEAVHKIVDVKCPGSGEANRFHRPNLASLTMRDELKFVISDRADYEYARDFIRTNSLEGRVGQLLLSPAFSKTPLPERSTANAVLDPRELVHWMLEDGLDARLSLQIHKYIWEPQKKGV

SEQ ID NO: 27259 - protein, 226 aa, unidentified
  source 1..226: note = Acidipila rosea
  REGION 1..226: note = tr|A0A4R1L2C7|A0A4R1L2C7_9BACT 7-carboxy-7-deazaguanine synthase OS=Acidipila rosea; OX = 768535 GN=queE PE=3 SV=1
MHLIELYKSVQGESSFAGRPCIFVRLAGCNLRCSWCDSEYTFASGFRQSEDEVVAAIEKLAPVKLVEFTGGEPMLQERELIPLMERLLASGYELMIETSGERPLERVPPAVHKIVDVKCPGSGEQASFRLSNLEYLSSRDEVKFVLTDRRDYEFAREFLRKHTLESRAGSILLSPAFSKTPSPERSTINCLLDPRELVEWMLADGLEARLSLQIHKYVWEPQKKGV

SEQ ID NO: 27260 - protein, 226 aa, unidentified
  source 1..226: note = Acidipila sp.
  REGION 1..226: note = tr|A0A372IKD2|A0A372IKD2_9BACT 7-carboxy-7-deazaguanine synthase OS=Acidipila sp. 4G-K13; OX = 2303751 GN=queE PE=3 SV=1
MHFIEIYKSVQGESSFAGRPCIFVRLAGCNLRCSWCDSEYTFTGGHRLTDEEVIAAMEALAPVKLIEFTGGEPMLQERELVPLMERLLAAGYELMIETSGERPLDRVPKAVHKIVDVKCPGSGEGGSFRMTNLDHLTKRDEVKFVIAGRPDYEFARAFVREHDLAAKAGSVLFSPAFSKTPSPERSTANALLDPRELVEWMLADGLDARLSLQIHKYIWEPQKKGV

SEQ ID NO: 27261 - protein, 226 aa, unidentified
  source 1..226: note = Acidipila sp.
  REGION 1..226: note = tr|A0A3P0XA16|A0A3P0XA16_9BACT 7-carboxy-7-deazaguanine synthase OS=Acidipila sp. EB88; OX = 2305226 GN=queE PE=3 SV=1
MFLIETYKSVQGESSFAGVPCIFVRLAGCNLRCSWCDSEYTFTGGYKQSADEVIAAVEALAPVRLVEFTGGEPLLQARELIPVMERLLADGYQLMIETSGERPLSDVPPAVHKIVDVKCPASGECGRFRLDNLDTLTARDEAKFVISDRADYEFARDFTLEHSLHTRAGHVLFSPAFKKAPSLERSTANCALDPRQLVDWMLADAVPARLSLQIHKYIWEPQKKGV

SEQ ID NO: 27262 - protein, 226 aa, unidentified
  source 1..226: note = Acidisarcina polymorpha
  REGION 1..226: note = tr|A0A2Z5G8M9|A0A2Z5G8M9_9BACT 7-carboxy-7-deazaguanine synthase OS=Acidisarcina polymorpha OX=2211140 GN=queE PE=3 SV=1
MYLIEIYKSVQGESSFAGRPCIFVRLAGCNLRCSWCDSEYTFKGGYKLTEDEVVAEVEKLAPVRLVEFTGGEPMLQQRELVPLMQRLLAAGYELMIETSGERPLQSVPEEVHKIVDVKCPGSGEGGTFRMENLSALTNRDEVKFVISDRSDYEFALQFVRAQELEQRVGSVLFSPAFTKTPSPVRTAENCLLDPRILVEWMMADGVEARLSLQIHKFVWEPSKKGV

SEQ ID NO: 27263 - protein, 211 aa, Acidisphaera rubrifaciens
  REGION 1..211: note = tr|A0A0D6P2F7|A0A0D6P2F7_9PROT 7-carboxy-7-deazaguanine synthase OS=Acidisphaera rubrifaciens HS-AP3 OX=1231350 GN=queE PE=3 SV=1
MVAYAVKEIFYTLQGEGRHAGRAAVFCRFAGCNLWSGREQDRGTATCRFCDTDFVGVDGQGGGRFQDAAALAQAISDAWIGRGGRRLVVLTGGEPLLQVDELLIERLHAMDFEVAVETNGTVPAPAGLDWIAVSPKGNAKLQILQGNELKLVYPQPEALPDRFEELAFAHHLLQPMDGPDLAANTAAAVAYCLANPRWRLSLQSHKVLGIP

SEQ ID NO: 27264 - protein, 198 aa, unidentified
  source 1..198: note = Acidithiobacillales bacterium
  REGION 1..198: note = tr|A0A0S8G3M5|A0A0S8G3M5_9PROT 7-carboxy-7-deazaguanine synthase OS=Acidithiobacillales bacterium SM23_46 OX=1703385 GN=queE PE=3 SV=1
MARSESPSSLAAASAADRLRVNEIFFSLQGEARTVGFPTVFVRLTGCPLRCGYCDTEYAFTEGRWMSFEEVEAAVAQYAPRHVTVTGGEPLAQRPCRTLLKRLCDHGYEVSLETSGALDIGDIDARVSVVMDLKTPGSGEEARNRIENIALLKPKDQVSPVHGELSATELAEWILADRLPVRMQIQLHKYLWQDARGR

SEQ ID NO: 27265 - protein, 193 aa, unidentified
  source 1..193: note = Acidithiobacillales bacterium
  REGION 1..193: note = tr|A0A0S8L083|A0A0S8L083_9PROT 7-carboxy-7-deazaguanine synthase (Fragment); OS = Acidithiobacillales bacterium SM1_46 OX=1703384; GN = AMJ72_11795 PE=3 SV=1
MARSESPSSLAAASAADRLRVNEIFFSLQGEARTVGFPTVFVRLTGCPLRCGYCDTEYAFTEGRWMSFEEVEAAVAQYAPRHVTVTGGEPLAQRPCRTLLKRLCDHGYEVSLETSGALDIGDIDARVSVVMDLKTPGSGEEARNHIENIALLKPKDQVKFVIRDRADYDWSRAMVAAHELDKRCEVLFSPVHG

SEQ ID NO: 27266 - protein, 213 aa, Acidithiobacillus caldus
  REGION 1..213: note = tr|A0A059ZYF6|A0A059ZYF6_ACICK 7-carboxy-7-deazaguanine synthase OS=Acidithiobacillus caldus (strain ATCC 51756 / DSM 8584 / KU) OX=637389; GN = queE PE=3 SV=1
MSRLRVSEIFHSLQGETTASGVPATFVRLTGCPLRCSYCDTAYAFHGGEWLDADQILARVAERDNRLVVITGGEPLAQPAVHALMTALCDGGREVYLETSGALSVAEVDPRVVKILDLKSPGSGELERNLWENLDYLGSRDQVKFVLCNRDDYEWARTTVRERKLQGRCELLFSPAYGQLTARDLAEWILEDRLPVRLQIQLHKFIWGDVPGH

SEQ ID NO: 27267 - protein, 213 aa, Acidithiobacillus caldus; identical to SEQ ID NO: 27266
  REGION 1..213: note = tr|A0A1E7YMT5|A0A1E7YMT5_9PROT 7-carboxy-7-deazaguanine synthase OS=Acidithiobacillus caldus OX=33059 GN=queE PE=3 SV=1

SEQ ID NO: 27268 - protein, 214 aa, unidentified
  source 1..214: note = Acidithiobacillus ferridurans
  REGION 1..214: note = tr|A0A2Z6IKN1|A0A2Z6IKN1_9PROT 7-carboxy-7-deazaguanine synthase OS=Acidithiobacillus ferridurans OX=1232575 GN=queE PE=3 SV=1
MEGRLRVTEIFHSLQGETRSVGRPATFVRLTGCPLRCRYCDTAYAFHGGEWRRIPEILEQVRAGGNRLVVVTGGEPLAQADVLPLLTQLCDAGHEVFLETSGALSLAGVDTRVVKVLDLKSPDSGECERNLWENLPLLNPQDQIKFVLCSRADYDWAKEVLAREALAERCEILFSPSHGTLALRDLAEWILADHLPVRLQIQLHKLIWGDLPGH

SEQ ID NO: 27269 - protein, 214 aa, Acidithiobacillus ferrivorans
  REGION 1..214: note = tr|A0A060UYP1|A0A060UYP1_9PROT 7-carboxy-7-deazaguanine synthase OS=Acidithiobacillus ferrivorans OX=160808 GN=queE PE=3 SV=1
MEGRLRITEIFHSLQGETRSVGRPATFVRLTGCPLRCHYCDTAYAFYGGEWQQIAGILEAVRAGGNRLVVVTGGEPLAQADVLPLLTQLCDAGYEVFLETSGALSVAGVDTRVVKVLDLKSPDSGECERNLWENLPLLNPQDQIKFVLCSRADYDWAKDVLVREALAERCEILFSPSHGALALRDLAEWILADHLPVRLQIQLHKLIWGDLPGH

SEQ ID NO: 27270 - protein, 214 aa, Acidithiobacillus ferrivorans
  REGION 1..214: note = tr|A0A1B9BV90|A0A1B9BV90_9PROT 7-carboxy-7-deazaguanine synthase OS=Acidithiobacillus ferrivorans OX=160808 GN=queE PE=3 SV=1
MEGRLRITEIFHSLQGETRSVGRPATFVRLTGCPLRCHYCDTAYAFHGGEWQQIAGILEAVRAGGNRLVVVTGGEPLAQADVLPLLTQLCDAGYEVFLETSGALSVAGVDTRVVKVLDLKSPDSGECERNLWENLPLLNPQDQIKFVLCSRADYDWAKDVLVREALAERCEILFSPSHGALALRDLAEWILADHLPVRLQIQLHKLIWGDLPGH

SEQ ID NO: 27271 - protein, 214 aa, Acidithiobacillus ferrooxidans
  REGION 1..214: note = tr|A0A365YJ43|A0A365YJ43_ACIFR 7-carboxy-7-deazaguanine synthase OS=Acidithiobacillus ferrooxidans OX=920 GN=queE PE=3 SV=1
MEGRLRVTEIFHSLQGETRSVGRPATFVRLTGCPLRCRYCDTAYAFHGGAWQRIPEILEQVRAGGNRLVVVTGGEPLAQADVLPLLTQLCDAGHEVFLETSGALSLAGVDTRVVKVLDLKSPDSGECERNLWENLPLLNPQDQIKFVLCSRADYDWAKEVLAREALAERCEILFSPSHGTLALRDLAEWILADHLPVRLQIQLHKLIWGDLPGH

SEQ ID NO: 27272 - protein, 214 aa, Acidithiobacillus ferrooxidans
  REGION 1..214: note = tr|B7J3H0|B7J3H0_ACIF2 7-carboxy-7-deazaguanine synthase OS=Acidithiobacillus ferrooxidans (strain ATCC 23270 / DSM 14882 / CIP 104768 / NCIMB 8455) OX=243159; GN = que E PE=3 SV=1
MEGRLRITEIFHSLQGETRSVGRPATFVRLTGCPLRCRYCDTAYAFHGGEWRRIPEILEQVRAGGNRLVVVTGGEPLAQADVLPLMTQLCDAGHEVFLETSGALSLAGVDTRVVKVLDLKSPDSGECERNLWENLPLLNPQDQIKFVLCSRADYDWAKEVLAREALAERCEILFSPSHGTLALRDLAEWMLADHLPVRLQIQLHKLIWGDLPGH

SEQ ID NO: 27273 - protein, 214 aa, Acidithiobacillus sp.
  REGION 1..214: note = tr|A0A2I1DQW5|A0A2I1DQW5_9PROT 7-carboxy-7-deazaguanine synthase OS=Acidithiobacillus sp. SH OX=187490 GN=queE PE=3 SV=1
MDGRLRITEIFHSLQGETRSVGRPATFVRLTGCPLRCHYCDTAYAFHGGEWQTLDTIMASVQAGGSHLVVVTGGEPLAQAEVLPLLTRLCDSGYEVFLETSGALPVAAVDPRVVKVLDLKTPDSGESERNLWENLPHLNAQDQIKFVICSRQDYDWAQQVVQRENLNQICEVLFSPAQGEMPLRDLADWILADKLPVRLQIQLHKLIWGDVPGR

SEQ ID NO: 27274 - protein, 214 aa, Acidithiobacillus sp.
  REGION 1..214: note = tr|A0A3M8RRC3|A0A3M8RRC3_9PROT 7-carboxy-7-deazaguanine synthase OS=Acidithiobacillus sp. CJ-2 OX=1867749 GN=queE PE=3 SV=1
MKERLRISEIFHSLQGETRSVGRPATFVRLTGCPLRCQYCDTAYAFHGGEWMEPADIHERIRAEGSPLVVVTGGEPLAQRAVLPFLSRLCDDGYEVFLETSGALPVADVDGRVVKVLDLKTPDSGEAPRNLWENIAHLSPRDQIKFVLCSRTDYDWAREVLEREHLATRCEVLFSPAHGQLALRDLAEWILADRLPVRLQVQLHKLIWGDVPGH

SEQ ID NO: 27275 - protein, 214 aa, Acidithiobacillus thiooxidans
  REGION 1..214: note = tr|A0A543Q6U5|A0A543Q6U5_ACITH 7-carboxy-7-deazaguanine synthase OS=Acidithiobacillus thiooxidans ATCC 19377 OX=637390 GN=queE PE=3 SV=1
MDERLRITEIFHSLQGETRSVGRPATFVRLTGCPLRCHYCDTAYAFHGGEWQTLDVIMDAVRAGGNRLVVVTGGEPLAQQDVLPLMTRLCDSGYEVFLETSGALSVEAVDPRVIKVLDLKTPDSGESDRNLWENLVRLNAQDQIKFVICSRRDYDWAKEVLAREDLSQICEVLFSPSQGEMPLRDLADWILTDQLPVRLQIQLHKLIWGDVPGR

SEQ ID NO: 27276 - protein, 214 aa, Acidithiobacillus thiooxidans
  REGION 1..214: note = tr|A0A1C2I346|A0A1C2I346_ACITH 7-carboxy-7-deazaguanine synthase OS=Acidithiobacillus thiooxidans OX=930 GN=queE PE=3 SV=1
MDERLRITEIFHSLQGETRSVGRPATFVRLTGCPLRCHYCDTAYAFHGGEWQTLDVIIDAVRAGGNRLVVVTGGEPLAQQDVLPLMTRLCDSGYEVFLETSGALSVEAVDPRVIKVLDLKTPDSGESDRNLWENLVRLNAQDQIKFVICSRRDYDWAKEVLAREDLSQICEVLFSPSQGEMPLRDLADWILTDQLPVRLQIQLHKLIWGDVPGR

SEQ ID NO: 27277 - protein, 211 aa, unidentified
  source 1..211: note = Acidithrix ferrooxidans
  REGION 1..211: note = tr|A0A0D8HCP3|A0A0D8HCP3_9ACTN 7-carboxy-7-deazaguanine synthase OS=Acidithrix ferrooxidans OX=1280514 GN=queE PE=3 SV=1
MSYVVKEIFYTLQGEGHRSGRPAVFLRFAGCNLWTGREVNRLKAICQFCDTDFVGTDGTDGGIYKTALELGDMVDRIWPDNFSDRKYVVCTGGEPLLQLDAELVNALHERGFEIAIETNGTQLPPEGIDWICVSPKAGAELNLTYGNELKVVVPQSGIDLEYLRKLDFENFYLQPMENENLDSNIKFAIAYCLENPVWNLSLQTHKMIGIR

SEQ ID NO: 27278 - protein, 213 aa, unidentified
  source 1..213: note = Acidobacteria bacterium
  REGION 1..213: note = tr|A0A1F2REZ1|A0A1F2REZ1_9BACT 7-carboxy-7-deazaguanine synthase OS=Acidobacteria bacterium RIFCSPLOWO2_02_FULL_64_15 OX=1797181 GN=queE; PE = 3 SV=1
MLTVNEIFYSIQGESTQAGRPCVFVRLTACDLRCSWCDTPYAFVEGRKMSVDEVVAAVGQYGCPLIEITGGEPLLQEDVYELMDRLMGGGYAVMLETGGHRTIARVPSAVLKIVDVKCPGSGESAKNDWTNLDRLTPHDEVKFVISDRADYQFARDLIGRYGLAERTAAVLLSPVHGVLDPKTLAEWILADRLPARLQVQLHKYIWPPTARGV

SEQ ID NO: 27279 - protein, 231 aa, unidentified
  source 1..231: note = Acidobacteria bacterium
  REGION 1..231: note = tr|A0A1Q7L363|A0A1Q7L363_9BACT 7-carboxy-7-deazaguanine synthase OS=Acidobacteria bacterium 13_1_40CM_4_58_4 OX=1803453 GN=queE PE=3 SV=1
MVITEIFKSIQGEGTRAGLPCIFVRLTGCNLRCTWCDTAYAFHGGKKMSVEEVLETMDELAGRREGGSDGEPTVPLVELTGGEPLLQEEIYPLAKKLLAAGYTVMIETSGERFIGRLPKEVIKIVDVKCPDSGEPDTFEMRNLEELTENDEVKFVLSTRRDYEFAREFTRLHGLARQVKQVLFSPVCEDPEGKWPGLEPRLLAEWILAEGLPVRLGLQLHKFIWDPATKGV

SEQ ID NO: 27280 - protein, 227 aa, unidentified
  source 1..227: note = Acidobacteriales bacterium
  REGION 1..227: note = tr|A0A1Q3QMT8|A0A1Q3QMT8_9BACT 7-carboxy-7-deazaguanine synthase OS=Acidobacteriales bacterium 59-55 OX=1895690 GN=queE PE=3 SV=1
MHLIELYKSVQGESSFAGLPCIFVRFAGCNLRCAWCDSEYTFTGGRPFSEDEVVAQIEALAPCRLIEFTGGEPMLQAKELIPLMERLLAEGYTLMIETSGERPLAEVPKAVHKIVDVKCPGAGAAAGSFRRENLDALTKNDEVKFVITSREDYDFAREFIGRHEVNRRAGGVLLSPAFRKSPSPERTAENMALDPRDLVEWMLADGLDARLSLQIHKFIWEPMKKGV

SEQ ID NO: 27281 - protein, 227 aa, unidentified
  source 1..227: note = Acidobacteriales bacterium
  REGION 1..227: note = tr|A0A1Q7N4J4|A0A1Q7N4J4_9BACT 7-carboxy-7-deazaguanine synthase OS=Acidobacteriales bacterium 13_1_40CM_3_55_5 OX=1803468 GN=queE PE=3 SV=1
MQITEIYKSIQGESTHAGLPCVFVRLTGCNLRCSWCDSEYTFTGGRRMALDEVLEEVERLSPDGGLVEITGGEPMLQEREAIPLMQRLLDAGYTVLLETSGERPLAGVPPGVIKIVDVKCPNSGEPETFYMENLDTLGLQDEVKFVLSDRSDYEFARNFVERHALDRRVNAVLFSPAFRKDAEGDRDCSHCLLDPRELAEWMLEDNSTARLGLQIHKFIWDPALKGV

SEQ ID NO: 27282 - protein, 237 aa, unidentified
  source 1..237: note = Acidobacteriia bacterium
  REGION 1..237: note = tr|A0A317IYZ4|A0A317IYZ4_9BACT 7-carboxy-7-deazaguanine synthase OS=Acidobacteriia bacterium OX=2081523 GN=queE PE=3 SV=1
MPACCGARVLKRPGLKIAELFYSVQGEGSLVGVPSFFIRTSGCNLRCAWCDTPYTSWQPEGADLPLDRIVDEVKAHRVHHVVVTGGEPMIAPEIIPLTERLRALNLHITIETAGTVFKPVACDLMSISPKLSNSTPRDPWAGQHERLRINPGVLAGLMAKYDYQLKFVIEHQRDLDEVRLLVGSLEADTTRVILMPEGTDRDVLRERGVWLAEICKAEGYRFSPRLHVELYGNRRGV

SEQ ID NO: 27283 - protein, 227 aa, unidentified
  source 1..227: note = Acidobacteriia bacterium
  REGION 1..227: note = tr|A0A2N9LSG2|A0A2N9LSG2_9BACT 7-carboxy-7-deazaguanine synthase OS=Acidobacteriia bacterium SbA2 OX=2043162 GN=queE PE=3 SV=1
MDWIEEIPSRSFREEMVITEIFKSIQGESTYAGLPCLFVRLTGCNLRCHWCDTAYAFYGGQKMTVAEVLTRLQQLGGNLVELTGGEPLLQQEIYSLTDQLLAQGFRVLIETSGERSVAQLPRQVVKVLDVKCPGSGEEGKFCFDNLGLLERKDQIKFVILNEDDYGYARDFLARHDLHRHVDEVIFSPVFDQLSPRSLAEWILRDNLEVRLGLQIHKFIWGPETRGV

SEQ ID NO: 27284 - protein, 226 aa, Acidobacterium capsulatum
  REGION 1..226: note = tr|C1F2N6|C1F2N6_ACIC5 7-carboxy-7-deazaguanine synthase OS=Acidobacterium capsulatum (strain ATCC 51196 / DSM 11244 / JCM 7670 / NBRC 15755 / NCIMB 13165 / 161) OX= 240015 GN=queE PE=3 SV=1
MRLIEIYKSVQGESSFAGRPCIFVRLAGCNLRCSWCDSEYTFTGGEAFSDDEILARIEALAPVRLVEFTGGEPLLQAKQLIPFMERLLAAGYELMIETSGERPLREVPAAVHKIVDVKCPGSGEAGKFLMENLEFLTPRDEVKFVIADRADYEFAREFLRAHALDRKAGQILLSPTFSKTPTPERSTSNATLDPRLLVEWMLEDGLPARLSLQIHKYIWEPQKKGV

SEQ ID NO: 27285 - protein, 226 aa, Acidobacterium sp.; identical to SEQ ID NO: 27284
  REGION 1..226: note = tr|A0A3D4VJW6|A0A3D4VJW6_9BACT 7-carboxy-7-deazaguanine synthase OS=Acidobacterium sp.; OX = 1872119 GN=queE PE=3 SV=1

SEQ ID NO: 27286 - protein, 213 aa, Acidobacterium sp.
  REGION 1..213: note = tr|A0A2G4JIX3|A0A2G4JIX3_9BACT 7-carboxy-7-deazaguanine synthase OS=Acidobacterium sp.; OX = 1872119 GN=queE PE=3 SV=1
MLTINEIFHSIQGESTHAGRPCVFVRLTACDLRCRWCDTPYAFHEGRKMSVDEVVAEVEARGCPVVEVTGGEPLLQADVYPLMQRLLDAGKTVLIETGGHRSIAQVPAGVVRIMDIKCPGSGESSRNDWSNLLLLTPTDEVKFVIADRVDYEYAREIVNREDLANRVAAVLFSPVHGELVAKQLAEWVIADRLAVRVQLQMHKYIWSPETRGV

SEQ ID NO: 27287 - protein, 211 aa, Acidocella aminolytica
  REGION 1..211: note = tr|A0A0D6PGC1|A0A0D6PGC1_9PROT 7-carboxy-7-deazaguanine synthase OS=Acidocella aminolytica 101 = DSM 11237 OX=1120923 GN=queE PE=3 SV=1
MTYSIKEIFYTLQGEGRNAGRAAVFCRFAGCNLWTGRETDRHTATCRFCDTDFVGTDGTGGGRFADAADLAAAVEAVWPARAQEARLVVLTGGEPLLQVDAALIAALHAAGFEIAVETNGTIAPPDGIDWLCVSPKAGAALAVEKGEELKLVFPQAGAEPAQFEHLAFQHFLLQPMDGPDQAANTEKAVAFCMANPLWRLSLQTHKFLGIR

SEQ ID NO: 27288 - protein, 210 aa, Acidocella sp.
  REGION 1..210: note = tr|A0A257QIH5|A0A257QIH5_9PROT 7-carboxy-7-deazaguanine synthase OS=Acidocella sp. 20-58-15 OX=1970302 GN=queE PE=3 SV=1
MTYNVKEIFYTLQGEGRNVGRAAIFCRFTGCNLWSGREMDRNTAVCRFCDTDFVGIDGTGGGRFATADQLAIAIDAVRPTGTKVELVVLTGGEPMLQIDDALIDALHNLGFKIAVETNGTIPVPAEIDWLCVSPKAGTQLAISQGDELKLVFPQPNAGPECFESLAFTDFLLQPMDGPDQTDNTAAAVSYCLAHPRWRLSLQTHKLLGLR

SEQ ID NO: 27289 - protein, 211 aa, Acidocella sp.
  REGION 1..211: note = tr|K5YUY6|K5YUY6_9PROT 7-carboxy-7-deazaguanine synthase OS=Acidocella sp. MX-AZ02 OX=1214225 GN=queE PE=3; SV = 1
MAYSVKEIFYTLQGEGRNAGRAAVFCRFAGCNLWSGREEDRATAICRFCDTDFIGTNGTGGGRFADAADLSAAIAAAWSQDQPEDRLVVLTGGEPLLQLDTPLVDALHAAGFEIAVETNGTIAPPAGVDWLCVSPKAGAVLAVAGGDELKLVFPQPDALPARFEGLAFRHFLLQPMDGPDQAANTAAAVAYCMAHPRWRLSLQTHKFLGIR

SEQ ID NO: 27290 - protein, 213 aa, Acidomonas methanolica
  REGION 1..213: note = tr|A0A023D1K3|A0A023D1K3_ACIMT 7-carboxy-7-deazaguanine synthase OS=Acidomonas methanolica NBRC 104435 OX=1231351 GN=queE PE=3 SV=1
MSYAVKEIFPTLQGEGAQTGRAAVFCRFAGCNLWSGREEDRARAACRFCDTDFVGTDGEGGGRFADSEALADAIAACWRAIAGEAAGRYVVFTGGEPLLQLDAALIAAMKARDFEIALETNGTLAVPDGIDWICVSPKPGGPVVQTRGDELKLVYPQPELPPASFEDWSFGHFWLQPMDGPERAAHTSAAAAYCMGHPRWRLSLQTHKLIGLP

SEQ ID NO: 27291 - protein, 212 aa, Acidovorax anthurii
  REGION 1..212: note = tr|A0A328YS67|A0A328YS67_9BURK 7-carboxy-7-deazaguanine synthase OS=Acidovorax anthurii; OX = 78229 GN=queE PE=3 SV=1
MTYAVKEIFYTLQGEGGQAGMPAVFCRFAGCNLWSGREEDRATAVCRFCDTDFVGTDGTLGGKYAAADALADVIAAQWPPHDADHRLVVATGGEPLLQLDAPLIDALHARGFRIAVESNGTVAAPPRIDWLCISPKAGAPWVQREGQELKLVWPQPGFDLAELEAGTRFTHRFLQPMDGPDQADNIGRCIATCMERPAWRLSLQTHKLTGIR

SEQ ID NO: 27292 - protein, 212 aa, Acidovorax avenae
  REGION 1..212: note = tr|A0A2R4EEB2|A0A2R4EEB2_9BURK 7-carboxy-7-deazaguanine synthase OS=Acidovorax avenae subsp. avenae OX=80870 GN=queE PE=3 SV=1
MTYSVKEIFYTLQGEGGQAGMPAVFCRFAGCNLWSGREEDRSTAVCRFCDTDFVGTDGTLGGKYAQADALADVIAAQWPAHDADHRLVVLTGGEPLLQLDTPLIDALHARGFRIAVESNGTVAAPPGIDWLCVSPKAGAPWVQRAGQELKLVWPQPGFDLAELESATRFEHRFLQPMDGPEQAANISLCIAACMERPAWRLSLQTHKLTGIR

SEQ ID NO: 27293 - protein, 212 aa, Acidovorax avenae
  REGION 1..212: note = tr|A0A2R4EQ04|A0A2R4EQ04_9BURK 7-carboxy-7-deazaguanine synthase OS=Acidovorax avenae subsp. avenae OX=80870 GN=queE PE=3 SV=1
MTYSVKEIFYTLQGEGGQAGMPAVFCRFAGCNLWSGREEDRSSAICRFCDTDFVGTDGTLGGKYAQADALADVIAAQWPAHDADHRLVVLTGGEPLLQLDTPLIDALHARGMRIAVESNGTVAAPPGIDWLCVSPKAGAPWVQRAGQELKLVWPQPGFDLAELESATRFEHRFLQPMDGPEQAANTGLCIAACMERPAWRLSLQTHKLTGIR

SEQ ID NO: 27294 - protein, 212 aa, unidentified
  source 1..212: note = Acidovorax carolinensis
  REGION 1..212: note = tr|A0A240TP66|A0A240TP66_9BURK 7-carboxy-7-deazaguanine synthase OS=Acidovorax carolinensis OX=553814 GN=queE PE=3 SV=1
MTYSVKEIFYTLQGEGGQAGSPAVFCRFAGCNLWSGREQDRATAICRFCDTDFVGTDGTLGGKFADAPGLARQIAALWPAGDAHHRLVVLTGGEPLLQVDAALIEALHAQGFRIAVETNGTVAAPQGIDWLCVSPKAGADWVQRQGQELKVVWPQPGLDLDVLETTGQFQHRFLQPMDGPDQARHIALCIDLCLQRPAWRLSLQTHKLTGIR

SEQ ID NO: 27295 - protein, 212 aa, unidentified
  source 1..212: note = Acidovorax carolinensis
  REGION 1..212: note = tr|A0A240U0S8|A0A240U0S8_9BURK 7-carboxy-7-deazaguanine synthase OS=Acidovorax carolinensis OX=553814 GN=queE PE=3 SV=1
MTYSVKEIFYTLQGEGGQAGSPAVFCRFAGCNLWSGREQDRATAICRFCDTDFVGTDGTLGGKFADAPTLARQIAALWPADDAHHRLVVLTGGEPLLQVDVALIEALHAQGFRIAVETNGTVAAPQGIDWLCVSPKAGADWVQRQGQELKVVWPQPGLDLDVLETTGQFLHRFLQPMDGPDQARHIALCIDLCLQRPAWRLSLQTHKLTGIR

SEQ ID NO: 27296 - protein, 212 aa, Acidovorax cattleyae
  REGION 1..212: note = tr|A0A1H0T5P1|A0A1H0T5P1_9BURK 7-carboxy-7-deazaguanine synthase OS=Acidovorax cattleyae; OX = 80868 GN=queE PE=3 SV=1
MTYSVKEIFYTLQGEGGQAGMPAVFCRFAGCNLWSGREEDRTTAVCRFCDTDFVGTDGTLGGKYARADALADVISAQWPAHDADHRLVVLTGGEPLLQLDTPLIDALHARGFRIAVESNGTVAAPPGIDWLCVSPKAGAPWVQREGQELKLVWPQPGFDLAELESATRFAHRFLQPMDGPVQAENTGLCIAACMERPAWRLSLQTHKLTGIR

SEQ ID NO: 27297 - protein, 212 aa, unidentified
  source 1..212: note = Acidovorax cavernicola
  REGION 1..212: note = tr|A0A3A1W4H7|A0A3A1W4H7_9BURK 7-carboxy-7-deazaguanine synthase OS=Acidovorax cavernicola OX=1675792 GN=queE PE=3 SV=1
MTYSVKEIFYTLQGEGGQAGMPAVFCRFAGCNLWTGREEDRDTAVCRFCDTDFVGTDGTLGGKFKTADQLADTIAAQWPAGDTDHRLVVLTGGEPLLQVDAALVDALHARHFRIAVESNGTVAAPAGIDWLCISPKAGAPWVQQRGQELKLVWPQAGLDLDAMARTGEFTHRFLQPMDGPDRVANTELCIAECMKQPAWRLSVQTHKITGIR

SEQ ID NO: 27298 - protein, 212 aa, Acidovorax citrulli
  REGION 1..212: note = tr|A1TTV1|A1TTV1_ACIAC 7-carboxy-7-deazaguanine synthase OS=Acidovorax citrulli (strain AAC00-1) OX=397945; GN = queE PE=3 SV=1
MTYSVKEIFYTLQGEGGQAGMPAVFCRFAGCNLWSGREEDRSSAVCRFCDTDFVGTDGTLGGKYAQAEALADVIAAQWPAHDADHRLVVLTGGEPLLQLDTPLIDALHARGMRIAVESNGTVAAPPGIDWLCVSPKAGAPWVQRAGQELKLVWPQPGFDLAELESATRFEHRFLQPMDGPDQAANTGLCIAACMERPAWRLSLQTHKLTGIR

SEQ ID NO: 27299 - protein, 211 aa, Acidovorax delafieldii
  REGION 1..211: note = tr|A0A561XIR2|A0A561XIR2_ACIDE 7-carboxy-7-deazaguanine synthase OS=Acidovorax delafieldii OX=47920 GN=queE PE=3 SV=1
MTYSVKEIFYTLQGEGGQAGTPAVFCRFAGCNLWTGREQDRAQAICQFCDTDFVGTDGTLGGKFETAAALAELIAAQWPAGASHRLVVLTGGEPLLQVDAALIDALHAQQFRIAVESNGTVAAPEGIDWLCISPKAGAPWVQRSGQELKLVWPQPGFDLQALEQDTQFTHRFLQPMDGLLQRQNTAACIDACLAHPAWRLSLQTHKLTGIR

SEQ ID NO: 27300 - protein, 211 aa, Acidovorax delafieldii
  REGION 1..211: note = tr|C5T9G6|C5T9G6_ACIDE 7-carboxy-7-deazaguanine synthase OS=Acidovorax delafieldii 2AN OX=573060 GN=queE; PE = 3 SV=1
MTYSVKEIFYTLQGEGGQAGTPAVFCRFAGCNLWTGREQDRAQAICQFCDTDFVGTDGTLGGKFETAAALAQSIAAQWPAGAGHRLVVLTGGEPLLQVDSELIAALHAQQFRIAVESNGTVAAPEGIDWLCISPKAGAPFVQRSGQELKLVWPQPGFDLGALERETHFTHRFLQPMDGPLQRQNTAACIAACLAHPAWRLSLQTHKLTGIR

SEQ ID NO: 27301 - protein, 211 aa, unidentified
  source 1..211: note = Acidovorax kalamii
  REGION 1..211: note = tr|A0A235EHM1|A0A235EHM1_9BURK 7-carboxy-7-deazaguanine synthase OS=Acidovorax kalamii; OX = 2004485 GN=queE PE=3 SV=1
MTYSVKEIFYTLQGEGGQAGTPAVFCRFAGCNLWTGREQDRAQAICQFCDTDFVGTDGTLGGKFETATALAELIAAQWPAGAGHRLVVLTGGEPLLQVDRELIDALHAQQFRIAVESNGTVAAPEGIDWLCISPKAGAPWVQRSGQELKLVWPQPGFDLLALEQDTQFTHRFLQPMDGLLQRQNTAACIDACLAHPAWRLSLQTHKLTGIR

SEQ ID NO: 27302 - protein, 212 aa, Acidovorax konjaci
  REGION 1..212: note = tr|A0A1I1SK63|A0A1I1SK63_9BURK 7-carboxy-7-deazaguanine synthase OS=Acidovorax konjaci; OX = 32040 GN=queE PE=3 SV=1
MTYSVKEIFYTLQGEGGQAGTPAVFCRFAGCNLWSGREEDRSSAVCRFCDTDFVGTDGTLGGKYATADALADVVAAQWPAHDADHRLVVITGGEPLLQLDAPLIDALHARGLRIAVESNGTIAAPPGIDWLCISPKAGAPWVQREGQELKLVWPQPGFDLAALESQTRFTHRFLQPMDGPDQAAHTARCIDACLERPAWRLSLQTHKLTGIR

SEQ ID NO: 27303 - protein, 212 aa, Acidovorax radicis
  REGION 1..212: note = tr|A0A561CP15|A0A561CP15_9BURK 7-carboxy-7-deazaguanine synthase OS=Acidovorax radicis; OX = 758826 GN=queE PE=3 SV=1
MTYSVKEIFYTLQGEGGQAGMPAVFCRFAGCNLWSGREADRASAICRFCDTDFVGTDGTLGGKFADADALAERIAAQWPAHDAAHRLVVLTGGEPLLQVDAALIEALHARRFRIAVETNGSVAAPPGIDWLCVSPKAGAPWVQQQGQELKLVWPQAGMDLAAIAATGQFAQRFLQPMDGPDQAAHIALCIATCMEQPAWRLSLQTHKISGIR

SEQ ID NO: 27304 - protein, 211 aa, Acidovorax soli
  REGION 1..211: note = tr|A0A1H3W7Q0|A0A1H3W7Q0_9BURK 7-carboxy-7-deazaguanine synthase OS=Acidovorax soli; OX = 592050 GN=queE PE=3 SV=1
MTYSVKEIFYTLQGEGGQAGTPAVFCRFAGCNLWTGREQDRAQAVCQFCDTDFVGTDGTLGGKFETATALAGLIAAQWPAGAGHRLVVLTGGEPLLQVDSELIDALHAQQFRIAVESNGTVAAPNGIDWLCISPKAGAPWVQRSGQELKLVWPQPGFDLQALEQDTHFTHRFLQPMDGLLQRQNTAACIDACLAHPAWRLSLQTHKLTGIR

SEQ ID NO: 27305 - protein, 211 aa, Acidovorax sp.
  REGION 1..211: note = tr|A0A495FGR6|A0A495FGR6_9BURK 7-carboxy-7-deazaguanine synthase OS=Acidovorax sp. 93; OX = 2135632 GN=queE PE=3 SV=1
MTYSVKEIFYTLQGEGGQAGTPAVFCRFAGCNLWTGREQDRAQAICQFCDTDFVGTDGTLGGKFETATALAELIAAQWPAGAGHRLVVLTGGEPLLQVDTALIDALHAQQFRIAVESNGTVAAPEGIDWLCISPKAGAPWVQRSGQELKLVWPQPGFDLQALEQDTQFTHRFLQPMDGLLQRQNTAACIDACLAHPAWRLSLQTHKLTGIR

SEQ ID NO: 27306 - protein, 211 aa, Acidovorax sp.
  REGION 1..211: note = tr|A0A1Q3J5A8|A0A1Q3J5A8_9BURK 7-carboxy-7-deazaguanine synthase OS=Acidovorax sp. 65-7; OX = 1895692 GN=queE PE=3 SV=1
MTYSVKEIFYTLQGEGGQAGTPAVFCRFAGCNLWTGREQDRAQAICQFCDTDFVGTDGTLGGKFETATALAELIAAQWPAGAGHRLVVLTGGEPLLQVDSDLIDALHAQQFRIAVESNGTVAAPEGIDWLCISPKAGAPWVQRSGQELKLVWPQPGFDLQALEQDTQFTHRFLQPMDGLLQRQNTAACIDACLAHPAWRLSLQTHKLTGIR

SEQ ID NO: 27307 - protein, 211 aa, Acidovorax temperans
  REGION 1..211: note = tr|A0A543LAA4|A0A543LAA4_9BURK 7-carboxy-7-deazaguanine synthase OS=Acidovorax temperans; OX = 80878 GN=queE PE=3 SV=1
MTYSVKEIFYTLQGEGGQAGTPAVFCRFAGCNLWTGREQDRAQAICQFCDTDFVGTDGTLGGKFETAAALAELIAAQWPAGAGHRLVVLTGGEPLLQVDRELIDALHAQQFRIAVESNGTVKAPEGIDWLCISPKAGAPWVQRSGQELKLVWPQPGFDLPTLEQDTDFAQRYLQPMDGPLQRQNTALCIDTCMQRPAWRLSLQTHKLTGIR

SEQ ID NO: 27308 - protein, 212 aa, Acidovorax valerianellae
  REGION 1..212: note = tr|A0A1G6PH11|A0A1G6PH11_9BURK 7-carboxy-7-deazaguanine synthase OS=Acidovorax valerianellae OX=187868 GN=queE PE=3 SV=1
MTYSVKEIFYTLQGEGGQAGTPAVFCRFAGCNLWSGREEDRATAVCRFCDTDFVGTDGTLGGKFATADALADVIAAQWPAHDAAHRLVVLTGGEPLLQVDAAFIDALHARRFRIAVESNGTVAAPPGIDWLCISPKAGAPWLQQSGQELKLVWPQPGFDLAALEVQTQFTHRFLQPMDGPDQAANTERCIAACLERPAWRLSLQTHKLTGIR

SEQ ID NO: 27309 - protein, 212 aa, unidentified
  source 1..212: note = Acidovorax wautersii
  REGION 1..212: note = tr|A0A1I2BQI0|A0A1I2BQI0_9BURK 7-carboxy-7-deazaguanine synthase OS=Acidovorax wautersii; OX = 1177982 GN=queE PE=3 SV=1
MTYSVKEIFYTLQGEGGQAGTPAVFCRFAGCNLWSGREEDRASAICRFCDTDFVGTDGTLGGKFATADALADLIAAQWPAHDEQHRLVVLTGGEPLLQVDAALVDALHARRFRIAVESNGTVAAPAGIDWLCISPKAGADWVQRQGQELKLVWPQPGFDLAALEAQTRFTHRFLQPMDGPDQAANTALCIEACMQRPAWRLSLQTHKLTGIR

SEQ ID NO: 27310 - protein, 236 aa, unidentified
  source 1..236: note = Acinetobacter albensis
  REGION 1..236: note = tr|A0A1C4GV69|A0A1C4GV69_9GAMM 7-carboxy-7-deazaguanine synthase OS=Acinetobacter albensis OX=1673609 GN=queE PE=3 SV=1
MNTLRSSAIPVSDPSAGLRITEIFYSLQGEANAAGLPTVFIRLTGCPLRCSYCDTTYSFEGGERQSLEQIIQTTLDFKTPYICVTGGEPLAQPNALPLMTRLADLGCEVSLETSGALDVSKVDPRVSKVLDLKTPTSGEEHRNLLSNLDYLTQHDQIKFVICNREDYEWSKQQVKQYQLNNKVSTVWFSPAFAVEKGHVGLPQLARDLAQWILDDHLPVRFQLQLHKLLWNDETGR

SEQ ID NO: 27311 - protein, 238 aa, unidentified
  source 1..238: note = Acinetobacter apis
  REGION 1..238: note = tr|A0A217EF26|A0A217EF26_9GAMM 7-carboxy-7-deazaguanine synthase OS=Acinetobacter apis; OX = 1229165 GN=queE PE=3 SV=1
MTTSSLRSQAIPVTNPSAGLRITEIFYSLQGEADTAGLPTVFIRLTGCPLRCTYCDTTYSFEGGQRQTLESIIDTAKSHNTPYICVTGGEPLAQPNCIPLLKQLCDLGFDVSLETSGALDVSQVDPRVSKVLDLKTPASGESHRNLMSNLDHLTPRDQIKFVICDRNDYEWSKQQVLDYQLNQKVNTVWFSPAFAVDKTQAKLPRFARDLAQWLLEDHIPVRFQLQLHKLLWQDEMGR

SEQ ID NO: 27312 - protein, 434 aa, Acinetobacter baumannii
  REGION 1..434: note = tr|A0A3D5C6B5|A0A3D5C6B5_ACIBA Multifunctional fusion protein OS=Acinetobacter baumannii OX=470 GN=queC; PE = 3 SV=1
  VARIANT 214: note = Xaa can be any naturally occurring amino acid
MASLRSSAIPVSDPASGLRITEIFYSLQGEANASGLPTVFIRLTGCPLRCSYCDTTYSFEGGERLSLEHIIETAEKYQTPYICVTGGEPLAQPNCLILLQRLCDAGFDVSLETSGALDVSRVDPRVSKVLDLKTPTSGEEHRNLISNLDHLTPRDQIKFVICNREDYEWSKQQVEQYQLQTKVSTVWFSPAFAVEKGAVGLPRLARDLAQWILXRAIVLLSGGLDSTTCLAWAQARYECIAISFMYGQRSTTELDAAKALAQRAGVEHRVINIDLANLGGSALTDHNIAVPEQLQEGIPVTYVPARNTIFLSYALAAAEVFNAEAIVIGINAVDYSGYPDCRPEFIDAFANMARLATKAGVEGKPLKFETPLLHLSKANIIRLGIEHGVDYSQTVSCYQADAQGRACGKCDSCRLRKEGFIDAGVTDPTRYIPQ

SEQ ID NO: 27313 - protein, 236 aa, Acinetobacter baumannii
  REGION 1..236: note = tr|S3TW68|S3TW68_ACIBA 7-carboxy-7-deazaguanine synthase OS=Acinetobacter baumannii NIPH 410 OX=1217634; GN = queE PE=3 SV=1
MASLRSSAIPVSDPASGLRITEIFYSLQGEANASGLPTVFIRLTGCPLRCSYCDTTYSFEGGERLSLEHIIETAEKYQTPYICVTGGEPLAQPNCLILLQRLCDAGFDVSLETSGALDVSRVDPRVSKVLDLKTPTSGEEHRNLISNLDHLTPRDQIKFVICNREDYEWSKQQVEQYQLQTKVSTVWFSPAFAVEKGAVGLPRLARDLAQWILDDKLPVRFQLQLHKLLWNDESGR

SEQ ID NO: 27314 - protein, 245 aa, Acinetobacter baylyi
  REGION 1..245: note = tr|Q6F9A4|Q6F9A4_ACIAD 7-carboxy-7-deazaguanine synthase OS=Acinetobacter baylyi (strain ATCC 33305 / BD413 / ADP1) OX=62977 GN=queE PE=3 SV=1
MFSNLGNSAMTSLRSTTIPVSDPAAGLRITEIFYSLQGEANAAGLPTVFIRLTGCPLRCTYCDTTYSFEGGERLSLDEIINTALSYKTPYICVTGGEPLAQPNCLILLSRLSDLGCQVSLETSGTLDVSKVDPRVSKVLDLKTPTSGEEKRNLLSNLDYLTQHDQIKFVICNHEDYIWSKQQVVEYQLEKKVSTVWFSPAFAVEKGAVKLPQLARDLAQWILDDHLPVRFQLQLHKLLWNDETGR

SEQ ID NO: 27315 - protein, 236 aa, Acinetobacter beijerinckii
  REGION 1..236: note = tr|N9FFH5|N9FFH5_9GAMM 7-carboxy-7-deazaguanine synthase OS=Acinetobacter beijerinckii CIP 110307; OX = 1217648 GN=queE PE=3 SV=1
MASLRSSAIPVSDPAAGLRITEIFYSLQGEANTFGLPTVFIRLTGCPLRCSYCDTTYSFEGGERQSLEQIIETASQHKTPYICVTGGEPLAQPNCLILLQRLCDLGFEVSLETSGALDVSKVDPRVSKVLDLKTPTSNEDHRNLFTNIDYLTQHDQIKFVICNRADYEWSKLQLEKLQLQDKVSTVWFSPAFAVEKGAVALPAFACDLAQWILEDHLPVRFQLQLHKLLWNDESGR

SEQ ID NO: 27316 - protein, 236 aa, Acinetobacter beijerinckii
  REGION 1..236: note = tr|N9FH41|N9FH41_9GAMM 7-carboxy-7-deazaguanine synthase OS=Acinetobacter beijerinckii ANC 3835 OX=1217649; GN = queE PE=3 SV=1
MASLRSSAIPVSDPAAGLRITEIFYSLQGEANTFGLPTVFIRLTGCPLRCSYCDTTYSFEGGERQSLEQIIETANQHKTPYICVTGGEPLAQPNCLILLQRLCDLGFEVSLETSGALDVSKVDPRVSKVLDLKTPTSNEDHRNLFTNIDYLTQHDQIKFVICNRADYEWSKLQLEQLQLQDKVSTVWFSPAFAVEKGAVALPALARDLAQWILEDHLPVRFQLQLHKLLWNDESGR

SEQ ID NO: 27317 - protein, 236 aa, Acinetobacter bereziniae
  REGION 1..236: note = tr|N8XEJ1|N8XEJ1_ACIBZ 7-carboxy-7-deazaguanine synthase OS=Acinetobacter bereziniae NIPH 3 OX=1217651; GN = queE PE=3 SV=1
MNSLRSSTIPVSDPSAGLRITEIFYSLQGEANTLGLPTVFIRLTGCPLRCTYCDTTYSFEGGERQSLDQIIQTALDYKTPYICVTGGEPLAQPNALPLMQRLADLGCEVSLETSGALDVSKVDSRVSKVLDLKTPTSGEVTRNLITNFEHLTPHDQIKFVICNREDYEWSKQQVEHYALNQKVSTVWFSPAFAVEKGATRLPQLARDLAQWILEDHLPVRFQLQLHKLLWNDETGR

SEQ ID NO: 27318 - protein, 236 aa, Acinetobacter bereziniae
  REGION 1..236: note = tr|A0A3S0AYD3|A0A3S0AYD3_ACIBZ 7-carboxy-7-deazaguanine synthase OS=Acinetobacter bereziniae OX=106648 GN=queE PE=3 SV=1
MSSLRSSTIPVSDPSAGLRITEIFYSLQGEANTLGLPTVFIRLTGCPLRCTYCDTTYSFEGGERQSLDQIIQTALDYKTPYICVTGGEPLAQPNALPLMQRLADLGCEVSLETSGALDVSKVDSRVSKVLDLKTPTSGEVTRNLITNFEHLTPHDQIKFVICNREDYEWSKQQVELYALNQKVSTVWFSPAFAVEKGATRLPQLARDLAQWILEDHLPVRFQLQLHKLLWNDETGR

SEQ ID NO: 27319 - protein, 236 aa, unidentified
  source 1..236: note = Acinetobacter bohemicus
  REGION 1..236: note = tr|A0A1I6U4K1|A0A1I6U4K1_9GAMM 7-carboxy-7-deazaguanine synthase OS=Acinetobacter bohemicus OX=1435036 GN=queE PE=3 SV=1
MNTLRSSTIPVSDPSAGLRITEIFYSLQGEANAAGLPTVFIRLTGCPLRCTYCDTTYSFEGGERQSLEQIIQTTLDFKTPYICVTGGEPLAQPNALPLMTRLADLGCEVSLETSGALDVSKVDPRVSKVLDLKTPTSGEEKRNLLSNLDHLTQHDQIKFVICNREDYEWSKQQVEQYQLVDKVSTVWFSPAFAVEKGNVRLPQLARDLAQWILEDHLPVRFQLQLHKLLWNDETGR

SEQ ID NO: 27320 - protein, 236 aa, unidentified; identical to SEQ ID NO: 27319
  source 1..236: note = Acinetobacter bohemicus
  REGION 1..236: note = tr|N8NY33|N8NY33_9GAMM 7-carboxy-7-deazaguanine synthase OS=Acinetobacter bohemicus ANC 3994 OX=1217715; GN = queE PE=3 SV=1

SEQ ID NO: 27321 - protein, 237 aa, unidentified
  source 1..237: note = Acinetobacter boissieri
  REGION 1..237: note = tr|A0A1G6II40|A0A1G6II40_9GAMM 7-carboxy-7-deazaguanine synthase OS=Acinetobacter boissieri OX=1219383 GN=queE PE=3 SV=1
MNALRRSKSIPVTDPTAGLKITEIFYSLQGEADAAGLPTVFIRLTGCPLRCTYCDTTYSFEGGQRQSLESIIATAKSYNTPYICVTGGEPLAQPNCIALLTQLCDLGFEVSLETSGALDVSKVDPRVSKVLDLKTPTSGEDHRNLMSNLAHLTPKDQIKFVICNQTDYEWSKQQVLFYQLHKKVNTVWFSPAFAVEKGNAKLPQFARDLAQWLLDDQLPVRFQLQLHKLLWQDETGR

SEQ ID NO: 27322 - protein, 236 aa, Acinetobacter bouvetii
  REGION 1..236: note = tr|A0A4Q7ATB1|A0A4Q7ATB1_9GAMM 7-carboxy-7-deazaguanine synthase OS=Acinetobacter bouvetii OX=202951 GN=queE PE=3 SV=1
MSTLRSSAIPVSDPSAGLRITEIFYSLQGEANTAGLPTVFIRLTGCPLRCTYCDTTYSFEGGERQSLDDIIQTALDFKTPFICVTGGEPLAQPNALPLMQRLADLGCEVSLETSGALDVSKVDPRVSKVLDLKTPTSGESARNLLSNIDYLTEHDQVKFVICNREDYEWSKQQVKQLKLNEKAGTIWFSPAFAVEKGAVRLPQLARDLAQWILEDHLPVRFQLQLHKLLWNDETGR

SEQ ID NO: 27323 - protein, 251 aa, Acinetobacter bouvetii
  REGION 1..251: note = tr|N9DL79|N9DL79_9GAMM 7-carboxy-7-deazaguanine synthase OS=Acinetobacter bouvetii DSM 14964 = CIP 107468; OX = 1120925 GN=queE PE=3 SV=1
MTVEILFFCLWLFFVMSTLRSSAIPVSDPSAGLRITEIFYSLQGEANTAGLPTVFIRLTGCPLRCTYCDTTYSFEGGERQSLDDIIQTALDFKTPFICVTGGEPLAQPNALPLMQRLADLGCEVSLETSGALDVSKVDPRVSKVLDLKTPASGESARNLLSNIDYLTEHDQIKFVICNREDYEWSKQQVEQLKLNEKAGTIWFSPAFAVEKGAVRLPQLARDLAQWILEDHLPVRFQLQLHKLLWNDETGR

SEQ ID NO: 27324 - protein, 236 aa, Acinetobacter brisouii
  REGION 1..236: note = tr|V2U9J2|V2U9J2_9GAMM 7-carboxy-7-deazaguanine synthase OS=Acinetobacter brisouii CIP 110357 OX=1341683; GN = queE PE=3 SV=1
MNPLRSSQIPVTDPAAGLRITEIFYSLQGEANTAGLPTVFIRLTGCPLRCTYCDTTYSFEGGERWSLDKIIETAQAYQTPYICVTGGEPLAQPNCIALLNRLCELGFEVSLETSGALDVSKVDQRVSKVLDLKTPTSGEAHRNLLSNLDLLTTKDQIKFVICNREDYEWSKQQLAEYQLQQKVSTVWFSPAFAVEKGNAKLPRFARDLAQWILDDHLPVRFQLQLHKLLWQDETGR

SEQ ID NO: 27325 - protein, 236 aa, Acinetobacter calcoaceticus
  REGION 1..236: note = tr|A0A1A0GL96|A0A1A0GL96_ACICA 7-carboxy-7-deazaguanine synthase OS=Acinetobacter calcoaceticus OX=471 GN=queE PE=3 SV=1
MASLRSSAIPVSDPASGLRITEIFYSLQGEANASGLPTVFIRLTGCPLRCSYCDTTYSFEGGERFSLEHIIETATQFQTPYICVTGGEPLAQPNCLILLQRLCEAGFDVSLETSGALDVSRVDPHVSKVLDLKTPTSGEEHRNLISNLDHLTSRDQIKFVICNREDYEWSKQQVEKYQLQTKVSTVWFSPAFAVEKGAVGLPRLARDLAQWILDDKLPVRFQLQLHKLLWNDESGR

SEQ ID NO: 27326 - protein, 236 aa, Acinetobacter calcoaceticus; identical to SEQ ID NO: 27313
  REGION 1..236: note = tr|A0A1C4HLG6|A0A1C4HLG6_ACICA 7-carboxy-7-deazaguanine synthase OS=Acinetobacter calcoaceticus OX=471 GN=queE PE=3 SV=1

SEQ ID NO: 27327 - protein, 236 aa, Acinetobacter calcoaceticus; identical to SEQ ID NO: 27313
  REGION 1..236: note = tr|A0A2S4T6R2|A0A2S4T6R2_9GAMM 7-carboxy-7-deazaguanine synthase OS=Acinetobacter calcoaceticus/baumannii complex sp. ABNIH27 OX=2080673; GN = queE PE=3 SV=1

SEQ ID NO: 27328 - protein, 236 aa, unidentified
  source 1..236: note = Acinetobacter celticus
  REGION 1..236: note = tr|A0A1C3CWN0|A0A1C3CWN0_9GAMM 7-carboxy-7-deazaguanine synthase OS=Acinetobacter celticus OX=1891224 GN=queE PE=3 SV=1
MNTLRSSAIPVSDPSAGLRITEIFYSLQGEANAAGLPTVFIRLTGCPLRCTYCDTTYSFEGGERKSLEEIIQTTLDFKTPYICVTGGEPLAQPNALPLMSRLADLGCDVSLETSGALDVSKVDPRVSKILDLKTPTSGEVTRNLLSNFDHLTQHDQIKFVICNREDYEWSKQQVEQYALNEKVSTVWFSPAFAVEKGVVRLPQLARDLAQWILEDHLPVRFQLQLHKLLWNDETGR

SEQ ID NO: 27329 - protein, 236 aa, unidentified
  source 1..236: note = Acinetobacter colistiniresistens
  REGION 1..236: note = tr|N9PJI4|N9PJI4_9GAMM 7-carboxy-7-deazaguanine synthase OS=Acinetobacter colistiniresistens OX=280145; GN = queE PE=3 SV=1
MASLRSSAIPVSDPAAGLRITEIFYSLQGEANTFGLPTVFIRLTGCPLRCSYCDTTYSFEGGERLSLEQIIETASQHKTPYICVTGGEPLAQPNCLILLQRLCDLGFDVSLETSGALDVSKVDPRVSKVLDLKTPTSKEDHRNLYSNLDYLTQHDQIKFVICNREDYEWSRQQLEQFQLQNKVSTVWFSPAFAVEKGAVALPALARDLAQWILEDHLPIRFQLQLHKLLWNDESGR

SEQ ID NO: 27330 - protein, 236 aa, unidentified
  source 1..236: note = Acinetobacter colistiniresistens
  REGION 1..236: note = tr|S3TC99|S3TC99_9GAMM 7-carboxy-7-deazaguanine synthase OS=Acinetobacter colistiniresistens OX=280145; GN = queE PE=3 SV=1
MASLRSSAIPVSDPAAGLRITEIFYSLQGEANTFGLPTVFIRLTGCPLRCSYCDTTYSFEGGERLSLEQIIETASQHKTPYICVTGGEPLAQPNCLILLQRLCDLGFDVSLETSGALDVSKVDPRVSKVLDLKTPTSKEDHRNLYSNLDYLTQHDQIKFVICNREDYEWSRQQLEQFQLQNKVSTVWFSPAFAVEKGAVALPALARDLAQWILEDHLPVRFQLQLHKLLWNDESGR

SEQ ID NO: 27331 - protein, 236 aa, unidentified
  source 1..236: note = Acinetobacter cumulans
  REGION 1..236: note = tr|A0A4P8DWU1|A0A4P8DWU1_9GAMM 7-carboxy-7-deazaguanine synthase OS=Acinetobacter cumulans OX=2136182 GN=queE PE=3 SV=1
MSTLRSSAIPVSDPSAGLRITEIFYSLQGEANAAGLPTVFIRLTGCPLRCTYCDTTYSFEGGQRQSLEEIIQTTLDFKTPYICVTGGEPLAQPNALPLMTKLADLGCQVSLETSGALDVSKVDPRVSKVLDLKTPTSGESARNLLSNLDYLTEHDQIKFVICNREDYEWSKQQVEQFQLHQKVSTVWFSPAFAVEKGAARLPQLARDLAQWILDDHLPVRFQLQLHKLLWNDETGR

SEQ ID NO: 27332 - protein, 236 aa, unidentified
  source 1..236: note = Acinetobacter cumulans
  REGION 1..236: note = tr|A0A3A8GDY1|A0A3A8GDY1_9GAMM 7-carboxy-7-deazaguanine synthase OS=Acinetobacter cumulans OX=2136182 GN=queE PE=3 SV=1
MSTLRSSAIPVSDPSAGLRITEIFYSLQGEANAAGLPTVFIRLTGCPLRCTYCDTTYSFEGGQRQSLEEIIQTTLDFKTPYICVTGGEPLAQPNALPLMTKLADLGCQVSLETSGALDVSKVDPRVSKVLDLKTPTSGESARNLLSNLDYLTEHDQIKFVICNREDYEWSKQQVEQFQLHQKVSTVWFSPAFAVEKGAVRLPQLARDLAQWILDDHLPVRFQLQLHKLLWNDETGR

SEQ ID NO: 27333 - protein, 236 aa, unidentified
  source 1..236: note = Acinetobacter defluvii
  REGION 1..236: note = tr|A0A2S2FF82|A0A2S2FF82_9GAMM 7-carboxy-7-deazaguanine synthase OS=Acinetobacter defluvii OX=1871111 GN=queE PE=3 SV=1
MTSLRSSSIHVSDPSAGLRITEIFYSLQGEANAAGLPTVFIRLTGCPLRCTYCDTTYSFEGGERQSLEDIIQTTLSFQTPYICVTGGEPLAQPNALPLMTRLADLGCEVSLETSGALDVSKVDPRISKVLDLKTPTSGESHRNLLSNLEHLTLKDQIKFVICNREDYDWAKQQMAEFQLNKKVSTVWFSPAFAVEKGAVRLPQLARDLAQWILDDHLPVRFQLQLHKLLWNDETGR

SEQ ID NO: 27334 - protein, 236 aa, unidentified
  source 1..236: note = Acinetobacter equi
  REGION 1..236: note = tr|A0A0N9W4C8|A0A0N9W4C8_9GAMM 7-carboxy-7-deazaguanine synthase OS=Acinetobacter equi; OX = 1324350 GN=queE PE=3 SV=1
MTHLRSSAIPVSDPSAGLRITEIFYSLQGEADTAGLPTVFIRLTGCPLRCTYCDTTYSFEGGERKSLEEIIQTTLDFKTPYICVTGGEPLAQPNALPLMQRLADLGCEVSLETSGALDVSKVDVRVSKVLDLKTPTSGEVTRNLLSNFDHLTQHDQIKFVICNREDYEWSKEQVEKYQLNDKVSTIWFSPAFAVEKGAVRLPQLARDLAQWILEDHLPVRFQLQLHKLLWNDETGR

SEQ ID NO: 27335 - protein, 236 aa, unidentified
  source 1..236: note = Acinetobacter gandensis
  REGION 1..236: note = tr|A0A1A7RBQ4|A0A1A7RBQ4_9GAMM 7-carboxy-7-deazaguanine synthase OS=Acinetobacter gandensis OX=1443941 GN=queE PE=3 SV=1
MSTLRSSTIPVSDPSAGLRITEIFYSLQGEANTAGLPTVFIRLTGCPLRCTYCDTTYSFEGGERQSLEEIIQTTLDFKTPYICVTGGEPLAQPNALPLMTRLADLGCEVSLETSGALDVSKVDPRVSKVMDLKTPTSGEVARNLLSNFDHLTQHDQIKFVICNREDYEWSKQQVEQYKLNEKVSTIWFSPAFAVEKGAVRLPQLARDLAQWILEDHLPVRFQLQLHKLLWNDETGR

SEQ ID NO: 27336 - protein, 236 aa, unidentified
  source 1..236: note = Acinetobacter genomosp.
  REGION 1..236: note = tr|A0A1V2V3Z8|A0A1V2V3Z8_9GAMM 7-carboxy-7-deazaguanine synthase OS=Acinetobacter genomosp. 33YU OX=1675530 GN=queE PE=3 SV=1
MASLRSSAIPVSDPASGLRITEIFYSLQGEANASGLPTVFIRLTGCPLRCTYCDTTYSFEGGERLSLEHIIETAEKYKTPYICVTGGEPLAQPNCLILLQRLCDAGFDVSLETSGALDVSKVDPRVSKVLDLKTPTSGEEHRNLISNLDYLTSHDQIKFVICNREDYEWSKQQVEQYQLQTKVSTVWFSPAFAVEKGAVGLPRLARDLAQWILDDKMPVRFQLQLHKLLWNDESGR

SEQ ID NO: 27337 - protein, 236 aa, Acinetobacter gerneri
  REGION 1..236: note = tr|N8ZPL1|N8ZPL1_9GAMM 7-carboxy-7-deazaguanine synthase OS=Acinetobacter gerneri DSM 14967 = CIP 107464; OX = 1120926 GN=queE PE=3 SV=1
MNSLRTQNIPVTDPASGLRITEIFYSLQGEANAAGLPTVFIRLTGCPLRCTYCDTTYSFEGGERQSLEEIIQTAKSFNTPYICVTGGEPLAQPNCLVLLEQLCELGFDVSLETSGALDVSKVDPRVSKVLDLKTPTSGEDKRNLLSNLEHLSKRDQIKFVICNREDYEWSKQQVQQHHLDQLVSSVWFSPAFAVEKNAAKLPELAKNLAQWILDDQLSVRFQLQLHKLLWNDETGR

SEQ ID NO: 27338 - protein, 236 aa, Acinetobacter guillouiae
  REGION 1..236: note = tr|A0A077L2F5|A0A077L2F5_ACIGI 7-carboxy-7-deazaguanine synthase OS=Acinetobacter guillouiae OX=106649 GN=queE PE=3 SV=1
MNSLRSSTIPVSDPSAGLRITEIFYSLQGEANTAGLPTVFIRLTGCPLRCTYCDTTYSFEGGERQSLDQIIQTTLDYKTPYICVTGGEPLAQPNALPLMQRLADLGCEVSLETSGALDVSKVDPRVSKVLDLKTPTSGEVARNLLSNLDHLTQHDQIKFVICNREDYEWSKQQVEQYALAQKVSTVWFSPAFAVEKGAARLPQLARDLAQWILEDHLPVRFQLQLHKLLWNDETGR

SEQ ID NO: 27339 - protein, 236 aa, Acinetobacter guillouiae; identical to SEQ ID NO: 27338
  REGION 1..236: note = tr|N8WTB0|N8WTB0_ACIGI 7-carboxy-7-deazaguanine synthase OS=Acinetobacter guillouiae NIPH 991 OX=1217656; GN = queE PE=3 SV=1

SEQ ID NO: 27340 - protein, 236 aa, Acinetobacter gyllenbergii
  REGION 1..236: note = tr|A0A1B8UHP3|A0A1B8UHP3_9GAMM 7-carboxy-7-deazaguanine synthase OS=Acinetobacter gyllenbergii OX=134534 GN=queE PE=3 SV=1
MASLRSSAIPVSDPAAGLRITEIFYSLQGEANTFGLPTVFIRLTGCPLRCSYCDTTYSFEGGERLSLEHIIETASQHKTPYICVTGGEPLAQPNCLILLQRLCDLGFEVSLETSGALDVSKVDPRVSKVLDLKTPTSKEDHRNLYSNLDYLTPHDQIKFVICNREDYEWSRQQLEQFQLQDKVSTIWFSPAFAVEKGAVGLPALARDLAQWILDDHLPVRFQLQLHKLLWNDESGR

SEQ ID NO: 27341 - protein, 236 aa, Acinetobacter gyllenbergii
  REGION 1..236: note = tr|V2UL66|V2UL66_9GAMM 7-carboxy-7-deazaguanine synthase OS=Acinetobacter gyllenbergii NIPH 230 OX=1217658; GN = queE PE=3 SV=1
MASLRSSAIPVSDPAAGLRITEIFYSLQGEANTFGLPTVFIRLTGCPLRCSYCDTTYSFEGGERLSLEHIIETASQHKTPYICVTGGEPLAQPNCLILLQRLCDLGFEVSLETSGALDVSKVDPRVSKVLDLKTPTSKEDHRNLYSNLDYLTPHDQIKFVICNREDYEWSRQQLKQFQLQNKVSTVWFSPAFAIEKGAVGLPALARDLAQWILDDHLPVRFQLQLHKLLWNDESGR

SEQ ID NO: 27342 - protein, 238 aa, Acinetobacter haemolyticus
  REGION 1..238: note = tr|D4XS97|D4XS97_ACIHA 7-carboxy-7-deazaguanine synthase OS=Acinetobacter haemolyticus ATCC 19194; OX = 707232 GN=queE PE=3 SV=1
MFMASLRSSAIPVSDPAAGLRITEIFYSLQGEANTFGLPTVFIRLTGCPLRCSYCDTTYSFEGGERLSLEHIIETASQYKTPYICVTGGEPLAQPNCLILLQRLCDLGFQVSLETSGALDVSKVDSRVSKVLDLKTPTSKEDHRNLLTNLDYLTQHDQIKFVICNRADYEWSRQQLEQFQLQDKVSTVWFSPAFAVEKGAVALPALARDLAQWILDDHLPVRFQLQLHKLLWNDESGR

SEQ ID NO: 27343 - protein, 238 aa, Acinetobacter haemolyticus; identical to SEQ ID NO: 27342
  REGION 1..238: note = tr|N9FE93|N9FE93_ACIHA 7-carboxy-7-deazaguanine synthase OS=Acinetobacter haemolyticus NIPH 261 OX=1217986; GN = queE PE=3 SV=1

SEQ ID NO: 27344 - protein, 236 aa, unidentified
  source 1..236: note = Acinetobacter halotolerans
  REGION 1..236: note = tr|A0A4Q6XE37|A0A4Q6XE37_9GAMM 7-carboxy-7-deazaguanine synthase OS=Acinetobacter halotolerans OX=1752076 GN=queE PE=3 SV=1
MASLRSSAIPVSDPAAGLRITEIFYSLQGEANTFGLPTVFIRLTGCPLRCSYCDTTYSFEGGERLSLEHIIETASQFKTPYICVTGGEPLAQPNCLILLQRLCDLGFQVSLETSGALDVAKVDPRVSKVLDLKTPTSKEDHRNLFSNFDYLTQHDQIKFVICNRADYEWSKQQLEQFQLQTKVSTVWFSPAFAVEKGAAVLPTFARDLAQWILDDHLPVRFQLQLHKLLWNDESGR

SEQ ID NO: 27345 - protein, 236 aa, unidentified
  source 1..236: note = Acinetobacter idrijaensis
  REGION 1..236: note = tr|A0A098YE09|A0A098YE09_9GAMM 7-carboxy-7-deazaguanine synthase OS=Acinetobacter idrijaensis OX=1507807 GN=queE PE=3 SV=1
MNTLRSSAIPVSDPSAGLRITEIFYSLQGEANAAGLPTVFIRLTGCPLRCSYCDTTYSFEGGERQSLDDIIQTTLDFKTPYVCVTGGEPLAQPNALPLMQRLADLGCEVSLETSGALDVSKVDPRVSKVLDLKTPASGEVARNLLSNLDHLTAHDQIKFVICNREDYEWSKQQLELYQLQDKVSTVWFSPAFAVEKGAVRLPPLARDLAQWILEDHLPVRFQLQLHKLLWNDETGR

SEQ ID NO: 27346 - protein, 236 aa, unidentified
  source 1..236: note = Acinetobacter indicus
  REGION 1..236: note = tr|V2ULJ2|V2ULJ2_9GAMM 7-carboxy-7-deazaguanine synthase OS=Acinetobacter indicus CIP 110367 OX=1341679; GN = queE PE=3 SV=1
MSTLRSSAIPVSDPSAGLRITEIFYSLQGEANTSGLPTVFIRLTGCPLRCTYCDTTYSFEGGERQSLEAIIQTTLDFNTPYVCVTGGEPLAQPNALPLMQRLADLGCEVSLETSGALDVSKVDPRVSKVLDLKTPTSGEVARNLLSNLDYLTAHDQIKFVICNREDYEWSKQQLELYQLHKKVSTVWFSPAFEVENGAARMPQLARDLAQWILEDHLPVRFQLQLHKLLWNDETGR

SEQ ID NO: 27347 - protein, 236 aa, unidentified
  source 1..236: note = Acinetobacter indicus
  REGION 1..236: note = tr|A0A437J0I7|A0A437J0I7_9GAMM 7-carboxy-7-deazaguanine synthase OS=Acinetobacter indicus; OX = 756892 GN=queE PE=3 SV=1
MSTLRSSAIPVSDPSAGLRITEIFYSLQGEANTSGLPTVFIRLTGCPLRCTYCDTTYSFEGGERQSLEAIIQTTLDFNTPYVCVTGGEPLAQPNALPLMQRLADLGCEVSLETSGALDVSKVDPRVSKVLDLKTPTSGEVARNLLSNLDYLTAHDQIKFVICNREDYEWSKQQVELYQLHKKVSTVWFSPAFEVENGAARMPQLARDLAQWILEDHLPVRFQLQLHKLLWNDETGR

SEQ ID NO: 27348 - protein, 236 aa, Acinetobacter johnsonii
  REGION 1..236: note = tr|A0A239RZ49|A0A239RZ49_ACIJO 7-carboxy-7-deazaguanine synthase OS=Acinetobacter johnsonii OX=40214 GN=queE PE=3 SV=1
MNTLRSSAIPVSDPSAGLRITEIFYSLQGEANTSGLPTVFIRLTGCPLRCTYCDTTYSFEGGERQSLDQIIQTTLDFKTPYVCVTGGEPLAQPNALPLMQRLADLGCEVSLETSGALDVSKVDPRVSKVLDLKTPTSGEVARNLLSNLDHLTQHDQIKFVICNREDYEWSKQQVEDYKLNEKVSTVWFSPAFAVEKGAARLPQLARDLAQWILEDHLPVCFQLQLHKLLWNDETGR

SEQ ID NO: 27349 - protein, 236 aa, Acinetobacter johnsonii
  REGION 1..236: note = tr|N9BEB2|N9BEB2_ACIJO 7-carboxy-7-deazaguanine synthase OS=Acinetobacter johnsonii ANC 3681 OX=1217662; GN = queE PE=3 SV=1
MNTLRSSAIPVSDPSAGLRITEIFYSLQGEANTSGLPTVFIRLTGCPLRCTYCDTTYSFEGGERQSLDQIIQTTLDFKTPYVCVTGGEPLAQPNALPLMQRLADLGCAVSLETSGALDVSKVDPRVSKVLDLKTPTSGEVARNLLSNLDHLTQHDQIKFVICNREDYEWSKQQVEDYKLNEKVSTVWFSPAFAVEKGAARLPQLARDLAQWILEDHLPVCFQLQLHKLLWNDETGR

SEQ ID NO: 27350 - protein, 236 aa, Acinetobacter junii
  REGION 1..236: note = tr|D0SK34|D0SK34_ACIJU 7-carboxy-7-deazaguanine synthase OS=Acinetobacter junii SH205 OX=575587 GN=queE; PE = 3 SV=1
MTSLRSSAIPVSDPAAGLRITEIFYSLQGEANTFGLPTVFIRLTGCPLRCSYCDTTYSFEGGERQSLEHIIETASQFKTPYICVTGGEPLAQPNCLVLLQRLCDLGFDVSLETSGALDVSKVDPRVSKVLDLKTPTSNEDHRNLLTNLDYLTQHDQIKFVICNRADYEWSKQQLENFQLQDKVSTVWFSPAFAVEKGAVALPALARDLAQWILDDHLPVRFQLQLHKLLWNDESGR

SEQ ID NO: 27351 - protein, 236 aa, Acinetobacter junii
  REGION 1..236: note = tr|A0A365PH15|A0A365PH15_ACIJU 7-carboxy-7-deazaguanine synthase OS=Acinetobacter junii; OX = 40215 GN=queE PE=3 SV=1
MTSLRSSAIPVSDPAAGLRITEIFYSLQGEANTFGLPTVFIRLTGCPLRCSYCDTTYSFEGGERQSLEHIIETASQFKTPYICVTGGEPLAQPNCLVLLQRLCDLGFDVSLETSGALDVSKVDPRVSKVLDLKTPTSNEDHRNLLINLDYLTQHDQIKFVICNRADYEWSKQQLENFQLQDKVSTVWFSPAFAVEKGAVALPALARDLAQWILDDHLPVRFQLQLHKLLWNDESGR

SEQ ID NO: 27352 - protein, 236 aa, unidentified
  source 1..236: note = Acinetobacter kookii
  REGION 1..236: note = tr|A0A1G6H0M4|A0A1G6H0M4_9GAMM 7-carboxy-7-deazaguanine synthase OS=Acinetobacter kookii; OX = 1226327 GN=queE PE=3 SV=1
MSTLRSSAIPVTDPSAGLRITEIFYSLQGEANAAGLPTVFIRLTGCPLRCTYCDTTYSFEGGERQSLDDIIQTALDFKTPYICVTGGEPLAQPNALPLMQRLADLGCEVSLETSGALDVSKVDPRVSKVLDFKTPTSGEVARNLLSNLDHLTPHDQIKFVICNREDYEWSKQQVEQFKLADKVSTVWFSPAFAVEKGAVKLPQLARDLAQWILDDHLPVRFQLQLHKLLWNDETGR

SEQ ID NO: 27353 - protein, 236 aa, unidentified; identical to SEQ ID NO: 27319
  source 1..236: note = Acinetobacter kyonggiensis
  REGION 1..236: note = tr|A0A1H3HI96|A0A1H3HI96_9GAMM 7-carboxy-7-deazaguanine synthase OS=Acinetobacter kyonggiensis OX=595670 GN=queE PE=3 SV=1

SEQ ID NO: 27354 - protein, 236 aa, unidentified
  source 1..236: note = Acinetobacter lactucae
  REGION 1..236: note = tr|A0A151YMX3|A0A151YMX3_9GAMM 7-carboxy-7-deazaguanine synthase OS=Acinetobacter lactucae OX=1785128 GN=queE PE=3 SV=1
MASLRSSAIPVSDPASGLRITEIFYSLQGEANASGLPTVFIRLTGCPLRCSYCDTTYSFEGGERFSLEHIIETATQFQTPYICVTGGEPLAQPNCLILLQRLCEAGFDVSLETSGALDVSRVDPRVSKVLDLKTPTSGEEHRNLISNLDHLTPHDQIKFVICNREDYEWSKQQVEKYQLHTKVSTVWFSPAFAVEKGAVGLPRLARDLAQWILDDKLPVRFQLQLHKLLWNDESGR

SEQ ID NO: 27355 - protein, 236 aa, unidentified
  source 1..236: note = Acinetobacter lactucae
  REGION 1..236: note = tr|A0A429K9K3|A0A429K9K3_9GAMM 7-carboxy-7-deazaguanine synthase OS=Acinetobacter lactucae OX=1785128 GN=queE PE=3 SV=1
MASLRSSAIPVSDPASGLRITEIFYSLQGEANASGLPTVFIRLTGCPLRCSYCDTTYSFEGGERFSLEHIIETATQFQTPYICVTGGEPLAQPNCLILLQRLCEAGFDVSLETSGALDVSRVDPRVSKVLDLKTPTSGEEHRNLISNLDHLTPHDQIKFVICNREDYEWSKQQVKKYQLHTKVSTVWFSPAFAVEKGAVGLPRLARDLAQWILDDKLPVRFQLQLHKLLWNDESGR

SEQ ID NO: 27356 - protein, 236 aa, unidentified
  source 1..236: note = Acinetobacter larvae
  REGION 1..236: note = tr|A0A1B2LXR4|A0A1B2LXR4_9GAMM 7-carboxy-7-deazaguanine synthase OS=Acinetobacter larvae; OX = 1789224 GN=queE PE=3 SV=1
MHARRSTAIPVSDPAAGLRITEIFYSLQGEANSAGLATVFIRLTGCPLRCHYCDTTYSFEGGERLSLAHIIDVARAYQTPHICITGGEPLAQPNCIPLMTQLADLGCQVSLETSGALDVSKVDPRVSKVMDLKTPSSGEERKNLLSNLDHLTAHDQIKFVICNREDYIWAKNQVERYRLEQRVGSVWFSPAFAIEKGAVALPALARDLAQWILDDRLQVRFQLQLHKLLWNDETGR

SEQ ID NO: 27357 - protein, 236 aa, Acinetobacter lwoffii
  REGION 1..236: note = tr|A0A4Q4DW20|A0A4Q4DW20_ACILW 7-carboxy-7-deazaguanine synthase OS=Acinetobacter lwoffii; OX = 28090 GN=queE PE=3 SV=1
MNTLRSSAIPVSDPSAGLRITEIFYSLQGEANAAGLPTVFIRLTGCPLRCSYCDTTYSFEGGERQSLDDIIQTTLDFKTPYVCVTGGEPLAQPNALPLMQRLADLGCEVSLETSGALDVSKVDSRVSKVLDLKTPTSGEVARNLLSNLDHLTAHDQIKFVICNREDYEWSKQQLEQYQLQDKVSTVWFSPAFAVEKGAVRLPPLARDLAQWILEDHLPVRFQLQLHKLLWNDETGR

SEQ ID NO: 27358 - protein, 236 aa, Acinetobacter lwoffii
  REGION 1..236: note = tr|N9HC98|N9HC98_ACILW 7-carboxy-7-deazaguanine synthase OS=Acinetobacter lwoffii ATCC 9957 = CIP 70.31; OX = 1311804 GN=queE PE=3 SV=1
MNTLRSSAIPVSDPSAGLRITEIFYSLQGEANAAGLPTVFIRLTGCPLRCSYCDTTYSFEGGERQSLDDIIQTTLDFKTPYVCVTGGEPLAQPNALPLMQRLADLGCQVSLETSGALDVSKVDSRVSKVLDLKTPTSGEVARNLLSNLDHLTAHDQIKFVICNREDYEWSKQQLELYQLQDKVSTVWFSPAFAVEKGAVCLPPLARDLAQWILEDHLPVRFQLQLHKLLWNDETGR

SEQ ID NO: 27359 - protein, 232 aa, unidentified
  source 1..232: note = Acinetobacter marinus
  REGION 1..232: note = tr|A0A1G6J5K6|A0A1G6J5K6_9GAMM 7-carboxy-7-deazaguanine synthase OS=Acinetobacter marinus; OX = 281375 GN=queE PE=3 SV=1
MRTQSIPVTDPAAGLKLTEIFYSLQGEANEAGHPTVFVRLTGCPLRCVYCDTTYSFDGGTRFGLDDIIQQISQYNAKYVCVTGGEPLAQPNCVVLLKTLCDSGFKVSLETSGALDISKVDTRVSRIVDVKTPSSHEQHRNMIENYPHLTQHDQIKFVISDRADYEWSKDFLMQHQLANLVSTVWFSPAFAIEGNVRLPPLARNLAQWILEDHLPVKFQLQLHKLLWQDEKGR

SEQ ID NO: 27360 - protein, 242 aa, unidentified
  source 1..242: note = Acinetobacter nectaris
  REGION 1..242: note = tr|V2TQV0|V2TQV0_9GAMM 7-carboxy-7-deazaguanine synthase OS=Acinetobacter nectaris CIP 110549 OX=1392540; GN = queE PE=3 SV=1
MVDFAMNSPLRSTTIPVTDPSSGLRITEIFYSLQGEADTAGLPTVFIRLTGCPLRCTYCDTTYSFEGGKRQSLESIITEAQKHNTPYICVTGGEPLAQPNCIALLNQLCHLGFEISLETSGALSIANVDTRVSKVLDLKTPTSGESHRNLIENFEYLTKKDQIKFVICNREDYEWSKQQVEKYQLEKKVNTVWFSPAFAVEKGNAKLPAFARDLAQWVLEDQLPVRFQLQLHKLLWQDETGR

SEQ ID NO: 27361 - protein, 236 aa, Acinetobacter nosocomialis
  REGION 1..236: note = tr|A0A0E2GCL3|A0A0E2GCL3_ACINO 7-carboxy-7-deazaguanine synthase OS=Acinetobacter nosocomialis NIPH 386 OX=1217985 GN=queE PE=3 SV=1
MASLRSSAIPVSDPASGLRITEIFYSLQGEANASGLPTVFIRLTGCPLRCSYCDTTYSFEGGERLSLEHIIETAEKYQTPYICVTGGEPLAQPNCLILLQRLCDAGFDVSLETSGALDVSKVDPRVSKVLDLKTPTSGEEHRNLISNLDYLTSHDQIKFVICNREDYEWSKQQVEQYQLQNKVSTVWFSPAFAVEKGAVGLPRLARDLAQWILDDKLPVRFQLQLHKLLWNDESGR

SEQ ID NO: 27362 - protein, 236 aa, Acinetobacter nosocomialis; identical to SEQ ID NO: 27361
  REGION 1..236: note = tr|A0A2T7FRR4|A0A2T7FRR4_ACINO 7-carboxy-7-deazaguanine synthase OS=Acinetobacter nosocomialis OX=106654 GN=queE PE=3 SV=1

SEQ ID NO: 27363 - protein, 236 aa, unidentified
  source 1..236: note = Acinetobacter oleivorans
  REGION 1..236: note = tr|A0A0B2UAG8|A0A0B2UAG8_9GAMM 7-carboxy-7-deazaguanine synthase OS=Acinetobacter oleivorans OX=1148157 GN=queE PE=3 SV=1
MASLRSSAIPVSDPASGLRITEIFYSLQGEANASGLPTVFIRLTGCPLRCSYCDTTYSFEGGERFSLEHIIETATQFQTPYICVTGGEPLAQPNCLILLQRLCEAGFDVSLETSGALDVSKVDSRVSKVLDLKTPTSGEEHRNLISNLDHLTAHDQIKFVICNREDYEWSKQQVEKYQLHKKVSTVWFSPAFAVEKGAVGLPRLARDLAQWILDDKLPVRFQLQLHKLLWNDESGR

SEQ ID NO: 27364 - protein, 236 aa, unidentified
  source 1..236: note = Acinetobacter oleivorans
  REGION 1..236: note = tr|D8JEE1|D8JEE1_ACISD 7-carboxy-7-deazaguanine synthase OS=Acinetobacter oleivorans (strain JCM 16667 / KCTC 23045 / DR1) OX=436717 GN=queE PE=3 SV=1
MASLRSSAIPVSDPASGLRITEIFYSLQGEANASGLPTVFIRLTGCPLRCSYCDTTYSFEGGERFSLEHIIETATQYQTPYICVTGGEPLAQPNCLILLQRLCEAGFDVSLETSGALDVSKVDSRVSKVLDLKTPTSGEEHRNLISNLDHLTAHDQIKFVICNREDYEWSKQQVEKYQLHKKVSTVWFSPAFAVEKGAVSLPRLARDLAQWILDDKLLVRFQLQLHKLLWNDESGR

SEQ ID NO: 27365 - protein, 236 aa, Acinetobacter parvus
  REGION 1..236: note = tr|N8RMB4|N8RMB4_9GAMM 7-carboxy-7-deazaguanine synthase OS=Acinetobacter parvus NIPH 1103 OX=1217671; GN = queE PE=3 SV=1
MASLRSSAIPVSDPAAGLRITEIFYSLQGEANTFGLPTVFIRLTGCPLRCSYCDTTYSFEGGERLSLEHIIETASQHKTPYICVTGGEPLAQPNCLVLLQRLCDLGFQVSLETSGALDVSKVEPRVSKVLDLKTPTSKEDHRNLLTNLDYLTQHDQIKFVICNREDYEWSKQQLINFQLQDKVSTVWFSPAFAVEKGAAVLPAFARDLAQWILDDHLPVRFQLQLHKLLWNDESGR

SEQ ID NO: 27366 - protein, 236 aa, Acinetobacter parvus
  REGION 1..236: note = tr|N8RR18|N8RR18_9GAMM 7-carboxy-7-deazaguanine synthase OS=Acinetobacter parvus DSM 16617 = CIP 108168; OX = 981333 GN=queE PE=3 SV=1
MASLRSSAIPVSDPAAGLRITEIFYSLQGEANTFGLPTVFIRLTGCPLRCSYCDTTYSFEGGERLSLEHIIETASQHKTPYICVTGGEPLAQPNCLILLQRLCDLGFQVSLETSGALDVSKVEPRVSKVLDLKTPTSKEDHRNLLTNLDYLTQHDQIKFVICNREDYEWSKQQLINFQLQDKVSTVWFSPAFAVEKGAAVLPALARDLAQWILDDHLPVRFQLQLHKLLWNDESGR

SEQ ID NO: 27367 - protein, 236 aa, unidentified
  source 1..236: note = Acinetobacter piscicola
  REGION 1..236: note = tr|A0A4Q4H130|A0A4Q4H130_9GAMM 7-carboxy-7-deazaguanine synthase OS=Acinetobacter piscicola OX=2006115 GN=queE PE=3 SV=1
MNALRTSTIPVSDPSAGLRITEIFYSLQGEANAAGLPTVFIRLTGCPLRCTYCDTTYSFEGGERQSLEQIIQTTLDFKTPYICVTGGEPLAQPNALPLMTHLADLGCDVSLETSGALDVSKVDPRVSKVLDLKTPTSGEMQRNLLSNFEHLTPHDQIKFVICNREDYDWAKQQVADFQLNEKVSTVWFSPAFAVEKGAVRLPQLARDLAQWILDDHLPVRFQLQLHKLLWNDETGR

SEQ ID NO: 27368 - protein, 236 aa, Acinetobacter pittii
  REGION 1..236: note = tr|R8YPP9|R8YPP9_ACIPI 7-carboxy-7-deazaguanine synthase OS=Acinetobacter pittii ANC 4050 OX=1217691; GN = queE PE=3 SV=1
MASLRSSAIPVSDPASGLRITEIFYSLQGEANASGLPTVFIRLTGCPLRCSYCDTTYSFEGGERFSLEHIIETAKQYQTPYICVTGGEPLAQPNCLILLQRLCEAGFDVSLETSGALDVSKVDSRVSKVLDLKTPTSGEEHRNLISNLDHLTLHDQIKFVICNREDYEWSKQQVEKYQLHKKVSTVWFSPAFAVEKGAVGLPRLARDLAQWILDDKLSVRFQLQLHKLLWNDESGR

SEQ ID NO: 27369 - protein, 236 aa, Acinetobacter pittii
  REGION 1..236: note = tr|A0A0R0RY63|A0A0R0RY63_ACIPI 7-carboxy-7-deazaguanine synthase OS=Acinetobacter pittii; OX = 48296 GN=queE PE=3 SV=1
MASLRSSAIPVSDPASGLRITEIFYSLQGEANASGLPTVFIRLTGCPLRCSYCDTTYSFEGGERFSLEHIIETATQFQTPYICVTGGEPLAQPNCLILLQRLCEAGFDVSLETSGALDVSKVDSRVSKVLDLKTPTSGEEHRNLISNLDHLTPRDQIKFVICNREDYEWSKQQVEKYQLQTKVSTVWFSPAFAVEKGAVGLPRLARDLAQWILDDKLPVRFQLQLHKLLWNDESGR

SEQ ID NO: 27370 - protein, 232 aa, unidentified
  source 1..232: note = Acinetobacter populi
  REGION 1..232: note = tr|A0A1Z9Z135|A0A1Z9Z135_9GAMM 7-carboxy-7-deazaguanine synthase OS=Acinetobacter populi; OX = 1582270 GN=queE PE=3 SV=1
MRNQFIPVTDPAAGLKITEIFYSLQGEANEAGSPTVFVRLTGCPLRCHYCDTTYSFEGGKRMTLEDIYQQIASYQAKFVCVTGGEPLAQPNCLTLLSALCNKGYRVSLETSGALDISRVDTRVSRIVDVKTPSSGEEHRNLIDNYQHLTQHDQIKFVISDEDDYQWAKDFLARHQLAQKVGTVWFSPAFAIEGDVRLPAFARQLAGWILQDHLPVKFQLQLHKLLWQDEKGR

SEQ ID NO: 27371 - protein, 236 aa, unidentified
  source 1..236: note = Acinetobacter pragensis
  REGION 1..236: note = tr|A0A151Y1R3|A0A151Y1R3_9GAMM 7-carboxy-7-deazaguanine synthase OS=Acinetobacter pragensis OX=1806892 GN=queE PE=3 SV=1
MSTLRSAAIPVSDPSAGLRITEIFYSLQGEANTAGLPTVFIRLTGCPLRCTYCDTTYSFEGGERKSLDDIIQTTLDFKTPYICVTGGEPLAQPNALPLMQRLADLGCEVSLETSGALDVSKVDPRVSKVLDLKTPASGESARNLLSNIDYLTEHDQIKFVICDREDYEWSKQQVQQLELNKKAGTIWFSPAFAVEKGVVRLPQLARDLAQWILEDRLPVRFQLQLHKLLWNDETGR

SEQ ID NO: 27372 - protein, 236 aa, unidentified
  source 1..236: note = Acinetobacter proteolyticus
  REGION 1..236: note = tr|A0A1E7RAI6|A0A1E7RAI6_9GAMM 7-carboxy-7-deazaguanine synthase OS=Acinetobacter proteolyticus OX=1776741 GN=queE PE=3 SV=1
MASLRSSAIPVSDPAAGLRITEIFYSLQGEANTFGLPTVFIRLTGCPLRCSYCDTTYSFEGGERLSLEQIIETASQHKTPYICVTGGEPLAQPNCLILLQRLCDLGFEVSLETSGALDVSKVDPRVSKVLDLKTPTSKEDHRNLYSNLDYLTPHDQIKFVICNRADYEWSKQQLEQFQLQDKVSTVWFSPAFAVEKGAVALPPLARDLAQWILEDHLPVRFQLQLHKLLWNDESGR

SEQ ID NO: 27373 - protein, 236 aa, unidentified
  source 1..236: note = Acinetobacter proteolyticus
  REGION 1..236: note = tr|A0A2N0WFX8|A0A2N0WFX8_9GAMM 7-carboxy-7-deazaguanine synthase OS=Acinetobacter proteolyticus OX=1776741 GN=queE PE=3 SV=1
MASLRSSAIPVSDPAAGLRITEIFYSLQGEANTFGLPTVFIRLTGCPLRCSYCDTTYSFEGGERLSLEHIIETASQHKTPYICVTGGEPLAQPNCLILLQRLCDLGFEVSLETSGALDVSKLDPRVSKVLDLKTPTSKEDHRNLYSNLDYLTSHDQIKFVICNREDYEWSRQQLEQFQLQDKVSTVWFSPAFAVEKGAVGLPALARDLAQWILDDHLPVRFQLQLHKLLWNDESGR

SEQ ID NO: 27374 - protein, 232 aa, unidentified
  source 1..232: note = Acinetobacter puyangensis
  REGION 1..232: note = tr|A0A240E5E5|A0A240E5E5_9GAMM 7-carboxy-7-deazaguanine synthase OS=Acinetobacter puyangensis OX=1096779 GN=queE PE=3 SV=1
MRNQFIPVTDPAAGLKITEIFYSLQGEANEAGSPTVFVRLTGCPLRCNYCDTTYSFEGGKRITLADIYQQIASYQAKFVCVTGGEPLAQPNCLILLKTLCDEGYHVSLETSGALDISRVDTRVSRIVDVKTPSSGEEQRNLIENYQHLTCHDQIKFVISDQEDYLWAKDFLAEHQLAEKVGTVWFSPAFAIEGDVRLPAFARQLAGWILQDHLPVKFQLQLHKLLWQDEKGR

SEQ ID NO: 27375 - protein, 232 aa, unidentified
  source 1..232: note = Acinetobacter qingfengensis
  REGION 1..232: note = tr|A0A1E7RDP5|A0A1E7RDP5_9GAMM 7-carboxy-7-deazaguanine synthase OS=Acinetobacter qingfengensis OX=1262585 GN=queE PE=3 SV=1
MRTQSIPVTDPAAGLRLTEIFYSLQGEANEAGHPTVFVRLTGCPLRCQYCDTTYSFEGGYRTSLEHIHDEIANYQAKYVCVTGGEPLAQPNCLVLLQSLCDAGYHVSLETSGALDISRVDTRVSRIVDVKTPSSAEQHRNLIRNYAYLTSHDQIKFVIGSLEDYEWSKAFLAEHELASKVSTVWFSPAFAITGDVKLPTFARQLAQWILEDHLPVKFQLQLHKLLWQDEKGR

SEQ ID NO: 27376 - protein, 236 aa, Acinetobacter radioresistens
  REGION 1..236: note = tr|A0A0E2GYF0|A0A0E2GYF0_ACIRA 7-carboxy-7-deazaguanine synthase OS=Acinetobacter radioresistens DSM 6976 = NBRC 102413 = CIP 103788; OX = 981334 GN=queE PE=3 SV=1
MNPLRSSVIPVSDPAAGLRITEIFYSLQGEANAAGLPTVFIRLTGCPLRCTYCDTTYSFEGGVRQSLEEIIATARSYNTPYICVTGGEPLAQPNCLVLLQRLCDLGHKVSLETSGALDVSKVDPRVSKVLDLKTPSSGEVIRNLMSNLEFLTSNDQIKFVICNRDDYQWAKEQLALYSLEQKVSTVWFSPAFAVEKGAAQLPKLARELAQWILDDQLPVRFQLQLHKLLWNDETGR

SEQ ID NO: 27377 - protein, 236 aa, Acinetobacter radioresistens
  REGION 1..236: note = tr|A0A2T1J1J0|A0A2T1J1J0_ACIRA 7-carboxy-7-deazaguanine synthase OS=Acinetobacter radioresistens OX=40216 GN=queE PE=3 SV=1
MNPLRSSVIPVSDPAAGLRITEIFYSLQGEANAAGLPTVFIRLTGCPLRCTYCDTTYSFEGGVRQSLEEIIATARSYNTPYICVTGGEPLAQPNCLVLLQRLCDLGHKVSLETSGALDVSKVDPRVSKVLDLKTPSSGEVTRNLMSNLEFLTSNDQIKFVICNRDDYQWAKEQLALYSLEQKVSTVWFSPAFAVEKGAAQLPKLARELAQWILDDQLPVRFQLQLHKLLWNDETGR

SEQ ID NO: 27378 - protein, 241 aa, Acinetobacter rudis
  REGION 1..241: note = tr|S3PEU7|S3PEU7_9GAMM 7-carboxy-7-deazaguanine synthase OS=Acinetobacter rudis CIP 110305 OX=421052; GN = queE PE=3 SV=1
MVKGVMQTLRSTAIPVSDPSAGLRITEIFYSLQGEANAAGLPTVFIRLTGCPLRCTYCDTTYSFEGGERRSLDEIISTTMAFKTPYICVTGGEPLAQPNVHPLMTRLADLGCEVSLETSGALDVAKVDQRVSKVLDLKTPTSGEQQRNLLSNFEHLTQHDQIKFVICNREDYLWAKTQLEQYKLQDKVSTIWFSPAFAIEKGAIRLPELARDLAQWILDDHLPVRFQLQLHKLLWNDETGR

SEQ ID NO: 27379 - protein, 236 aa, Acinetobacter schindleri
  REGION 1..236: note = tr|N8Y1J5|N8Y1J5_9GAMM 7-carboxy-7-deazaguanine synthase OS=Acinetobacter schindleri NIPH 900 OX=1217675; GN = queE PE=3 SV=1
MSTLRSSAIPVSDPSAGLRITEIFYSLQGEANTAGLPTVFIRLTGCPLRCTYCDTTYSFEGGERKSLEEIIQTTLDFKTPYICVTGGEPLAQPNALPLMQRLADAGCEVSLETSGALDVSKVDPRVSKVLDLKTPTSGEVARNLLSNLDHLTQHDQIKFVICNREDYEWSKQQVEQYQLNEKVSTVWFSPAFEVEKGTARMPQLARDLAQWILEDHLPVRFQLQLHKLLWNDETGR

SEQ ID NO: 27380 - protein, 236 aa, Acinetobacter schindleri
  REGION 1..236: note = tr|N9ALG6|N9ALG6_9GAMM 7-carboxy-7-deazaguanine synthase OS=Acinetobacter schindleri CIP 107287 OX=1217988; GN = queE PE=3 SV=1
MSTLRSSAIPVSDPSAGLRITEIFYSLQGEANTAGLPTVFIRLTGCPLRCTYCDTTYSFEGGERKSLEEIIQTTLDFKTPYICVTGGEPLVQPNALPLMQRLADAGCEVSLETSGALDVSKVDPRVSKVLDLKTPTSGEVARNLLSNLDHLTQHDQIKFVICNREDYEWSKQQVEQYQLNEKVSTVWFSPAFEVEKGTARMPQLARDLAQWILEDHLPVRFQLQLHKLLWNDETGR

SEQ ID NO: 27381 - protein, 236 aa, unidentified; identical to SEQ ID NO: 27336
  source 1..236: note = Acinetobacter seifertii
  REGION 1..236: note = tr|N8SDD7|N8SDD7_9GAMM 7-carboxy-7-deazaguanine synthase OS=Acinetobacter seifertii OX=1530123 GN=queE; PE = 3 SV=1

SEQ ID NO: 27382 - protein, 236 aa, unidentified
  source 1..236: note = Acinetobacter seifertii
  REGION 1..236: note = tr|A0A2M8MIJ6|A0A2M8MIJ6_9GAMM 7-carboxy-7-deazaguanine synthase OS=Acinetobacter seifertii OX=1530123 GN=queE PE=3 SV=1
MASLRSSAIPVSDPASGLRITEIFYSLQGEANASGLPTVFIRLTGCPLRCTYCDTTYSFEGGERLSLEHIIETAEEYKTPYICVTGGEPLAQPNCLILLQRLCDAGFDVSLETSGALDVSKVDPRVSKVLDLKTPTSGEEHRNLISNLDYLTSHDQIKFVICNREDYEWSKQQVEQYQLQTKVSTVWFSPAFAVEKGAVGLPRLARDLAQWILDDKMPVRFQLQLHKLLWNDESGR

SEQ ID NO: 27383 - protein, 236 aa, Acinetobacter soli
  REGION 1..236: note = tr|N9ACF4|N9ACF4_9GAMM 7-carboxy-7-deazaguanine synthase OS=Acinetobacter soli NIPH 2899 OX=1217677; GN = queE PE=3 SV=1
MTSLRSTTIPVTDPAAGLRITEIFYSLQGEANTAGLPTVFIRLTGCPLRCTYCDTTYSFEGGQRLSIDEIIETARAYKTPYICVTGGEPLAQPNCQVLLTRLCDLGFDVSLETSGALDVSMVDARVSKVLDLKTPTSGEEKRNLMSNLDHLTPHDQIKFVICNREDYEWSKLQVEQFQLEKKVSTVWFSPAFAVEKNAAKLPQLARDLAEWILNDHLPVRFQLQLHKILWNDETGR

SEQ ID NO: 27384 - protein, 236 aa, Acinetobacter soli; identical to SEQ ID NO: 27383
  REGION 1..236: note = tr|A0A1P8EEY1|A0A1P8EEY1_9GAMM 7-carboxy-7-deazaguanine synthase OS=Acinetobacter soli; OX = 487316 GN=queE PE=3 SV=1

SEQ ID NO: 27385 - protein, 236 aa, Acinetobacter sp.; identical to SEQ ID NO: 27361
  REGION 1..236: note = tr|A0A4V7TDM2|A0A4V7TDM2_9GAMM 7-carboxy-7-deazaguanine synthase OS=Acinetobacter sp. FDAARGOS_131 OX=1876769 GN=queE PE=3 SV=1

SEQ ID NO: 27386 - protein, 236 aa, Acinetobacter sp.
  REGION 1..236: note = tr|A0A1E3GMC4|A0A1E3GMC4_9GAMM 7-carboxy-7-deazaguanine synthase OS=Acinetobacter sp. 51m; OX = 1856846 GN=queE PE=3 SV=1
MNTLRSSAIPVSDPSAGLRITEIFYSLQGEANAAGLPTVFIRLTGCPLRCSYCDTTYSFEGGERQSLDDIIQTTLDFKTPYVCVTGGEPLAQPNALPLMQRLADLGCQVSLETSGALDVSKVDSRVSKVLDLKTPTSGEVARNLLSNLDHLTAHDQIKFVICNREDYEWSKQQLELYQLQDKVSTVWFSPAFAVEKGAVQLPPLARDLAQWILEDHLPVRFQLQLHKLLWNDETGR

SEQ ID NO: 27387 - protein, 236 aa, Acinetobacter tandoii
  REGION 1..236: note = tr|A0A515BDL2|A0A515BDL2_9GAMM 7-carboxy-7-deazaguanine synthase OS=Acinetobacter tandoii; OX = 202954 GN=queE PE=3 SV=1
MNTLRSSAIPVSDPAAGLRITEIFYSLQGEANTAGLPTVFIRLTGCPLRCTYCDTTYSFEGGERQSLEQIIQTTLDFKTPYVCVTGGEPLAQPNALPLMTRLADLGCEVSLETSGALDVSKVDPRVSKVLDLKTPTSGEEQRNLMSNLDHLTQHDQIKFVICNREDYEWSKQQLAQYQLQDKVSTVWFSPAFAVEKGAARLPQLARDLAQWILEDHLPVRFQLQLHKLLWNDETGR

SEQ ID NO: 27388 - protein, 236 aa, Acinetobacter tandoii
  REGION 1..236: note = tr|R9B3F3|R9B3F3_9GAMM 7-carboxy-7-deazaguanine synthase OS=Acinetobacter tandoii DSM 14970 = CIP 107469; OX = 1120927 GN=queE PE=3 SV=1
MNTLRSSAIPVSDPAAGLRITEIFYSLQGEANTAGLPTVFIRLTGCPLRCTYCDTTYSFEGGERQSLDQIIQTTLDFKTPYVCVTGGEPLAQPNALPLMQRLADLGCEVSLETSGALDVSKVDPRISKVLDLKTPTSGEEQRNLISNLDHLTQHDQIKFVICNREDYEWSKLQVAQYQLQDKVSTVWFSPAFAVEKGAVRLPQLARDLAQWILEDHLPVRFQLQLHKLLWNDETGR

SEQ ID NO: 27389 - protein, 236 aa, Acinetobacter tjernbergiae
  REGION 1..236: note = tr|V2V6S3|V2V6S3_9GAMM 7-carboxy-7-deazaguanine synthase OS=Acinetobacter tjernbergiae DSM 14971 = CIP 107465 OX=1120928 GN=queE PE=3 SV=1
MASLRSSAIPVSDPAAGLRITEIFYSLQGEANTFGLPTVFIRLTGCPLRCSYCDTTYSFEGGERQSLEQIIETASQHKTPYICVTGGEPLAQPNCLILLQRLCDLGFEVSLETSGALDVSKVDPRVSKVLDLKTPTSKEDHRNLLTNIDYLTQHDQIKFVICNRADYEWSKQQLEQLQLQDKVSTVWFSPAFAVEKGTVALPVLARDLAQWILEDHLPVRFQLQLHKLLWNDESGR

SEQ ID NO: 27390 - protein, 251 aa, Acinetobacter towneri
  REGION 1..251: note = tr|N9CQ73|N9CQ73_9GAMM 7-carboxy-7-deazaguanine synthase OS=Acinetobacter towneri DSM 14962 = CIP 107472; OX = 1120929 GN=queE PE=3 SV=1
MTVGIFVFLHTVMNFMNTLRSSAIPVSDPSAGLRITEIFYSLQGEANTSGLPTVFIRLTGCPLRCHYCDTTYSFEGGERQSLDDIIQTTLEFKTPYVCVTGGEPLAQPNALPLIQRLADLGCEVSLETSGALDISKVDNRVSKVLDLKTPASGEMSRNLLSNLDFLNPHDQIKFVICNHDDYLWAKQQVEQYQLHKKVDTVWFSPAFAVEKGAVALPQLARDLAQWILADHLPVRFQLQLHKLLWNDETGR

SEQ ID NO: 27391 - protein, 236 aa, Acinetobacter towneri
  REGION 1..236: note = tr|A0A1E8E2J4|A0A1E8E2J4_9GAMM 7-carboxy-7-deazaguanine synthase OS=Acinetobacter towneri; OX = 202956 GN=queE PE=3 SV=1
MSTLRSSAIPVSDPSAGLRITEIFYSLQGEANTSGLPTVFIRLTGCPLRCHYCDTTYSFEGGERQSLDDIIQTTLDFKTPYVCVTGGEPLAQPNALPLMQRLADLGCEVSLETSGALDISKVDNRVSKVLDLKTPASGEMSRNLLSNLDFLNPHDQIKFVICNHDDYLWAKQQVEQYQLHKKVNTVWFSPAFAVEKGAVALPQLARDLAQWILADHLPVRFQLQLHKLLWNDETGR

SEQ ID NO: 27392 - protein, 259 aa, Acinetobacter ursingii
  REGION 1..259: note = tr|N9D943|N9D943_9GAMM 7-carboxy-7-deazaguanine synthase OS=Acinetobacter ursingii ANC 3649 OX=1257043; GN = queE PE=3 SV=1
MFLVSTFKSDRRDFCFLRCGISAMTSLRSTTIPVSDPAAGLRITEIFYSLQGEANTAGLPTVFIRLTGCPLRCSYCDTTYSFEGGERQSLDQIIETALSFKTPYICVTGGEPLAQPNCLHLLTRLSDLGCQVSLETSGALDVSKVDSRVSKVLDLKTPTSGEEKRNLLSNLDYLTPHDQIKFVICNREDYEWSKQQLENYQLNEKVSTVWFSPAFAVEKASVKLPQLARDMAQWILDDHLPVRFQLQLHKLLWNDETGR

SEQ ID NO: 27393 - protein, 259 aa, Acinetobacter ursingii
  REGION 1..259: note = tr|N9QRP7|N9QRP7_9GAMM 7-carboxy-7-deazaguanine synthase OS=Acinetobacter ursingii NIPH 706 OX=1217716; GN = queE PE=3 SV=1
MFLVSTFKSDRRDFCFLRCGISAMTSLRSTTIPVSDPAAGLRITEIFYSLQGEANTAGLPTVFIRLTGCPLRCTYCDTTYSFEGGERQSLDQIIETALSFKTPYICVTGGEPLAQPNCLHLLTRLSDLGCQVSLETSGALDVSKVDSRVSKVLDLKTPTSGEEKRNLLSNLDYLTPHDQIKFVICNREDYEWSKQQLENYQLDEKVSTVWFSPAFAVEKASVKLPQLARDMAQWILDDHLPVRFQLQLHKLLWNDETGR

SEQ ID NO: 27394 - protein, 236 aa, unidentified
  source 1..236: note = Acinetobacter variabilis
  REGION 1..236: note = tr|N9MEC6|N9MEC6_9GAMM 7-carboxy-7-deazaguanine synthase OS=Acinetobacter variabilis OX=70346 GN=queE PE=3; SV = 1
MNTLRSSAIPVSDPSAGLRITEIFYSLQGEANTAGLPTVFIRLTGCPLRCTYCDTTYSFEGGERKSLDDIIQTTLDFKTPYVCVTGGEPLAQPNALPLMQRLADLGCEVSLETSGALDVSKVDARVSKVLDLKTPTSGEVARNLLTNLDHLTQHDQIKFVICNREDYEWSKQQVEQYQLNEKVSTVWFSPAFAVEKGAARLPQLARDLAQWILEDHLPVRFQLQLHKLLWNDETGR

SEQ ID NO: 27395 - protein, 236 aa, Acinetobacter venetianus
  REGION 1..236: note = tr|N8YLU9|N8YLU9_ACIVR 7-carboxy-7-deazaguanine synthase OS=Acinetobacter venetianus (strain ATCC 31012 / CIP 110063 / RAG-1) OX=1191460 GN=queE PE=3 SV=1
MASLRSSAIPVSDPAAGLRITEIFYSLQGEANTFGLPTVFIRLTGCPLRCSYCDTTYSFEGGERFSLEHIIETASQYKTPYICVTGGEPLAQPNCLILLQRLCDLGFQVSLETSGALDVSKVDSRVSKVLDLKTPTSKEDHRNLLSNIDHLTRHDQIKFVICNREDYEWSKLQLEQFQLQEKVSTVWFSPAFAVEKGAVALPALARDLAQWILEDHLPVRFQLQLHKLLWNDESGR

SEQ ID NO: 27396 - protein, 236 aa, Acinetobacter venetianus
  REGION 1..236: note = tr|A0A150I1L7|A0A150I1L7_9GAMM 7-carboxy-7-deazaguanine synthase OS=Acinetobacter venetianus OX=52133 GN=queE PE=3 SV=1
MASLRSSAIPVSDPAAGLRITEIFYSLQGEANTFGLPTVFIRLTGCPLRCSYCDTTYSFEGGERFSLEHIIETASQYKTPYICVTGGEPLAQPNCLILLQRLCNLGFQVSLETSGALDVSKVDSRVSKVLDLKTPTSKEDHRNLLSNIDHLTQHDQIKFVICNREDYEWSKQQLEQFQLQEKVSTVWFSPAFAIEKGAIALPALARDLAQWILEDHLPVRFQLQLHKLLWNDESGR

SEQ ID NO: 27397 - protein, 236 aa, unidentified
  source 1..236: note = Acinetobacter wuhouensis
  REGION 1..236: note = tr|A0A385C730|A0A385C730_9GAMM 7-carboxy-7-deazaguanine synthase OS=Acinetobacter wuhouensis OX=1879050 GN=queE PE=3 SV=1
MNALRSSTIPVSDPSAGLRITEIFYSLQGEANAAGLPTVFIRLTGCPLRCTYCDTTYSFEGGERQSLDQIIQTTLDFKTPYICVTGGEPLAQPNALPLMQRLADLGCEVSLETSGALDVSKVDPRVSKVLDLKTPTSGEAARNLMSNLEHLTQHDQIKFVICNREDYEWSKQQVEQFLLNEKVSTVWFSPAFAVEKGAVRLPQLARDLAQWILEDHLPVRFQLQLHKLLWNDETGR

SEQ ID NO: 27398 - protein, 239 aa, unidentified
  source 1..239: note = Actinoalloteichus hoggarensis
  REGION 1..239: note = tr|A0A221W780|A0A221W780_9PSEU 7-carboxy-7-deazaguanine synthase OS=Actinoalloteichus hoggarensis OX=1470176 GN=queE PE=3 SV=1
MIGMAADGEPLLLIAEVFGPTLQGEGPSTGRPAMFVRLSRCNLSCTWCDTPETWDTTRFDLRRHTTAQTSARLAETVLHADVELVVITGGEPLIQQRRLVDLLDLLLAAGRRIEIETNGTITPEPGLIRPGVRFNVSPKLPGSGLPAHRRLVPTALKTLAAADSVCKFVIAPAHQEIDLAEADAIATAYPFREVWLMPEATTHTDATAGLRALAEPVLARGWALSPRLHITLWEGQPGR

SEQ ID NO: 27399 - protein, 212 aa, Actinobacillus delphinicola
  REGION 1..212: note = tr|A0A448TSX6|A0A448TSX6_9PAST 7-carboxy-7-deazaguanine synthase OS=Actinobacillus delphinicola OX=51161 GN=queE PE=3 SV=1
MQNLVDPSYAIVEIFESLQGEGANCGMPAIFLRFGKCNLRCTWCDTPYEEYQSMTMSEILTKIEAFNAKNIIVTGGEPAVVPNIDIILQALKKRGYFLAIETNGLQEVPAEIDYIATSPKAQYAKMYAKQCLSHADEVRIVVDDKDNPEKFVQFCEFIRANIPARFYFLSPCDNEGEMNLHQTLNYLGKLNQNHSEMPWLLSLQTHKLVGIE

SEQ ID NO: 27400 - protein, 210 aa, Actinobacillus equuli
  REGION 1..210: note = tr|A0A448QTM4|A0A448QTM4_ACTEU 7-carboxy-7-deazaguanine synthase OS=Actinobacillus equuli; OX = 718 GN=queE PE=3 SV=1
MTAIIYPNIEFPIVEIFESLQGEGFNTGLPCIFVRLGKCNLACPWCDTNYNEYEKWSVAKILERVKSYSAKNIIITGGEPTMYANLSVLLDVFKAEGYWLAIETNGLKTVPKQIDYIATSPKLMYQEKYLKECIPFANEVRIVMDKGDVQGFCEQIETQITAEHYYLSPCEVDGKMNLLETITQLGILNQRANKPKWQLSLQTHKLVGIE

SEQ ID NO: 27401 - protein, 210 aa, Actinobacillus equuli
  REGION 1..210: note = tr|A0A0A7MFD2|A0A0A7MFD2_ACTEU 7-carboxy-7-deazaguanine synthase OS=Actinobacillus equuli subsp. equuli OX=202947 GN=queE PE=3 SV=1
MTAIIYPNIEFPIVEIFESLQGEGFNTGLPCIFVRLGKCNLACPWCDTNYNEYEKWSVAKILERVKSYSAKNIIITGGEPTMYANLSVLLDVFKAEGYWLAIETNGLKAVPKQIDYIATSPKLMYQEKYLKECIPFANEVRIVMDKGDVQGFCEQIETQITAEHYYLSPCEVDGKMNLLETITQLGILNQRANKPKWQLSLQTHKLVGIE

SEQ ID NO: 27402 - protein, 210 aa, Actinobacillus lignieresii
  REGION 1..210: note = tr|A0A380TXN3|A0A380TXN3_ACTLI 7-carboxy-7-deazaguanine synthase OS=Actinobacillus lignieresii OX=720 GN=queE PE=3 SV=1
MTNTIFTTTAFPIVEIFESLQGEGFNTGLPCIFVRLGKCNLACPWCDTNYNEYEKWSVTKILERVKSYSAKHIIITGGEPTMYANLSVLLDVFKAEGYWLAIETNGLKTVPKQIDYIATSPKLMYQEKYLRECISFANEVRIVMDKGDVQGFCEQIETQITAEHYYLSPCEVDGKMNLLETITQLGILNQRANKPKWQLSLQTHKLVGIE

SEQ ID NO: 27403 - protein, 206 aa, Actinobacillus minor
  REGION 1..206: note = tr|C5S1U3|C5S1U3_9PAST 7-carboxy-7-deazaguanine synthase OS=Actinobacillus minor NM305 OX=637911 GN=queE; PE = 3 SV=1
MIFSTITYPIVEIFESLQGEGFNTGMPSIFIRFGKCNLTCSWCDTPYHQFDSWTLTQILEKVEGYQAKNIIITGGEPTIQPNLTVLLDELKQRGYFLAIETNGLKDIPTQIDYIATSPKRLYAKKYQRRCIPFAHEVRIVADENVIAFCEQIETQINAERYYLSPCEVEGKMNLLETITQIGLLNQRKNKPKWQLSIQTHKIVGIE

SEQ ID NO: 27404 - protein, 264 aa, Actinobacillus pleuropneumoniae
  REGION 1..264: note = tr|A0A4U9TSU2|A0A4U9TSU2_ACTPL 7-carboxy-7-deazaguanine synthase OS=Actinobacillus pleuropneumoniae OX=715 GN=queE_1 PE=3 SV=1
MNNVHETPVTDSNGASSPAMTVDRPIPVMEIFGPTVQGEGMVVGRKTMFVRTAGCDYRCSWCDSAFTWDGSAKDSISLLSADEIWQELYRLGGERFDHVTLSGGNPALLPQLGALVDELHRHGITVAVETQGSRWQDWLNHIDEVTISPKPPSSGMDTDWGKLDDIVSRLSARPPGRTFSLKVVVFDDKDLTYAETVHERYPNVPFYLQTGNPDVGTGDTSSLVSHLLDRYESLVDAVMQSDRLNDVRVLPQLHTLVWGNKRGV

SEQ ID NO: 27405 - protein, 210 aa, Actinobacillus pleuropneumoniae
  REGION 1..210: note = tr|A0A380W0Q4|A0A380W0Q4_ACTPL 7-carboxy-7-deazaguanine synthase OS=Actinobacillus pleuropneumoniae OX=715 GN=queE PE=3 SV=1
MKNTIFTTTAFPIVEIFESLQGEGFNTGLPCIFVRLGKCNLACPWCDTNYNEYEKWSVAKILERVKSYSAKNIIITGGEPTMYANLSVLLDVFKAEGYWLAIETNGLKAVPKQIDYIATSPKLMYQEKYLRECISFANEVRIVMDKGDVQSFCEQIETQITAEHYYLSPCEVDGKMNLLETITQLGILNQRAYKPKWQLSLQTHKLVGIE

SEQ ID NO: 27406 - protein, 208 aa, Actinobacillus porcinus
  REGION 1..208: note = tr|A0A4V0II89|A0A4V0II89_9PAST 7-carboxy-7-deazaguanine synthase OS=Actinobacillus porcinus OX=51048 GN=queE PE=3 SV=1
MSSLIQEPSFPIVEIFESLQGEGANTGMPSIFVRFGKCNLACPWCDTPYNEFQSWTLSQILAKVRSFSAKNVIITGGEPTLHPKIVLLLEILKQDGYFLAIETNGLKDVPPQIDYIATSPKAMYANKYQRRCISKANEVRIVMDAQAKEFCEFIEQKIQADYYFLSPCEIDGKMNLHETIALLGQLNSRIHKPKWLLSIQTHKLIGIE

SEQ ID NO: 27407 - protein, 206 aa, unidentified
  source 1..206: note = Actinobacillus porcitonsillarum
  REGION 1..206: note = tr|A0A2U8FIZ7|A0A2U8FIZ7_9PAST 7-carboxy-7-deazaguanine synthase OS=Actinobacillus porcitonsillarum OX=189834 GN=queE PE=3 SV=1
MIFSTITYPIVEIFESLQGEGFNTGMPSIFIRFGKCNLTCSWCDTPYHQFDSWTLPQILEKVEGYQAKNIIITGGEPTIQPNLTVLLDELKRRGYFLAIETNGLKDIPSQIDYIATSPKRLYAEKYQRRCIPFAHEVRIVADENVIAFCEQIEAQINAERYYLSPCEVEGKMNLLETITQIGLLNQRKNKPKWQLSIQTHKIVGIE

SEQ ID NO: 27408 - protein, 208 aa, unidentified
  source 1..208: note = [Actinobacillus] rossii
  REGION 1..208: note = tr|A0A380TN76|A0A380TN76_9PAST 7-carboxy-7-deazaguanine synthase OS=[Actinobacillus] rossii OX=123820 GN=queE PE=3 SV=1
MSSLINEPSFPIVEIFESLQGEGANTGMPSIFVRFGKCNLACPWCDTPYNEFESWTLSQILAKMRSFSAKSVIITGGEPTIHPKIVLLLDILKKDGYFLAIETNGLKEIPPQIDYIATSPKAMYVEKYQRRCIKKANEVRVVMDAQAEAFCEFIEGKINADYYFLSPCEVGGKMNLHETITLLGRLNSRANKPKWLLSIQTHKLIGIE

SEQ ID NO: 27409 - protein, 208 aa, Actinobacillus seminis
  REGION 1..208: note = tr|A0A263HEE4|A0A263HEE4_9PAST 7-carboxy-7-deazaguanine synthase OS=Actinobacillus seminis OX=722 GN=queE PE=3 SV=1
MSLLINAPCFPIVEIFESLQGEGANTGMPSIFVRLGKCNLACPWCDTNYNKFEPWTLSQILAKVQSFSAKNVIITGGEPTIHPKIVLLLDELKKDGYFLAIETNGLKEIPSQIDYIATSPKAMYAEKYQRRCIKKANEVRIVMDADAREFCEFIERKISADYYFLSPCEVDGKMNLHETIQLLGELNARPNKPKWLLNIQTHKLIGIE

SEQ ID NO: 27410 - protein, 208 aa, Actinobacillus succinogenes
  REGION 1..208: note = tr|A6VQW8|A6VQW8_ACTSZ 7-carboxy-7-deazaguanine synthase OS=Actinobacillus succinogenes (strain ATCC 55618 / DSM 22257 / 130Z) OX=339671 GN=queE PE=3 SV=1
MNVIASTHSYPIVEIFESLQGEGANTGMPAIFIRFGKCNLACPWCDTPYNEFAALTFSQIIQKVRSFSAKNIIITGGEPTIQPRLSLLLEQLKQEGYFLAIETNGLKTVPSQIDYIAVSPKGLYWEKYHSRCISFAHEVRIVADENVLKFCAFIEDKIKANHYYLSPCETDGKMNLYETVTLLGQLNQRANRPKWQLSLQTHKLIGIE

SEQ ID NO: 27411 - protein, 210 aa, Actinobacillus suis
  REGION 1..210: note = tr|K0G4N9|K0G4N9_ACTSU 7-carboxy-7-deazaguanine synthase OS=Actinobacillus suis H91-0380 OX=696748 GN=queE; PE = 3 SV=1
MTNTIFTTTTFPIVEIFESLQGEGFNTGLPCIFVRLGKCNLACPWCDTNYNEYEKWSVAKILERVKSYSAKNIIITGGEPTMYANLSVLLDVFKAEGYWLAIETNGLKAVPKQIDYIATSPKLMYQEKYLRECISFANEVRIVMDKGDVQGFCEQIETQITAEHYYLSPCEVDGKMNLLETITQLGILNQRANKPKWQLSLQTHKLVGIE

SEQ ID NO: 27412 - protein, 210 aa, Actinobacillus ureae
  REGION 1..210: note = tr|E8KIR4|E8KIR4_9PAST 7-carboxy-7-deazaguanine synthase OS=Actinobacillus ureae ATCC 25976 OX=887324; GN = queE PE=3 SV=1
MTNTIFTTTTFPIVEIFESLQGEGFNTGLPCIFVRLGKCNLACPWCDTNYNEYEKWNVAKILERVKSYSAKNIIITGGEPTMYANLSVLLDVFKVEGYWLAIETNGLKAVPKQIDYIATSPKLMYQEKYLRECIPFANEVRIVMDKGDVQGFCEQIETQITAEHYYLSPCEVDGKMNLLETITQLGILNQRANKPKWQLSLQTHKLVGIE

SEQ ID NO: 27413 - protein, 245 aa, unidentified
  source 1..245: note = Actinobacteria bacterium
  REGION 1..245: note = tr|A0A1F2WWN9|A0A1F2WWN9_9ACTN 7-carboxy-7-deazaguanine synthase OS=Actinobacteria bacterium RBG_16_64_13 OX=1797200 GN=queE PE=3 SV=1
MAPLRVLEIFHSLQGEGYWSGVPMTFVRLAGCNAAELGLGCTAWCDTPAGWALDEGEDREIGEVLSAVTLPRLCLTGGEPLLQTGGVAELIGEAEQRGIRVHVETNGTVDPLPILELARDYATARPGATPRPFPEFGWAAVSPKPPDYAVAPGWAGLVDELKLVADEHLDAATAERLAAANLGAFVCIQPLYAQGPAPPDCGSGRGPDGAGAAPQRTSSERAVELVMRHPEWRLSLQLHKHLGIR

SEQ ID NO: 27414 - protein, 226 aa, unidentified
  source 1..226: note = Actinobacteria bacterium
  REGION 1..226: note = tr|A0A538JK70|A0A538JK70_9ACTN 7-carboxy-7-deazaguanine synthase OS=Actinobacteria bacterium OX=1883427 GN=queE PE=3 SV=1
MTLVVSELFGPTLQGEGPSAGRRAGFVRLGRCSLNCSWCDTPYSWDWKRYDPAMELRELSVDEVAATIRAMDVPMVVVTGGEPLLQQRAIVELLKQLPGLGVEVETNGIHVPEPALVAYIDRFNVSPKLANAGIERSRRHKPDVLRAFQATGKAVFKFVVCGPQDLDEIDAVVAECGLTDVWVMPEGTDAPTLVARARRLEDDVVARGWHLTPRLHILLWGAERGR

SEQ ID NO: 27415 - protein, 241 aa, unidentified
  source 1..241: note = Actinocrispum wychmicini
  REGION 1..241: note = tr|A0A4R2ISB2|A0A4R2ISB2_9PSEU 7-carboxy-7-deazaguanine synthase OS=Actinocrispum wychmicini OX=1213861 GN=queE PE=3 SV=1
MTTSDRANTLEIAELFGPTVQGEGPSLGRPAGFLRLGGCNFTCLWCDSAYTWDATRFDLRVELDRRDVADVAEQLRAMAVGLVVITGGEPLMQQRTPGFAALLGLLADLDIEIETNGSIHPTDALMDNATVRFNVGLKLANSGVPEHLRIRAASLRAFWRLAGEGRACFKAVCCHRGDVAELAGLVDRLELDPATVWVMPEGQTDLDTVHHLRRIAEPAIQYGFNITPRLHISIWETERGR

SEQ ID NO: 27416 - protein, 234 aa, Actinokineospora auranticolor
  REGION 1..234: note = tr|A0A2S6GDR9|A0A2S6GDR9_9PSEU 7-carboxy-7-deazaguanine synthase OS=Actinokineospora auranticolor OX=155976 GN=queE PE=3 SV=1
MSALVIPVGRAESTAILAEKFESFQGEGPWMGQRCVFLRLSRCNLRCGFCDTPETWDWSRYNSSEVSRRVPIADLVSWVRERAVDLVVITGGEPMLQQLAIGTLARDLPGVRVQIETNGTMEPIPELADRVDLWVVSPKLANSGMDYPARIKPQALAALSATGRAVFKFVVSDPANDLDEIAELVEEYGLTPVWAMPEGTTREAVLAGMDSLYGPAIDRGWNVSTRLHILTGAR

SEQ ID NO: 27417 - protein, 212 aa, Actinokineospora cianjurensis
  REGION 1..212: note = tr|A0A421BAK2|A0A421BAK2_9PSEU 7-carboxy-7-deazaguanine synthase OS=Actinokineospora cianjurensis OX=585224 GN=queE PE=3 SV=1
MYLVKEIFYTLQGEGTHAGRPSVFCRFSLCNLWTGREKDRHRAICTFCDTDFIGTDGPGGGRFATAADLAAAISAAWAGAAHPRSKPYVVCTGGEPLLQLDKDAVDALHDAGFEVAVETNGTRPAPPGLDWVCVSPKSTAEVVLTSGDDLKLVYPQPDARPERFEHLDFAHFLLQPMDGPDVEANTRATVEYCLRNPQWHLSLQTHKYLGIA

SEQ ID NO: 27418 - protein, 175 aa, unidentified
  source 1..175: note = Actinokineospora spheciospongiae
  REGION 1..175: note = tr|W7IWI7|W7IWI7_9PSEU Queuosine Biosynthesis QueE Radical SAM OS=Actinokineospora spheciospongiae OX=909613; GN = UO65_3543 PE=4 SV=1
MEKDRHRAICQFCDTDFVGTDGDGGGKFATADDLADAVESHWPSERGEHRFVVCTGGEPLLQLDEAATRALHERGFEIAVETNGTRPAPAGIDWLCVSPKIGAGLALTSGDELKLVYPQAGGDPAQFEHLDFRHFRLQPLDSADQEANTRAALEYCLKNPQWSLSLQTHKYIGIR

SEQ ID NO: 27419 - protein, 212 aa, Actinokineospora terrae
  REGION 1..212: note = tr|A0A1H9NXT8|A0A1H9NXT8_9PSEU 7-carboxy-7-deazaguanine synthase OS=Actinokineospora terrae OX=155974 GN=queE PE=3 SV=1
MYLVKEIFYTLQGEGTHAGRPSVFCRFSLCNLWTGREKDRHRAICTFCDTDFIGTDGPGGGRFATAADLAAAISAAWAGAAHPRSKPYVVCTGGEPLLQLDKDAVDALHDAGFEVAVETNGTRPAPPGLDWVCVSPKSTAEVVLTSGDDLKLVYPQPDAQPERFEHLDFAHFLLQPMDGPDVEANTRATVEYCLRHPQWHLSLQTHKYLGIA

SEQ ID NO: 27420 - protein, 231 aa, Actinomadura echinospora
  REGION 1..231: note = tr|A0A1H6E9B5|A0A1H6E9B5_9ACTN 7-carboxy-7-deazaguanine synthase OS=Actinomadura echinospora OX=1992 GN=queE PE=3 SV=1
MSGKELLVSEIFGPTFQGEGPSAGVRAAFLRLSRCPLACRWCDTPYTWDTSRYDLTTETRRMSEEEVLADLLARPAPLVVITGGEPLLQQDRLTWLIDMCRARRRRVEVETSGTVVPSRGVLGAAHRFNVSPKLANSGMPQHRRINPDALRAFTRSGKAAFKFVVEGLADLEEIAELEAEYGLAPIWVMPQATTAEGVLDGLRTVADEVLARGWNLTGRLHVLLWGDVRGR

SEQ ID NO: 27421 - protein, 228 aa, Actinomadura sp.
  REGION 1..228: note = tr|A0A3M2LUK6|A0A3M2LUK6_9ACTN 7-carboxy-7-deazaguanine synthase OS=Actinomadura sp. NEAU-Ht49 OX=2483351 GN=queE PE=3 SV=1
MDTLLVSEIFGPTCQGEGASLGQCAVFVRLGLCNLSCAWCDTPYTWDRAHYDLRHQPAPISREVVWARIRAIPAPLVVITGGEPLIQQRRLTWLIDRCSAAGRMVEIETNATLVPSLPMLQCRARFNASVKLASSGVPAARRIRPEAIRALAKARTCWKFVVNDLADLEEIADLENRFGLAPIWVMPEGTDATTILRRLHEFADPVLARGWNLTPRLHVLLWGDERGR

SEQ ID NO: 27422 - protein, 246 aa, Actinomadura sp.
  REGION 1..246: note = tr|A0A4R4XK42|A0A4R4XK42_9ACTN 7-carboxy-7-deazaguanine synthase OS=Actinomadura sp. KC06; OX = 2530369 GN=queE PE=3 SV=1
MNETARHSHSLWVSERFGPTFQGEGPSAGRQAVFVRLLSCNLDCGRGEGAAWSCDTPYTWDWDRFDRKAEGRRVPVRDLVSWILDRRVELMVITGGEPLLQQRRLVDLVVQVLAEGRRVEIETNGTVVPLSDLCRANVTFNVSPKLSASGVATSRRVVDEPLRVFGRLARAGGAVFKFVVTCQAELDEVARLVDAHALAPVWIMPAGTDADVVLRRARELAEPVLARGWHLTPRLHTLLWGDARGR

SEQ ID NO: 27423 - protein, 250 aa, Actinoplanes regularis
  REGION 1..250: note = tr|A0A238X610|A0A238X610_9ACTN 7-carboxy-7-deazaguanine synthase OS=Actinoplanes regularis OX=52697 GN=queE PE=3 SV=1
MKTDEADIGLLESSDGGMPALPVSEVFGPTIQGEGPYAGRSAWFVRLGGCNLSCSWCDSPYTWDAQRFDLRREIPMTPVEEVIAGVASSSLVVVTGGEPLLHQNRPAWRALCTGLRARGCTLQIETNGTIVPNSTTRGLVQTFVVSPKLANAGAHRGNVDPALRTGWVEVAKSGHAHLKVVCTSADDVAGVVDIARTTGWPLSQVWVMPEGTTAQELNGRWRAIADAAAQAGINATHRLHILAWQDRRGH

SEQ ID NO: 27424 - protein, 237 aa, Actinoplanes sp.
  REGION 1..237: note = tr|R4LB42|R4LB42_9ACTN 7-carboxy-7-deazaguanine synthase OS=Actinoplanes sp. N902-109 OX=649831 GN=queE; PE = 3 SV=1
MEQDLVVNEVFGPTVQGEGRSMGRRCAFLRLGGCNLSCTWCDTPYTWDWTGVSDSGVAHDPRQELHRRPVADVLAELLAFGTDLIVISGGEPLGQQERLIPLVRALVEHGKEIEIETNGTHAAHPDLVAAGVRFNVSPKLSHSGDPEHRRIVPDALENLAALPGSTFKFVCRDTRDLDEVSGLVSAFELSSVWIMPIGRTADDVTRHLSALADAVVERGWNLTTRLHTLVWDDKRAV

SEQ ID NO: 27425 - protein, 254 aa, Actinopolyspora erythraea
  REGION 1..254: note = tr|A0A223RSS8|A0A223RSS8_9ACTN 7-carboxy-7-deazaguanine synthase OS=Actinopolyspora erythraea OX=414996 GN=queE PE=3 SV=1
MSETVRDSVTRSGGSGYPDRSGLVVNEIFGPTVQGEGPSAGRICAFVRLGGCNLSCRWCDTPYTWDWTGIASPVPHDPAEELHLLPVEEVADRIRATGVDRVIVSGGEPLNQQHRLVPLLELLSGEAVTVEVETNGTHEPVAPLARLVDRFVVSPKLSHSGDSERRRISAAALRSFRELGKSDFKFVVTSPEDLREVDGIVAANSLRPVWIMPEGRDVDTLVRNLSAVADEVVRRKWNLTGRLHILAWNDVRGV

SEQ ID NO: 27426 - protein, 232 aa, Actinopolyspora erythraea
  REGION 1..232: note = tr|A0A099D4Z6|A0A099D4Z6_9ACTN 7-carboxy-7-deazaguanine synthase OS=Actinopolyspora erythraea OX=414996 GN=queE PE=3 SV=1
MVVNEIFGPTVQGEGPSAGRICAFVRLGGCNLSCRWCDTPYTWDWTGIASPVPHDPAEELHLLPVEEVADRIRATGVDRVIVSGGEPLNQQHRLVPLLELLSGEAVTVEVETNGTHEPVAPLARLVDRFVVSPKLSHSGDSERRRISAAALRSFRELGKSDFKFVVTSPEDLREVDGIVAANSLRPVWIMPEGRDVDTLVRNLSAVADEVVRRKWNLTGRLHILAWNDVRGV

SEQ ID NO: 27427 - protein, 254 aa, Actinopolyspora xinjiangensis
  REGION 1..254: note = tr|A0A1H0S1I1|A0A1H0S1I1_9ACTN 7-carboxy-7-deazaguanine synthase OS=Actinopolyspora xinjiangensis OX=405564 GN=queE PE=3 SV=1
MSETVCDPVSGSGGAGHPDRSGLVVNEIFGPTVQGEGPSAGRICAFVRLGGCNLSCRWCDTPYTWDWTGIASPVPHDPAEELHLLAVEEVADRIRATGVDRVIVSGGEPLNQQHRLVPLLELLSSEAVTVEVETNGTHEPVAPLARLVDRFVVSPKLSHSGDSERRRISAAALRSFRELGKSDFKFVVTSPEDLSEVDGIVAANSLRPVWIMPEGRDVDTLVRNLSAVADEVVRRRWNLTGRLHILAWNDARGV

SEQ ID NO: 27428 - protein, 211 aa, Actinosynnema pretiosum
  REGION 1..211: note = tr|A0A290Z120|A0A290Z120_9PSEU 7-carboxy-7-deazaguanine synthase OS=Actinosynnema pretiosum OX=42197 GN=queE PE=3 SV=1
MSYLIKEIFYTLQGEGHHAGRPAVFCRFSRCNLWTGREKDRARAICKFCDTDFVGVDGTGGGRFATSSDLVDAIEAAWPSEDRAHRFVVCTGGEPLLQLDVAAIDELHARGFEVAVETNGTRVPPAGIDWLCVSPKIGADLVVTGGDELKLVYPQEGGDPAQFEHLDFTSFRIQPMDWGDREANTRAAVEYCLKNPQWSLSMQTHKYLGIR

SEQ ID NO: 27429 - protein, 233 aa, Actinosynnema pretiosum
  REGION 1..233: note = tr|A0A347Q2G0|A0A347Q2G0_9PSEU 7-carboxy-7-deazaguanine synthase OS=Actinosynnema pretiosum subsp. pretiosum OX=103721 GN=queE PE=3 SV=1
MVLMRLAVNELFGPTFQGEGVSQGRVASFLRLHGCHLACAWCDTPQTWDHDRHPPAGERRLLDTTEVLDWVVEQPTELLVITGGEPLLQQRALGELLTAITDRRAVSEIEVETSGTITPSLVVAQTVNRFTVSTKLANAKMPLHRRVRPAALRALAMTGKASWKFVVQSPDDLDEAAELVQTYRLGPVWVMPEGTEEAVLLQRMRELADPVLARGWNLTSRLHILLWGDVRGR

SEQ ID NO: 27430 - protein, 252 aa, Actinosynnema sp.
  REGION 1..252: note = tr|A0A1V2QFS6|A0A1V2QFS6_9PSEU 7-carboxy-7-deazaguanine synthase OS=Actinosynnema sp. ALI-1.44 OX=1933779 GN=queE PE=3 SV=1
MPVAGSGLARHRQTLPLSEVFGPTFQGEGPFTGYRARFVRLGGCNLSCGTGDAPMVCDTEYTWNAAKFDLAVECPEIRTSTILERAGRISAPISVLTGGEPMTHQRKPAFTALLTGLRELGQVHVETNGTIPPTPAVGELVDHFTVSPKLANTGDPAGRRLKPRALAAFAAAAPGRAVFKFVAASPTDLTEVDRLVSEYSIPRRAVWIMPEGRTAARVLACHRSLADAILTRGYNTTTRLHMLLWPEEDRGR

SEQ ID NO: 27431 - protein, 232 aa, Actinosynnema sp.
  REGION 1..232: note = tr|A0A1V2P5H5|A0A1V2P5H5_9PSEU 7-carboxy-7-deazaguanine synthase OS=Actinosynnema sp. ALI-1.44 OX=1933779 GN=queE PE=3 SV=1
MDQYVVVDETFGPTFQGEGSSAGRYAHFIRLFGCRLSCAWCDSPQTHDATRCDVAAEQRILSIEDVTSWLAADPAGLLVITGGEPLLQPHVVGRLLCAIRERALATDIEIETSGAIAPADMITSAVTRFNVSPKLAHSGLRRHQRIRPAVLRGFADSGKAIWKFVVQELDDLDEIQDLVDTYGLHPVWVMPEGTDSATVLARMRMLADPVLARRWHLSTRLHTLLWENDRGR

SEQ ID NO: 27432 - protein, 217 aa, Adhaeribacter aerolatus
  REGION 1..217: note = tr|A0A512AYD9|A0A512AYD9_9BACT 7-carboxy-7-deazaguanine synthase OS=Adhaeribacter aerolatus OX=670289 GN=queE PE=3 SV=1
MEDLKEITQASIHSVPKDGSILPVMEAFYTVQGEGFYTGHAAYFIRLAGCDVGCHWCDVKESWDAEQHPLTALDDIVAGALAFPGRLVVITGGEPLIYNLSPLTAKLKAAGFQINIETSGAYPLSGNIDWVCLSPKKFKQPVTEILPKAQELKIIVFNKSDFKWAEDYAAQVSPATRLYLQPEWSRHAEMLPLIIDYVKEHPKWQISLQTHKYMNIP

SEQ ID NO: 27433 - protein, 193 aa, Adhaeribacter sp.
  REGION 1..193: note = tr|A0A2T2YNQ2|A0A2T2YNQ2_9BACT 7-carboxy-7-deazaguanine synthase OS=Adhaeribacter sp. HMF7605 OX=2072846 GN=queE PE=3 SV=1
MEAFYTIQGEGHNTGRAAYFIRLGGCDVGCHWCDVKESWDATSHPLTSVETIVAQAKEYPGQAVVITGGEPLIYNLDVLTQELQAAGIRTFLETSGAYPLSGSWDWICVSPKKFKKPQPDVLQKASELKVVVFHKSDFGWAEEHADQVAPHTKLYLQPEWSKAEQMMPLIVEYVKNNPKWQVSLQTHKYLNIP

SEQ ID NO: 27434 - protein, 217 aa, Adhaeribacter sp.
  REGION 1..217: note = tr|A0A369QJE6|A0A369QJE6_9BACT 7-carboxy-7-deazaguanine synthase OS=Adhaeribacter sp. HMF7616 OX=2072847 GN=queE PE=3 SV=1
MNLTKEIKQPAVLSVPASGRELPLMEAFYTIQGEGYNTGKAAYFIRLGGCDIGCHWCDVKESWDAAAHPLTSVASIVAQAQQYPGKAVVVTGGEPLIYNLDLLTLTLQQAGILTFLETSGAYPLSGSWDWVCVSPKKFKKPLPSVLAKADELKVIVFNKSDFAWAEEHAGQVAPHTRLYLQPEWSKAQQIVPDIVDYVKNNPKWQVSLQTHKYLNIP

SEQ ID NO: 27435 - protein, 261 aa, Adlercreutzia equolifaciens
  REGION 1..261: note = tr|A0A3E2EFT3|A0A3E2EFT3_9ACTN 7-carboxy-7-deazaguanine synthase OS=Adlercreutzia equolifaciens OX=446660 GN=queE PE=3 SV=1
MVPEEENDGLLDAERHQARHTIAPRAQLFPVAEKFVSVNGEGLAAGRPAAFIRFAGCNMWCTYCDTRWANHPLVEVEGWSVPDLVAWVAETGVSCVTLTGGEPLLQPYLPDLVQTLLAVDDPRPLRVEIETNGSRDLSPMAHLREACAEAGLPGSLHFTVDWKTPTAGEAVSAAMRRENYDLLDTRDAVKFVVGTEDDLVFMERCADEAGLWDRCSVLASPVWGAIESAEIAAYLIEHGLDRARLQLQLHKIIWPDETRGV

SEQ ID NO: 27436 - protein, 210 aa, Advenella incenata
  REGION 1..210: note = tr|A0A4V2FS54|A0A4V2FS54_9BURK 7-carboxy-7-deazaguanine synthase OS=Advenella incenata; OX = 267800 GN=queE PE=3 SV=1
MTYAVKELFKTLQGEGAQAGRAAVFCRFAGCNLWSGREIDRASAACTFCDTDFVGTNGIGGGKFGTAVDLAGTLAKTWGPDRTSRYVVFTGGEPLLQLDTALIDAVHAEGFEIAIETNGTLAAPAGIDWICVSPKGNNQLVQTRGNELKLVFLQSDAPPERFETLDFSHFFLQPMDGPDRLAATEHAVQYCMDHPKWRLSVQTHKYIGIP

SEQ ID NO: 27437 - protein, 213 aa, Advenella kashmirensis
  REGION 1..213: note = tr|V8QMA4|V8QMA4_9BURK 7-carboxy-7-deazaguanine synthase OS=Advenella kashmirensis W13003 OX=1424334; GN = queE PE=3 SV=1
MTYSIKEIFYTLQGEGIQAGMPAVFCRVAGCNLWSGRESDRSTAICQFCDTDFVGTDGTFGGKFRTAEALADAIEAQWPKHDDTSRLVVVTGGEPLLQLDGALIDALHDRKFRIAVETNGTVAAPPGIDWICVSPKQGAPLVQTTGNELKLVFPQEQLRPESLDRSILRFDHYLLQPMDGPLLNDNTQAAIRYCQDNPQWRLSVQTHKIIGIR

SEQ ID NO: 27438 - protein, 210 aa, Advenella kashmirensis
  REGION 1..210: note = tr|A0A356LE77|A0A356LE77_9BURK 7-carboxy-7-deazaguanine synthase OS=Advenella kashmirensis OX=310575 GN=queE PE=3 SV=1
MTYAVKEIFKTLQGEGAQAGRAAVFCRFAGCNLWSGREIDRASAACTFCDTDFVGTNGVGGGKFATAVDLAATLAKTWGPDGASRYVVFTGGEPLLQLDTALIDAVHAEGFEIAIETNGTLAAPAGIDWICVSPKGNNELVQTQGDELKLVFLQSNAPPERFEALAFSHFFLQPMDGPNRLAATEHAVQYCMDHPKWRLSVQTHKYIGIP

SEQ ID NO: 27439 - protein, 210 aa, Advenella mimigardefordensis
  REGION 1..210: note = tr|W0PDB5|W0PDB5_9BURK 7-carboxy-7-deazaguanine synthase OS=Advenella mimigardefordensis DPN7 OX=1247726; GN = queE PE=3 SV=1
MTYAVKEIFKTLQGEGAQAGRAAVFCRFAGCNLWSGREADRASAACTFCDTDFVGTNGIGGGKFNTAAELAMTLGKTWGPDQASRYVVFTGGEPLLQLDTALIEAVHAEGFEIAIETNGTLAAPAGIDWICVSPKGNNTLVQTRGDELKLVFRQSDALPEQFEALDFSHFFLQPMDGPDRLAATERAVQYCMDHPKWRLSVQTHKYIGIP

SEQ ID NO: 27440 - protein, 210 aa, Advenella sp.
  REGION 1..210: note = tr|A0A2M9TZ13|A0A2M9TZ13_9BURK 7-carboxy-7-deazaguanine synthase OS=Advenella sp. S44; OX = 1982755 GN=queE PE=3 SV=1
MAYAVKEIFKTLQGEGAHAGRAAVFCRFAGCNLWSGREVDRAAAACTFCDTDFIGTDGMGGGKFSAAADLARTLAQTWGPDSTSRYVVFTGGEPLLQLDASLIDAVHAEGFEIAIETNGTIAAPAGIDWICVSPKGNNKLVQTRGNELKLVFHQSDAPPERFEALDFSHFFLQPMDGPDRRAATEHAVRYCMDHPQWRLSLQTHKYIGIP

SEQ ID NO: 27441 - protein, 209 aa, Aequorivita antarctica
  REGION 1..209: note = tr|A0A5C6YXH0|A0A5C6YXH0_9FLAO 7-carboxy-7-deazaguanine synthase OS=Aequorivita antarctica OX=153266 GN=queE PE=3 SV=1
MKKEVQHLVDKGVMLPLMEEFYTIQGEGFHKGTAAYFIRVGGCDVGCHWCDVKESWNAELHPPTAIEAIVENASKYSKTIVITGGEPLTWDMGPLTEMLKTRGMQTHIETSGAYKLTGTWDWICLSPKKMKLPTEEVYKAANELKVIVFNNDDFRFAEEQAAKVGKDCILYLQPEWSKREKMSPLIVDYVMQNPQWKVSLQTHKYLNIP

SEQ ID NO: 27442 - protein, 209 aa, Aequorivita lipolytica
  REGION 1..209: note = tr|A0A5C6YSC0|A0A5C6YSC0_9FLAO 7-carboxy-7-deazaguanine synthase OS=Aequorivita lipolytica OX=153267 GN=queE PE=3 SV=1
MKEETKILVEKGEMLPLMEEFYTIQGEGFHKGTAAYFIRVGGCDVGCHWCDVKESWNAELHPPTAIENIVENAAKHSKTIVITGGEPLTWDMGPLTKMLKDRGMQIHIETSGAYKLTGIWDWVCLSPKKMKLPTEEVYRKADELKVIVFNNDDFRFAEEQAAKVNEECILYLQPEWSKREKMSALIVDYVMQNPKWKVSLQTHKYLNIP

SEQ ID NO: 27443 - protein, 209 aa, unidentified
  source 1..209: note = Aequorivita soesokkakensis
  REGION 1..209: note = tr|A0A1A9LGK9|A0A1A9LGK9_9FLAO 7-carboxy-7-deazaguanine synthase OS=Aequorivita soesokkakensis OX=1385699 GN=queE PE=3 SV=1
MKKEVQILVDKGVMLPLMEEFYTIQGEGFHKGTAAYFIRVGGCDVGCHWCDVKESWNADLHPPTAIEAIVENAAKHSKTIVITGGEPLTWDMGPLTEMLKERGMQTHIETSGAYKLTGIWDWICLSPKKMKLPTEEVYKAANELKVIVFNKDDFRFAEEQAAKVGGDCILYLQPEWSKREKMSPLIVDYVMQNPKWKVSLQTHKYLNIP

SEQ ID NO: 27444 - protein, 209 aa, Aequorivita sp.
  REGION 1..209: note = tr|A0A2G2CR20|A0A2G2CR20_9FLAO 7-carboxy-7-deazaguanine synthase OS=Aequorivita sp.; OX = 1872390 GN=queE PE=3 SV=1
MKKEVQQLVDKGVMLPLMEEFYTIQGEGFHKGTAAYFIRVGGCDVGCHWCDVKESWNAELHPPTAIEAIVENAAKYSKTIVITGGEPLTWDMAPLTEMLKGKGMQTHIETSGAYKLTGIWDWICLSPKKMKLPTEEVYKAADELKVIVFNKDDFRFAEEQAAKVGPDCILYLQPEWSKREKMSPLIVDYVMQNPKWKVSLQTHKYLNIP

SEQ ID NO: 27445 - protein, 209 aa, Aequorivita sp.
  REGION 1..209: note = tr|A0A2D4XGE5|A0A2D4XGE5_9FLAO 7-carboxy-7-deazaguanine synthase OS=Aequorivita sp.; OX = 1872390 GN=queE PE=3 SV=1
MKKEVQQLVDKGVMLPLMEEFYTIQGEGFHKGTAAYFIRVGGCDVGCHWCDVKESWNAELHPPTAIEAIVENAAKYSKTIVITGGEPLTWNMGPLTEMLKEKGMQTHIETSGAYRLTGTWDWICLSPKKMKLPTEEVYKAANELKVIVFNKDDFRFAEEQAAKVGPDCILYLQPEWSKREKMSPLIVDYVMQNPKWKVSLQTHKYLNIP

SEQ ID NO: 27446 - protein, 209 aa, Aequorivita sublithincola
  REGION 1..209: note = tr|I3YSX9|I3YSX9_AEQSU 7-carboxy-7-deazaguanine synthase OS=Aequorivita sublithincola (strain DSM 14238 / LMG 21431 / ACAM 643 / 9-3) OX=746697 GN=queE PE=3 SV=1
MKKEVQDLVNAGVMLPLMEEFYTIQGEGFHKGTAAYFIRVGGCDVGCHWCDVKESWNADLHPPTAIESIVENAAKYSKTIVITGGEPLTWNMDPLTEMLKSQGMQIHIETSGAYKLTGTWDWVCLSPKKMKLPTKEVYKAANELKVIIFNKDDFRFAEEQAAKINENCILYLQPEWSKRDKMVPLIVDYVMQNPQWKVSLQTHKYLNIP

SEQ ID NO: 27447 - protein, 233 aa, unidentified
  source 1..233: note = Aequorivita viscosa
  REGION 1..233: note = tr|A0A1M6D3Z6|A0A1M6D3Z6_9FLAO 7-carboxy-7-deazaguanine synthase OS=Aequorivita viscosa; OX = 797419 GN=queE PE=3 SV=1
MVYQLVFVRCILLFEVYFYSTFAPMKNEVQSLVDRGLVLPLMEEFYTIQGEGYHKGTAAYFIRVGGCDVGCHWCDVKESWNAELHPPTTIESMVQKATSHSKTVVITGGEPLTYDMGPLTKMLKDNGANVHIETSGAYKLTGTWDWICLSPKKVKLPTEEIYEVAHELKVIVFNKDDFRFAEEQAAKVNDNCLLYLQPEWGNREKMSPLIVDYVMQNPKWKVSLQTHKYLNIP

SEQ ID NO: 27448 - protein, 242 aa, unidentified
  source 1..242: note = Aeribacillus composti
  REGION 1..242: note = tr|A0A559TXK7|A0A559TXK7_9BACI 7-carboxy-7-deazaguanine synthase OS=Aeribacillus composti; OX = 1868734 GN=queE PE=3 SV=1
MKKIPVIEIFGPTIQGEGMVIGQKTMFVRTAGCDYSCSWCDSAFTWNGSAKDEIKQMTAAEILDDLIELGGDRFNHVTISGGNPALIRGLDELIILLREQGFRTALETQGSRYQDWFLLIDDLTLSPKPPSSGMKTNFTVLDDIMKRLIDGGRKDNVSLKVVVFNEEDFDYAKNVHLRYPNISFYLQPGNDQVNEQNDHLLRNQLLEKLEWLIELTVQSKEMNDARVLPQLHALVWGNKRGV

SEQ ID NO: 27449 - protein, 242 aa, Aeribacillus pallidus; identical to SEQ ID NO: 27448
  REGION 1..242: note = tr|A0A161WFC6|A0A161WFC6_9BACI 7-carboxy-7-deazaguanine synthase OS=Aeribacillus pallidus; OX = 33936 GN=queE PE=3 SV=1

SEQ ID NO: 27450 - protein, 242 aa, Aeribacillus pallidus
  REGION 1..242: note = tr|A0A165WD92|A0A165WD92_9BACI 7-carboxy-7-deazaguanine synthase OS=Aeribacillus pallidus; OX = 33936 GN=queE PE=3 SV=1
MKKIPVIEIFGPTIQGEGMVIGQKTMFVRTAGCDYSCSWCDSAFTWNGSAKDEIKQMTAAEILDDLIELGGDRFNHVTISGGNPALIRGLDELIILLREQGFRTALETQGSRYQDWFLLIDDLTLSPKPPSSGMKTNFTVLDDIMKRLIDGGRKDNVSLKVVVFNEEDFDYAKNVHLRYPNISFYLQPGNDQVNEQNDHLLRNQLLEKLEWLIELTVLSKEMNDARVLPQLHALVWGNKRGV

SEQ ID NO: 27451 - protein, 211 aa, Aeromicrobium sp.
  REGION 1..211: note = tr|A0A0S9RC14|A0A0S9RC14_9ACTN 7-carboxy-7-deazaguanine synthase OS=Aeromicrobium sp. Leaf289 OX=1736324 GN=queE PE=3 SV=1
MTYKVKEIFYTLQGEGTHAGRPAVFCRFSSCNLWTGREADRSRAVCKFCDTDFVGTDGEGGGKFADAHELAAAIAAKWPAGGGGRPMVVCTGGEPLLQLDAPAVDALHELGFYVAVETNGTISPPSGIDWLCVSPKIGSQLVVGQGHELKFVVPQGGVDPTAFEHLEFESFRVQPMDGPDVAANTELAVKFCLDHPLWQLSLQTHKHLGIP

SEQ ID NO: 27452 - protein, 211 aa, Aeromicrobium sp.
  REGION 1..211: note = tr|A0A3B7D7T1|A0A3B7D7T1_9ACTN 7-carboxy-7-deazaguanine synthase OS=Aeromicrobium sp. A1-2 OX=2107713 GN=queE PE=3 SV=1
MTYKVKEIFYTLQGEGSHAGRPAVFCRFSLCNLWTGHEKDRHRAICQFCDTDFVGTDGPGGGRFETADDLADAVEQAWPSTERDYRMVVCTGGEPLLQLDEAAVGALHARGFYVAVETNGTQVPPTGIDWLCVSPKVGADLVVTGGDEIKFVYPQGGVDPKDFESLAFANWRLQPMDNPESARNTELAVQYCLDNPRWQISLQTHKMMGIP

SEQ ID NO: 27453 - protein, 223 aa, Aeromonas allosaccharophila
  REGION 1..223: note = tr|A0A1Q5VW68|A0A1Q5VW68_9GAMM 7-carboxy-7-deazaguanine synthase OS=Aeromonas allosaccharophila OX=656 GN=queE PE=3 SV=1
MHYPINEIFQTIQGEGIFTGLPAIFVRLQGCPVGCPWCDTRHTWVVDPAREVGKEAVLDRSNESDCWSQLSTAQIIKSFSELGYQARHVVITGGEPCLYDLHELSSALLAAGYQVQIETSGTSEIKTHEQTWVTVSPKIGMKGGLPVLVSALERANEIKHPVATEHHIEELDALLATAALRPDVVIALQPISQKPRATQLAMDTCIARNWRLSIQTHKYLDID

SEQ ID NO: 27454 - protein, 223 aa, Aeromonas allosaccharophila
  REGION 1..223: note = tr|A0A0T6V0V5|A0A0T6V0V5_9GAMM 7-carboxy-7-deazaguanine synthase OS=Aeromonas allosaccharophila OX=656 GN=queE PE=3 SV=1
MHYPINEIFQTIQGEGIFTGLPAIFVRLQGCPVGCPWCDTRHTWVVDPAREAGKEAVLDRSNESDCWSTLSTAQIIASFSELGYQARHVVITGGEPCLYDLHELSSALLATGYQVQIETSGTSEIKTHEQTWVTVSPKIGMKGGLPVLVSALERANEIKHPVATEHHIEELDALLATATLRPDVVIALQPISQKPRATQLAMDTCIARNWRLSIQTHKYLDID

SEQ ID NO: 27455 - protein, 223 aa, unidentified
  source 1..223: note = Aeromonas cavernicola
  REGION 1..223: note = tr|A0A2H9U7S6|A0A2H9U7S6_9GAMM 7-carboxy-7-deazaguanine synthase OS=Aeromonas cavernicola; OX = 1006623 GN=queE PE=3 SV=1
MDYPINEIFQTIQGEGCFTGQPAIFVRLQGCPVGCPWCDTRHTWEVDPARQVAAQAVLNRSNESDCWSALTSTQILSQFQALGYQARHVVITGGEPCLYDLHELCAVLLAAGYQVQIETSGTSEIKAHEQAWVTVSPKIGMKGGLPVLISALERANEIKHPVATEHHIAELDTLLASATLRPEVVIALQPISQKPRATQLAIATCIARNWRLSIQTHKYLEIA

SEQ ID NO: 27456 - protein, 237 aa, Aeromonas caviae
  REGION 1..237: note = tr|A0A3N9YED9|A0A3N9YED9_AERCA 7-carboxy-7-deazaguanine synthase OS=Aeromonas caviae; OX = 648 GN=queE PE=3 SV=1
MGYNPPLLQQVVTKMHYPINEIFQTIQGEGVFTGLPAIFVRLQGCPVGCPWCDTRHTWVVDPEREVAPGEVLDRSNESDGWSKMSTEDILASFTRLGYRARHVVLTGGEPCLYDLRELSSALVASGYQVQIETSGTSEVLTHEQTWVTVSPKIGMKGGLPVLVSALERANEIKHPVATEHHIEELDALLATARLRPDVMIALQPISQKARATELAMATCIARNWRLSIQTHKYLNID

SEQ ID NO: 27457 - protein, 242 aa, Aeromonas caviae
  REGION 1..242: note = tr|A0A2X4RC87|A0A2X4RC87_AERCA 7-carboxy-7-deazaguanine synthase OS=Aeromonas caviae; OX = 648 GN=queE PE=3 SV=1
MPSPGLGYNPPLLQQVVTKMHYPINEIFQTIQGEGVFTGLPAIFVRLQGCPVGCPWCDTRHTWVVDPEREVAPGEVLDRSNESDGWSKMSTKDILASFTRLGYRARHVVLTGGEPCLYDLRELSSALVASGYQVQIETSGTSEVLTHEQTWVTVSPKIGMKGGLPVLVSALERANEIKHPVATEHHIEELDALLATARLRPDVMIALQPISQKARATELAMATCIARNWRLSIQTHKYLNID

SEQ ID NO: 27458 - protein, 223 aa, unidentified
  source 1..223: note = Aeromonas dhakensis
  REGION 1..223: note = tr|K1KBR8|K1KBR8_9GAMM 7-carboxy-7-deazaguanine synthase OS=Aeromonas dhakensis OX=196024 GN=queE PE=3 SV=1
MHYPINEIFQTIQGEGVFTGLPAIFVRLQGCPVGCPWCDTRHTWVVDPAREVGVQAVLDCSNESDGWSKMSTAQILASFQQLGYQARHVVITGGEPCLYDLQDLSTALIAAGYQVQIETSGTSEIQTHERTWVTVSPKINMKGGLPVLVSALERANEIKHPVATERHVEELDALLATARLRDDVVIALQPISQKPRATQLAMATCIARNWRLSIQTHKYLDID

SEQ ID NO: 27459 - protein, 237 aa, unidentified
  source 1..237: note = Aeromonas dhakensis
  REGION 1..237: note = tr|A0A433GCG9|A0A433GCG9_9GAMM 7-carboxy-7-deazaguanine synthase OS=Aeromonas dhakensis; OX = 196024 GN=queE PE=3 SV=1
MGYNPRLLQPAVTKMHYPINEIFQTIQGEGVFTGLPAIFVRLQGCPVGCPWCDTRHTWVVDPAREVGVQAVLDCSNESDGWSKMSTEQILASFQQLGYQARHVVITGGEPCLYDLQDLSTALIAAGYQVQIETSGTSEIKTHERTWVTVSPKINMKGGLPVLVSALERANEIKHPVATERHVEELDALLATARLRDDVVIALQPISQKPRATQLAMVTCIARNWRLSIQTHKYLDID

SEQ ID NO: 27460 - protein, 224 aa, Aeromonas diversa
  REGION 1..224: note = tr|N9V840|N9V840_9GAMM 7-carboxy-7-deazaguanine synthase OS=Aeromonas diversa CDC 2478-85 OX=1268237; GN = queE PE=3 SV=1
MIHYPINEIFQTIQGEGVYTGLPAIFVRLQGCPVGCPWCDTRHTWVVSPEREVPSRQVLDRSNESDAWSAMSAVEIRESFQRLGYTARHVVITGGEPCLYDLRELSVLLLAEGFTVQVETSGTHEVLVHEEAWVTVSPKLGMKGGLEVLPQALSRANEIKHPVATERHIEELDALLHFATLRPDVQIALQPISQKKHATELAMRVCIERHWRLSIQTHKYLDID

SEQ ID NO: 27461 - protein, 223 aa, Aeromonas encheleia
  REGION 1..223: note = tr|A0A448KWU0|A0A448KWU0_9GAMM 7-carboxy-7-deazaguanine synthase OS=Aeromonas encheleia; OX = 73010 GN=queE PE=3 SV=1
MHYPINEIFQTIQGEGVFTGLPAIFVRLQGCPVGCPWCDTRHTWVVDPAREVGSSEVLDRSNESDGWSKMSTVQILASFETLGYRARHVVLTGGEPCLYDLHELSAALLAAGYQVQIETSGTSEIQTHDDTWVTVSPKIGMKGGLPVLVSALERANEIKHPVATERHIEELDALLATASLRPDVMIALQPISQKPRATELAMATCIARNWRLSIQTHKYLNID

SEQ ID NO: 27462 - protein, 223 aa, Aeromonas enteropelogenes
  REGION 1..223: note = tr|A0A175VND9|A0A175VND9_AEREN 7-carboxy-7-deazaguanine synthase OS=Aeromonas enteropelogenes OX=29489 GN=queE PE=3 SV=1
MHYPINEIFQTIQGEGIFTGLPAIFVRLQGCPVGCPWCDTRHTWIVDPEREVGVQAVLDCSNESDGWSKMSTAEILASFQQLGYQAHHVVITGGEPCLYDLHELSTALLAAGYQVQIETSGTSEIKTHDDTWVTVSPKIGMKGGLPVLVSALERANEIKHPVATEHHIEELDELLATAHLRADVVIALQPISQKPRATQLAMATCIARNWRLSIQTHKYLDID

SEQ ID NO: 27463 - protein, 230 aa, Aeromonas hydrophila
  REGION 1..230: note = tr|V9ZZW7|V9ZZW7_AERHY 7-carboxy-7-deazaguanine synthase OS=Aeromonas hydrophila 4AK4 OX=1354302 GN=queE; PE = 3 SV=1
MQQAVTEMHYPINEIFQTIQGEGVFTGVPAIFVRLQGCPVGCPWCDTRHTWVVDPAREVGSREVLDRSNESDSWSKMSTGEILESFETLGYRARHVVLTGGEPCLYDLHELSSALLAAGYQVQIETSGTSEILTHAQTWVTVSPKIGMKGGLPVLVSALERANEIKHPVATERHIEELDVLLATASLRPDVVIALQPISQKPRATELAMATCIARNWRLSIQTHKYLNID

SEQ ID NO: 27464 - protein, 237 aa, Aeromonas hydrophila
  REGION 1..237: note = tr|A0A4P7IU76|A0A4P7IU76_AERHY 7-carboxy-7-deazaguanine synthase OS=Aeromonas hydrophila; OX = 644 GN=queE PE=3 SV=1
MGYNPRLLQPAVTKMHYPINEIFQTIQGEGVFTGLPAIFVRLQGCPVGCPWCDTRHTWVVDPAREVGVQAVLDCSNESDGWSKMSTEQILASFQQLGYQARHVVITGGEPCLYDLQDLSAVLIEAGYQVQIETSGTSEIQTHEQTWVTVSPKINMKGGLPVLVSALERANEIKHPVATERHVEELDALLATARLRENVVIALQPISQKPRATQLAMATCIARNWRLSIQTHKYLDID

SEQ ID NO: 27465 - protein, 237 aa, Aeromonas jandaei
  REGION 1..237: note = tr|A0A3N6VKY1|A0A3N6VKY1_AERJA 7-carboxy-7-deazaguanine synthase OS=Aeromonas jandaei; OX = 650 GN=queE PE=3 SV=1
MGYNLRLLQQAVTKMHYPINEIFQTIQGEGVFTGLPAIFVRLQGCPVGCPWCDTRHTWVVDPAREVGRERVLDRSNESDCWSQLTTEQILASFVELGYQARHVVITGGEPCLYDLTELSSALLAAGYQVQIETSGTSEIKTHEQTWVTVSPKIGMKGGLPVLVSALERANEIKHPVATEHHIDELDALLVTANLRQDVVIALQPISQKPRATQLAMATCIARNWRLSIQTHKYLDID

SEQ ID NO: 27466 - protein, 237 aa, Aeromonas jandaei
  REGION 1..237: note = tr|A0A2S5FGC5|A0A2S5FGC5_AERJA 7-carboxy-7-deazaguanine synthase OS=Aeromonas jandaei; OX = 650 GN=queE PE=3 SV=1
MGYNPRLLQQAVTKMHYPINEIFQTIQGEGVFTGLPAIFVRLQGCPVGCPWCDTRHTWVVDPAREVGREHVLDRSNESDCWSQLTTEQILASFVELGYQARHVVITGGEPCLYDLTELSSALLAAGYQIQIETSGTSEIKTHEQTWVTVSPKIGMKGGLPVLVSALERANEIKHPVATEHHIEELDALLVTANLRPDVVIGLQPISQKPRATQLAMATCIARNWRLSIQTHKYLDID

SEQ ID NO: 27467 - protein, 237 aa, unidentified
  source 1..237: note = Aeromonas lusitana
  REGION 1..237: note = tr|A0A2M8HBY7|A0A2M8HBY7_9GAMM 7-carboxy-7-deazaguanine synthase OS=Aeromonas lusitana; OX = 931529 GN=queE PE=3 SV=1
MGYNPRLLQQVVTSMHYPINEIFQTIQGEGVFTGVPAIFVRLQGCPVGCPWCDTRHTWVVDPAREVGKGEVLDRSNESDGWSKMSTADILASFETLGYKARHVVITGGEPCLYDLTELSGALLASGYQVQIETSGTSEILTHEQTWVTVSPKIGMKGGLPVLVSALERANEIKHPVATERHIEELDALLETATLRADVIVALQPISQKPRATELAMATCIARNWRLSIQTHKYLNID

SEQ ID NO: 27468 - protein, 226 aa, Aeromonas media
  REGION 1..226: note = tr|A0A023RIW9|A0A023RIW9_AERME 7-carboxy-7-deazaguanine synthase OS=Aeromonas media WS; OX = 1208104 GN=queE PE=3 SV=1
MTEMHYPINEIFQTIQGEGVFTGVPAIFVRLQGCPVGCPWCDTRHTWVVDPAREVGCREVLDRSNESDGWSKMSTEEILGSFETLGYRARHVVLTGGEPCLYDLHELSSALLAAGYQVQIETSGTSEILTHAQTWVTVSPKIGMKGGLPVLVSALARANEIKHPVATERHIEELDALLATASLRPDVVIALQPISQKPRATELAMATCIARNWRLSIQTHKYLNID

SEQ ID NO: 27469 - protein, 223 aa, Aeromonas molluscorum
  REGION 1..223: note = tr|R1H5E0|R1H5E0_9GAMM 7-carboxy-7-deazaguanine synthase OS=Aeromonas molluscorum 848 OX=1268236 GN=queE; PE = 3 SV=1
MLYPINEIFQTIQGEGVFTGLPAIFVRLQGCPVGCPWCDTRHTWVVDPARQVPISQVLDCSNESDGWSPMSGAQVLASFAELGYRAKHVVITGGEPCLYDLNELSETLHQAGYQLQIETSGTSEILTHPATWVTVSPKIGMAGGLTVLPSALARANEIKHPVAMMRHVEELDDLLSGAQLREDVVIALQPISQKPRATELAMAVCIERNWRLSIQTHKYLEID

SEQ ID NO: 27470 - protein, 237 aa, unidentified
  source 1..237: note = Aeromonas rivipollensis
  REGION 1..237: note = tr|A0A2P1PGR1|A0A2P1PGR1_9GAMM 7-carboxy-7-deazaguanine synthase OS=Aeromonas rivipollensis OX=948519 GN=queE PE=3 SV=1
MGYNPRLLQQAVTEMHYPINEIFQTIQGEGVFTGVPAIFVRLQGCPVGCPWCDTRHTWVVDPAREVGSREVLDRSNESDGWSKMSTEEILGSFETLGYRARHVVLTGGEPCLYDLHELSSALLAAGYQVQIETSGTSEILTHAQTWVTVSPKIGMKGGLPVLVSALERANEIKHPVATERHIEELDVLLATASLRPDVVIALQPISQKPRATELAMATCIARNWRLSIQTHKYLNID

SEQ ID NO: 27471 - protein, 250 aa, Aeromonas salmonicida
  REGION 1..250: note = tr|A4SLT3|A4SLT3_AERS4 7-carboxy-7-deazaguanine synthase OS=Aeromonas salmonicida (strain A449) OX=382245; GN = queE PE=3 SV=1
MRKAYCEPASCPCLGYNPRLLQQAVTVMHYPINEIFQTIQGEGIFTGLPAIFVRLQGCPVGCPWCDTRHTWIVDPAREVGVQAVLDCSNESDSWSKMSTDQILASFQQLGYQARHVVITGGEPCLYDLHELSTVLLAAGYQVQIETSGTSEIKTHDSTWVTVSPKIGMKGGLPVLVSALERANEIKHPVATERHIEELDALLATATLRPDVEIALQPISQKPRATQLAMAVCIARNWRLSIQTHKYLDID

SEQ ID NO: 27472 - protein, 223 aa, Aeromonas salmonicida
  REGION 1..223: note = tr|T0QWC0|T0QWC0_AERSA 7-carboxy-7-deazaguanine synthase OS=Aeromonas salmonicida subsp. pectinolytica 34mel OX=1324960 GN=queE PE=3 SV=1
MHYPINEIFQTIQGEGIFTGLPAIFVRLQGCPVGCPWCDTRHTWIVDPAREVGVQAVLDCSNESDSWSKMSTDQILASFQQLGYQARHVVITGGEPCLYDLHELSTVLLAAGYQVQIETSGTSEIKTHDSTWVTVSPKIGMKGGLPVLVSALERANEIKHPVATERHIEELDALLATATLRPDVEIALQPISQKPRATQLAMAVCIARNWRLSIQTHKYLDID

SEQ ID NO: 27473 - protein, 224 aa, Aeromonas schubertii
  REGION 1..224: note = tr|A0A0S2SIE8|A0A0S2SIE8_9GAMM 7-carboxy-7-deazaguanine synthase OS=Aeromonas schubertii; OX = 652 GN=queE PE=3 SV=1
MIHYPINEIFQTIQGEGVYTGLPAIFVRLQGCPVGCPWCDTRHTWVVDPERQVPSRQVLDRSNESDAWSAMSAAEIRESFQRLDYTARHVVITGGEPCLYDLRELSILLLAEGFTVQVETSGTHEILVHDEAWVTVSPKLGMKGGLEVLPQALARANEIKHPVATEHHIEELDALLHFATLRPDVQIGLQPISQKKHATELAMRVCIERHWRLSIQTHKYLDID

SEQ ID NO: 27474 - protein, 223 aa, Aeromonas schubertii
  REGION 1..223: note = tr|A0A0W7U741|A0A0W7U741_9GAMM 7-carboxy-7-deazaguanine synthase OS=Aeromonas schubertii; OX = 652 GN=queE PE=3 SV=1
MHYPINEIFQTIQGEGVYTGLPAIFVRLQGCPVGCPWCDTRHTWVVDPERQVPSRQVLDRSNESDAWSAMSAAEIRESFQRLDYTARHVVITGGEPCLYDLRELSVLLLAEGFTVQVETSGTHEIQVHDEAWVTVSPKLGMKGGLEVLPQALARANEIKHPVATEHHIEELDALLHFATLRPDVQIGLQPISQKKHATELAMRVCIERHWRLSIQTHKYLDID

SEQ ID NO: 27475 - protein, 224 aa, Aeromonas simiae
  REGION 1..224: note = tr|A0A5J6WVB6|A0A5J6WVB6_9GAMM 7-carboxy-7-deazaguanine synthase QueE OS=Aeromonas simiae; OX = 218936 GN=queE PE=4 SV=1
MIHYPINEIFQTIQGEGVNTGLPAIFVRLQGCPVGCPWCDTRHTWVVDPERQVASQQVLDRSNESDGWSPMSAPEVLESFRRLGYTARLVVITGGEPCLYDLRELSTLLLGEGYAVQVETSGTHEVRVHDAAWVTVSPKLGMKGGFAVLPQALARANEIKHPVATEHHIEELDELLHFATLRPDVQIALQPISQKRRATELAMRVCIERHWRLSIQTHKYLDID

SEQ ID NO: 27476 - protein, 223 aa, Aeromonas sobria
  REGION 1..223: note = tr|A0A2N3IWF0|A0A2N3IWF0_AERSO 7-carboxy-7-deazaguanine synthase OS=Aeromonas sobria; OX = 646 GN=queE PE=3 SV=1
MHYPINEIFQTIQGEGIFTGLPAIFVRLQGCPVGCPWCDTRHTWVVDPAREVGQEAVLDRSNESDCWSKLSTAQIIASFSGLGYQARHVVITGGEPCLYDLHELSSALLAAGYQVQIETSGTSEIKTHEQTWVTVSPKIGMKGGQPVLVSALERANEIKHPVATEHHIEELDTLLATATLRPDVVIALQPISQKPRATQLAMDTCIARNWRLSIQTHKYLDID

SEQ ID NO: 27477 - protein, 223 aa, Aeromonas sobria
  REGION 1..223: note = tr|A0A1S2D5T9|A0A1S2D5T9_AERSO 7-carboxy-7-deazaguanine synthase OS=Aeromonas sobria; OX = 646 GN=queE PE=3 SV=1
MHYPINEIFQTIQGEGIFTGLPAIFVRLQGCPVGCPWCDTRHTWVVDPAREVGQEAVLDRSNESDCWSQLSTAQIIASFSDLGYQARHVVITGGEPCLYDLHELSSALLAAGYQVQIETSGTSEIKTHEQTWVTVSPKIGMKGGLPVLVSALARANEIKHPVATEHHIEELDALLATAALRPDVVIALQPISQKPRATQLAMETCIARNWRLSIQTHKYLDID

SEQ ID NO: 27478 - protein, 237 aa, Aeromonas sp.
  REGION 1..237: note = tr|A0A2R7MUA5|A0A2R7MUA5_9GAMM 7-carboxy-7-deazaguanine synthase OS=Aeromonas sp. HMWF017; OX = 2056853 GN=queE PE=3 SV=1
MGYNPRLLQQAVIEMHYPINEIFQTIQGEGIFTGLPAIFVRLQGCPVGCPWCDTRHTWVVDPAREVGKAAVLDRSNESDCWSQLSTAQIIKSFTDLGYQARHVVITGGEPCLYDLHELSSALLAAGYRVQIETSGTSEIKTHEQTWVTVSPKIGMKGGLPVLVSALERANEIKHPVATEHHIEELDALLATATLRPDVVIALQPISQKPRATQLAMDTCIARNWRLSIQTHKYLDID

SEQ ID NO: 27479 - protein, 237 aa, Aeromonas sp.; identical to SEQ ID NO: 27456
  REGION 1..237: note = tr|A0A369SVD8|A0A369SVD8_9GAMM 7-carboxy-7-deazaguanine synthase OS=Aeromonas sp. ARM81; OX = 1747384 GN=queE PE=3 SV=1

SEQ ID NO: 27480 - protein, 223 aa, Aeromonas taiwanensis
  REGION 1..223: note = tr|A0A5F0KDL1|A0A5F0KDL1_9GAMM 7-carboxy-7-deazaguanine synthase OS=Aeromonas taiwanensis; OX = 633417 GN=queE PE=3 SV=1
MHYPINEIFQTIQGEGVFTGLPAIFVRLQGCPVGCPWCDTRHTWVVDPAREVGRGEVLDRSNESDGWSKMSTHDILASFDTLGYRARHVVLTGGEPCLYDLNELSSALVASGYQVQIETSGTSEILTHEQTWVTVSPKIGMKGGLPVLVSALERANEIKHPVATERHIEELDALLASARLREDVVIALQPISQKPRATELAMATCIARNWRLSIQTHKYLNID

SEQ ID NO: 27481 - protein, 223 aa, Aeromonas veronii
  REGION 1..223: note = tr|A0A318DN27|A0A318DN27_9GAMM 7-carboxy-7-deazaguanine synthase OS=Aeromonas veronii; OX = 654 GN=queE PE=3 SV=1
MHYPINEIFQTIQGEGIFTGLPAIFVRLQGCPVGCPWCDTRHTWVVDPAREVGKAAVLDRSNESDCWSQLSTAQIIKSFTDLGYQARHVVITGGEPCLYDLHELSSALLAAGYQVQIETSGTSEIKTHEQTWVTVSPKIGMKGGLPVLVSALERANEIKHPVATEHHIEELDTLLATATLRPDVVIALQPISQKPRATQLAMDICIARNWRLSIQTHKYLDID

SEQ ID NO: 27482 - protein, 237 aa, Aeromonas veronii
  REGION 1..237: note = tr|A0A3D8JLS8|A0A3D8JLS8_9GAMM 7-carboxy-7-deazaguanine synthase OS=Aeromonas veronii; OX = 654 GN=queE PE=3 SV=1
MGYNPRLLQQAVIEMHYPINEIFQTIQGEGIFTGLPAIFVRLQGCPVGCPWCDTRHTWVVDPAREVGKEAVLDRSNESDCWSQLSTTQIIKSFTDLGYQARHVVITGGEPCLYDLHELSSALLAAGYQVQIETSGTSEIKTHEQTWVTVSPKIGMKGGLPVLVSALERANEIKHPVATEHHIEELDTLLATATLRPDVVIALQPISQKPRATQLAMDTCIARNWRLSIQTHKYLDID

SEQ ID NO: 27483 - protein, 215 aa, Aestuariibacter sp.
  REGION 1..215: note = tr|A0A2D6XYM0|A0A2D6XYM0_9ALTE 7-carboxy-7-deazaguanine synthase OS=Aestuariibacter sp.; OX = 1872400 GN=queE PE=3 SV=1
  VARIANT 17: note = Xaa can be any naturally occurring amino acid
  VARIANT 24: note = Xaa can be any naturally occurring amino acid
  VARIANT 51: note = Xaa can be any naturally occurring amino acid
  VARIANT 54: note = Xaa can be any naturally occurring amino acid
  VARIANT 69: note = Xaa can be any naturally occurring amino acid
  VARIANT 77: note = Xaa can be any naturally occurring amino acid
  VARIANT 92: note = Xaa can be any naturally occurring amino acid
  VARIANT 95: note = Xaa can be any naturally occurring amino acid
  VARIANT 197: note = Xaa can be any naturally occurring amino acid
MFETIQGEGVYTGVPAXFVRLQGXPVGCPWCDTKHTWTLDENLIDSVDAVXNKXEESERFFGISDLGLXALFEQQGXNAKHVVITGGEPCMXDLXGLTELLHERGFTSQIETSGTFEVKCAQQTWVTVSPKVNMKGGYDVLTSALQRANEIKHPIAMQKHVDELDALLAGIDLTDKVVCLQPISQQARATELAIKTXIDRNWRLSLQTHKYVGIA

SEQ ID NO: 27484 - protein, 215 aa, Aestuariibacter sp.
  REGION 1..215: note = tr|A0A506RU16|A0A506RU16_9ALTE 7-carboxy-7-deazaguanine synthase OS=Aestuariibacter sp. GS-14 OX=2590670 GN=queE PE=3 SV=1
MFETIQGEGVYTGVPAIFVRLQGCPVGCPWCDTKHTWVLDENLIDSVDAVIRKSEESERFFGISDLGLLALFEQQGYHAKHVVITGGEPCMYDLTGLTTLLHERGYTSQIETSGTFEVKCAPQTWVTVSPKVNMKGGYEVLTSALQRANEIKHPIAMQKHIDELDALLKNIELGNKVVCLQPISQQARATELAIKTCIERNWRLSLQTHKYLGIA

SEQ ID NO: 27485 - protein, 242 aa, unidentified
  source 1..242: note = Aestuariispira insulae
  REGION 1..242: note = tr|A0A3D9HGK5|A0A3D9HGK5_9PROT 7-carboxy-7-deazaguanine synthase OS=Aestuariispira insulae OX=1461337 GN=queE PE=3 SV=1
MATDTIRISEIFGPTIQGEGALIGEPTVFVRTGGCDYRCSWCDTLHAVESDYRHDWTPMTAEAIFAEVERLSGGKPLTLSLSGGNPAIQPLGDLIALGKAKAYRFALETQGSVAAPWFSGLDVLTLSPKGPSSGMDTDWSKFDECLEIAGHSPDIALKIVVFDEADYAYAQDAAARYPKLPLYLQPGNHTPPPADDDDAEIDIDGILARMRWLVDKVAEDQWYDAKILPQLHVLLWGNLRGV

SEQ ID NO: 27486 - protein, 210 aa, Afipia broomeae
  REGION 1..210: note = tr|K8PNV1|K8PNV1_9BRAD 7-carboxy-7-deazaguanine synthase OS=Afipia broomeae ATCC 49717 OX=883078 GN=queE; PE = 3 SV=1
MSYAVKEIFLTLQGEGAHAGRTAVFCRFSGCNLWTGREQDRASAVCQFCDTDFVGTDGTLGGRYANADELAATIAAQWQGPEGHRYTVLTGGEPLLQVDTALIDALHAQGFTIAIETNGTIEPPPGLDWICVSPKAGSELVIRKGHELKLVYPQAENTPEDFAGLEFERFSLQPMDGPDIAQSTQAAIAYCLRHPQWRLSVQTHKTLGIR

SEQ ID NO: 27487 - protein, 210 aa, Afipia broomeae
  REGION 1..210: note = tr|A0A2M8ZXL0|A0A2M8ZXL0_9BRAD 7-carboxy-7-deazaguanine synthase OS=Afipia broomeae; OX = 56946 GN=queE PE=3 SV=1
MSYAVKEIFLTLQGEGAHAGRAAVFCRFSGCNLWSGREQDRATATCRFCDTDFVGTDGTLGGRYGSAAELADTIAGQWIGAKANRYVVLTGGEPLLQVDTALIDALHGHRFSIGIETNGTIEPPDGMDWICVSPKAGAELVVRRGHELKLIYPQTDAAPEAFVDLAFERFSLQPMDGPDVIENTARAVDYCLRHPQWRLSLQTHKTLGIR

SEQ ID NO: 27488 - protein, 210 aa, Afipia clevelandensis
  REGION 1..210: note = tr|K8P350|K8P350_9BRAD 7-carboxy-7-deazaguanine synthase OS=Afipia clevelandensis ATCC 49720 OX=883079; GN = queE PE=3 SV=1
MSYAVKEIFLTLQGEGAHAGRTAVFCRFSGCNLWTGREQDRPEAVCKFCDTDFVGMDGTLGGRYANADDLAAVIAAQWEGPPEHRYTVLTGGEPLLQVDPALIDALHARGFTIAVETNGTVTAPPGLDWICVSPKAGAELILRKGHELKLVYPQPENKPEDFAGLEFERFSLQPMDGPDIAQSTQAAIAYCLAHPQWRLSVQTHKTLGIR

SEQ ID NO: 27489 - protein, 210 aa, Afipia felis
  REGION 1..210: note = tr|A0A380WCF1|A0A380WCF1_AFIFE 7-carboxy-7-deazaguanine synthase OS=Afipia felis OX=1035; GN = queE PE=3 SV=1
MSYAVKEIFLTLQGEGMQAGRPAVFCRFSGCNLWSGREQDRADAVCQFCDTDFVGTDGTLGGRYATADDLAERIATTWGPHPDHRFVVLTGGEPMLQIDDALIGALHARGFMIAVETNGTLPAPPGLDWICVSPKADTELAIRQGHELKLVYPQTQNAPEDYTALAFQHFLLQPMDGPDLAQNTKHAIDYCLRHPQWRLSVQTHKTIGIR

SEQ ID NO: 27490 - protein, 210 aa, Afipia felis
  REGION 1..210: note = tr|A0A090N7P1|A0A090N7P1_AFIFE 7-carboxy-7-deazaguanine synthase OS=Afipia felis OX=1035; GN = queE PE=3 SV=1
MSYAVKEIFLTLQGEGMQAGRPAVFCRFAGCNLWSGREQDRAEAVCQFCDTDFVGTDGTLGGRYATADDLAERIAATWGPDSRHRFVVLTGGEPMLQIDDALIAALHARGFMIAVETNGTLPAPPGLDWICVSPKADTELAIRQGHELKLVYPQRQNAPEDYTALAFQHFLLQPMDGPDLEQNTARAIDYCLRHPQWRLSVQTHKTIGIR

SEQ ID NO: 27491 - protein, 210 aa, Afipia massiliensis
  REGION 1..210: note = tr|A0A4U6BJP7|A0A4U6BJP7_9BRAD 7-carboxy-7-deazaguanine synthase OS=Afipia massiliensis; OX = 211460 GN=queE PE=3 SV=1
MSYAVKEIFLTLQGEGAHAGRTAVFCRFSGCNLWTGREQDRADAVCKFCDTDFVGMDGTLGGRYANADDLACAIAEQWVGPQDHRYTVLTGGEPLLQIDPALIDALHARGFTIAVETNGTIAAPPGLDWICVSPKAGSELVIRKGHELKLVYPQEENTPEDFAGLEFERFSLQPMDGPDIAQSTQAAIAYCLRHPQWRLSVQTHKTLGIR

SEQ ID NO: 27492 - protein, 210 aa, Afipia sp.
  REGION 1..210: note = tr|A0A5C8CNQ2|A0A5C8CNQ2_9BRAD 7-carboxy-7-deazaguanine synthase OS=Afipia sp. OX=1871052; GN = queE PE=3 SV=1
MSYAVKEIFLTLQGEGAHAGRTAVFCRFSGCNLWTGREQDRAEAICKFCDTDFVGMDGTLGGRYANADALASAVAAQWEGPPEHRYTVLTGGEPLLQVDSALIDALHTRGFTIAVETNGTVAAPPGLDWICVSPKAGAELILRKGHELKLVYPQPENKPEDFANLEFERFSLQPLDGPDIAQSTQAAIAYCLAHPQWRLSVQTHKTLGIR

SEQ ID NO: 27493 - protein, 210 aa, Afipia sp.; identical to SEQ ID NO: 27490
  REGION 1..210: note = tr|D6V920|D6V920_9BRAD 7-carboxy-7-deazaguanine synthase OS=Afipia sp. 1NLS2 OX=666684 GN=queE PE=3 SV=1

SEQ ID NO: 27494 - protein, 225 aa, Agarivorans albus
  REGION 1..225: note = tr|R9PQX0|R9PQX0_AGAAL 7-carboxy-7-deazaguanine synthase OS=Agarivorans albus MKT 106 OX=1331007 GN=queE; PE = 3 SV=1
MASLALPVNEVFETIQGEGFHTGVPSIFVRLQGCDVGCSWCDTKHTWQVLESDRVQPELIIGASGDTARWAMLTPNQLLEQFKTRYQAKHIVITGGEPCIYDLHELTNVLITAGYSVQIETSGTYPVKAAAKAWVTVSPKVDMKGGKVVIEQALHRANEIKHPVARERDLTNLKTLLTGMTSNLDVLVCLQPISQQQRATELCIQACIENNWRLSLQTHKFIGIE

SEQ ID NO: 27495 - protein, 224 aa, Agarivorans sp.
  REGION 1..224: note = tr|A0A4D4J1Q7|A0A4D4J1Q7_9ALTE 7-carboxy-7-deazaguanine synthase OS=Agarivorans sp. Toyoura001 OX=2283141 GN=ygcF PE=3 SV=1
MPQPTLPINEIFETIQGEGFHTGVPAVFIRLQGCDVGCSWCDTKHTWEVLAADKVQVEQIIGVSGDTARWAGYSVEQLLKVLTQYSGTHIVITGGEPCIYDLEPLTSALISHGKSVQIETSGTYPVKANGKTWVTVSPKVAMKGEKEILIEALQRANEIKHPVARERDLENLNELLARLPEEHHALVCLQPISQQPRATELCIEACIKNNWRLSLQTHKYIGIE

SEQ ID NO: 27496 - protein, 222 aa, unidentified
  source 1..222: note = Agathobacter ruminis
  REGION 1..222: note = tr|A0A2G3E269|A0A2G3E269_9FIRM 7-carboxy-7-deazaguanine synthase OS=Agathobacter ruminis; OX = 1712665 GN=queE PE=3 SV=1
MAKFQVVEKFVSINGEGQSAGALAVFIRLRGCNLACSYCDTRWACTDDAEAVEMTEGEIIDYVKSTGVTRVTLTGGEPLLAKSIDVLLQAFAQCSDLALEIETNGSISIAKYASMEHAPSFTLDYKLAGSGMEQYMDVSNFALLQPKDTVKFVCSSVDELDRVCEIVDQYRISEKCRVLISPVFGSIEPADMVDYLILHQRNDIRLQLQLHKFIWDPNKRGV

SEQ ID NO: 27497 - protein, 202 aa, Aggregatibacter actinomycetemcomitans
  REGION 1..202: note = tr|H0KCN7|H0KCN7_AGGAC 7-carboxy-7-deazaguanine synthase OS=Aggregatibacter actinomycetemcomitans RhAA1; OX = 1089447 GN=queE PE=3 SV=1
MPSYNIVEIFESLQGEGFNTGMPCIFVRFGKCNLACPWCDTNYNQFERMTLAQVMEEVRSFSSKNIIITGGEPTIVPNIEILLEQMKSEGYFLAIETNGLKPIPPQIDYIATSPKRLYRYKYEQRCTDFAHEVRIVADENIMAFCELIEDRIRAERYYLSPCEINGKMNLLETITQLGQLNQRANKPKWLLSVQTHKLIGIE

SEQ ID NO: 27498 - protein, 209 aa, Aggregatibacter actinomycetemcomitans
  REGION 1..209: note = tr|A0A5D0KSE0|A0A5D0KSE0_AGGAC 7-carboxy-7-deazaguanine synthase QueE OS=Aggregatibacter actinomycetemcomitans OX=714 GN=FXB84_05470 PE=4 SV=1
MQNSSVFMPSYNIVEIFESLQGEGFNTGMPCIFVRFGKCNLACPWCDTNYNQFERMTLAQVMEEVRSFSSKNIIITGGEPTIVPNIEILLEQMKSEGYFLAIETNGLKPIPPQIDYIATSPKRLYPHKYERRCIDFAHEVRIVADENVMAFCELIEDKIRAERYYLSPCEINGKMNLLETITQLGQLNQRVNRPKWLLSVQTHKLIGIE

SEQ ID NO: 27499 - protein, 209 aa, Aggregatibacter aphrophilus
  REGION 1..209: note = tr|A0A448F7X3|A0A448F7X3_AGGAP 7-carboxy-7-deazaguanine synthase OS=Aggregatibacter aphrophilus ATCC 33389 OX=985008 GN=queE PE=3 SV=1
MQKIDVFTPSYNIVEIFESLQGEGFNTGMPSIFVRFGKCNLACPWCDTNYNQFERMTLAQIMEEVRSFSAKNIIITGGEPTIVPNIELLLDQMKSEGYFLAIETNGLKPIPTQIDYIATSPKRLYQHKYEQCCIEFADEVRIVADGDVSDFCALIEENIQATRYYLSPCEINGKMNLLETITQLGLLNQRPNKPKWLLSVQTHKLIGIA

SEQ ID NO: 27500 - protein, 209 aa, Aggregatibacter aphrophilus; identical to SEQ ID NO: 27499
  REGION 1..209: note = tr|A0A336N8Y7|A0A336N8Y7_AGGAP 7-carboxy-7-deazaguanine synthase OS=Aggregatibacter aphrophilus OX=732 GN=queE PE=3 SV=1

SEQ ID NO: 27501 - protein, 220 aa, Agitococcus lubricus
  REGION 1..220: note = tr|A0A2T5IWI5|A0A2T5IWI5_9LACT 7-carboxy-7-deazaguanine synthase OS=Agitococcus lubricus; OX = 1077255 GN=queE PE=3 SV=1
MASDVLGQELRITEIFFSLQGEARTVGLPTVFIRLTGCPLRCAYCDTTYSFTGGEKFSIGQILQQVADYGAHYVCVTGGEPLAQPNCLLLLTALCDLGYSVSLETSGALDVREVDIRVSKVVDLKTPDSGESHRNLYENLPHLSPHDQIKFVICSRRDYDWARFKIDEYQLKHRVSDILLSPSHGQQNPTELAQWIIQDKLPVRLQVQLHKYLWNNEPGH

SEQ ID NO: 27502 - protein, 251 aa, unidentified
  source 1..251: note = Agrobacterium arsenijevicii
  REGION 1..251: note = tr|A0A0D8KWB7|A0A0D8KWB7_9RHIZ 7-carboxy-7-deazaguanine synthase OS=Agrobacterium arsenijevicii OX=1585697 GN=queE PE=3 SV=1
MTAAAQKVAAKETAIRISEIFGPTIQGEGPLIGLPTVFVRTGGCDYRCSWCDTLHAVDSEYRDTWKPMPVETIWQEVRQLSGGVPLTVSLSGGNPAIQPLGALIAKGHGEGYRFALETQGSIAKDWFANLDHLVLSPKPPSSGMETDWQAFENCLAAAGDEPQVALKVVVFDDADYAYAKAASARFPHLPVYLQPGNHTPPPPDDDDARVDVDGIMDRMLWLVEKVSEDRWFSARVLPQLHVLLWGNKRGV

SEQ ID NO: 27503 - protein, 245 aa, unidentified
  source 1..245: note = Agrobacterium bohemicum
  REGION 1..245: note = tr|A0A135P8N0|A0A135P8N0_9RHIZ 7-carboxy-7-deazaguanine synthase OS=Agrobacterium bohemicum OX=2052828 GN=queE PE=3 SV=1
MSSTKDIPIRISEIFGPTIQGEGLLIGVPTVFVRTGGCDYRCSWCDTLHAVDSQYRDDWKPMSVDAIWQDVTALSGGKPLTVSLSGGNPAIQPLGGLIDKGHAEGYRFALETQGSIAKRWFADLDYLILSPKPPSSGMQTDWEAFESCLAAAGKGPHIALKVVIFDDADYAYAKNAAARFPDLPVYLQPGNHTPPPPDDDDAVVDIDGVMNRMLWLVDKVSADHWFNVRVLPQLHVLLWGNKRGV

SEQ ID NO: 27504 - protein, 251 aa, unidentified
  source 1..251: note = Agrobacterium deltaense
  REGION 1..251: note = tr|A0A1S7U1L3|A0A1S7U1L3_9RHIZ 7-carboxy-7-deazaguanine synthase OS=Agrobacterium deltaense NCPPB 1641 OX=1183425 GN=queE PE=3 SV=1
MTAAAHKIAAKETTIRISEIFGPTIQGEGVLIGLPTVFVRTGGCDYRCSWCDTLHAVDSEYRDTWKPMPVEVIWQEVRRLSGGVPLTVSLSGGNPAIQPFAALIAKGQGEGYRFALETQGSIAKDWFAALDHLVLSPKPPSSGMETDWQAFEDCLAAAGDGPQVALKIVVFDDADYAYAKAASARFPHLPVYLQPGNHTPPPPDDDDARVDIDGVMDRMLWLVGKVSEDRWFSARVLPQLHVLLWGNKRGV

SEQ ID NO: 27505 - protein, 251 aa, unidentified
  source 1..251: note = Agrobacterium deltaense
  REGION 1..251: note = tr|A0A1S7RXQ5|A0A1S7RXQ5_9RHIZ 7-carboxy-7-deazaguanine synthase OS=Agrobacterium deltaense Zutra 3/1 OX=1183427 GN=queE PE=3 SV=1
MTVAAHKIAAKETTIRISEIFGPTIQGEGLLIGLPTVFVRTGGCDYRCSWCDTLHAVDSDYRDTWKPLSVEVIWQEVRQLSGGVPLTVSLSGGNPAIQPLGPLITRGQDEGYRFALETQGSIAKDWFADLDHLVLSPKPPSSGMETDWQAFEDCLAAAGEGPQVALKIVVFDDVDYAYAKAASARFPHLPVYLQPGNHTPPPPDDDDARVDIDGVMDRMLWLVDKVSEDRWFSARVLPQLHVLLWGNKRGV

SEQ ID NO: 27506 - protein, 251 aa, unidentified
  source 1..251: note = Agrobacterium fabrum
  REGION 1..251: note = sp|A9CF16|QUEE_AGRFC 7-carboxy-7-deazaguanine synthase OS=Agrobacterium fabrum (strain C58 / ATCC 33970); OX = 176299 GN=queE PE=3 SV=1
MTEAARNIAARETTVRISEIFGPTIQGEGPLIGLPTVFVRTGGCDYRCSWCDTLHAVDSEYRDTWKPMSVEAIWQEVLGLSGGMPLTVSLSGGNPAIQPLGTLIAKGQGEGYRFALETQGSIAKDWFADLDHLVLSPKPPSSGMETDWQAFEDCLAAAGDGPQVALKVVIFDDADYAYAKAASARFPHLPVYLQPGNHTPPPPDDDDARVDIDGVMDRMLWLVEKISEDRWFSARVLPQLHVLLWGNKRGV

SEQ ID NO: 27507 - protein, 251 aa, unidentified
  source 1..251: note = Agrobacterium fabrum
  REGION 1..251: note = tr|A0A3G2D9T7|A0A3G2D9T7_9RHIZ 7-carboxy-7-deazaguanine synthase OS=Agrobacterium fabrum; OX = 1176649 GN=exsD PE=3 SV=1
MTAAARNIAARETTIRISEIFGPTIQGEGPLIGLPTVFVRTGGCDYRCSWCDTLHAVDSEYRDTWKPMSVEAIWQEVLGLSGGVPLTVSLSGGNPAIQPLGALIAKGQGEGYRFALETQGSIAKDWFADLDHLVLSPKPPSSGMETDWQAFEDCLAAAGDGPQVALKVVIFDDADYAYAKAASARFPHLPVYLQPGNHTPPPPDDDDARVDIDGVMDRMLWLVEKISEDRWFSARVLPQLHVLLWGNKRGV

SEQ ID NO: 27508 - protein, 251 aa, unidentified
  source 1..251: note = Agrobacterium genomosp.
  REGION 1..251: note = tr|A0A1S7QV69|A0A1S7QV69_9RHIZ 7-carboxy-7-deazaguanine synthase OS=Agrobacterium genomosp. 3 str. CFBP 6623 OX=1183432 GN=queE PE=3 SV=1
MTAAAQKIAAKETTIRISEIFGPTIQGEGLLIGLPTVFVRTGGCDYRCSWCDTLHAVDSDYRDTWKPMPVEAIWQEVRRLSGGVPLTVSLSGGNPAIQPLGSLIAKGQGEGYRFALETQGSIAKDWFADLDHLVLSPKPPSSGMETDWQAFEDCLAAADDGPQVALKIVVFDDADYAYAKAASARFPHLPVYLQPGNHTPPPPDDDDARVDIDGVMDRMLWLVNKVSEDRWFSARVLPQLHVLLWGNKRGV

SEQ ID NO: 27509 - protein, 251 aa, unidentified
  source 1..251: note = Agrobacterium genomosp.
  REGION 1..251: note = tr|A0A1S7S6V0|A0A1S7S6V0_9RHIZ 7-carboxy-7-deazaguanine synthase OS=Agrobacterium genomosp. 5 str. CFBP 6626 OX=1183435 GN=queE PE=3 SV=1
MTTAAQQVVAKESTIRISEIFGPTIQGEGLLIGLPTVFVRTGGCDYRCSWCDTLHAVDSDYRDTWKPMPVEAIWQEVRRLSGGVPLTVSLSGGNPAIQPLGALIAKGQNEGYRFALETQGSIAKDWFADLDHLVLSPKPPSSGMETDWQAFENCLAAAGERPQVALKIVVFDDADYAYARAASARFPHLPVYLQPGNHTPPPPDDDDARVDIEGVMDRMLWLVEKVSEDRWFSARVLPQLHVLLWGNKRGV

SEQ ID NO: 27510 - protein, 245 aa, unidentified
  source 1..245: note = Agrobacterium larrymoorei
  REGION 1..245: note = tr|A0A4D7DX13|A0A4D7DX13_9RHIZ 7-carboxy-7-deazaguanine synthase OS=Agrobacterium larrymoorei OX=160699 GN=queE PE=3 SV=1
MSAAKEAPIRISEIFGPTIQGEGLLIGLPTVFVRTGGCDYRCSWCDTLHAVDSDYREDWKPSSVDEIWAEVTELSGGKPITVSLSGGNPAIQPLGPLIQRGHAEGYTFALETQGSVSKDWFADLDYLVLSPKPPSSGMETDWQAFENCLAAAGDRPKIALKVVVFDDADFAYVREAAQRFPQLPVYLQPGNHTPPPPDDDDATVDVDGIMDRMLWLVEKVASERWFEARVLPQLHVLLWGNRRGV

SEQ ID NO: 27511 - protein, 245 aa, unidentified
  source 1..245: note = Agrobacterium larrymoorei
  REGION 1..245: note = tr|A0A4Z1PVX6|A0A4Z1PVX6_9RHIZ 7-carboxy-7-deazaguanine synthase OS=Agrobacterium larrymoorei OX=160699 GN=queE PE=3 SV=1
MSAAKEAPIRISEIFGPTIQGEGLLIGLPTVFVRTGGCDYRCSWCDTLHAVDSDYREDWKPSSVDEIWAEVTELSGGNPITVSLSGGNPAIQPLGPLIHRGHAEGYTFALETQGSVSKDWFADLDYLVLSPKPPSSGMETDWQAFENCLAAAGDQPKIALKIVVFDDADFAYAREAAQRFPQLPVYLQPGNHTPPPPDDDDATVDVDGIMDRMLWLVEKVASERWFEARVLPQLHVLLWGNRRGV

SEQ ID NO: 27512 - protein, 251 aa, unidentified
  source 1..251: note = Agrobacterium radiobacter
  REGION 1..251: note = tr|W1L3K8|W1L3K8_RHIRD 7-carboxy-7-deazaguanine synthase OS=Agrobacterium radiobacter DSM 30147 OX=1336745; GN = queE PE=3 SV=1
MTAAAHKIAAKETTIRISEIFGPTIQGEGVLIGLPTVFVRTGGCDYRCSWCDTLHAVDSEYRDTWKPMPVEAIWQEVRRLSGGVPLTVSLSGGNPAIQPLGALIAKGQGEGYRFALETQGSIAKDWFAALDHLVLSPKPPSSGMETDWRAFEDCLAAAGDGPQVALKIVVFDDADYAYAKAASARFPHLPVYLQTGNHTPPPPDDDDARVDIDGVMDRMLWLVEKVSEDRWFSARVLPQLHVLLWGNKRGV

SEQ ID NO: 27513 - protein, 279 aa, unidentified
  source 1..279: note = Agrobacterium radiobacter
  REGION 1..279: note = tr|B9JLH8|B9JLH8_AGRRK 7-carboxy-7-deazaguanine synthase OS=Agrobacterium radiobacter (strain K84 / ATCC BAA-868) OX=311403 GN=exsD PE=3 SV=1
MSGQAFLRLVQGDAARDLGGTRQRNAEDMGGIPAMSEAREARIRVSEIFGPTIQGEGILIGLPTVFVRTGGCDYRCSWCDTLHAVDSDYRDQWQPMSVDEIWQDVIRLSGGKPLAVSLSGGNPAIQPLGPLIARGHGEGYSFALETQGSVAKDWFADLDTLVLSPKPPSSGMVTDWAVFDDCLRLAADKPQVALKIVVFDDHDYAYARDAAARYPYLPVYLQPGNHTPPPPDADDAKIDIDGIMDRMLWLVDKVTADRWFEARVLPQLHVLLWGNKRGV

SEQ ID NO: 27514 - protein, 251 aa, unidentified
  source 1..251: note = Agrobacterium rhizogenes
  REGION 1..251: note = tr|A0A546WK90|A0A546WK90_AGRRH 7-carboxy-7-deazaguanine synthase OS=Agrobacterium rhizogenes OX=359 GN=queE PE=3 SV=1
MTAAAQKVAAKETAIRISEIFGPTIQGEGLLIGLPTVFVRTGGCDYRCSWCDTLHAVDSEYRDTWKPMSVEAIWQEVRRLSGGVPLTVSLSGGNPAIQPLGQLIAKGQGEGYRFALETQGSIAKDWFGDLDHLVLSPKPPSSGMETDWRAFEDCLAAAGDGPQVALKIVVFDDADYAYAKAASARFPHLPIYLQPGNHTPPPPDDDDARVDIDGIMDRMLWLVDKVSEDRWFSARVLPQLHVLLWGNKRGV

SEQ ID NO: 27515 - protein, 251 aa, unidentified
  source 1..251: note = Agrobacterium rhizogenes
  REGION 1..251: note = tr|A0A178H1N5|A0A178H1N5_AGRRH 7-carboxy-7-deazaguanine synthase OS=Agrobacterium rhizogenes OX=359 GN=queE PE=3 SV=1
MTVAAHKIAAKETTIRISEIFGPTIQGEGLLIGLPTVFVRTGGCDYRCSWCDTLHAVDSDYRDTWKPLSVEAIWQEVRRLSGGVPLTVSLSGGNPAIQPLGALIAKGQGEGYRFALETQGSIAKDWFAGLDHLVLSPKPPSSGMETDWRAFEDCLAAAGDGPQVALKIVVFDDVDYAYAKAASARFPHLPVYLQPGNHTPPPPDDDDARVDIDGVMDRMLWLVDKVSEDRWFSARVLPQLHVLLWGNKRGV

SEQ ID NO: 27516 - protein, 245 aa, unidentified
  source 1..245: note = Agrobacterium rosae
  REGION 1..245: note = tr|A0A2S4EAF6|A0A2S4EAF6_9RHIZ 7-carboxy-7-deazaguanine synthase OS=Agrobacterium rosae; OX = 1972867 GN=queE PE=3 SV=1
MSSTKDTPIRISEIFGPTIQGEGLLIGVPTIFVRTGGCDYRCSWCDTLHAVDSQYRDDWKPMSVDAIWQDVTTLSGGKPLTVSLSGGNPAIQPLGKLIEKGHGEGYRFALETQGSIAKDWFADLDYLVLSPKPPSSGMDTDWNAFEHCLEKAGGGPQTALKFVVFDDADYAYAKHAAARYPHLAVHLQPGNHTPPPPDDDDALVDIDGVMDRMLWLVDRVSADRWFDVRVLPQLHVLLWGNKRGV

SEQ ID NO: 27517 - protein, 245 aa, unidentified
  source 1..245: note = Agrobacterium rubi
  REGION 1..245: note = tr|A0A081CSA8|A0A081CSA8_9RHIZ 7-carboxy-7-deazaguanine synthase OS=Agrobacterium rubi TR3 = NBRC 13261 OX=1368415 GN=queE PE=3 SV=1
MNTQKEAPVRISEIFGPTIQGEGLLIGLPTVFVRTGGCDYRCSWCDTLHAVESKYREDWTPMSAEEIWQEVKRLSGGKPLTVSLSGGNPAIQPLGPLIAKGHGEGYRFALETQGSLAKDWFADLDYLVLSPKPPSSGMQTDWPAFESCLTAAGSGPQLALKIVVFDDVDYAYAKDAHRRYPQLPVYLQPGNHTPPPPEDDDAVVDIDGVMERMLWLVEKVNADRWFDVRVLPQLHVLLWGNKRGV

SEQ ID NO: 27518 - protein, 245 aa, unidentified
  source 1..245: note = Agrobacterium rubi
  REGION 1..245: note = tr|A0A1B9TX19|A0A1B9TX19_9RHIZ 7-carboxy-7-deazaguanine synthase OS=Agrobacterium rubi; OX = 28099 GN=queE PE=3 SV=1
MKTQKEAPVRISEIFGPTIQGEGLLIGLPTVFVRTGGCDYRCSWCDTLHAVESKYREDWTPMSADDIWQEVTRLSGGKPLTVSLSGGNPAIQPLGPLIAKGHGEGYRFALETQGSLSKDWFADLDYLVFSPKPPSSGMQTDWPAFESCLTAAGSGPQLALKIVVFDDADYAYAKDAHQRYPQLPVYLQPGNHTPPPPEDDDAVVDIDGVTERMVWLVEKVNADLWFDVRVLPQLHVLLWGNKRGV

SEQ ID NO: 27519 - protein, 251 aa, unidentified
  source 1..251: note = Agrobacterium salinitolerans
  REGION 1..251: note = tr|A0A1S9E5G0|A0A1S9E5G0_9RHIZ 7-carboxy-7-deazaguanine synthase OS=Agrobacterium salinitolerans OX=1183413 GN=queE PE=3 SV=1
MTMAAHKIAAKDATIRISEIFGPTIQGEGLLIGLPTVFVRTGGCDYRCSWCDTLHAVDSDYRETWKPMSIDAIWQEVRRLSGGVPLTVSLSGGNPAIQPLGSLISKGQGEGYRFALETQGSIAKDWFADLDHLVLSPKPPSSEMETDWQAFESCLAAAGDGPQVALKIVVFDDADYAYAKAASARFPHLPVYLQPGNHTPPPPDDDDARVDIDGVMDRMLWLVDKVSVDRWFSARVLPQLHVLLWGNKRGV

SEQ ID NO: 27520 - protein, 251 aa, unidentified
  source 1..251: note = Agrobacterium salinitolerans
  REGION 1..251: note = tr|A0A1S7UDT5|A0A1S7UDT5_9RHIZ 7-carboxy-7-deazaguanine synthase OS=Agrobacterium salinitolerans str. Hayward 0363 OX=1183434 GN=queE PE=3; SV = 1
MTAAAHKIAAKDTTIRISEIFGPTIQGEGLLIGLPTVFVRTGGCDYRCSWCDTLHAVDSDYRDTWKPMSVDAIWRDVRRLSGGVPLTVSLSGGNPAIQPLGALIAKGRGEGYRFALETQGSIAKDWFADLDHLVLSPKPPSSGMGTDWQAFEDCLTAAGEGPQVALKIVVFDDADYAYAKAASARFPHLPVYLQPGNHTPPPPDDDDARVDIDGVMDRMLWLVDKVSEDRWFSARVLPQLHVLLWGNKRGV

SEQ ID NO: 27521 - protein, 251 aa, unidentified
  source 1..251: note = Agrobacterium sp.
  REGION 1..251: note = tr|A0A3R9DRM9|A0A3R9DRM9_9RHIZ 7-carboxy-7-deazaguanine synthase OS=Agrobacterium sp. FDAARGOS_525 OX=2420311 GN=queE PE=3 SV=1
MTAARQKSAAKDTTIRISEIFGPTIQGEGLLIGLPTVFVRTGGCDYRCSWCDTLHAVDSDYRDTWKPVPVDAIWQEVRRLSGGVPLTVSLSGGNPAIQPLGSLIAKGHGEGYRFALETQGSIAKDWFADLDHLVLSPKPPSSGMGTDWQAFEDCLAAAGEGPQVALKIVVFDDADYAYAKAASARFPHLPVYLQPGNHTPPPPDDDDARVDIDGVMERMLWLVDKVSEDRWFSARVLPQLHVLLWGNKRGV

SEQ ID NO: 27522 - protein, 251 aa, unidentified
  source 1..251: note = Agrobacterium sp.
  REGION 1..251: note = tr|A0A437L7E1|A0A437L7E1_9RHIZ 7-carboxy-7-deazaguanine synthase OS=Agrobacterium sp. CNPSo 2736 OX=2499627 GN=queE PE=3 SV=1
MIAAAQKIAAKETTIRISEIFGPTIQGEGVLIGLPTVFVRTGGCDYRCSWCDTLHAVDSEYRDTWKPMPVEAIWQEVRRLSGGVPLTVSLSGGNPAIQPLGALIAKGQGEGYRFALETQGSIAKDWFADLDHLVLSPKPPSSGMETDWQAFKDCLAAAGEGPQVALKIVVFDDADYAYAKAASARFPHLPVYLQPGNHTPPPPDDDDARVDIDGVMDRMLWLVDKVSEDRWFSARVLPQLHVLLWGNKRGV

SEQ ID NO: 27523 - protein, 251 aa, unidentified
  source 1..251: note = Agrobacterium tumefaciens
  REGION 1..251: note = tr|H0H3E8|H0H3E8_RHIRD 7-carboxy-7-deazaguanine synthase OS=Agrobacterium tumefaciens 5A OX=1107544; GN = queE PE=3 SV=1
MTAVAQKVAAKETAIRISEIFGPTIQGEGLLIGLPTVFVRTGGCDYRCSWCDTLHAVDSEYRDTWKPMSVEAIWQEVRRLSGSVPLTVSLSGGNPAIQPLGQLIAKGQGEGYRFALETQGSIAKDWFGDLDHLVLSPKPPSSGMETDWRAFEDCLAAAGDGPQVALKIVVFDDADYAYAKAASARFPHLPIYLQPGNHTPPPPDDDDARVDIDGIMDRMLWLVDKVSEDRWFSARVLPQLHVLLWGNRRGV

SEQ ID NO: 27524 - protein, 251 aa, unidentified
  source 1..251: note = Agrobacterium tumefaciens
  REGION 1..251: note = tr|M8A3U9|M8A3U9_RHIRD 7-carboxy-7-deazaguanine synthase OS=Agrobacterium tumefaciens str. Cherry 2E-2-2; OX = 1281779 GN=queE PE=3 SV=1
MTAAAQKIAAKETTIRISEIFGPTIQGEGVLIGLPTVFVRTGGCDYRCSWCDTLHAVDSEYRDTWKPMPVEAIWQEVRRLSGGVPLTVSLSGGNPAIQPLGALIAKGQGEGYRFALETQGSIAKDWFADLDYLVLSPKPPSSGMETDWQAFEDCLAAAGDGPQVALKIVVFDDADYAYAKAASARFPHLPVYLQPGNHTPPPPDDDDARVDIDGVMNRMLWLVDKVSEDRWFSARVLPQLHVLLWGNKRGV

SEQ ID NO: 27525 - protein, 255 aa, unidentified
  source 1..255: note = Agrobacterium vitis
  REGION 1..255: note = tr|B9JS44|B9JS44_AGRVS 7-carboxy-7-deazaguanine synthase OS=Agrobacterium vitis (strain S4 / ATCC BAA-846); OX = 311402 GN=exsD PE=3 SV=1
MGGVSSLTASETVIRVSEIFGPTIQGEGVLIGQPTVFVRMGGCDYRCSWCDSLHAVESRFREEWLPMSVQAIWAEVESLSGGVPLMVSLSGGNPAIQPLGALIAHGHERGYRFALETQGSIARDWFADLDVLVVSPKPPSSGMETDWDALSLCLEKAAARGEQQSPLTVLKFIVFDEADYAYARDASARHPHLPVYLQPGNHTPPPPEDDDAVIDMDGIMTRMHWLVDRVVEDRWFAARVLPQLHVLLWGNKRGV

SEQ ID NO: 27526 - protein, 255 aa, unidentified
  source 1..255: note = Agrobacterium vitis
  REGION 1..255: note = tr|A0A202F0Q1|A0A202F0Q1_AGRVI 7-carboxy-7-deazaguanine synthase OS=Agrobacterium vitis; OX = 373 GN=queE PE=3 SV=1
MGGVSSLTASETVIRVSEIFGPTIQGEGVLIGQPTVFVRTGGCDYRCSWCDSLHAVESRFREEWLPMSVEAIWAEVESLSGGVPLMVSLSGGNPAIQPLGGLIAHGHERGYRFALETQGSIARDWFADLDVLVVSPKPPSSGMETDWDALSLCLEKAAARGKQQSPLTVLKFIVFDEADYAYARDASARHPHLPVYLQPGNHTPPPPEDDDAVIDMDGIMTRMHWLVDRVVEDRWFAARVLPQLHVLLWGNKRGV

SEQ ID NO: 27527 - protein, 211 aa, Agromyces ramosus
  REGION 1..211: note = tr|A0A4Q7M8U5|A0A4Q7M8U5_9MICO 7-carboxy-7-deazaguanine synthase OS=Agromyces ramosus; OX = 33879 GN=queE PE=3 SV=1
MSYKVKEIFYTLQGEGTHAGRPAVFCRFSLCNLWTGRERDRPRAICQFCDTDFVGTDGPGGGKFATADELADAVEAAWPVGWASNRMVVCTGGEPLLQLDEPAIEALHRRGFYVAVETNGTRIPPAGVDWLCVSPKIGADLVVTRGDELKFVYPQKGVDPSSFEHLDFGTYRVQPMDGPDISVNTALAVEYCLNHPTWQLSLQTHKYLGIA

SEQ ID NO: 27528 - protein, 226 aa, Agromyces sp.
  REGION 1..226: note = tr|A0A542JQZ9|A0A542JQZ9_9PSED 7-carboxy-7-deazaguanine synthase OS=Agromyces sp. SLBN-50; OX = 744977 GN=queE PE=3 SV=1
MACFAVTPGALMQTNLRITEIFYSLQGETNTSGLPTVFVRLTGCPLRCQYCDTAYAFSGGEIMSLEAILERVAAFKPRYVCVTGGEPLAQPNCIPLLEQLCDAGYRVSLETSGAMDIAPTDRRVSRVVDLKTPGSQEVARNLYSNLDQLTGNDQVKFVICSREDYDWAVSKLIEYRLEQRAGEVLFSPSHGQVDARALADWIVADNLPVRFQLQLHKILWNDEPGH

SEQ ID NO: 27529 - protein, 230 aa, unidentified
  source 1..230: note = Ahniella affigens
  REGION 1..230: note = tr|A0A2P1PY91|A0A2P1PY91_9GAMM 7-carboxy-7-deazaguanine synthase OS=Ahniella affigens; OX = 2021234 GN=queE PE=3 SV=1
MTEALEASRLVVDDQPELERLKITEVFLSLQGEARDVGWPTTFIRLTGCPLRCTYCDTTYSFFGGTWRQIDDLVDEATQNGARHVCVTGGEPLSQKRCLILLKKLCDAGFLVSLETSGAIDISAVDSRVSRVLDLKTPSSGEMARNRLANLPLLTAHDQVKFVIGDRADYDWSVQMLKTHNLAQRAEVLFSPSHGQITATELADWIIADRLPVRFQWQLHKQLWGETPGK

SEQ ID NO: 27530 - protein, 214 aa, Aidingimonas halophila
  REGION 1..214: note = tr|A0A1H3B925|A0A1H3B925_9GAMM 7-carboxy-7-deazaguanine synthase OS=Aidingimonas halophila OX=574349 GN=queE PE=3 SV=1
MYHVKEAFYTLQGEGAQTGRASVFCRFSGCNLWSGRESDRTKSLCRFCDTDFVGTDGQNGGRFANAESLADHLHALWPTRAMRSSPYVVFTGGEPLLQLDDALITAMQARGFEVAVETNGTLPVPPGIDWLCVSPKGKSPLVIESGDELKLVYPQVDAPPERFDTLRFTYFFLQPMDTSPREQNSHTVPDTVAYCLRYPQWRLSLQTHKIIGID

SEQ ID NO: 27531 - protein, 234 aa, unidentified
  source 1..234: note = Akkermansia glycaniphila
  REGION 1..234: note = tr|A0A1C7PB06|A0A1C7PB06_9BACT 7-carboxy-7-deazaguanine synthase OS=Akkermansia glycaniphila OX=1679444 GN=queE PE=3 SV=1
MKLARLNSVPEIFYSVQGEGVSQGSPTVFLRLAGCNLACSWCDTAYSWKRQEAEEMTPHQVLRAIMDIVEAESPEDSPCRHIVITGGEPLLQQQELGELLGLLDGWRVEIETNGTQAPSGELAARVDQWNVSPKLSHSGNRTGRALVPDTLAAFAATGNAWFKFVIAHESDWEEIRQTAETAGIPRSRILLMPMATTRAELAAARAHVIGICLQHNVRYSDRLHIAVWDSRQGV

SEQ ID NO: 27532 - protein, 227 aa, Akkermansia muciniphila
  REGION 1..227: note = tr|A0A2N8IRL7|A0A2N8IRL7_9BACT 7-carboxy-7-deazaguanine synthase OS=Akkermansia muciniphila OX=239935 GN=queE PE=3 SV=1
MLTLAQIHGQPEIFHSIQGEGVSQGTPCVFLRLAGCNLACSWCDTAYSWNGTAPGVRLAPEKAAELVLHYPCRRLVLTGGEPLIQQKALPALLRLLPDHAVEMETNGTIMPDTELLKRVTQFNVSPKLPHSGNNDVKTWKPDILRCLAGTEKAWFKFVVACEDDVRAVLRRASEADIPPERILIMPLASTRDELNAMRAQAVEWCLRYGLRFSDRLHIAIWNSKKGV

SEQ ID NO: 27533 - protein, 227 aa, Akkermansia muciniphila
  REGION 1..227: note = tr|A0A2N8ILB7|A0A2N8ILB7_9BACT 7-carboxy-7-deazaguanine synthase OS=Akkermansia muciniphila OX=239935 GN=queE PE=3 SV=1
MLTLAQIHGQPEIFHSIQGEGVSQGTPCVFLRLAGCNLACSWCDTAYSWNGTVPGVRLAPEKAAELVLHYPCRRLVLTGGEPLIQQKALPALLRLLPDHAVEMETNGTIMPDTELLKRVTQFNVSPKLPHSGNNDVKTWKPDILRCLAGTEKAWFKFVVACEDDVRAVLRRASEADIPPERILIMPLASTRDELNAMRAQAVEWCLRYGFRFSDRLHIAIWNSKKGV

SEQ ID NO: 27534 - protein, 227 aa, Akkermansia sp.
  REGION 1..227: note = tr|A0A5B6D9P0|A0A5B6D9P0_9BACT 7-carboxy-7-deazaguanine synthase OS=Akkermansia sp. BIOML-A26 OX=2584582 GN=queE PE=3 SV=1
MLKLAQLHGEPEIFHSIQGEGASQGAPCVFLRLAGCNLACSWCDTAYSWDGTSPVVRLSPEEAAIAVLRYPCRRLVLTGGEPLIQQKALPGLFRLLPEHFVEMETNGTILPDEELLHHIGQFNVSPKLPHSGNDAARAWKPNILRRLAETEKAWFKFVASCEEDVAGVLRLAQQAGIPAERILIMPLAASREELDIMRPRVVAWCLRYGLRFSDRLHIAIWGSKKGV

SEQ ID NO: 27535 - protein, 227 aa, Akkermansia sp.; identical to SEQ ID NO: 27534
  REGION 1..227: note = tr|A0A5B6GYX9|A0A5B6GYX9_9BACT 7-carboxy-7-deazaguanine synthase OS=Akkermansia sp. BIOML-A8 OX=2584564 GN=queE PE=3 SV=1

SEQ ID NO: 27536 - protein, 212 aa, Albidiferax sp.
  REGION 1..212: note = tr|A0A1H0STE1|A0A1H0STE1_9BURK 7-carboxy-7-deazaguanine synthase OS=Albidiferax sp. OV413; OX = 1855285 GN=queE PE=3 SV=1
MTYSVKEIFYTLQGEGAQTGSPAVFCRFAGCNLWTGRESDRATAVCRFCDTDFVGTDGTLGGKFATADALADLIEAQWPAGDTQNRLTVLTGGEPLLQVDAELVAALHARGFRIAVESNGTVRAPEGIDWLCISPKAGAPWIQQQGQELKVVWPQSGMDLGTLVSTGQFTHRFLQPMDGPEQAANMTLCIDTCMQHPAWRLSIQTHKISGIR

SEQ ID NO: 27537 - protein, 210 aa, unidentified
  source 1..210: note = Alcaligenaceae bacterium
  REGION 1..210: note = tr|A0A2G4J8J5|A0A2G4J8J5_9BURK 7-carboxy-7-deazaguanine synthase OS=Alcaligenaceae bacterium OX=2021368 GN=queE PE=3 SV=1
MTYSVKEIFYTLQGEGLRAGRPAVFCRFAGCNLWSGREEDRSTAVCQFCDTDFVGTNGTLGAKFVSPEQLAEQIAALWPEHKQQRYVVLTGGEPLLQVDAALIQALHHQDFEIALETNGTLAVPEGIDWICVSPKAGANWVQKTGNELKLVYPQPTLMPSALAATSFDHYLLQPMDGLFQKQNTLKAIDYCQQNPEWRLSVQTHKFLDIR

SEQ ID NO: 27538 - protein, 211 aa, unidentified
  source 1..211: note = Alcaligenaceae bacterium
  REGION 1..211: note = tr|A0A354K341|A0A354K341_9BURK 7-carboxy-7-deazaguanine synthase OS=Alcaligenaceae bacterium OX=2021368 GN=queE PE=3 SV=1
MTYSVKEIFYTLQGEGGQAGCAAVFLRFAGCNLWTGLEKDRAQAVCQFCDTDFVGTNGTLGGKYKTAIELVEVIDREWPAGYSESKLVVCTGGEPLLQLDDALIRELHDHGFRIAVETNGTITAPSGIDWICVSPKSDAPLNQDHGQEIKLVYPQKNVRPELFENLNFKHFFLQPMDGPDQATNIALTIQYCMNHPKWRLSLQSHKLTGIR

SEQ ID NO: 27539 - protein, 210 aa, unidentified
  source 1..210: note = Alcaligenes xylosoxydans
  REGION 1..210: note = tr|A0A424WH46|A0A424WH46_ALCXX 7-carboxy-7-deazaguanine synthase OS=Alcaligenes xylosoxydans xylosoxydans OX=85698 GN=queE PE=3 SV=1
MTYSAKEIFKTLQGEGAHAGRAAVFCRFAGCNLWTGRESDRASAACTFCDTDFIGTDGDGGGKFATPELLADAIAAAWGPGANDRYVVFTGGEPLLQLDAPLLTAVHARGFTVAIETNGTIKPPAGIDWICVSPKGTTPVVLERGDELKLVYPQANAQPEAFAHLDFDHFFLQPMDGPARAANTEQAVQYCMQHPQWRLSLQTHKYIGIP

SEQ ID NO: 27540 - protein, 210 aa, unidentified
  source 1..210: note = Alcaligenes xylosoxydans
  REGION 1..210: note = tr|A0A176XT76|A0A176XT76_ALCXX 7-carboxy-7-deazaguanine synthase OS=Alcaligenes xylosoxydans xylosoxydans OX=85698 GN=queE PE=3 SV=1
MTYSAKEIFKTLQGEGAHAGRAAVFCRFAGCNLWSGRESDRASAACTFCDTDFIGTDGDGGGKFASPDLLADAIAAAWGPGADNRYVVFTGGEPLLQLDAPLLDAIHARGFTVAIETNGTIKPPGGIDWICVSPKGTAPVVVERGNELKLVYPQGNALPDAFAHLDFEHFFLQPMDGPARAANTEQAVQYCMQHPQWRLSLQTHKYIGIP

SEQ ID NO: 27541 - protein, 214 aa, unidentified
  source 1..214: note = Alcanivoracaceae bacterium
  REGION 1..214: note = tr|A0A3L8B090|A0A3L8B090_9GAMM 7-carboxy-7-deazaguanine synthase OS=Alcanivoracaceae bacterium GenoA1_TS13_700 OX=2072747 GN=queE PE=3 SV=1
MSQLRITEIFYSLQGEARTIGLPTVFVRLTGCPLRCQYCDTAYAFSGGEMRSISEILDEVARYSPKYITVTGGEPLAQPACRVLLTELCDAGYDVSLETSGALDIRGIDPRVSIVLDLKTPDSAESHRNLMDNIPLLKSRDQVKFVICSRQDYQWARMKVDELGLTERVGDVLFSPSFQQIKAADLADWIVEDRLPVRFQLQLHKLLWSDEPGR

SEQ ID NO: 27542 - protein, 213 aa, unidentified
  source 1..213: note = Alcanivoracaceae bacterium
  REGION 1..213: note = tr|A0A2E2DHB3|A0A2E2DHB3_9GAMM 7-carboxy-7-deazaguanine synthase OS=Alcanivoracaceae bacterium OX=2024895 GN=queE PE=3 SV=1
MELRLTEIFHSLQGEARTVGRPTVFVRLTGCPQRCVWCDTEYAFSGGEKWTLEAILAEVARHGAGCVTVTGGEPLAQPNCLPLLTALCDQGYEVSLETGGAMDIAGVDERVSVVMDLKAPGSGEQHNNRLENIPHLRPNHQVKFVLADRRDYDWARFMLDQHQLHKRVSDVLFSPVQGTLAPGELADWIVADRLPVRFQLQLHKLLWNDARGR

SEQ ID NO: 27543 - protein, 213 aa, Alcanivorax borkumensis
  REGION 1..213: note = tr|Q0VRI9|Q0VRI9_ALCBS 7-carboxy-7-deazaguanine synthase OS=Alcanivorax borkumensis (strain ATCC 700651 / DSM 11573 / NCIMB 13689 / SK2) OX=393595 GN=queE PE=3 SV=1
MELRLTEIFHSLQGESRTVGRPTVFVRLTGCPQRCVWCDTEYAFSGGEKWSLAAILEEVAALGAQYVTVTGGEPLAQPSCLPLLKTLCDEGYQVSLETGGAMDIAGVDERVSVVMDLKAPGSGEQHNNRLSNIALLKAHHQVKFVLADRKDYDWARFMLDQYQLHQRVSDVLFSPVQGTLAPGDLANWIVEDRLPVRFQLQLHKLLWNDARGR

SEQ ID NO: 27544 - protein, 252 aa, Alcanivorax dieselolei
  REGION 1..252: note = tr|K0CGH6|K0CGH6_ALCDB 7-carboxy-7-deazaguanine synthase OS=Alcanivorax dieselolei (strain DSM 16502 / CGMCC 1.3690 / B-5) OX=930169 GN=queE PE=3 SV=1
MLECTPFRGSIPTLNDSALFRAVIRIHHHIRIRRRSGATVELRITEIFHSLQGEARSVGRPTVFVRLTGCPQRCVWCDTEYAFQGGQKWSLDDILETVDGYGAGYVTVTGGEPLAQPNCLPLLTLLCDRGYEVSLETGGAMDIAAVDERVSVVMDLKAPGSGEQHNNRLENIPLLRPNHQVKFVLADRRDYDWARFMLDQHQLARRVSDVLFSPVQGQLAPTDLADWIVRDRLPVRFQIQLHKLLWNDAQGR

SEQ ID NO: 27545 - protein, 213 aa, Alcanivorax hongdengensis
  REGION 1..213: note = tr|L0WAH3|L0WAH3_9GAMM 7-carboxy-7-deazaguanine synthase OS=Alcanivorax hongdengensis A-11-3 OX=1177179; GN = queE PE=3 SV=1
MELRLTEIFFSLQGEARTVGCPTVFVRLTGCPQRCVWCDTEYAFSGGEKWSLAAILEEVGRHGARYVTVTGGEPLAQPHCLTLLGALCDAGYQVSLETGGAMDIAGVDERVSVVMDLKAPGSAEQHNNRLENIPLLRPHHQVKFVLADRRDYDWARFMLDQHNLAERVSDVLFSPVQGQLAPGQLADWIIEDRLPVRFQLQLHKLLWDDARGR

SEQ ID NO: 27546 - protein, 213 aa, Alcanivorax jadensis
  REGION 1..213: note = tr|A0A095S864|A0A095S864_9GAMM 7-carboxy-7-deazaguanine synthase OS=Alcanivorax jadensis T9 OX=1177181 GN=queE PE=3 SV=1
MDLRLTEIFYSLQGEARTVGRPTVFVRLTGCPQRCVWCDTEYAFSGGEKWSLEAVLEKVASYGAHYVTVTGGEPLAQPNCLPLLTALCDRGLDVSLETGGAMDIAGVDPRVSVVMDLKAPGSGEQHNNRLENIPLLQPHHQVKFVLADRKDYDWARFMLDQHQLHQRVSDVLFSPVQGELPPGELADWIVADRLPVRFQLQLHKLLWNDARGR

SEQ ID NO: 27547 - protein, 213 aa, unidentified
  source 1..213: note = Alcanivorax nanhaiticus
  REGION 1..213: note = tr|A0A095TSB7|A0A095TSB7_9GAMM 7-carboxy-7-deazaguanine synthase OS=Alcanivorax nanhaiticus OX=1177154 GN=queE PE=3 SV=1
MELRLTEIFHSLQGEARTVGRPTVFVRLTGCPQRCVWCDTEYAFSGGEKWTLESILAEVAQYGAGYITVTGGEPLAQPNCLPLLTALCDEGYEVSLETGGAMDISQVDERVSVVMDLKAPGSAEQHNNRLENIPLLRPHHQVKFVLADRKDYDWARFMLDQHQLAERVADVLFSPVQGQLAPGDLADWIVADRLPVRFQLQLHKLLWNDARGR

SEQ ID NO: 27548 - protein, 213 aa, Alcanivorax pacificus
  REGION 1..213: note = tr|A0A0B4XKQ4|A0A0B4XKQ4_9GAMM 7-carboxy-7-deazaguanine synthase OS=Alcanivorax pacificus W11-5 OX=391936 GN=queE PE=3 SV=1
MELRITEIFHSLQGEARSVGRPTVFVRLTGCPQRCVWCDTEYAFQGGQRRDLADIVAEVGSYGAEYVTVTGGEPLAQPNCLPLLTQLCDAGFQVSLETGGAMDIAGVDPRVSVVMDLKAPDSGEMHNNRLANIALLKAADQVKFVLASRRDYDWARLQLDQHALPDKVADVLFSPVWGQLPPEQLAQWILEDRLPVRFQLQLHKILWADARGR

SEQ ID NO: 27549 - protein, 213 aa, unidentified; identical to SEQ ID NO: 27542
  source 1..213: note = Alcanivorax profundi
  REGION 1..213: note = tr|A0A418Y1E8|A0A418Y1E8_9GAMM 7-carboxy-7-deazaguanine synthase OS=Alcanivorax profundi; OX = 2338368 GN=queE PE=3 SV=1

SEQ ID NO: 27550 - protein, 213 aa, Alcanivorax sp.
  REGION 1..213: note = tr|B4WY37|B4WY37_9GAMM 7-carboxy-7-deazaguanine synthase OS=Alcanivorax sp. DG881 OX=236097 GN=queE PE=3; SV = 1
MELRLTEIFHSLQGESRTVGRPTVFVRLTGCPQRCVWCDTEYAFSGGEKWTLAAIREQVAAHGAQYVTVTGGEPLAQPNCLPLLTALCDDGYQVSLETGGAMDIAGVDERVSVVMDLKAPGSGEQHNNRLENIPLLKAHHQVKFVLADRKDYDWARFMLDQHQLHKRVSDVLFSPVQDGLAPGELADWIVADRLPVRFQLQLHKYLWNDARGR

SEQ ID NO: 27551 - protein, 213 aa, Alcanivorax sp.
  REGION 1..213: note = tr|A0A2E9TL93|A0A2E9TL93_9GAMM 7-carboxy-7-deazaguanine synthase OS=Alcanivorax sp.; OX = 1872427 GN=queE PE=3 SV=1
MDLRLTEIFYSLQGEARTVGRPTVFVRLTGCPQRCVWCDTEYAFSGGEKWSLEAILAQVAGYQAHYVTVTGGEPLAQPNCLGLLTALCDQGYEVSLETGGAMDIAEVDPRVSVVMDLKAPGSGEQHNNRLENIPLLRPHHQVKFVLADRKDYDWARFMLDQHQLPQRVGDVLFSPVQGQLAPGELADWIVADRLPVRFQLQLHKLLWNDARGR

SEQ ID NO: 27552 - protein, 215 aa, unidentified
  source 1..215: note = Algibacter alginicilyticus
  REGION 1..215: note = tr|A0A0N7HYU3|A0A0N7HYU3_9FLAO 7-carboxy-7-deazaguanine synthase OS=Algibacter alginicilyticus OX=1736674 GN=queE PE=3 SV=1
MYLCKLMKEEIQLLVDKGEMLPLMEEFYTIQGEGFHKGTAAYFVRIGGCDVGCHWCDVKESWNANLHPPTEISKIVNNAKKYSNTIVITGGEPLTWDMTALTTQLKAEGLQIHIETSGAYKLTGIWDWICLSPKKMKLPTAEVYDKAQELKMIIYNKDDFRFAEEQAAKVNKDCILYLQPEWSKREKVIPEIVEYVMKNPKWKVSLQTHKYLNIP

SEQ ID NO: 27553 - protein, 209 aa, unidentified
  source 1..209: note = Algibacter amylolyticus
  REGION 1..209: note = tr|A0A556R0R8|A0A556R0R8_9FLAO 7-carboxy-7-deazaguanine synthase OS=Algibacter amylolyticus OX=1608400 GN=queE PE=3 SV=1
MNEVVKQMVEKGEMLPLMEEFYTIQGEGFHKGTAAYFVRIGGCDVGCHWCDVKESWNANLHPPTETTKIVAAAKSYSNTIVVTGGEPLTWDMTALTTQLKAEGLQTHIETSGAYKLTGIWDWICLSPKKMKLPTKEVYDHAHELKMIIYNKDDFRFAEEQAAKVNDDCILYLQPEWSKRDKVVPEIVDYVMKHPKWKVSLQTHKYLNIP

SEQ ID NO: 27554 - protein, 209 aa, unidentified
  source 1..209: note = Algibacter aquaticus
  REGION 1..209: note = tr|A0A1E5T9I9|A0A1E5T9I9_9FLAO 7-carboxy-7-deazaguanine synthase OS=Algibacter aquaticus; OX = 1849968 GN=queE PE=3 SV=1
MNKETQLLIDKGEMLPLMEEFYTIQGEGYYKGTAAYFIRIGGCDVGCHWCDVKESWNANLHPPTETSKIVENAKKYSDTIVVTGGEPLTWDMTALTSQLKNEGLQVHIETSGAYKLTGTWDWICLSPKKMKRPTQEVYDSADELKVIIYNKDDFRFAEEQAAKVNANCILYMQPEWSKRDTVVPEIVDYVMKNPKWKVSLQTHKYLNIP

SEQ ID NO: 27555 - protein, 209 aa, Algibacter lectus
  REGION 1..209: note = tr|A0A090WZ74|A0A090WZ74_9FLAO 7-carboxy-7-deazaguanine synthase OS=Algibacter lectus; OX = 221126 GN=queE PE=3 SV=1
MKKEIQQLVDKGEMLPLMEEFYTIQGEGFHKGTAAYFIRVGGCDVGCHWCDVKESWNANLHPPTLITNIVENAKKHSDTIVITGGEPLTWDMTPLTTQLKAEGLQVHIETSGAYKLTGIWDWICLSPKKMKLPTKEVYDNAHELKVIIYNKDDFRFAEEQAEKVNNDCILYLQPEWSKRDKVVPEIVDYVMKNPRWKVSLQTHKYLNIP

SEQ ID NO: 27556 - protein, 209 aa, unidentified
  source 1..209: note = Algibacter pectinivorans
  REGION 1..209: note = tr|A0A1I1MIL8|A0A1I1MIL8_9FLAO 7-carboxy-7-deazaguanine synthase OS=Algibacter pectinivorans OX=870482 GN=queE PE=3 SV=1
MNEVVKQMVEKGEMLPLMEEFYTIQGEGFHKGTAAYFVRIGGCDVGCHWCDVKESWNANLHPPTETTKIVAAAKSYSSTIVVTGGEPLTWDMTPLTTQLKAEGLQTHIETSGAYKLTGIWDWICLSPKKMKLPTKEVYDHAHELKMIIYNKDDFRFAEEQAAKVNDNCILYLQPEWSKRDKVVPEIVDYVMKHPKWKVSLQTHKYLNIP

SEQ ID NO: 27557 - protein, 209 aa, Algibacter sp.
  REGION 1..209: note = tr|A0A2U2X6F4|A0A2U2X6F4_9FLAO 7-carboxy-7-deazaguanine synthase OS=Algibacter sp. ZY111; OX = 2100723 GN=queE PE=3 SV=1
MDKEIQSLVDKGEMLPLMEEFYTIQGEGFYKGTAAYFVRIGGCDVGCHWCDVKESWNANLHPPTKTSQIVENAKKYSDTIVVTGGEPLTWDMTPLTKGLKAEGLQVHIETSGAYKLTGIWDWICLSPKKMKLPTQEVYEKADELKVIVYNKDDFRFAEEQATKVNDNCILYLQPEWSKRDKVVPEIVDYVMANPKWKVSLQTHKYLNIP

SEQ ID NO: 27558 - protein, 215 aa, Algibacter sp.
  REGION 1..215: note = tr|A0A2N0JHX4|A0A2N0JHX4_9FLAO 7-carboxy-7-deazaguanine synthase OS=Algibacter sp. RHA_19; OX = 1798237 GN=queE PE=3 SV=1
MYLCIMVKNEVLALVDKGEMLPLMEEFYTIQGEGFHKGTAAYFIRVGGCDVGCHWCDVKESWNAATHPPTTIDAIVDNAAKYSNTIVVTGGEPLTWNMAPLTEALKAKNLQTHIETSGAYTLTGIWDWICLSPKKNKLPQGIIYDKADELKMIIYNKNDFKFAEEQAAKVNKDCILYLQPEWSVKDKMTPLIVDFVMKNPQWKVSLQTHKYLNIP

SEQ ID NO: 27559 - protein, 209 aa, unidentified
  source 1..209: note = Algibacter wandonensis
  REGION 1..209: note = tr|A0A4V6QD86|A0A4V6QD86_9FLAO 7-carboxy-7-deazaguanine synthase OS=Algibacter wandonensis OX=1343161 GN=queE PE=3 SV=1
MKKEIQQLVDKGEMLPLMEEFYTIQGEGFHKGTAAYFIRVGGCDVGCHWCDVKESWNANLHPPTLITNIVENAKKHSDTIVITGGEPLTWDMTPLTTQLKAEGLQVHIETSGAYKLTGIWDWICLSPKKMKLPTKEVYDNAHELKVIIYNKDDFRFAEEQAEKVNNDCILYLQPEWSKRDKVVPEIVDYVMKNPKWKVSLQTHKYLNIP

SEQ ID NO: 27560 - protein, 215 aa, unidentified
  source 1..215: note = Algoriella xinjiangensis
  REGION 1..215: note = tr|A0A1I4ZCB4|A0A1I4ZCB4_9FLAO 7-carboxy-7-deazaguanine synthase OS=Algoriella xinjiangensis OX=684065 GN=queE PE=3 SV=1
MINIASTTAEEQRLIEQGKLLPVMEHFYTIQGEGMYTGLASYFIRLGGCDVGCHWCDVKDSWDAEKHPLTNVDELVDLATSQAKTIIITGGEPLMWDLTYLTKKLHEKGARIHIETSGAYPLSGEIDWVCLSPKKMMLPLDDVCTAAHELKCIIFNNHDFEFAEEQAARVGKDCTLFLQTEWSKRDKNLPLIIDYVKENPKWRYSLQTHKYLDIP

SEQ ID NO: 27561 - protein, 216 aa, Algoriphagus alkaliphilus
  REGION 1..216: note = tr|A0A1G5ZHR8|A0A1G5ZHR8_9BACT 7-carboxy-7-deazaguanine synthase OS=Algoriphagus alkaliphilus OX=279824 GN=queE PE=3 SV=1
MNTLDLVAQTTQELVAAGLQLPIMEAFYTIQGEGRFTGHPAYFIRLGGCDVGCVWCDVKESWEAAKWPVLSIEKIVEDALAFPGRLVVITGGEPLMYNMDPLTKLLKEHGFTTNIETSGAHPFSGDFDWVCFSPKKFKKPHPSIFAEADELKVVIYNKSDYEFAEQYAGLVNESCELRLQPEWSKAVKITAEIIDFVKNHPKWNISLQTHKFMDIP

SEQ ID NO: 27562 - protein, 248 aa, Algoriphagus antarcticus
  REGION 1..248: note = tr|A0A3E0DFW8|A0A3E0DFW8_9BACT 7-carboxy-7-deazaguanine synthase OS=Algoriphagus antarcticus OX=238540 GN=queE PE=3 SV=1
MENSNVFLTVFQFVTFPILKYYLCGIIHPAVQSPALSKIQMNIDEAVAHGVQLPLMEAFYTIQGEGKFTGHPAYFIRLGGCDVGCVWCDVKESWDSGKWPVLSIERIVEDALAYPGRLVVITGGEPLMYDLGPLTALLKEKGFTTNIETSGAHPYSGDFDWVCFSPKKFKKPHPSIYAEADELKVVIFHQSDFSFAEEHAELVKSTCELRLQPEWSKAEKFTPVIIDYAKNHPKWKISLQTHKFMDIP

SEQ ID NO: 27563 - protein, 216 aa, Algoriphagus aquaeductus
  REGION 1..216: note = tr|A0A326RWJ5|A0A326RWJ5_9BACT 7-carboxy-7-deazaguanine synthase OS=Algoriphagus aquaeductus OX=475299 GN=queE PE=3 SV=1
MHTLDLVAPTTQELVSAGLQLPVMEAFYTIQGEGRFTGHPAYFIRLGGCDVGCVWCDVKESWEAAKWPVLSIEKIVEDALAFPGRLVVITGGEPLMYNLDPLTRLLKEKGFTTNIETSGAHPFSGNFDWVCFSPKKFKKPHPSIYAQADELKVVIYNKSDFAFAEEHANMVNADCELRLQPEWSKASKLTPEIIDYVKNHPTWKISLQTHKFMDIP

SEQ ID NO: 27564 - protein, 208 aa, Algoriphagus aquimarinus
  REGION 1..208: note = tr|A0A1I1C9X1|A0A1I1C9X1_9BACT 7-carboxy-7-deazaguanine synthase OS=Algoriphagus aquimarinus OX=237018 GN=queE PE=3 SV=1
MDTKELVEKGLELPLMEAFYTIQGEGRFTGYPAYFIRLGGCDVGCVWCDVKESWDSGKWPVFSIEQLVEDALAFPGRLAVITGGEPLMYDLGPLTALLKANGFTTNIETSGAHPFSGDFDWVCFSPKKFKKPHTSIYKEADELKVVVFHQSDFAFAEEHAALVNSSCELRLQPEWSKADKFTPIIIDFAKNRPKWKISLQTHKFMDIP

SEQ ID NO: 27565 - protein, 208 aa, Algoriphagus aquimarinus
  REGION 1..208: note = tr|A0A5C7AUR2|A0A5C7AUR2_9BACT 7-carboxy-7-deazaguanine synthase OS=Algoriphagus aquimarinus OX=237018 GN=queE PE=3 SV=1
MDTKELVAKGLELPLMEAFYTIQGEGRFTGHPAYFIRLGGCDVGCVWCDVKESWDSGKWPVHSIEKIVDEALVYPGRLVVVTGGEPLMYDLGPLTALLKANGFTTNIETSGAHPFSGDFDWVCFSPKKFKKPHDSIYKEADELKVVVFHQSDFAFAEEHARLVNSSCELRLQPEWSKADKFTPIIIDFAKNSPKWKISLQTHKFMDIP

SEQ ID NO: 27566 - protein, 216 aa, Algoriphagus boritolerans
  REGION 1..216: note = tr|A0A1H5Z6E3|A0A1H5Z6E3_9BACT 7-carboxy-7-deazaguanine synthase OS=Algoriphagus boritolerans DSM 17298 = JCM 18970 OX=1120964 GN=queE PE=3; SV = 1
MNTLDPVVPTTQELVAAGLQLPIMEAFYTIQGEGRFTGHPAYFIRLGGCDVGCVWCDVKESWEAAKWPVLSIEKIVEEALAYPGRLVVITGGEPLLYNLDPLTKLLKEKGFTTNIETSGAHPFSGDFDWVCFSPKKFKKPHPSIFVEADELKVIIYNKSDFGFAEEHAKLVKSTCELRLQPEWSRAAKFTPEIIDYVKNRPKWNISLQTHKFMDIP

SEQ ID NO: 27567 - protein, 208 aa, unidentified
  source 1..208: note = Algoriphagus boseongensis
  REGION 1..208: note = tr|A0A4R6T2M4|A0A4R6T2M4_9BACT 7-carboxy-7-deazaguanine synthase OS=Algoriphagus boseongensis OX=1442587 GN=queE PE=3 SV=1
MSTQEQVAAGLQLPVMEAFYTIQGEGRFTGHPAYFIRLGGCDVGCVWCDVKESWEAGKWPVLSIEKIVDEALKFPGRLVVITGGEPLMYDLGPLTKLLKEKGFTLNIETSGAHPFSGNFDWVCFSPKKFKKPDPSIYAVADELKVVVYHHSDFAFAEEHAKLVRTTCELRLQPEWSKASKYTPEIIEYVKNRPNWKISLQTHKFMDIP

SEQ ID NO: 27568 - protein, 208 aa, Algoriphagus chordae
  REGION 1..208: note = tr|A0A2W7QLC8|A0A2W7QLC8_9BACT 7-carboxy-7-deazaguanine synthase OS=Algoriphagus chordae; OX = 237019 GN=queE PE=3 SV=1
MDTKELVAKGLELPLMEAFYTIQGEGRFTGHPAYFIRLGGCDVGCVWCDVKESWEAGKWPVLPIEQLVEDALAYPGRLVVITGGEPLMYDLGPLTALLKAKGFTTNIETSGAHPYSGDFDWVCFSPKKFKKPHPSIYKEADELKVVVFHQSDFAFAEEHAALVDSSCELRLQPEWSKAEKFTPVIIDFAKNHPKWKISLQTHKFMDIP

SEQ ID NO: 27569 - protein, 216 aa, Algoriphagus faecimaris
  REGION 1..216: note = tr|A0A1G6M963|A0A1G6M963_9BACT 7-carboxy-7-deazaguanine synthase OS=Algoriphagus faecimaris OX=686796 GN=queE PE=3 SV=1
MDTLDQVASTTQELVAAGLQLPLMEAFYTIQGEGKFTGHPAYFIRLGGCDVGCVWCDVKESWEAGKWPIVSIEKIVDDACSHPGRLVVITGGEPLMYNLNPLTKLLKEKGFTTNIETSGAHPFSGDFDWVCFSPKKFKKPHPSIYDQADELKVVIFHDSDFKFAEEHAQSVRSSCELRLQPEWSKADIFTPKLIDYVKSHPSWKISLQTHKFMDIP

SEQ ID NO: 27570 - protein, 208 aa, Algoriphagus halophilus
  REGION 1..208: note = tr|A0A1N6HFM2|A0A1N6HFM2_9BACT 7-carboxy-7-deazaguanine synthase OS=Algoriphagus halophilus OX=226505 GN=queE PE=3 SV=1
MKTKELIAKGVSLPVMEAFYTIQGEGRFTGHPAYFIRLGGCDVGCVWCDVKESWEAGKWPVLSIEEIVAEVEKYPGKLVVITGGEPLMYDLGPLTALLKQKGFSTNIETSGAHPFSGDFDWVCFSPKKFKAPHPSIYDHADELKVVVFHASDFDFAENHALKVKKSCELRLQPEWSKAEKFTPLIINYSKNHPNWKISLQTHKFMDIP

SEQ ID NO: 27571 - protein, 208 aa, Algoriphagus hitonicola
  REGION 1..208: note = tr|A0A1I2NPD5|A0A1I2NPD5_9BACT 7-carboxy-7-deazaguanine synthase OS=Algoriphagus hitonicola OX=435880 GN=queE PE=3 SV=1
MTTREFVDAGLQLPLMEAFYTIQGEGKFTGHPAYFIRLGGCDVGCVWCDVKESWEAGKWPIVSIEEIVAGALAHPGRLVVITGGEPLMYNLDPLTKLLKEKGFTTNIETSGAHPFSGDFDWVCFSPKKFKKPHPSIYEQADELKVVIFHDSDFKFAEEHAQSVRSSCELRLQPEWSKADIFTPKLIDYVKSHPSWKVSLQTHKFMDIP

SEQ ID NO: 27572 - protein, 208 aa, Algoriphagus locisalis
  REGION 1..208: note = tr|A0A1I6ZPF9|A0A1I6ZPF9_9BACT 7-carboxy-7-deazaguanine synthase OS=Algoriphagus locisalis OX=305507 GN=queE PE=3 SV=1
MNTKELVAKGLELPLMEAFYTIQGEGRFTGYPAYFIRLGGCDVGCVWCDVKESWDSGKWPVLAIEKIVEDALAFPGRLVVITGGEPLMYDLGPLTALLKSKGFTTNIETSGAHPFSGDFDWVCFSPKKFKKPHPSIYQQADELKVVVFHQSDFAFAEEHAELVNSNCEQRLQPEWSKAEKFIPVIIDFAKNRPKWKISLQTHKFMDIP

SEQ ID NO: 27573 - protein, 208 aa, unidentified
  source 1..208: note = Algoriphagus machipongonensis
  REGION 1..208: note = tr|A3HZL5|A3HZL5_9BACT 7-carboxy-7-deazaguanine synthase OS=Algoriphagus machipongonensis OX=388413; GN = queE PE=3 SV=1
MKTEELIAKGLSLPLMEAFYTIQGEGRFTGHPAYFIRLGGCDVGCVWCDVKESWEAGKWPILPIEEIVAEAVKYPGRLVVITGGEPLMYDLGPLTSLLKEKGFTTNIETSGAHPFSGDFDWVCFSPKKFKKPHPSIYKVANELKVVVFHNSDFAFAEEHALKVNENCELRLQPEWSKSEKFTPLIINYSKYHPNWKISLQTHKFMDIP

SEQ ID NO: 27574 - protein, 208 aa, Algoriphagus marincola
  REGION 1..208: note = tr|A0A0P7Y1X3|A0A0P7Y1X3_9BACT 7-carboxy-7-deazaguanine synthase OS=Algoriphagus marincola HL-49 OX=1305737 GN=queE PE=3 SV=1
MTTQELVAEGLQLPVMEAFYTIQGEGKFTGHPAYFIRLGGCDVGCVWCDVKESWEAGKWPVLSIEKIVEEACSFPGRLVVITGGEPLMYNLNPLTKLLKEKGFTTNMETSGAHPYSGDFDWVCFSPKKFKKPHPSIYAEADELKVVVFHQSDFAFAEKHAELVRKDCELRLQPEWSKAEKYTPEIINYVKNHPTWNISLQTHKFMDIP

SEQ ID NO: 27575 - protein, 208 aa, Algoriphagus ornithinivorans
  REGION 1..208: note = tr|A0A1I5ANR7|A0A1I5ANR7_9BACT 7-carboxy-7-deazaguanine synthase OS=Algoriphagus ornithinivorans OX=226506 GN=queE PE=3 SV=1
MTTQELVASGLQLPVMEAFYTIQGEGRFTGTPAYFIRLGGCDVGCVWCDVKESWEAGKWPILAIEEIVEEAVKYPGRLVVITGGEPLMYDLDPLTRLLKENGFTTNIETSGAHPFSGDFDWVCFSPKKFKKPHPSIYSEADELKVVIFHQSDFKFAEEHAALVNKSCELRLQPEWSKAEKFTSEIINYVKNHPTWNISLQTHKFMDIP

SEQ ID NO: 27576 - protein, 208 aa, Algoriphagus ratkowskyi
  REGION 1..208: note = tr|A0A2W7RCB4|A0A2W7RCB4_9BACT 7-carboxy-7-deazaguanine synthase OS=Algoriphagus ratkowskyi OX=57028 GN=queE PE=3 SV=1
MNTKELVAKGLELPLMEAFYTIQGEGRFTGHPAYFIRLGGCDVGCVWCDVKESWEAGKWPVISIEQLVEDAVAFPGRLVVITGGEPLMYNLGPLTALLKEKGFTTNIETSGAHPFSGDFDWVCFSPKKFKKPHPSIYDEADELKVVVFHQSDFEFAEEHARLVNSSCELRLQPEWSKADKFTPVIIDFAKNHPKWKISLQTHKFMDIP

SEQ ID NO: 27577 - protein, 216 aa, Algoriphagus sp.
  REGION 1..216: note = tr|A0A418PP78|A0A418PP78_9BACT 7-carboxy-7-deazaguanine synthase OS=Algoriphagus sp. N3; OX = 2056311 GN=queE PE=3 SV=1
MNTLELVAPTTQELIAAGLQLPIMEAFYTIQGEGRFTGHPAYFIRLGGCDVGCVWCDVKDSWEAAKWPVLSIEKIVEDALAFPGRLAVITGGEPLMYNLGPLTKLLKEKGFTTNIETSGAHPFSGDFDWVCFSPKKFKKPHPSIYVEADELKVVIYNKSDFDFAEDHAKLVNSDCELRLQPEWSKAAKFTPEIIEYVKNHPTWKISLQTHKFMDIP

SEQ ID NO: 27578 - protein, 216 aa, Algoriphagus sp.
  REGION 1..216: note = tr|A0A142EMI4|A0A142EMI4_9BACT 7-carboxy-7-deazaguanine synthase OS=Algoriphagus sp. M8-2; OX = 1727163 GN=queE PE=3 SV=1
MQTLDLVAPTTQELVAAGLQLPIMEAFYTIQGEGRFTGHPAYFIRLGGCDVGCVWCDVKESWEAAKWPVLSVEQIVEDALVFPGRLVVITGGEPLMYNLDPLTKLLKEKGFTTNIETSGAHPFSGDFDWVCFSPKKFKKPHPSIYPKADELKVVIYNNRDFEFAEEHAKLVNPGCELRLQPEWSKASRFISEIIAYVKNHPTWKISLQTHKFMDIP

SEQ ID NO: 27579 - protein, 208 aa, Algoriphagus yeomjeoni
  REGION 1..208: note = tr|A0A327PGF0|A0A327PGF0_9BACT 7-carboxy-7-deazaguanine synthase OS=Algoriphagus yeomjeoni OX=291403 GN=queE PE=3 SV=1
MNIVEAVGKGVQLPLMEAFYTIQGEGRFTGYPAYFIRLGGCDVGCVWCDVKESWNSGKWPVLSIEKIVEDALAYPGRLVVITGGEPLMYDLGPLTALLKEKGFTTNIETSGAHPFSGDFDWVCFSPKKFKKPHPSIYKEADELKVVVFHQSDFDFAEDHASLVKSTCELRLQPEWSKAEKFTPEIIDFVKKRPKWKISLQTHKFMDIP

SEQ ID NO: 27580 - protein, 208 aa, unidentified
  source 1..208: note = Algoriphagus zhangzhouensis
  REGION 1..208: note = tr|A0A1M7ZEN3|A0A1M7ZEN3_9BACT 7-carboxy-7-deazaguanine synthase OS=Algoriphagus zhangzhouensis OX=1073327 GN=queE PE=3 SV=1
MNTKDQVAKGLMLPIMEAFYTIQGEGRFTGHPAYFIRLGGCDVGCVWCDVKESWEAGKWPVLSIEQIVKEGLNHPGRLVVITGGEPLMYDLGPLTKMLKEKGFTTNIETSGAHPFSGDFDWVCFSPKKFKKPHPSIYEQANELKVVVFHKSDFDFAEEHAALVNSSCEKRLQPEWSKAEKFTPIIIDYVKNHPTWNISLQTHKFMDIP

SEQ ID NO: 27581 - protein, 250 aa, Alicyclobacillus acidocaldarius
  REGION 1..250: note = tr|B7DN75|B7DN75_9BACL 7-carboxy-7-deazaguanine synthase OS=Alicyclobacillus acidocaldarius LAA1 OX=543302; GN = queE PE=3 SV=1
MASTHAPWEDAYEEAKLGDPGRITLPMVEIFETVEGEGTKAGFPTTFVRVFHCNLRCTWCDTPYSYAPERPAFHATLREIAQQVEAFGWPNVCLTGGEPLIHRHKSQLLIEAIAGIEWVRDVHIETNGAIDVRPFVRFRDASTRLREVVRFIVDYKLPASGEESRMIGEHLTSLSERDEVKFVIADERDFARALEVMEAHPTRATILMSPVWETMPPRDLVALILKHRLRDVKLNLQLHKVIWDPNARGV

SEQ ID NO: 27582 - protein, 257 aa, Alicyclobacillus acidocaldarius
  REGION 1..257: note = tr|F8IES3|F8IES3_ALIAT 7-carboxy-7-deazaguanine synthase OS=Alicyclobacillus acidocaldarius (strain Tc-4-1) OX=1048834 GN=queE PE=3 SV=1
MDVVKAAGASFRAPWEDAYEEAKRGDPGQLSLPMVEIFETVEGEGTRAGFPTTFVRVFHCNLRCTWCDTPYSYAPERPAFHATLREIAKQVEAFGWPNVCLTGGEPLIHRHKSQLLIEAIADIEWVRDVHIETNGAIDVRPYVRFRDASARLREVVRFIVDYKLPASGEDSRMIGEHLTSLSERDEVKFVIADERDFARALEVMEFYPTRATILMSPVWDTMPPRDLVALILKHRLRDVKLNLQLHKVIWDPNARGV

SEQ ID NO: 27583 - protein, 253 aa, Alicyclobacillus acidoterrestris
  REGION 1..253: note = tr|A0A512CT22|A0A512CT22_9BACL 7-carboxy-7-deazaguanine synthase OS=Alicyclobacillus acidoterrestris OX=1450 GN=queE PE=3 SV=1
MTTSTQRSYDWRPTYRQARDTNPLALTLPMVEIFQTVEGEGTRAGFPTVFVRVFHCNLRCTWCDTPYSYAPAKPEFEATIADIAQRAAAYGWENVCLTGGEPLIHRHKSQFLIEALAAVEHIQDIHIETNGAIDVRPFAELRASQAQLREKVRFIVDYKLPASGEMDKMVHHHLSALEPQDELKFVIANDDDFETAVDVLSRYRPRATALFSPVWETMPPDKLVEKILNAGLKRVKLNLQIHKVIWDPAARGV

SEQ ID NO: 27584 - protein, 253 aa, Alicyclobacillus acidoterrestris; identical to SEQ ID NO: 27583
  REGION 1..253: note = tr|T0BH24|T0BH24_ALIAG 7-carboxy-7-deazaguanine synthase OS=Alicyclobacillus acidoterrestris (strain ATCC 49025 / DSM 3922 / CIP 106132 / NCIMB 13137 / GD3B); OX = 1356 854 GN=queE PE=3 SV=1

SEQ ID NO: 27585 - protein, 240 aa, Alicyclobacillus ferrooxydans
  REGION 1..240: note = tr|A0A0P9CZ10|A0A0P9CZ10_9BACL 7-carboxy-7-deazaguanine synthase OS=Alicyclobacillus ferrooxydans OX=471514 GN=queE PE=3 SV=1
MSKIPVLETFGPTIQGEGMVVGRKTMFVRTAGCDYQCVWCDSAYTWNGSEKHRTRMLSPEEVMDELVALGGNRFNHVTITGGNPALIGDPMRRFINLCHQQGHKVGLETQGSRMQDWFFDIDDLTLSPKPPSSKMETNWDTLDRIVHELTGHSVNFSLKIVVFDNEDVEYAKSVFARYPDVAQKYVQPGNAHTDASGNISAYLLERLEWLFGVVISDAAFNSVRVLPQLHAMVWSNERER

SEQ ID NO: 27586 - protein, 258 aa, Alicyclobacillus hesperidum
  REGION 1..258: note = tr|A0A1H2U6Z4|A0A1H2U6Z4_9BACL 7-carboxy-7-deazaguanine synthase OS=Alicyclobacillus hesperidum OX=89784 GN=queE PE=3 SV=1
MTGSSAGTTVRRNVDWHVQYEQARRGDWRSSRLPMVEIFETVEGEGTRAGYPTVFVRVFHCNLRCTWCDTPYSYAPAKPEFEASIGEIVDRVDRFGWHQVCLTGGEPLIHRHKSQLLIDAIASLPQIEDLHVETNGAIDVRPFAALREQSPELAAKLRFIVDYKLPSSGEQAQMVNEHLAALSDRDEVKFVIADDHDFDTAASVLAAYPTKAQVLFSPVWESMPPRELVNRILQHRLSRVKLNLQIHKVIWDPNQRGV

SEQ ID NO: 27587 - protein, 237 aa, Alicyclobacillus macrosporangiidus
  REGION 1..237: note = tr|A0A1I7JNX8|A0A1I7JNX8_9BACL 7-carboxy-7-deazaguanine synthase OS=Alicyclobacillus macrosporangiidus OX=392015 GN=queE PE=3 SV=1
MSRIPVLEVFGPTIQGEGMVIGRKTMFVRTAGCDYRCAWCDSKFTWDGSERARMLTPDEVWAELVAAGGRRFNHVTISGGNPALIRDPMAELIALLHGHGIRVGLETQGSVWQDWFVEIDDLTISPKPPSSGMDTDWAGLDVMVRRLSDHGVHFSLKVPIFDDTDLDYARRVHRTWPEVPLYLSVGNPDPSAGGDVAAHLLARLAWLVDRVVQDEALNAVHVLPQLHTLLWGNRRGV

SEQ ID NO: 27588 - protein, 250 aa, unidentified
  source 1..250: note = Alicyclobacillus montanus
  REGION 1..250: note = tr|A0A1M6JRV9|A0A1M6JRV9_9BACL 7-carboxy-7-deazaguanine synthase OS=Alicyclobacillus montanus OX=1830138 GN=queE PE=3 SV=1
MNNQLTIDHQSDEQLRNSDLNDLQLPMVEIFETIQGEGTAAGERTTFVRVYNCNLRCQWCDTKYSYAPEKPVFFASIKEICHKAASFENRWLCLTGGEPLMHGRKSIALVEALAKIPHVTDVHIETNGAIDLSPFAQLRQEIQPLGQKIRFIMDYKLPGSGEEHRMLTSNFQYLTERDEIKFVIADDRDFERAVDIVENEIGDGKVLFSPVFSSMSAKRLVEKLLKTNLKQVRVSLQLHKWIWDPEARGV

SEQ ID NO: 27589 - protein, 258 aa, Alicyclobacillus sacchari
  REGION 1..258: note = tr|A0A4V3HEI9|A0A4V3HEI9_9BACL 7-carboxy-7-deazaguanine synthase OS=Alicyclobacillus sacchari OX=392010 GN=queE PE=3 SV=1
MTGRPAATSSRRTVDWLAQYEQARKGDWRSLRLPMVEIFETVEGEGTRAGYPTVFVRVFHCNLRCTWCDTPYSYAPAQPEFEATIGEIASRVNELGWHHVCLTGGEPLIHRHKSQLLVDAIARLPQVQDVHVETNGAIDVRPFAALRHQSRELTAKLRFIVDYKLPSSGEQAQMVHEHLAVLSEQDELKFVIADDHDFDTAIAILKSYPTKAQVLFSPVWESMPPHELVERMLKNRLAQVKLNLQIHKVIWDPNQRGV

SEQ ID NO: 27590 - protein, 239 aa, Alicyclobacillus sp.
  REGION 1..239: note = tr|A0A1F2YAB2|A0A1F2YAB2_9BACL 7-carboxy-7-deazaguanine synthase OS=Alicyclobacillus sp. RIFOXYA1_FULL_53_8 OX=1797236 GN=queE PE=3 SV=1
MAKIPVMEVFGPTIQGEGMVIGRKTMFVRTAGCDYQCLWCDSPFTWNGAEKDKTRWLEPAEIVSELRALGGNRFNHVTVSGGNPALIGQAMKEFIDLCHDEHWAVGLETQGSRKQTWFHDIDDLTLSPKPPSSGMKTDFSVLDDLVNDLMEHRVHFSLKIVIFDQLDLEYAKSVFQRYPGTQTYLQVGNDQIEHSGDLAQHLLQRLHWLFERAIEDPGFNDTRVLPQLHALIWGNERAR

SEQ ID NO: 27591 - protein, 224 aa, unidentified
  source 1..224: note = Alicyclobacillus tengchongensis
  REGION 1..224: note = tr|A0A0V0PPT4|A0A0V0PPT4_9BACL 7-carboxy-7-deazaguanine synthase OS=Alicyclobacillus tengchongensis OX=368812 GN=queE PE=3 SV=1
MVEIFETVEGEGTRAGYPTVFVRVFHCNLRCTWCDTPYSYAPAKPEFEASIGEIVDRVDRFGWHQVCLTGGEPLIHRHKSQLLIDAIASLPQIEDLHVETNGAIDVRPFAALREQSPELAAKLRFIVDYKLPSSGEQAQMVHEHLAALSDRDEVKFVIADDHDFDTAVSVLAAYPTKAQVLFSPVWESMPPHELVNRILQHRLSRVKLNLQIHKVIWDPNQRGV

SEQ ID NO: 27592 - protein, 250 aa, Alicyclobacillus vulcanalis
  REGION 1..250: note = tr|A0A1N7KWW3|A0A1N7KWW3_9BACL 7-carboxy-7-deazaguanine synthase OS=Alicyclobacillus vulcanalis OX=252246 GN=queE PE=3 SV=1
MSFARAPWEAAYEEAKRGDPGAITLPMVEIFETVEGEGTKAGLPTTFVRVFHCNLRCTWCDTPYSYAPERPAFEASLKQIAERVESFGWANVCLTGGEPLIHRHKSQLLIDTLAGIAGVEDVHIETNGAIDVRPFVQYRDASARLRQVVRFIVDYKLPGSGEEHRMVPDHLSALSERDEVKFVIADDRDFARALEVLQAHPTRATVLFSPVWETMPPRDLVSLMLKHRLRGVKLNLQLHKVIWDPSARGV

SEQ ID NO: 27593 - protein, 223 aa, unidentified
  source 1..223: note = Aliidiomarina haloalkalitolerans
  REGION 1..223: note = tr|A0A432VZ74|A0A432VZ74_9GAMM 7-carboxy-7-deazaguanine synthase OS=Aliidiomarina haloalkalitolerans OX=859059 GN=queE PE=3 SV=1
MIYPINELFETIQGEGVYTGVPAIFIRLQGCPVGCPWCDTQHTWDKSADDRIAITDVLAKQQASTQFAEVSPDDILAQIQALGFTAKHVVITGGEPCMYDLRPLAAVLEAAGYRLQIETSGTFEVLTSPQTWVTVSPKVDMPGGYAVRADAMLRANEVKYPVAMHKHIEQLDQLLLDCPVQPGTTICLQPISQRPHATELAMRICRQRNWRLSVQLHKYLAID

SEQ ID NO: 27594 - protein, 223 aa, unidentified
  source 1..223: note = Aliidiomarina iranensis
  REGION 1..223: note = tr|A0A432VX45|A0A432VX45_9GAMM 7-carboxy-7-deazaguanine synthase OS=Aliidiomarina iranensis OX=1434071 GN=queE PE=3 SV=1
MQYPVNELFETIQGEGLYTGVPAIFLRLQGCPVGCPWCDTQHTWSKMAENAVDFGQIITKTGPDERYSELSAEAILQRIQSLGFTAKHIVITGGEPCMYDLRPLAEVLEPLGYQLQIETSGTFPILASSSTWVTVSPKVDMPGGYPVLADAMQRADEIKYPIAMEKHISAFDALLAEKPARAGAVICLQPISQRPRATELAIKVCRERNWRLSVQLHKYLAIE

SEQ ID NO: 27595 - protein, 222 aa, unidentified
  source 1..222: note = Aliidiomarina maris
  REGION 1..222: note = tr|A0A327WND5|A0A327WND5_9GAMM 7-carboxy-7-deazaguanine synthase OS=Aliidiomarina maris; OX = 531312 GN=queE PE=3 SV=1
MLAINEIFETIQGEGVFTGVPAIFVRLQGCPVGCPWCDTQQTWALNDDDQIDPAQMILKTGDTPAWSSMTAQQVLQLFSQQQYTAKHVVITGGEPCMFDLREFTTLLHQQGYRTQIETSGTFEVRCDPATWVTVSPKLDMPGGYEVRADAMARANEIKHPIAMQKHVDALDALLSRCPVQEGTTICLQPISQRPRATQLAIDICRQRNWRLSVQLHKYLAIA

SEQ ID NO: 27596 - protein, 232 aa, unidentified
  source 1..232: note = Aliidiomarina minuta
  REGION 1..232: note = tr|A0A432W5M8|A0A432W5M8_9GAMM 7-carboxy-7-deazaguanine synthase OS=Aliidiomarina minuta; OX = 880057 GN=queE PE=3 SV=1
MSFIEQTASNQLAVNELFETIQGEGVFTGVAAIFLRLQGCPVGCPWCDTQHTWDKKEADKIAATDLIMKTADTPQWSDLSGEDILALIKTQGYTAKHVVITGGEPCMYDLRELATVLESAGYRLQIETSGTFEILTSADTWVTVSPKLDMPGGFQVRCDAMTRANEIKHPVAMEKHIEALDELLARCPVQPGTTICLQPISQRPRATELAIRTCRLRNWRLSVQLHKYLSIE

SEQ ID NO: 27597 - protein, 251 aa, unidentified
  source 1..251: note = Aliidiomarina sanyensis
  REGION 1..251: note = tr|A0A432WEQ6|A0A432WEQ6_9GAMM 7-carboxy-7-deazaguanine synthase OS=Aliidiomarina sanyensis OX=1249555 GN=queE PE=3 SV=1
MTTTRPEAPEQNEPLKTILQKQVAGFAPGVYPVNELFETIQGEGVFTGQPAIFLRLQGCPVGCPWCDTQHTWTLQPSDQTSAGEILVKTSADTRYAVQSSNDIVNTFKQRGFTAKHVVITGGEPCMYDLRPLAEVLEEAGYRLQIETSGTFEIRTSDNTWVTVSPKLEMPGGLDVLASAMRRANEVKHPIAMEKHIEALDELLIRCPVKPETIIALQPISQRPRATELAIKTCIARNWRLSVQMHKYLAIE

SEQ ID NO: 27598 - protein, 223 aa, unidentified
  source 1..223: note = Aliidiomarina shirensis
  REGION 1..223: note = tr|A0A432WY15|A0A432WY15_9GAMM 7-carboxy-7-deazaguanine synthase OS=Aliidiomarina shirensis OX=1048642 GN=queE PE=3 SV=1
MLYPVNELFETIQGEGLYTGVPAIFLRLQGCPVGCPWCDTQHTWSKTAENAVDFGEVIAKTGPDERYGELSAAAILEQIQHLGFTAKHIVITGGEPCMYDLRPLAEVFEPLGYQLQIETSGTFEVLTSDATWVTVSPKVDMPGGYPVLASAMQRANELKYPIAMEKHIEAFDALLAEKPAKANAVICLQPISQRPRATELAIKVCRERNWRLSVQLHKYLAIE

SEQ ID NO: 27599 - protein, 222 aa, unidentified
  source 1..222: note = Aliidiomarina soli
  REGION 1..222: note = tr|A0A432WMW1|A0A432WMW1_9GAMM 7-carboxy-7-deazaguanine synthase OS=Aliidiomarina soli; OX = 1928574 GN=queE PE=3 SV=1
MLAVNELFETIQGEGVFTGVAAIFLRLQGCPVGCPWCDTQHTWDKNNQAQVKPEQLIMKTGDSPSWAGMSEQAVLELIEQQGFTAKHVVITGGEPCMYDLNALTELLHETGYQTQIETSGTFEIKTSAQTWVTVSPKLDMPGGYEVRADAMARANEIKHPIAMQKHIDALDALLERCPVAAGTTICLQPISQRPRATELAIETCRKRNWRLSVQLHKYLAIE

SEQ ID NO: 27600 - protein, 238 aa, Aliidiomarina sp.
  REGION 1..238: note = tr|A0A552X4E8|A0A552X4E8_9GAMM 7-carboxy-7-deazaguanine synthase OS=Aliidiomarina sp. IM1326 OX=2593535 GN=queE PE=3 SV=1
MTDLSLASAVASYAPGVYPVNELFETIQGEGIYTGQPSIFLRLQGCPVGCPWCDTQHTWALEQSDAAPYGEVIAKTEPSPRFVVLNAAQILAKFHERGFTAKHVVITGGEPCMYDLNPLAEVLEAAGYQLQIETSGTFPIQTSAKTWVTVSPKLDMPGGLHVLPEAMARANEIKHPIAMEKHIEALDALLARCPVAEHTVIALQPISQRPRATELAIKTCIERNWRLSVQMHKYLAIE

SEQ ID NO: 27601 - protein, 216 aa, unidentified
  source 1..216: note = Aliifodinibius roseus
  REGION 1..216: note = tr|A0A1M4SI31|A0A1M4SI31_9BACT 7-carboxy-7-deazaguanine synthase OS=Aliifodinibius roseus; OX = 1194090 GN=queE PE=3 SV=1
MFKSRDQLEALIVTDEMNAVEYPLMEDFYTIQGEGAHSGRPAYFIRTAGCDVNCWWCDVRESWDEDAHPRETVGNIVERAKDSGAEFAVITGGEPLLHDLDPMTFKLKQAGIQTHIETSGSSPLSGYLDWITLSPKRFKEPIDDIFPYVDELKVVVLTRKDLEWAEKNAEKCPESTQLLLQPEWEKEGAVELIIDYVKEHPEWGISLQTHKFMGVR

SEQ ID NO: 27602 - protein, 215 aa, unidentified
  source 1..215: note = Aliifodinibius sediminis
  REGION 1..215: note = tr|A0A521B096|A0A521B096_9BACT 7-carboxy-7-deazaguanine synthase OS=Aliifodinibius sediminis OX=1214077 GN=queE PE=3 SV=1
MFKSQVQQTLHMPEKAGAVEYPLMEDFYTIQGEGAHTGRPAYFIRTAGCDVNCWWCDVKESWEEGAHPSESVENIVSRARQSGAEFAVITGGEPLLHDLDALTFQLKKAGLQTHIETSGSSPLSGYLDWITLSPKRFKEPLDEIFPCVDELKVVVLTSKDLEWAEKNAERCPENTQLLLQPEWEKEGAVELIIDYVKANPQWGISLQTHKFMGVR

SEQ ID NO: 27603 - protein, 200 aa, unidentified
  source 1..200: note = Aliifodinibius sp.
  REGION 1..200: note = tr|A0A2A2GFD5|A0A2A2GFD5_9BACT 7-carboxy-7-deazaguanine synthase OS=Aliifodinibius sp. WN023 OX=2032627 GN=queE PE=3 SV=1
MCSVEYPLVEDFYTIQGEGAHSGRPAYFIRTAGCDVNCWWCDVKESWDEDQHPPKTVEEIVEGAKESGAEFAVITGGEPLLHDLDPLTFQLKQAGIQVHIETSGSSPISGYLDWITLSPKRFKEPLDDIFPYVDELKVVVLTNKDLEWAEKNAEKCPDSTQLLLQPEWEKEGAVDLIIDYVKENPQWGISLQTHKFMEVR

SEQ ID NO: 27604 - protein, 227 aa, unidentified
  source 1..227: note = Aliiglaciecola lipolytica
  REGION 1..227: note = tr|K6XQI6|K6XQI6_9ALTE 7-carboxy-7-deazaguanine synthase OS=Aliiglaciecola lipolytica E3 OX=1127673; GN = queE PE=3 SV=1
MQTPTEYKINEVFESIQGEGALTGVPSIFVRLQGCPVGCAWCDTKHTWTLDEQFQVSSEQVMAESGESENWFATSIEQLLNLFDRHQYQAKNIILTGGEPCMYDLRPLCKALFDKGYTVSVETSGTYEIKVTPETWVTVSPKVDMKGGFKVREDAILRANEIKHPVAMEKHIEELENLLVWATQIPAPLVYLQPISQQKRATELAVKTCIAKNWRLSLQTHKFIGIE

SEQ ID NO: 27605 - protein, 227 aa, unidentified
  source 1..227: note = Aliiglaciecola sp.
  REGION 1..227: note = tr|A0A553L168|A0A553L168_9ALTE 7-carboxy-7-deazaguanine synthase OS=Aliiglaciecola sp. M165 OX=2593649 GN=queE PE=3 SV=1
MQSSIEYKINEVFESIQGEGALTGVPSIFVRLQGCPVGCPWCDTKHTWEIKEDLKTSAEEVMAEQSESERWFGHSVDQLLTLFKQHGYTAKNVILTGGEPCMYDLRPMCDALEQYGYSVSVETSGTFEILVSPNTWVTLSPKIDMKGGLEVRQDAVERANEIKHPVAMEKHVTELEKLLEWVPKDAKPLIYLQPISQQKRATDLAVKTCIAKNWRLSLQTHKFIGIE

SEQ ID NO: 27606 - protein, 214 aa, unidentified
  source 1..214: note = Aliikangiella marina
  REGION 1..214: note = tr|A0A545TD14|A0A545TD14_9GAMM 7-carboxy-7-deazaguanine synthase OS=Aliikangiella marina; OX = 1712262 GN=queE PE=3 SV=1
MSRLRITEIFYSLQGESSTIGKPTLFVRLTGCPLRCVWCDTEYAFTGGAYREIADLIKEIESFNPQNICITGGEPLAQKEPCEELMRILCDKGYSVSIETSGAIDVSGVDKRVTKVMDLKAPDSGELAKNRYENLAFLNKTDEVKFVIMSRKDYDWAKMQMDQYQLADKTNVIFSPCFGEINERELAEWIIADNLPVRFQLQMHKLLWDDAAGH

SEQ ID NO: 27607 - protein, 215 aa, unidentified
  source 1..215: note = Aliikangiella sp.
  REGION 1..215: note = tr|A0A545UBS2|A0A545UBS2_9GAMM 7-carboxy-7-deazaguanine synthase OS=Aliikangiella sp. M105 OX=2592383 GN=queE PE=3 SV=1
MLPRLRITEIFYSLQGESSTIGKPTLFVRLTGCPLRCVWCDTEYAFSGGEYWELEELVAKIESYQPQHICVTGGEPLAQRKPCEALMVALCDKGYSVSIETSGAIDVSDVDPRVTKVMDLKAPDSGEMGKNLYSNIQHLDKSDEVKFVIMSRKDYDWAKMQLSQYQLSEKTNVLFSPCFGEINEKELAEWIIADNLPVRFQIQMHKILWDDAAGH

SEQ ID NO: 27608 - protein, 226 aa, Aliivibrio finisterrensis
  REGION 1..226: note = tr|A0A4Q5KWN6|A0A4Q5KWN6_9GAMM 7-carboxy-7-deazaguanine synthase OS=Aliivibrio finisterrensis OX=511998 GN=queE PE=3 SV=1
MSSSTFKINELFETIQGEGTFTGVPSIFLRLQGCPVGCSWCDTKQTWDVELSVQTDLASILAKTEDSPSWTELTSTQIINMLKEQGYTAKHMVITGGEPCMYDLTPLTEELEQHGYRCQIETSGTYPILASENTWVTVSPKINMKGKLPVLENALMRANEIKHPVGTNKDIEQLEALLDGVKLLDDVTIALQPISQKPRATELCIETCIKRNWRLSIQTHKYLAIA

SEQ ID NO: 27609 - protein, 226 aa, Aliivibrio finisterrensis
  REGION 1..226: note = tr|A0A4Q5KK92|A0A4Q5KK92_9GAMM 7-carboxy-7-deazaguanine synthase OS=Aliivibrio finisterrensis OX=511998 GN=queE PE=3 SV=1
MSSSTFKINELFETIQGEGTFTGVPSIFLRLQGCPVGCSWCDTKQTWDVELSDQTDLASILAKTEDSPSWTELTSTQIINMLKEQGYTAKHMVITGGEPCMYDLTPLTEELEQHGYRCQIETSGTYPVLASENTWVTVSPKINMKGKLPVLENALMRANEIKHPVGTNKDIEQLEALLDGVKLLDDVTIALQPISQKPRATELCIETCIKRNWRLSIQTHKYLAIA

SEQ ID NO: 27610 - protein, 226 aa, Aliivibrio fischeri
  REGION 1..226: note = tr|Q5E081|Q5E081_ALIF1 7-carboxy-7-deazaguanine synthase OS=Aliivibrio fischeri (strain ATCC 700601 / ES114) OX=312309 GN=ygcF PE=3 SV=1
MSAPLFKINELFETIQGEGTFTGVPSIFLRLQGCPVGCSWCDTKQTWDVELSDKTDLQTILAKTEDTPSWTELSSTQIIEMLENQGYTAKHMVITGGEPCMYDLTSLTQELEQHGYRCQIETSGTYPILASDDTWVTVSPKINMKGKLPVLPVALSRANEIKHPVGTTKDIEQLDALLEGVELLEDVTIALQPISQKPRATELCIETCIKRNWRLSIQTHKYLAIA

SEQ ID NO: 27611 - protein, 226 aa, Aliivibrio fischeri
  REGION 1..226: note = tr|A0A1E5AT46|A0A1E5AT46_ALIFS 7-carboxy-7-deazaguanine synthase OS=Aliivibrio fischeri; OX = 668 GN=queE PE=3 SV=1
MSAPLFKINELFETIQGEGTFTGVPSIFLRLQGCPVGCSWCDTKQTWDIELSDKTDLQTILAKTEDTPSWTELSSTQIIEMLENQGYTAKHMVITGGEPCMYDLTSLTQELELHGYRCQIETSGTYPILASENTWVTVSPKINMKGKLPVLPVALSRANEIKHPVGTTKDIEQLDALLEGVELLEDVTIALQPISQKPRATELCIETCIKRNWRLSIQTHKYLAIA

SEQ ID NO: 27612 - protein, 226 aa, Aliivibrio logei
  REGION 1..226: note = tr|A0A1B9NU00|A0A1B9NU00_ALILO 7-carboxy-7-deazaguanine synthase OS=Aliivibrio logei; OX = 688 GN=queE PE=3 SV=1
MSSALFKINELFETIQGEGTFTGVPSIFLRLQGCPVGCSWCDTKQTWDVELSDKTDLATILAKTEDAPSWTELTALQIIDMLVQQGYTAKHMVITGGEPCMYDLTSLTEELEKNGYRCQIETSGTYPILTSDNTWVTVSPKINMKGKLPVLDEALMRANEIKHPVGTTKDIEQLEALLDGVNLLTDVTIALQPISQKPRATELCIETCIQKNWRLSIQTHKYLAIA

SEQ ID NO: 27613 - protein, 226 aa, Aliivibrio salmonicida
  REGION 1..226: note = tr|B6ERK1|B6ERK1_ALISL 7-carboxy-7-deazaguanine synthase OS=Aliivibrio salmonicida (strain LFI1238); OX = 316275 GN=queE PE=3 SV=1
MSSALFKINELFETIQGEGTFTGVPSIFLRLQGCPVGCSWCDTKQTWDVELSDKTDLATILAKTEDAPSWTELTALQIIDMLVQQGYTAKHMVITGGEPCMYDLTSLTEELEKNGYRCQIETSGTYPILTSNNTWVTVSPKINMKGKLPVLDEALMRANEIKHPVGTTKDIEQLEALLDGVNLLTDVTIALQPISQKPRATELCIETCIKKNWRLSIQTHKYLAIA

SEQ ID NO: 27614 - protein, 226 aa, Aliivibrio sifiae
  REGION 1..226: note = tr|A0A2S7X7T4|A0A2S7X7T4_9GAMM 7-carboxy-7-deazaguanine synthase OS=Aliivibrio sifiae; OX = 566293 GN=queE PE=3 SV=1
MSAPSFKINELFETIQGEGTFTGVPSIFLRLQGCPVGCSWCDTKQTWDVELSDKTDLATILAKKEDAPSWTELTSTQIIGMLNEQGYTAKHMVITGGEPCMYDLTPLTKELEQHGYRCQIETSGTYPILTSDNTWVTVSPKINMKGKLPVLEEALMRANEIKHPVGTKKDIEQLEALLDGVQLLDDVTIALQPISQKPRATELCIETCIKRNWRLSIQTHKYLAIA

SEQ ID NO: 27615 - protein, 226 aa, Aliivibrio sifiae
  REGION 1..226: note = tr|A0A2S7X345|A0A2S7X345_9GAMM 7-carboxy-7-deazaguanine synthase OS=Aliivibrio sifiae; OX = 566293 GN=queE PE=3 SV=1
MSAPSFKINELFETIQGEGTFTGVPSIFLRLQGCPVGCSWCDTKQTWEVELSDKTDLATILAKKEDAPSWTELTSTQIINMLNEQGYTAKHIVITGGEPCMYNLTPLTEELEQHGYRCQIETSGTYPILTSVSTWVTVSPKINMKGKLPVLEQALMRANEIKHPVGTTKDIEQLDTLLENIKLLDDVTIALQPISQKPRATELCIETCIKRNWRLSIQTHKYLAIA

SEQ ID NO: 27616 - protein, 226 aa, Aliivibrio sp.
  REGION 1..226: note = tr|A0A1B9PNK0|A0A1B9PNK0_9GAMM 7-carboxy-7-deazaguanine synthase OS=Aliivibrio sp. 1S175; OX = 1840087 GN=queE PE=3 SV=1
MSAPSFKINELFETIQGEGTFTGVPSIFLRLQGCPVGCSWCDTKQTWDVELSDKTDLATILAKTEDTPSWTELTSAQIINMLEQQGYTAKHVVITGGEPCMYDLTPLTVELEQHGYRCQIETSGTYPVLTSNDTWVTVSPKINMKGKLPVLEQALMRANEIKHPVGTNKDIEQLEALLDGVNLLSDVTIALQPISQKPRATELCIETCIKKNWRLSIQTHKYLAIA

SEQ ID NO: 27617 - protein, 226 aa, Aliivibrio wodanis
  REGION 1..226: note = tr|A0A090I9Y8|A0A090I9Y8_9GAMM 7-carboxy-7-deazaguanine synthase OS=Aliivibrio wodanis; OX = 80852 GN=queE PE=3 SV=1
MSASSFKINELFETIQGEGTFTGVPSIFLRLQGCPVGCSWCDTKQTWEVELTDQTDLATILSKTEDAPSWTELTSAQIIEMLKQQGYTAKHMVITGGEPCIYDLTALTEELEEHGYRCQIETSGTYPILTSENTWVTVSPKINMKGKLPVLEEALMRANEIKHPVGTTKDIEQLESLIDGVKLLDDVTIALQPISQKPRATELCIETCIKNNWRLSIQTHKYLAIA

SEQ ID NO: 27618 - protein, 237 aa, Alishewanella aestuarii
  REGION 1..237: note = tr|J2IAZ3|J2IAZ3_9ALTE 7-carboxy-7-deazaguanine synthase OS=Alishewanella aestuarii B11 OX=1197174 GN=queE; PE = 3 SV=1
MLWLHQLWRINTRLGRVYQVNEVFQTIQGEGRYTGKPSIFVRLQGCPVGCSWCDTKHTWTLDPELKTSPEAMLAKRSDTPAWAELSPAQLLALFAAEGYQARHVVITGGEPCLYDLYPLCEALHQAGYSTQIETSGTFEVKAPDSTWVTVSPKINMPGGYKVLASALARANEIKHPVAMQKHIEELQALLSEHQLQDKLVYLQPISQQKRATELAIASCIANNWQLSVQVHKYLGIE

SEQ ID NO: 27619 - protein, 221 aa, Alishewanella agri
  REGION 1..221: note = tr|I9P5J5|I9P5J5_9ALTE 7-carboxy-7-deazaguanine synthase OS=Alishewanella agri BL06 OX=1195246 GN=queE; PE = 3 SV=1
MYQVNEVFQTIQGEGRYTGTPAIFVRLQGCPVGCSWCDTKHTWTLDPELAITPDQLLAKRGDSPSWTGITPAALLALFQQQGYQARHVVITGGEPCMFDLTSLCQTLHAAGYSTQIETSGTFEIKAPPDTWVTVSPKLNMPGGYPVLPSALKRADEIKHPVAMQKHVDELVALLDLHQLNGKLVYLQPISQQKRATELAIASCIKHNWRLSVQVHKYLGIE

SEQ ID NO: 27620 - protein, 221 aa, Alishewanella jeotgali
  REGION 1..221: note = tr|H3ZJE6|H3ZJE6_9ALTE 7-carboxy-7-deazaguanine synthase OS=Alishewanella jeotgali KCTC 22429 OX=1129374; GN = queE PE=3 SV=1
MYQVNEVFQTIQGEGRYTGKPSIFVRLQGCPVGCSWCDTKHTWTLDPELKTSPEAILAKRSDTPAWAELSPAQLLALFAAEGYQARHVVITGGEPCLYDLYPLCEALHQAGYSTQIETSGTFEVKAPDSTWVTVSPKINMPGGYKVLASALARANEIKHPVAMQKHIEELQALLSEHQLQDKLVYLQPISQQKRATELAIASCIANNWQLSVQVHKYLGIE

SEQ ID NO: 27621 - protein, 221 aa, Alishewanella sp.
  REGION 1..221: note = tr|A0A1C2C2R5|A0A1C2C2R5_9ALTE 7-carboxy-7-deazaguanine synthase OS=Alishewanella sp. HH-ZS OX=1856684 GN=queE PE=3 SV=1
MYQVNEVFQTIQGEGRYTGKPSIFVRLQGCPVGCSWCDTKHTWTLDPELKTSPEAMLAKRSDTPAWAELSPAQLLALFAAEGYQARHVVITGGEPCLYDLYPLCEALHQAGYSTQIETSGTFEVKAPDSTWVTVSPKINMPGGYKVLASALARANEIKHPVAMQKHIEELQALLSEHQLQDKLVYLQPISQQKRATELAIASCIANNWQLSVQVHKYLGIE

SEQ ID NO: 27622 - protein, 221 aa, Alishewanella sp.
  REGION 1..221: note = tr|A0A258CJG6|A0A258CJG6_9ALTE 7-carboxy-7-deazaguanine synthase OS=Alishewanella sp. 32-51-5 OX=1970315 GN=queE PE=3 SV=1
MYQVNEVFQTIQGEGRYTGTPAIFVRLQGCPVGCSWCDTKHTWTLDPELAITPDQLLAKRGDSPSWTGLTPAALLALFQQQGYQARHVVITGGEPCMVDLTPLCQALHAAGYSTQIETSGTFEIKAPLATWVTVSPKLNMPGGYPVLPSALKRADEIKHPVAMQKHVDELVALLDLHQLNDKLVYLQPISQQKRATELAIASCIKHNWRLSVQVHKYLGIE

SEQ ID NO: 27623 - protein, 211 aa, Alistipes finegoldii
  REGION 1..211: note = tr|A0A174ESJ4|A0A174ESJ4_9BACT 7-carboxy-7-deazaguanine synthase OS=Alistipes finegoldii; OX = 214856 GN=queE PE=3 SV=1
MALKTDIEQLDGGRKLPLVEDFYTIQGEGFHAGKPAYFIRLGGCDVGCRWCDAKYTWNPRLYPPTDVRTVIDRATACPAQAIVITGGEPLLYPLGVLTETLHAKGLEIFLETSGTHPFSGYFDWVCLSPKRQQPPLDEAFGKAHELKVIVGDEADFEWAERNAARVGAGCILYLQPEWSVAERMMPAIVEYAKAHPKWNISIQTHKYMHIP

SEQ ID NO: 27624 - protein, 211 aa, Alistipes finegoldii
  REGION 1..211: note = tr|I3YHS4|I3YHS4_ALIFI 7-carboxy-7-deazaguanine synthase OS=Alistipes finegoldii (strain DSM 17242 / JCM 16770 / AHN 2437 / CCUG 46020 / CIP 107999) OX=679935; GN = que E PE=3 SV=1
MAFTTDTELLDGGRLLPLVEDFYTIQGEGFHAGKPAYFIRLGGCDVGCRWCDAKYTWNPKLYPPTDVRTVIDRALACPAQAIVITGGEPLLYPLGVLTETLHEKGLQIFLETSGTHPFSGYFDWVCLSPKRQQPPLDEALERAHELKVIVESESDFEWAERNAARVRPECMLYLQPEWSVAERVMPAMVEYAKAHPKWNISIQTHKYMHIP

SEQ ID NO: 27625 - protein, 212 aa, Alistipes indistinctus
  REGION 1..212: note = tr|A0A412SKQ5|A0A412SKQ5_9BACT 7-carboxy-7-deazaguanine synthase OS=Alistipes indistinctus OX=626932 GN=queE PE=3 SV=1
MNLQQNNEDLLDGGRRLPLVEDFYTIQGEGFHTGKPAYFIRLGGCDVGCRWCDAKMTWNPKLFPPTEVDTIVERACSYPAQAIVITGGEPSLYPLDYLTDALAKQGLQIFLETSGAHELSGHFDWICLSPKKQQPPVPSIFPKADELKVIIETPGDFAWAEENAAKVGERCRLYLQPEWSRYDGMIEAIVEYAKGNPQWNISVQTHKYMRIP

SEQ ID NO: 27626 - protein, 212 aa, Alistipes indistinctus
  REGION 1..212: note = tr|G5HB50|G5HB50_9BACT 7-carboxy-7-deazaguanine synthase OS=Alistipes indistinctus YIT 12060 OX=742725; GN = queE PE=3 SV=1
MNLQQNNEDLLDGGRRLPLVEDFYTIQGEGFHTGKPAYFIRLGGCDVGCRWCDAKMTWNPKLFPPTEVDTIVERACSYPAQAIVITGGEPSLYPLDYLTDALAKKGLQIFLETSGAHELSGHFDWICLSPKKQQPPVPSVFPKADELKVIIETPGDFAWAEENAAKVGERCRLYLQPEWSRYDGMIEAIVEYAKGNPQWNISVQTHKYMRIP

SEQ ID NO: 27627 - protein, 212 aa, unidentified
  source 1..212: note = Alistipes inops
  REGION 1..212: note = tr|A0A0B0C049|A0A0B0C049_9BACT 7-carboxy-7-deazaguanine synthase OS=Alistipes inops; OX = 1501391 GN=queE PE=3 SV=1
MRSDRGKESSEKGGTALPLAEDFYTIQGEGYQTGTAAYFIRLAGCDVGCPWCDAKYTWNIHRYPVSAVEKVIGRAAASGAPCAVITGGEPLMHPLVPLTEGLKANGLQVFLETSGTHPLQGEFDWICLSPKRQAPPLEEVFQAADELKVVIGNAEDLLWAEQCAARAGKSCRLYLQPEWSRFAEAVRLITEYVKAHPQWKVSLQTHKFMEIP

SEQ ID NO: 27628 - protein, 210 aa, unidentified
  source 1..210: note = Alistipes obesi
  REGION 1..210: note = tr|A0A3D3YNN5|A0A3D3YNN5_9BACT 7-carboxy-7-deazaguanine synthase OS=Alistipes obesi; OX = 1118061 GN=queE PE=3 SV=1
MIDTDPALFDGGRRLPLVEDFYTIQGEGFHAGKPAYFIRLGGCDVGCRWCDAKYTWNPRRYPPVDVQVVIDRALACPARAIVITGGEPLLYPLDILTRTLHDRGLQIFLETSGTHPFSGRFDWVCLSPKRQQPPLDEAFRRAHELKVIVEREDDLQWAEQNAARVGDDCLLYLQPEWSVYERMMPLLVEYAKAHPQWNISIQTHKFMHIP

SEQ ID NO: 27629 - protein, 211 aa, Alistipes onderdonkii; identical to SEQ ID NO: 27623
  REGION 1..211: note = tr|A0A5B4NQ99|A0A5B4NQ99_9BACT 7-carboxy-7-deazaguanine synthase OS=Alistipes onderdonkii; OX = 328813 GN=queE PE=3 SV=1

SEQ ID NO: 27630 - protein, 194 aa, Alistipes onderdonkii
  REGION 1..194: note = tr|A0A4Q5IQH2|A0A4Q5IQH2_9BACT 7-carboxy-7-deazaguanine synthase OS=Alistipes onderdonkii; OX = 328813 GN=queE PE=3 SV=1
MRVNEIFYSIQGEGRYTGTPAIFIRLAGCNLRCDFCDTEHQPYQDLTEEEIMRQIADFPTSHVVITGGEPMLQITQSLIHRLRNGAGKFVQVETNGTIPIKCYLPVDWITCSPKFDFCPHAELRLQRIDELKVVYQGQDMTAYDGIEAKEYYLQPCDFKDEARNAENLAATINYIKSHPKWKLSLQTQKILSVR

SEQ ID NO: 27631 - protein, 211 aa, Alistipes putredinis
  REGION 1..211: note = tr|R7JNH9|R7JNH9_9BACT 7-carboxy-7-deazaguanine synthase OS=Alistipes putredinis CAG:67 OX=1263036 GN=queE; PE = 3 SV=1
MKEATNYDLLDGGRKLPLVEDFYTIQGEGFHTGKPAYFIRLGGCDVGCRWCDAKYTWNPKLYPPTDISEVVRRATSCQAQAIVITGGEPLLYPLGPLTSALKGHGLKIFLETSGSHPFSGYFDWVCLSPKRQQPPLPEAFWRAHELKVIVEREADLQWAERNAEQVGRECKLFLQPEWSVSEEIMPLLVEYVKAHPAWNISIQTHKYMHIP

SEQ ID NO: 27632 - protein, 194 aa, Alistipes putredinis; identical to SEQ ID NO: 27630
  REGION 1..194: note = tr|B0MZT8|B0MZT8_9BACT 7-carboxy-7-deazaguanine synthase OS=Alistipes putredinis DSM 17216 OX=445970; GN = queE PE=3 SV=1

SEQ ID NO: 27633 - protein, 211 aa, Alistipes shahii
  REGION 1..211: note = tr|D4ILP1|D4ILP1_9BACT 7-carboxy-7-deazaguanine synthase OS=Alistipes shahii WAL 8301 OX=717959 GN=queE; PE = 3 SV=1
MAAATDPAWLDGGRMLPLVEDFYTIQGEGFHAGKPAYFIRLGGCDVGCRWCDAKYTWNPKLYPPTDVQTVIDRAMSCPAQAIVITGGEPLLYPLGVLTETLRERGLQIFLETSGSHPFSGVFDWVCLSPKRRQPPLDEAFERADELKVIVESEEDFEWAERNAARVGGKCLLFLQPEWSVAEKVMPAIVEYAKAHPQWNISIQTHKYMHIP

SEQ ID NO: 27634 - protein, 211 aa, Alistipes shahii
  REGION 1..211: note = tr|A0A5B3GCM3|A0A5B3GCM3_9BACT 7-carboxy-7-deazaguanine synthase OS=Alistipes shahii; OX = 328814 GN=queE PE=3 SV=1
MAAATDPAWLDGGRMLPLVEDFYTIQGEGFHAGKPAYFIRLGGCDVGCRWCDAKYTWNPKLYPPTDVQTVIDRATSCPAQAIVITGGEPLLYPLGVLTQTLRERGLQIFLETSGSHPFSGVFDWVCLSPKRRQPPLDEAFERADELKVIVESEEDFEWAERNAARVGGKCLLFLQPEWSVAEKVMPAMVEYAKAHPRWNISIQTHKYMHIP

SEQ ID NO: 27635 - protein, 211 aa, Alistipes sp.
  REGION 1..211: note = tr|A0A4Y1WY50|A0A4Y1WY50_9BACT 7-carboxy-7-deazaguanine synthase OS=Alistipes sp. 5CPEGH6; OX = 2585119 GN=queE PE=3 SV=1
MAAGTDNALLDGGRLLPLVEDFYTIQGEGYHAGKPAYFIRLGGCDVGCSWCDAKYTWNPKLYPPTDVGTVIDRATSCAARAIVITGGEPLIYPLGILTGELRRRGLEIFLETSGSHPFSGVFDWVCLSPKRRQPPLDDAYGRAHELKVIVESEADFEWAERNAARVGRHCRLYLQPEWSVSERVMPAIVEYVKARPEWNISIQTHKYMRIP

SEQ ID NO: 27636 - protein, 211 aa, Alistipes sp.; identical to SEQ ID NO: 27623
  REGION 1..211: note = tr|A0A4Y1WLK4|A0A4Y1WLK4_9BACT 7-carboxy-7-deazaguanine synthase OS=Alistipes sp. 3BBH6; OX = 2585117 GN=queE PE=3 SV=1

SEQ ID NO: 27637 - protein, 211 aa, unidentified
  source 1..211: note = Alistipes timonensis
  REGION 1..211: note = tr|A0A1H4F8B4|A0A1H4F8B4_9BACT 7-carboxy-7-deazaguanine synthase OS=Alistipes timonensis JC136 OX=1033731 GN=queE PE=3 SV=1
MAVTVDSELLDGGRLLPLVEDFYTIQGEGFHAGKPAYFIRLGGCDVGCRWCDAKYTWNPKLYPPTDVRTVIDRATACPAQAIVITGGEPLLYPLDVLTRALRAKGLEIFLETSGSHPFSGVFDWVCLSPKRQQPPLEEAYGRADELKVIVESEADFEWAERNAARVSAKCRLYLQPEWSVAERMMPAMVEYAKANPRWNISIQTHKYMHIP

SEQ ID NO: 27638 - protein, 263 aa, unidentified
  source 1..263: note = Aliterella atlantica
  REGION 1..263: note = tr|A0A0D8ZV87|A0A0D8ZV87_9CYAN 7-carboxy-7-deazaguanine synthase OS=Aliterella atlantica CENA595 OX=1618023 GN=queE PE=3 SV=1
MNINTDRTARLIEVFSAIQGEGLNVGTRQIFIRFAICDLRCSYCDSAHTWVASDECRVEMTPGLRDFAMHPNPVDTDTLLAWVERQNVPGLHDSISLTGGEPLLHAPFLKQFLPQVRLATGLPIYLETGGHRPAQLQTILPYLDSVGMDIKLPSVSGEEHWEEHAKFLQACVRSQVEVFIKIIVSQQTDTADLERAAQLVAAVSPEIPVFLQPVTPLDSESHPNKELILAPTPAQVLDWQAQMKRALKSVRAIPQTHKMLNQL

SEQ ID NO: 27639 - protein, 242 aa, Alkalibacillus haloalkaliphilus
  REGION 1..242: note = tr|A0A511W329|A0A511W329_9BACI 7-carboxy-7-deazaguanine synthase OS=Alkalibacillus haloalkaliphilus OX=94136 GN=queE PE=3 SV=1
MSKIPVLEIFGPTIQGEGMVIGKKTMFVRTAGCDYSCSWCDSAFTWDGSAKDEIVQMTAEDIWNRLKEIGGDLFNHVTISGGNPALLKNLNELINLLKQNEIEVALETQGSRWQDWFTQIDDLTISPKPPSSNMSTDFAILDRIIHNLTDHNRLEQTSLKVVIFDEADYQYAKGIGERYPQIPLYLQVGNRDVHGEDIDNLTSTLLNQYEQLIDRVVQDDELNNVRVLPQLHTLVWGNKRGV

SEQ ID NO: 27640 - protein, 244 aa, unidentified
  source 1..244: note = Alkalicoccus halolimnae
  REGION 1..244: note = tr|A0A5C7FCX3|A0A5C7FCX3_9BACI 7-carboxy-7-deazaguanine synthase OS=Alkalicoccus halolimnae OX=1667239 GN=queE PE=3 SV=1
MSKALPVLEVFGPTFQGEGMVIGKKTMFVRTAGCDYSCSWCDSAFTWDGSAKDEIRRLTPEEVWEELTNLAPNNFSHVTISGGNPALLKHMGSLIELLHENNVEAALETQGSRWQEWFLQVDDLTISPKPPSSLMKTNFTILDDIIDRLTKAGRDGFTSLKVVIFDKKDFDYAKQIHQRYPHIPFYLQVGNEDTGDEKKTEDLTSKLLTKYEELVDWTMDDPETVNVRVLPQLHTLVWGNKRGV

SEQ ID NO: 27641 - protein, 244 aa, unidentified
  source 1..244: note = Alkalicoccus saliphilus
  REGION 1..244: note = tr|A0A2T4U9Z5|A0A2T4U9Z5_9BACI 7-carboxy-7-deazaguanine synthase OS=Alkalicoccus saliphilus OX=200989 GN=queE PE=3 SV=1
MNKTLPVLEIFGPTFQGEGMVIGKKTMFVRTAGCDYSCSWCDSAFTWDGSAKEDIKKLTPDEIWDRLNEEAEGNFSHVTISGGNPALLKHMGAFIDILHTNEVEAALETQGSLWQDWFLKIDDLTISPKPPSSLMKTNFQVLDDIIHRLTEAGKTQQVSLKVVIFNEEDFDYAKNVHQRYPHIPFYLQVGNEDTGEDKNREDLVPRLLSRYESLVDWTMKDSAMNRARVLPQLHTLVWGNARGV

SEQ ID NO: 27642 - protein, 209 aa, Alkalilimnicola ehrlichii
  REGION 1..209: note = tr|Q0ACR1|Q0ACR1_ALKEH 7-carboxy-7-deazaguanine synthase OS=Alkalilimnicola ehrlichii (strain ATCC BAA-1101 / DSM 17681 / MLHE-1) OX=187272 GN=queE PE=3 SV=1
MTYSVHEIHYTLQGEGAQTGRPAVFCRFAGCNLWSGREAHRASAICRFCDTAFVGTGGSGGGRFRSANELAERLAGYWPGGGRPLVVCTGGEPLLQLDSALIDALHRRGFEVAVETNGTRPAPAGLDWICVSPKAGAPLVLTTGDELKLVHPQPGAEPERFQHLAFRHFFLQPMDGPEREANTQACVDYCLAHPQWSLSLQTHKLLGIP

SEQ ID NO: 27643 - protein, 223 aa, Alkalilimnicola ehrlichii
  REGION 1..223: note = tr|A0A3E0X156|A0A3E0X156_9GAMM 7-carboxy-7-deazaguanine synthase OS=Alkalilimnicola ehrlichii OX=351052 GN=queE PE=3 SV=1
MYANSQTATADKPLRITEIFHSLQGESRTIGFPTVFVRLTGCPLRCGYCDSEYAFHGGERMTFEEIEAAVAVYRPRFVTVTGGEPLAQRGCLPLLSRLCDAGYEVSLETSGALDVSHVDPRVVKVVDIKTPGSGECERNRWQNLEHLQPHDQLKFVLCSREDYEWARRILDKHRLSERWEVLFSPSFNDLSATDLADWVVADRLPVRVQIQLHKFLWGDQPGR

SEQ ID NO: 27644 - protein, 221 aa, Alkalimonas amylolytica
  REGION 1..221: note = tr|A0A1H4B6W1|A0A1H4B6W1_ALKAM 7-carboxy-7-deazaguanine synthase OS=Alkalimonas amylolytica OX=152573 GN=queE PE=3 SV=1
MYKVNELFETIQGEGSYTGCPAIFIRLQGCPVGCSWCDTKHTWTVDPEQQIPLTDVLAKTTDTEGWCNLSAEQLLTEFQRQGFRARHVVITGGEPCLYDLNPLCELLHQQGYSTQIETSGTFEVLAPSETWVTVSPKVNMKGGYEVLDSALLRANEIKHPVARERDIEELQQLLQRVPASGRLVYLQPISQKAKATRLAIEQCKQHNWRLSVQVHKYLGIN

SEQ ID NO: 27645 - protein, 221 aa, unidentified
  source 1..221: note = Alkalinema sp.
  REGION 1..221: note = tr|A0A251WHL0|A0A251WHL0_9CYAN 7-carboxy-7-deazaguanine synthase OS=Alkalinema sp. CACIAM 70d OX=1934309 GN=queE PE=3 SV=1
MSSNPSNVVTDDRTVENNHPSELQKLLPIVETFHSVQGEGAWVGANAFFIRLALCDVGCPWCDTKISWSDKRHPRRCVADLVAEAQSCHPSFVVITGGEPLMHDLSELTEALRQAGLQVHLETSGAHPLTGQFDWITLSPKMFKPPVAEIYAHVHELKVVISQPEDFAWAEEQSAKTPESVVRYLQPEWTSAKGQKLVFDYVLAHPQWRISLQTHKLLGVR

SEQ ID NO: 27646 - protein, 210 aa, Alkaliphilus peptidifermentans
  REGION 1..210: note = tr|A0A1G5KLG3|A0A1G5KLG3_9CLOT 7-carboxy-7-deazaguanine synthase OS=Alkaliphilus peptidifermentans DSM 18978 OX=1120976 GN=queE PE=3 SV=1
MLKINEIFLSIQGEGISTGYPTIFVRLTGCNLSCSYCDTVYSHHEGSLMSVEEVVSQIKTYGYKRVCLTGGEPLLQDEVRVLLSRLEDYEVNIETNGSIDINKFPLNPKHRYTMDIKAPSSGASNSIFYENFTNLRKNDEIKIVIGSREDYLWMREIIKKFHQLGVITVSPVFGEIDPQKIINWILEDNLDLRFQLQIHKIIWNPDERGV

SEQ ID NO: 27647 - protein, 209 aa, Alkalispirillum mobile
  REGION 1..209: note = tr|A0A498BRE8|A0A498BRE8_9GAMM 7-carboxy-7-deazaguanine synthase OS=Alkalispirillum mobile OX=85925 GN=queE PE=3 SV=1
MTYSVHEIHYTLQGEGAQAGRPAVFCRFTGCNLWSGREAHRASAICRFCDTEFVGTDGPGGGRFRSPEALAETIAGYWPGGGRPLVVCTGGEPLLQLDEPLIKALQARGFEVAVETNGTRPAPQGLDWICVSPKAGAPLVLICGDELKLVHPQPGAEPERFQHLAFRHFYLQPMDSPEQEANTQACVSYCLAHPQWRLSLQTHKLLGIP

SEQ ID NO: 27648 - protein, 286 aa, unidentified
  source 1..286: note = Alkalitalea saponilacus
  REGION 1..286: note = tr|A0A1T5H8J6|A0A1T5H8J6_9BACT 7-carboxy-7-deazaguanine synthase OS=Alkalitalea saponilacus OX=889453 GN=queE PE=3 SV=1
MSTKIVLANEGVFPITRDVNGAALSQLPATAIPVAGTIQGEGKLAGVPSLFIRFSSCNLRCIWQLPDGSYSRCDTPYASFDTQQVLQLTVAEVIKLVKENLGSIRHVVITGGEPLMQKDALAELAYELKNELYVHLTIETNGSMFNIQAAENIDLFSISPKLANSEPNPEKLKALGLQPSGPLSYHTQRRYNIKALQSYIDICNESNKEMQLKFVIGKPEDEQEIINDFLNQLTGWQPSDIMLMPLGANEAELRQTTPLTLEMAIRNGWRFTPRVHIDIFGSKPGV

SEQ ID NO: 27649 - protein, 233 aa, Alkanindiges illinoisensis
  REGION 1..233: note = tr|A0A4Y7XG43|A0A4Y7XG43_9GAMM 7-carboxy-7-deazaguanine synthase OS=Alkanindiges illinoisensis OX=197183 GN=queE PE=3 SV=1
MRSAQIPVTDPAAGLRLTEIFYSLQGEANESGWPCVFVRLTGCPLRCTYCDTTYSFEGGERVSLQAIMDQVNEFGVRHVCVTGGEPLAQPNCIPLLKQLCDAGLHVSLETSGALSVQAVDPRVSKVMDLKTPSSGEQHRNLMDNLNFLTLHDQIKFVICNREDYDWAKQQLQQYQLDKLVSTVWFSPAFAIDKTKATLPAFARQLADWIVADRLPVRFQLQLHKLLWNDEKGR

SEQ ID NO: 27650 - protein, 233 aa, Alkanindiges sp.
  REGION 1..233: note = tr|A0A1S8CWF7|A0A1S8CWF7_9GAMM 7-carboxy-7-deazaguanine synthase OS=Alkanindiges sp. H1; OX = 1907941 GN=queE PE=3 SV=1
MRSAQIPVTDPAAGLRLTEIFYSLQGEANESGWPCVFVRLTGCPLRCTYCDTTYSFEGGERVSLQAIMDQVNEFGVRHVCVTGGEPLAQPNCIPLLQQLCDAGLQVSLETSGALSVQAVDSRVSKVMDLKTPSSGEQHRNMMENLDFLTQHDQIKFVICNREDYDWAKQQLQQYGLNERVSTVWFSPAFAIDKTRATLPAFARQLADWIVADRLPVRFQLQLHKLLWNDEKGR

SEQ ID NO: 27651 - protein, 222 aa, Allisonella histaminiformans
  REGION 1..222: note = tr|A0A1G5WDA5|A0A1G5WDA5_9FIRM 7-carboxy-7-deazaguanine synthase OS=Allisonella histaminiformans OX=209880 GN=queE PE=3 SV=1
MWPYMKNEFPVVELFDSIDGEGKRTGRMAIFVRFAGCNLRCTYCDTAYALKRSDALEVLTEEELLKRIHNYPWKRITFTGGEPMLQNLLPLCQTLSDEGYDINIETNGAVPLFAHRPEHVFYTMDYKCTDSGMKDHMLLSNFSQLDERDVLKFVVSSEQDLNDMRRIVTGWKGIAPDFYVSPVWGKITPAELVEYVRKYELSSVCVQVQLHKIIWGAERRGV

SEQ ID NO: 27652 - protein, 234 aa, Alloactinosynnema album
  REGION 1..234: note = tr|A0A1H0L9F2|A0A1H0L9F2_9PSEU 7-carboxy-7-deazaguanine synthase OS=Alloactinosynnema album OX=504798 GN=queE PE=3 SV=1
MSTPPLPPGRVEGSAILTEKFESFQGEGPWTGQRCVFVRFSRCNLRCGYCDTPESWDWNRFNPAEVSDRVPVTELVSWVRERGVDMMVITGGEPMLQQPAMTALASGLTNVRVQVETNGTIAPTPELASLVDLWVVSPKLANSGMTYSSRIKADALSTLVATDRAVFKFVVTEPDRDLDEIAQLVEEHRLAPVWVMPEGTTQEKVLAGMDALYGPATDRGWNVSTRLHILTGAR

SEQ ID NO: 27653 - protein, 234 aa, unidentified
  source 1..234: note = Alloactinosynnema iranicum
  REGION 1..234: note = tr|A0A1G6VXQ0|A0A1G6VXQ0_9PSEU 7-carboxy-7-deazaguanine synthase OS=Alloactinosynnema iranicum OX=1271860 GN=queE PE=3 SV=1
MTPLAFLPGRAEGTAVLTEKFESFQGEGPWTGQRCVFIRFSRCNLKCGFCDTPESWDWSRYNPTEVSERVPIADLVTWVRERDVDLVVITGGEPMLQQPAMTALARGLTGVRIQVETNGTMEPTPELASLIDLWVVSPKLANSGMDYSVRIKPPALTALAATGRAVFKFVVTDPGSDLDEIAQLAEECQLEPVWVMPEGTTRETVLAGMDALHGPAAERGWNVSTRLHILAGVR

SEQ ID NO: 27654 - protein, 241 aa, Alloactinosynnema sp.
  REGION 1..241: note = tr|A0A0H5CU39|A0A0H5CU39_9PSEU 7-carboxy-7-deazaguanine synthase OS=Alloactinosynnema sp. L-07 OX=1653480 GN=queE PE=3 SV=1
MERPVTITLADDELLVAETFGPTVQGEGPSMGRRAVFIRLMNCNLTCQDCDTPYTWDDTRFDLDAEGTVASISDLLAWATEQPVDLVVITGGEPLMQQGRLIALVQGLVDAGLQVEIETNGTIAPAPDLLASVTRFNVSPKLSSFGAGMPISKRIKGRVLGHFAASGRAVFKFVVSSTADLDEITELVADHDLAPVYVMPEGRTAEEVTRRLAEIADPAIERGFHLTTRLHVLAWGDQRGR

SEQ ID NO: 27655 - protein, 215 aa, Allochromatium vinosum
  REGION 1..215: note = tr|D3RQ59|D3RQ59_ALLVD 7-carboxy-7-deazaguanine synthase OS=Allochromatium vinosum (strain ATCC 17899 / DSM 180 / NBRC 103801 / NCIMB 10441 / D) OX=572477 GN=queE; PE = 3 SV=1
MSYWVKESFYTLQGEGAQAGRAAVFCRFSGCNLWSGREQDRDRAICRFCDTDFRGTDGEGGGRYRDADVLAEHLRALWPTGAGADASDRPYVVCTGGEPLLQLDAPLIDALHGSGFEVAVETNGTRPAPPGLDWICVSPKAGATTVLIEGDELKLIYPQPGLEPERFEGLGFRHFFLQPMDGPQSNANTRLAVDYCKARPRWRLSLQTHKWLGIP

SEQ ID NO: 27656 - protein, 215 aa, Allochromatium warmingii
  REGION 1..215: note = tr|A0A1H3DAY2|A0A1H3DAY2_ALLWA 7-carboxy-7-deazaguanine synthase OS=Allochromatium warmingii OX=61595 GN=queE PE=3 SV=1
MAYWIKECFYSLQGEGAQSGRAAVFCRFSGCNLWSGREQDRARARCPFCDTDFRGTDGSDGGRYASAAALADRLWALWTAGADTSGQPYVVCTGGEPLLQLDAPLIDALHRHGFTVAVETNGTRPIRSDLQLDWICVSPKAGAPLRVTAGDELKLVYPQAGLDPTSFAALDFRQFWLQPCDGPQHAAHTQLALDYCLAHPRWRLSLQTHKLLGIR

SEQ ID NO: 27657 - protein, 212 aa, unidentified
  source 1..212: note = Allonocardiopsis opalescens
  REGION 1..212: note = tr|A0A2T0Q2J1|A0A2T0Q2J1_9ACTN 7-carboxy-7-deazaguanine synthase OS=Allonocardiopsis opalescens OX=1144618 GN=queE PE=3 SV=1
MYRVKEIFYTLQGEGSHTGRPSVFCRFTSCNLWTGREKDRHRAICKFCDTDFVGTDGPGGGRFRTAEDLAAAVAKTWQGRSHPRSRPYVVCTGGEPLLQLDNEAVNALHTEGLEVAIETNGTRPAPDGIDWICVSPKAGTELVLRSGHDLKLVYPQVGAEPERFEDLDFRRFMLQPMDGPDLAANTQAAIEYCLEHPQWHLSAQTHKTLGIR

SEQ ID NO: 27658 - protein, 193 aa, unidentified
  source 1..193: note = Alloprevotella rava
  REGION 1..193: note = tr|G5GDG5|G5GDG5_9BACT 7-carboxy-7-deazaguanine synthase OS=Alloprevotella rava F0323 OX=679199 GN=queE; PE = 3 SV=1
MTYKINEIFYSLQGEGFWTGTPSIFIRFSGCNLQCAFCDTRHKEGNMMSEEEILNSTKKFPAKHVVLTGGEPSLFVKETLLEKLHAQGKFIAIETNGTHELPKGIDWVTLSPKNNFQQKADLILKHCDELKIVYTKAEFNPYLDIKAKHRYLQPCDTGNLAENKKILQATINFIKANPIWRLSLQTHKIIGVQ

SEQ ID NO: 27659 - protein, 200 aa, unidentified
  source 1..200: note = Alloprevotella sp.
  REGION 1..200: note = tr|A0A328PUM6|A0A328PUM6_9BACT 7-carboxy-7-deazaguanine synthase OS=Alloprevotella sp. E39 OX=2133944 GN=queE PE=3 SV=1
MLKINEIFYSLQGEGYFSGVPAVFVRFSGCNLKCPFCDTLHEEGKEMSVEEIVSVVCQYPALHVVLTGGEPSLFIDSHLIKALHDKQRFVAIETNGTRLVEEKVDWITLSPKLGQAQNAQIQQNKCDELKLVYQNDEQIKRLIKTLEESNFTFPKHLFLQPCDTGISAKNQKIIEDCVSFCKSNPLWRLSLQMHKLIDIK

SEQ ID NO: 27660 - protein, 191 aa, unidentified
  source 1..191: note = Alloprevotella sp.
  REGION 1..191: note = tr|A0A496KW52|A0A496KW52_9BACT 7-carboxy-7-deazaguanine synthase OS=Alloprevotella sp.; OX = 1872471 GN=queE PE=3 SV=1
MKVNEIFYSLQGEGYWTGTPAVFVRLSGCNLKCFFCDTAHETGVQQKEADIVSEVLKYPAHHVVITGGEPSLFLTHSLVEALHQVGKFVAVETNGTHPLPDNVDWITLSPKDAFVPNATPTLTRCNELKVVCDGTPPPTYPNITADHRFLQPCDVGNQQENQRIMAATVNFCLENPEWRLSLQTHKIAGIQ

SEQ ID NO: 27661 - protein, 189 aa, unidentified
  source 1..189: note = Alloprevotella tannerae
  REGION 1..189: note = tr|C9LE55|C9LE55_9BACT 7-carboxy-7-deazaguanine synthase OS=Alloprevotella tannerae ATCC 51259 OX=626522; GN = queE PE=3 SV=1
MTRFKINEIFYSLQGEGFYSGIASIFIRFSGCNLSCSFCDTQHETGELMTQEQILDQVTRFPAKHVVLTGGEPSLFVTKELIDGLHAAGKYVCIETNGLHALPEGIDWVTLSPKTAQTILKTCNELKVVFTDDTFNPHDEIKAAHYFIQPCDMGNSIKNNRILASCISYVKENPRWRLSLQTHKMIGIH

SEQ ID NO: 27662 - protein, 209 aa, unidentified
  source 1..209: note = Unknown
  REGION 1..209: note = tr|A0A1V1PN69|A0A1V1PN69_9PROT 7-carboxy-7-deazaguanine synthase OS=alpha proteobacterium U9-1i OX=1605283 GN=queE PE=3 SV=1
MTYSVKEMFYTLQGEGARAGRPAVFVRFAGCNLWSGREQDRAEAICQFCDTEFVGTDGDGGGKFKTADGLADAAIAKWPGGGAPYVVCTGGEPLLQLDAPLINALHARGFEIAVETNGTIEAPAGIDWICVSPKAHADLVQRVGHELKLVYPQESAAPERYAALAFQHFYLQPMDNAARDANTSAATNYCLDHPQWRLSLQTHKLLGIR

SEQ ID NO: 27663 - protein, 215 aa, unidentified
  source 1..215: note = Unknown
  REGION 1..215: note = tr|J9DJB1|J9DJB1_9PROT 7-carboxy-7-deazaguanine synthase OS=alpha proteobacterium IMCC14465 OX=1220535; GN = queE PE=3 SV=1
MTYSVKEIYYTLQGEGAQSGRPAVFCRFAGCNLWSGLEADRADAACTFCDTDFIGTDGENGGKFTTAEELADKIATLWPDKDALADAYVVFTGGEPLLQLDTTLLEACKAHGFETGVETNGTQIAPANLDWICVSPKPNSPLAQDRGHELKFVYPQDTLSPYEFADYDFEHFFIQPMEVADEEAYHHNIQASIVFCLQNPQWRLSLQTHKIIGIS

SEQ ID NO: 27664 - protein, 211 aa, unidentified
  source 1..211: note = Alphaproteobacteria bacterium
  REGION 1..211: note = tr|A0A2S6RQK8|A0A2S6RQK8_9PROT 7-carboxy-7-deazaguanine synthase OS=Alphaproteobacteria bacterium MarineAlpha6_Bin5 OX=2013092 GN=queE_1 PE=3 SV=1
MYNVKEIYYTLQGEGAFSGRPSVFCRFSGCNLWSGKEKDRKLAKCNFCDTDFVGVNGINGGKFISELELGKKIISLWKSKNINNKPYVVFTGGEPLLQLDKKLINFLKNYNFEIGIETNGTLKLPCEIDWVCVSPKHKDNFILKKGDELKLVFPQKKINPKNLENLKFKYFFLQPMDGPNLKENIKKTYEYCNKNKKWNVSLQLHKMIGIR

SEQ ID NO: 27665 - protein, 213 aa, unidentified
  source 1..213: note = Alphaproteobacteria bacterium
  REGION 1..213: note = tr|A0A1Z8VWC4|A0A1Z8VWC4_9PROT 7-carboxy-7-deazaguanine synthase OS=Alphaproteobacteria bacterium TMED62 OX=1986642 GN=queE PE=3 SV=1
MNNYKTYSIKEIFLTLQGEGHNAGKTAVFCRFSGCNLWNGNEKDRKNAVCSFCDTDFKGVNGINGGKYHLQPLVEKITSLWPKLKRNKFIVFTGGEPLLQLDNKLIKKVKDKGFKVAVETNGTLPVSKLIDWVCVSPKIESKLVVTKGDEIKVVYPQDGINLSVFEKYNFEHFYLQPLDNKNFILNNKKTIEYILKNPKWKLSVQTHKYLKIK

SEQ ID NO: 27666 - protein, 244 aa, unidentified
  source 1..244: note = Altererythrobacter aquimixticola
  REGION 1..244: note = tr|A0A4T3F3G0|A0A4T3F3G0_9SPHN 7-carboxy-7-deazaguanine synthase OS=Altererythrobacter aquimixticola OX=2489173 GN=queE PE=3 SV=1
MPLTLATQAPGEPEIFASVQGEGPSVGRPVAFLRLSRCNLACVWCDTAYTWHFEGDNRPHRDGETYERKANQLTMEVEDVAARIAALGQDRLVITGGEPLLQAGKLADMLAHLPDVSVEIETNGTVKPPARLDVLVDQYNVSPKLAHSGNPPELALIPEMLDHWASEPRAFLKFVIAEPGDVDEVLALRERHHIPSSRIYLMPEGTDSETLRTREAWLAPLCMEHGLRLSDRLHIHLFGDTRGT

SEQ ID NO: 27667 - protein, 245 aa, unidentified
  source 1..245: note = Altererythrobacter atlanticus
  REGION 1..245: note = tr|A0A0F7KPN2|A0A0F7KPN2_9SPHN 7-carboxy-7-deazaguanine synthase OS=Altererythrobacter atlanticus OX=1267766 GN=queE PE=3 SV=1
MPLTLATQAPGEAEIFASIQGEGPSTGKPTAFIRLSRCNLACRWCDTAYTWHFTGDNRPHRNEETFDRKANQLVMEEEEAARRIAELAMPRLVITGGEPLLQAPALSRMIEALPADMAVEIETNGTIAPPERLAGLVDQFNVSPKLAHSGNPADLALIPERLREWAANPRAFFKFVIATPEDVEEVLSLAEIHAIPRNRIWLMAEGTDIATLEAREAWLAEKCIANKLTLSKRLHIQLFGDTRGT

SEQ ID NO: 27668 - protein, 244 aa, Altererythrobacter dongtanensis
  REGION 1..244: note = tr|A0A1B2ACS1|A0A1B2ACS1_9SPHN 7-carboxy-7-deazaguanine synthase OS=Altererythrobacter dongtanensis OX=692370 GN=queE PE=3 SV=1
MNLVLATDDTGGPEIFASLQGEGPSAGKPCSFIRLSRCNLACVWCDTAYTWRFAGDNRPHRDGVAYDRKANQVSLSPLEAARAIDRLAPRRLVITGGEPLLQAAALAEMALLLPDHAIEVETNGTVEPSAKFDAFVEQYTVSPKLAHSGNPADLALPPERLAAWAADTRAWFKFVIAAPEDVAEVRALCDVHHIPAYRVFLMPEGTDSATLRAREQWLAPLCVEHGYRLSDRLHIHLYGDTRGT

SEQ ID NO: 27669 - protein, 244 aa, Altererythrobacter epoxidivorans
  REGION 1..244: note = tr|A0A0M3TAK6|A0A0M3TAK6_9SPHN 7-carboxy-7-deazaguanine synthase OS=Altererythrobacter epoxidivorans OX=361183 GN=queE PE=3 SV=1
MALVLATDDTGGPEIFASLQGEGPSAGMPVAFVRLSRCNLACVWCDTAYTWHFEGDNRPHRSDETYDRKANQVTLEVGEVAQRIAALGQDRLVITGGEPLMQGAALAELAEALPDMAIEIETNGTTKAPVRLDIRVDQFNVSPKLSHSGNPAELALIPERLDAYATDPRAFFKFVIADPSDVDEVLSLHERYRLRPGHVFLMPEGTDSATLREREAWLSELCVQHGFRMSDRLHIHLYGDTRGT

SEQ ID NO: 27670 - protein, 244 aa, Altererythrobacter ishigakiensis
  REGION 1..244: note = tr|A0A562UV19|A0A562UV19_9SPHN 7-carboxy-7-deazaguanine synthase OS=Altererythrobacter ishigakiensis OX=476157 GN=queE PE=3 SV=1
MSLVLATDDTGGPEIFASLQGEGPSTGMPVAFMRLSRCNLACTWCDTAYTWRFEGDNRPHRDGETFERKANQITLELSDAAERIAALGQKRLVITGGEPLLQAGKLAELLELLPDISVEIETNGTVTAPARLDIRVDQYNVSPKLAHSGNDPKLALIPERLDAYATDPRAYFKFVIAEPEDVDEVLALQRRYRFKPGHVFLMPEGADSNTIGSRARWLADLCLQHGFRMSDRLHIHLYGDTRGT

SEQ ID NO: 27671 - protein, 235 aa, Altererythrobacter marensis
  REGION 1..235: note = tr|A0A2W4YQY9|A0A2W4YQY9_9SPHN 7-carboxy-7-deazaguanine synthase OS=Altererythrobacter marensis OX=543877 GN=queE PE=3 SV=1
MAEPEIFASLQGEGPSAGYPCAFIRLSRCNLACHWCDTAYTWHFTGDNRPHRDGLAFERRANQLVLSEEEAAARILALGQNRLVITGGEPLLQGAALARLAALLPDMRIEIETNGTVAPHPALDGQVAQYNISPKLAHSGNPADLALPPERLTAWAAEPRATFKFVIATPDDLAEALALAENYAIPRERIMLMPEGTDSTTLRERERWLAPLALEHGLRLSDRLHIHLYGDTRAT

SEQ ID NO: 27672 - protein, 244 aa, Altererythrobacter marensis
  REGION 1..244: note = tr|A0A0G3X7Q7|A0A0G3X7Q7_9SPHN 7-carboxy-7-deazaguanine synthase OS=Altererythrobacter marensis OX=543877 GN=queE PE=3 SV=1
MPLTLATQSPGEPEIFASLQGEGPSAGMPVAFLRLSRCNLACQWCDTAYTWHFAGDERPHRSGETFDRKTNQIVMGEEDVARRIAALGQNRLVITGGEPLLQAGALATLLEHLPDMAVEVETNGTVAAPPRLDVRIDQYNVSPKLAHSGNPADLALLPERLDAYAADPRAWFKFVIAAPGDVDEVLALKARYRFRPGHVFLMPEGTDSATLRAREEWLAPLCLEHGFRMSDRLHIHLYGDTRGT

SEQ ID NO: 27673 - protein, 248 aa, Altererythrobacter namhicola
  REGION 1..248: note = tr|A0A1C7DB06|A0A1C7DB06_9SPHN 7-carboxy-7-deazaguanine synthase OS=Altererythrobacter namhicola OX=645517 GN=queE PE=3 SV=1
MALTLATITPGDPEIFASIQGEGPSCGAEVAFIRLSRCNLACVWCDTAYTWHWEGDAKKFRRPHRSGETFARAANQVKLDEAEAARLVAATGRKRLVITGGEPLLQGAALARMLQHLPDVEVEIETNGTTTAPPALDVRVTQYNVSPKLAHSGNAPELALLPERLRAYAVDPRAFFKFVVAQPDDVAEVLALSDLYALPKERTYLMPEGTDSAALSARMDWIEPLAAEYGLQVTDRAHIHLFGDTRGT

SEQ ID NO: 27674 - protein, 244 aa, Altererythrobacter sp.
  REGION 1..244: note = tr|A0A420EK93|A0A420EK93_9SPHN 7-carboxy-7-deazaguanine synthase OS=Altererythrobacter sp. HN-Y73 OX=2320269 GN=queE PE=3 SV=1
MPLTLATTTPGEPEIFASLQGEGPSMGKPCTFIRLSRCNLACEWCDTAYTWHFEGDNRPHRRDPTYPRAANQLTLSEEDAARQIAAFGQDRLIITGGEPLLQGAALARMLGHLPGMIVEIETNGSVAPHPALDPLVSQYNVSPKLAHSGNPADLALNPERLAHWTQEPRATFKFVIAEPADVDEVLALQKAHTIPSAKIMLMAEGTEADVLEQRESWLAEICIAQKLTLSKRLHIRLFGDTRGT

SEQ ID NO: 27675 - protein, 244 aa, Altererythrobacter sp.
  REGION 1..244: note = tr|A0A2E1Y802|A0A2E1Y802_9SPHN 7-carboxy-7-deazaguanine synthase OS=Altererythrobacter sp. OX=1872480 GN=queE PE=3 SV=1
MALVLATDDTGGPEIFASVQGEGPSAGMPVAFMRLSRCNLACVWCDTAYTWHFEGDERPHSGGVTYARKPNQVTLPEDEVAAIIQSLGQSRLVITGGEPLLQAPALAKLMELLPDISVEIETNGTTKAPPPLDIRIDQFNVSPKLAHSGNPAELALLPERLDAYATDPRAWFKFVIAEPSDVDEVLALRDRYRFRPGHVFLMPEGTDSETLRAREKWLAGLCVEHGFRMSDRLHIHLFGDTRGT

SEQ ID NO: 27676 - protein, 244 aa, unidentified
  source 1..244: note = Altererythrobacter xiamenensis
  REGION 1..244: note = tr|A0A1Y6EIE7|A0A1Y6EIE7_9SPHN 7-carboxy-7-deazaguanine synthase OS=Altererythrobacter xiamenensis OX=1316679 GN=queE PE=3 SV=1
MPLVLATDDAGGPEIFASLQGEGPSAGTPVAFVRLSRCNLACVWCDTAYTWHFEGDDRPHRDETTFDRKANQVTLDVADVAERIAALGQKRLVITGGEPLLQGPALAELVDALPDMAIEIETNGTTTAPVRLDIRVDQYNVSPKLAHSGNPAELALIDERLDAYATDPRAFFKFVVASPEDVEEVLALHSRYRFRPGHVFLMPEGTDSATLRSREEWLSEICVKKGFRMSDRLHIHLYGDTRGT

SEQ ID NO: 27677 - protein, 239 aa, unidentified
  source 1..239: note = Alteribacillus bidgolensis
  REGION 1..239: note = tr|A0A1G8MK26|A0A1G8MK26_9BACI 7-carboxy-7-deazaguanine synthase OS=Alteribacillus bidgolensis OX=930129 GN=queE PE=3 SV=1
MKKVPVLEIFGPTIQGEGMVIGQKTMFIRTGGCDYRCSWCDSAFTWDGSQQAELLNVDEIIEKLETIGGAAFNHVTISGGNPALHSGLGEVVKMLQEKGIKTAVETQGTIWQHWMKDIDEVTISPKPPSSGMDTNWEQLDEYIRQLNDREDKEVSLKIVIFDDKDLEYAVDVHQRYPHIAMFLQTGNEHLETADNSWLLSHLLNRYEELVEKVIASERLNEVKVLPQLHTLLWGNKQGV

SEQ ID NO: 27678 - protein, 239 aa, unidentified
  source 1..239: note = Alteribacillus iranensis
  REGION 1..239: note = tr|A0A1I2CVZ8|A0A1I2CVZ8_9BACI 7-carboxy-7-deazaguanine synthase OS=Alteribacillus iranensis OX=930128 GN=queE PE=3 SV=1
MKKIPVLEIFGPTIQGEGMVIGQKTMFVRTGGCDYRCSWCDSAFTWDGSQKAELLTAEEIVNRLRETGGTSFNHVTLSGGNPALHQGIEEVIAMLKDEGVRTAVETQGSIWQDWMIDIDDVTISPKPPSSRMKTDWEKLDHYINHLKDRPGKRTSIKVVIFDESDLRYAEAVHSRYPDVPMYLQTGNPHLDAAEGEWLLKQLLLNYEWLVNQVIASDRLNEVKVLPQLHTLLWGNKQGV

SEQ ID NO: 27679 - protein, 239 aa, unidentified
  source 1..239: note = Alteribacillus persepolensis
  REGION 1..239: note = tr|A0A1G8GIT6|A0A1G8GIT6_9BACI 7-carboxy-7-deazaguanine synthase OS=Alteribacillus persepolensis OX=568899 GN=queE PE=3 SV=1
MNKVPVLEIFGPTIQGEGMVVGQKTMFIRTAGCDYRCSWCDSAFTWDGSQKPTLMDADDIVQQLEAIGGRRFNHVTISGGNPALQRGLASVVQALMEKGIKTAVETQGTMWQEWMRDVDDVTVSPKPPSSGMKTNWDQLDYYIQQLRGRSHKQVSLKIVIFNEEDLRYAENVHARYSDIPMFLQTGNDDIETDDNNWLLSHLLKRYEWLVENVIDSETLNEVKVLPQLHTLLWGNKQGV

SEQ ID NO: 27680 - protein, 213 aa, unidentified
  source 1..213: note = Alteromonadaceae bacterium
  REGION 1..213: note = tr|A0A3R8B9K0|A0A3R8B9K0_9ALTE 7-carboxy-7-deazaguanine synthase OS=Alteromonadaceae bacterium TMED101 OX=1986649 GN=queE PE=3 SV=1
MTYSVKEIFYTLQGEGAQAGRPAVFCRFTGCNLWSGLERDRQTATCNFCDTDFVGTDGEGGGKFATPAALVESIVACWPARLNTSAAPYVVFTGGEPLLQLDTRLIEALHEKGFEIAVETNGTLEAPPGIDWICVSPKATAPVTLSSGNELKLVYPQPSAMPDRFSHLQFDYYFLQPMDGPAVRENTQATIDYCKSNPQWRLSIQMHKLVGLP

SEQ ID NO: 27681 - protein, 215 aa, unidentified
  source 1..215: note = Alteromonadaceae bacterium
  REGION 1..215: note = tr|A0A2D9KE80|A0A2D9KE80_9ALTE 7-carboxy-7-deazaguanine synthase OS=Alteromonadaceae bacterium OX=1916082 GN=queE PE=3 SV=1
MFETIQGEGVYTGVPAIFVRLQGCPVGCPWCDTKHTWTLDENLIDSVDAVVNKSEESERFFGISDLGLLALFEQQGYNAKHVVITGGEPCMYDLRGLTELLHERGFTSQIETSGTFEVKCAQQTWVTVSPKVNMKGGYDVLTSALQRANEIKHPIAMQKHVDELDALLAGIDLTDKVVCLQPISQQARATELAIKTCIDRNWRLSLQTHKYVGIA

SEQ ID NO: 27682 - protein, 221 aa, unidentified
  source 1..221: note = Alteromonadales bacterium
  REGION 1..221: note = tr|A0Y004|A0Y004_9GAMM 7-carboxy-7-deazaguanine synthase OS=Alteromonadales bacterium TW-7 OX=156578; GN = queE PE=3 SV=1
MYKINEVFETIQGEASFTGTPSIFLRLQGCPVGCSWCDTKQTWDVDNVYKVSLDETVEKKADSDHWADASAEQVLELFKSRGYTAKHVVITGGEPCMYDLNQVCKLLHDNGFTTQIETSGTFEILAPEQTWVTVSPKINMRGGYEVLTSAMKRANEIKHPVAMQKHVEELEELFAKTGVNPKLVYLQPISQKVSATKLAIDTCIAKNWRLSIQVHKYLGIS

SEQ ID NO: 27683 - protein, 226 aa, unidentified
  source 1..226: note = Alteromonadales bacterium
  REGION 1..226: note = tr|A0A2N0WLI4|A0A2N0WLI4_9GAMM 7-carboxy-7-deazaguanine synthase OS=Alteromonadales bacterium alter-6D02 OX=2058087 GN=queE PE=3 SV=1
MSMIKLPLNEIFESIQGEGSFTGAPSIFVRLQGCPVGCAWCDTKHSWYLNEEDKTSFEQVLAKTGDGDSWCDVEVDQLIAHLLTYKARHIVISGGEPCMYDLVLLTTELEANGFSCQIETSGTFDVKVSDSTHVTVSPKVAMKGGYEILDQALVRANEIKHPVAMSRHIDELDALLARLTPEQLAQKKIYLQPISQQKRATQLAIDTCIERNWWLSIQTHKYLAIQ

SEQ ID NO: 27684 - protein, 214 aa, unidentified
  source 1..214: note = Alteromonas aestuariivivens
  REGION 1..214: note = tr|A0A3D8M621|A0A3D8M621_9ALTE 7-carboxy-7-deazaguanine synthase OS=Alteromonas aestuariivivens OX=1938339 GN=queE PE=3 SV=1
MFETIQGEGVFTGVPSVFVRLQGCPVGCPWCDTKHTWVVNEALATTPTAVLNKSQESEAFFNTSEANLLAEFSRQGYRARHVVITGGEPCMYDLTPLTTLLHQQGFTSQIETSGTFEVLCHPDTWVTVSPKVNMKGGYEVLVSALKRANEIKHPVAMQKHIDELDTLLAQLDTLPVVCLQPISQQQRATDLAIKTCIERNWRLSLQTHKYIGIE

SEQ ID NO: 27685 - protein, 216 aa, unidentified
  source 1..216: note = Alteromonas australica
  REGION 1..216: note = tr|A0A350P5V9|A0A350P5V9_9ALTE 7-carboxy-7-deazaguanine synthase OS=Alteromonas australica OX=589873 GN=queE PE=3 SV=1
MFETIQGEGAHTGIPSIFVRLQGCPVGCPWCDTKHTWTLDDALVTTAQAVIAKNEESEHYFDVNENELLALFEAQGYVAKHVVITGGEPCMYDLIPLTELLHNRGYTTQIETSGTFEVRCDPRTYVTVSPKINMKGGMEVLVSALERANEIKHPIAMQKHIDELDILLEKVSSLDDKQVCLQPISQQARATELAVKTCISRNWRLSLQTHKYIGIE

SEQ ID NO: 27686 - protein, 216 aa, unidentified
  source 1..216: note = Alteromonas australica
  REGION 1..216: note = tr|A0A075NY48|A0A075NY48_9ALTE 7-carboxy-7-deazaguanine synthase OS=Alteromonas australica OX=589873 GN=queE PE=3 SV=1
MFETIQGEGAHTGIPSIFVRLQGCPVGCPWCDTKHTWTLDDALVTTAQAVIAKNEESEHYFDVNENELLALFAAQGYVAKHVVITGGEPCMYDLIPLTELLHNRGYTTQIETSGTFEVRCDPRTYVTVSPKINMKGGMEVLVSALERANEIKHPIAMQKHIDELDILLEKVSSLDGKQVCLQPISQQARATELAVKTCISRNWRLSLQTHKYIGIE

SEQ ID NO: 27687 - protein, 216 aa, unidentified
  source 1..216: note = Alteromonas confluentis
  REGION 1..216: note = tr|A0A1E7ZFH6|A0A1E7ZFH6_9ALTE 7-carboxy-7-deazaguanine synthase OS=Alteromonas confluentis OX=1656094 GN=queE PE=3 SV=1
MFETIQGEGVQTGLPSIFVRLQGCPVGCPWCDTKHTWTLDDAFLTSADAVLDKTQESEAFFACTDGALLEIFAKRGYKARHVVITGGEPCMYDLTSVTSLLHARGFTTQIETSGTFEVLCHEDTWVTVSPKVDMKGGMPILTSALQRANEIKHPVAMQKHVDELDALLARLGDAQPAHICLQPISQQQRATDLAIATCIARNWRLSLQTHKYIGIE

SEQ ID NO: 27688 - protein, 215 aa, unidentified
  source 1..215: note = Alteromonas lipolytica
  REGION 1..215: note = tr|A0A1E8FKZ2|A0A1E8FKZ2_9ALTE 7-carboxy-7-deazaguanine synthase OS=Alteromonas lipolytica OX=1856405 GN=queE PE=3 SV=1
MFETIQGEGVYTGVPAIFVRLQGCPVGCPWCDTKHTWELDENMIDSVEAVITKSGESERYFGISELGLLALFEQQRYQAKHVVLTGGEPCMYDLTDLTRLLHEHGYTTQIETSGTFAVRCAPETWVTVSPKINMKGGYDVLVSALERANEIKHPIAMQKHIDELDELLARASKLPDIICLQPISQQPRATELAIKTCIERNWRLSLQTHKYVGIA

SEQ ID NO: 27689 - protein, 224 aa, Alteromonas macleodii
  REGION 1..224: note = tr|K0EDN8|K0EDN8_ALTMB 7-carboxy-7-deazaguanine synthase OS=Alteromonas macleodii (strain Balearic Sea AD45) OX=1004787 GN=queE PE=3 SV=1
MSTLNINEMFETIQGEGAHTGIPSIFVRLQGCPVGCPWCDTKHTWEIKPDLSVSPQAVITKGEESETYFISSEEALLAEFGKQGYVAKHVVITGGEPCMYDLRPLTSLLHNNGYTTQIETSGTFEVLCDTRTYVTVSPKINMKGGYDVLVSALERANEIKHPIAMQKHIDELDALLASVSSLDGKQVCLQPISQQKRATELAVRTCIERNWRLSLQTHKYIGIE

SEQ ID NO: 27690 - protein, 224 aa, Alteromonas macleodii
  REGION 1..224: note = tr|A0A1E7DIW4|A0A1E7DIW4_ALTMA 7-carboxy-7-deazaguanine synthase OS=Alteromonas macleodii; OX = 28108 GN=queE PE=3 SV=1
MSTLNINEMFETIQGEGAHTGIPSIFVRLQGCPVGCPWCDTKHTWEIKPDLSVSPQAVITKGEESETYFISSEEALLAEFGKQGYVAKHVVITGGEPCMYDLRPLTSLLHDNGYTTQIETSGTFEVLCDTRTYVTVSPKINMKGGYDVLVSALERANEIKHPIAMQKHIDELDALLANVSSLDGKQVCLQPISQQKRATELAVRTCIERNWRLSLQTHKYIGIE

SEQ ID NO: 27691 - protein, 224 aa, Alteromonas marina
  REGION 1..224: note = tr|A0A0B3YFJ7|A0A0B3YFJ7_9ALTE 7-carboxy-7-deazaguanine synthase OS=Alteromonas marina; OX = 203795 GN=queE PE=3 SV=1
MSTLNINEMFETIQGEGAHTGIPSIFVRLQGCPVGCPWCDTKHTWEIKPDLSVSPQAVITKGEESETYFISSEEALLAEFGKQGYVAKHVVITGGEPCMYDLRPLTSLLHDNGYTTQIETSGTFEVLCDTRTYVTVSPKINMKGGYDVLVSALERANEIKHPIAMQKHINELDALLANVSSLDGKQVCLQPISQQKRATELAVRTCIERNWRLSLQTHKYIGIE

SEQ ID NO: 27692 - protein, 224 aa, unidentified
  source 1..224: note = Alteromonas mediterranea
  REGION 1..224: note = tr|S5C043|S5C043_9ALTE 7-carboxy-7-deazaguanine synthase OS=Alteromonas mediterranea UM7 OX=1300258; GN = queE PE=3 SV=1
MSTLNINEMFETIQGEGAHTGVPSIFVRLQGCPVGCPWCDTKHTWEIKPDLSVTPEAVITKGQESETYFISNESDLLTQFGHEGYVAKHVVITGGEPCMYDLRPLTTLLHDKGYTTQIETSGTFEVLCDERTYVTVSPKINMKGGYDVLISALERANEIKHPIAMQKHIDELDALLANVSSLKGKQVCLQPISQQKRATELAVRTCIERNWRLSLQTHKYIGIE

SEQ ID NO: 27693 - protein, 224 aa, unidentified; identical to SEQ ID NO: 27692
  source 1..224: note = Alteromonas mediterranea
  REGION 1..224: note = tr|A0A1J0S2H1|A0A1J0S2H1_9ALTE 7-carboxy-7-deazaguanine synthase OS=Alteromonas mediterranea OX=314275 GN=queE PE=3 SV=1

SEQ ID NO: 27694 - protein, 227 aa, unidentified
  source 1..227: note = Alteromonas naphthalenivorans
  REGION 1..227: note = tr|F5ZDQ3|F5ZDQ3_ALTNA 7-carboxy-7-deazaguanine synthase OS=Alteromonas naphthalenivorans OX=715451; GN = queE PE=3 SV=1
MSKLITLNINEMFETIQGEGAHTGIPSIFVRLQGCPVGCPWCDTKHTWTLDNALVTTAQQVIDKTNESEHFFEIDENKLLSLFSEQGYVAKHVVITGGEPCMYDLRPLTTLLHNNGFSTQIETSGTYEVLCDDRTYVTVSPKINMKGGMPVLLSALERANEIKHPIAMQKHIDELDALLADVSSLAGKQVCLQPISQQPRATELAVQTCIARNWRLSLQTHKYIGIE

SEQ ID NO: 27695 - protein, 216 aa, unidentified
  source 1..216: note = Alteromonas pelagimontana
  REGION 1..216: note = tr|A0A2A6AWJ4|A0A2A6AWJ4_9ALTE 7-carboxy-7-deazaguanine synthase OS=Alteromonas pelagimontana OX=1858656 GN=queE PE=3 SV=1
MFETIQGEGVYTGVPSVFLRLQGCPVGCSWCDTKHTWTLDDAFLTTSDQVIDKKQENEAFFEADAEALLELFAKQGYHAKHVVITGGEPCIYDLSPLTNYLHQHGFTTQIETSGTYEIKCDPATWVTVSPKVNMKGGLPVLESALRRANEIKHPVAMQKHIEELDALLAKIKDDLPAHICLQPISQQERATDLAIRTCIARNWRLSLQTHKYIGIE

SEQ ID NO: 27696 - protein, 221 aa, Alteromonas sp.
  REGION 1..221: note = tr|A0A3N5ZB24|A0A3N5ZB24_9ALTE 7-carboxy-7-deazaguanine synthase OS=Alteromonas sp. U0105; OX = 2259342 GN=queE PE=3 SV=1
MLPINEMFETIQGEGVYTGMPAVFIRLQGCPVGCPWCDTKHTWEVSAENQVSYEDVIVKTTDLPTYFSASETELMGIMKAQGYSARHVVITGGEPCMYDLKVLTKILHDQGYSVQIETSGTFEAKCDERTWVTLSPKVNMKGGYEVLKQVIERADEIKHPVAMEKHIDELDALLAQRSTAIKEVCLQPISQQKRATDLAIRTCIARNWRLSLQTHKYLGIA

SEQ ID NO: 27697 - protein, 227 aa, Alteromonas sp.
  REGION 1..227: note = tr|A0A3S5AUN1|A0A3S5AUN1_9ALTE 7-carboxy-7-deazaguanine synthase OS=Alteromonas sp. 76-1; OX = 2358187 GN=queE PE=3 SV=1
MSKLITLNINEMFETIQGEGAHTGIPSIFVRLQGCPVGCPWCDTKHTWTLDNALVTTAQQVIDKTNESEHFFGIDENKLLSLFSEQGYVAKHVVITGGEPCMYDLRPLTNLLHENGYSTQIETSGTYEVLCDDRTYVTVSPKINMKGGMPVLLSALERANEIKHPIAMQKHIDELDALLADVSSLAGKQVCLQPISQQPRATQLAVQTCIARNWRLSLQTHKYIGIE

SEQ ID NO: 27698 - protein, 191 aa, Alteromonas stellipolaris
  REGION 1..191: note = tr|A0A0S1YLJ8|A0A0S1YLJ8_9ALTE 7-carboxy-7-deazaguanine synthase OS=Alteromonas stellipolaris LMG 21856 OX=1160720 GN=queE PE=3 SV=1
MGCPWCDTKHTWTLDNALVTTAQQVIDKTNESEHFFEIDENKLLSLFSEQGYVAKHVVITGGEPCMYDLRPLTTLLHDSGFSTQIETSGTYEVLCDDRTYVTVSPKINMKGGMPVLLSALERANEIKHPIAMQKHIDELDALLADVSSLAGKQVCLQPISQQPRATELAVQTCIARNWRLSLQTHKYIGIE

SEQ ID NO: 27699 - protein, 209 aa, unidentified
  source 1..209: note = Altibacter sp.
  REGION 1..209: note = tr|A0A2D9N7S7|A0A2D9N7S7_9FLAO 7-carboxy-7-deazaguanine synthase OS=Altibacter sp.; OX = 2024823 GN=queE PE=3 SV=1
MQNEIQVQVEQGVMLPLMEEFYTIQGEGFHKGTAAYFIRIGGCDVGCHWCDVKESWNAAIHPPTSIDAIVKNAELHSNTVVVTGGEPLTWNMGPLTQSLKNKGLQTHIETSGAYPLTGQWDWICLSPKKIKLPKDEIYKAADELKVIVYNKDDFRFAEAQAAQVSSTCILYLQPEWSKRDTVIPLIVDYVMANPKWKVSLQTHKYLNIP

SEQ ID NO: 27700 - protein, 206 aa, Alysiella crassa
  REGION 1..206: note = tr|A0A376BSA5|A0A376BSA5_9NEIS 7-carboxy-7-deazaguanine synthase OS=Alysiella crassa; OX = 153491 GN=queE PE=3 SV=1
MSSEPIYRIVEIFETLQGEGYNTGMPSVFIRFGKCNLACYWCDTNYNEFGAMSLTQIMTKVHEYSAKNIIITGGEPTIQPQIELLLNQLKSEGYFLAIETNGLKDVPPQIDYIATSPKRLYAEAYEKRCLKQADEVRIVVDNDEILAFCEHIEQKIAAKRYYLSPCEINGEMNILATITALGQLNARVGKPHWQLSIQTHKLCGIE

SEQ ID NO: 27701 - protein, 205 aa, Alysiella filiformis
  REGION 1..205: note = tr|A0A286ED90|A0A286ED90_9NEIS 7-carboxy-7-deazaguanine synthase OS=Alysiella filiformis DSM 16848 OX=1120981 GN=queE PE=3 SV=1
MSEPTYRIVEIFETLQGEGYNTGMPSVFIRFGKCNLACHWCDTNYNEFGFMSLSQIMQKVHQFAARNIIITGGEPTIQPQIEILLNQLKSESYFIAIETNGLKDVPAQIDYVATSPKRLYAQAYEKRCLKRADEVRIVVDGDDVFDFCEQIEQKIQSPRYYLSPCEHHGEMNVLQTIALLGKLNARVAKPHWQLSIQTHKLCGID

SEQ ID NO: 27702 - protein, 223 aa, unidentified
  source 1..223: note = Amantichitinum ursilacus
  REGION 1..223: note = tr|A0A0N0GN47|A0A0N0GN47_9NEIS 7-carboxy-7-deazaguanine synthase OS=Amantichitinum ursilacus OX=857265 GN=queE PE=3 SV=1
MTTIMTQTPLPPSVRITEIFFSLQGETSRMGLPTVFVRLTGCPLRCGYCDSAYAFHGGQTLSFDAILEQVASYGARTVCVTGGEPLAQKHSLALLRALCDAGYDVSLETSGALAIDDVDARVSRIVDIKTPGSGELDKMRWENLDVIKPGDEIKFVLVDRADYEWARDLLQTRQLAAKAPVLFSPVWETLKPTDLADWVIQDKLPVRMQVQLHKILWGDRPGV

SEQ ID NO: 27703 - protein, 251 aa, Ammonifex degensii
  REGION 1..251: note = tr|C9RBW4|C9RBW4_AMMDK 7-carboxy-7-deazaguanine synthase OS=Ammonifex degensii (strain DSM 10501 / KC4); OX = 429009 GN=queE PE=3 SV=1
MQGEGSAVALAPLREIFSSVQGEGPYVGVRHLFVRFAGCNLTCRYCDTPRDIPATCRVEVVAGRQHFFHLPNPLTPEEVVLLVSNLLRQLRHGAVALTGGEPLLYPAFLRELLPALRQIGCRVYLETNGTLPYALEEVADLVDVVAMDLKLPSSTGLKPYWSEHEEFLAKLKGKEVILKAVVSRQATREEVERAGELAEKAGAVLVLQPVTTKNPNFRPSGMRLLEMQEWALGKTSDVRLIPQVHKFCGWL

SEQ ID NO: 27704 - protein, 244 aa, Ammonifex sp.
  REGION 1..244: note = tr|A0A3A6MTR8|A0A3A6MTR8_9THEO 7-carboxy-7-deazaguanine synthase OS=Ammonifex sp.; OX = 1872493 GN=queE PE=3 SV=1
MVAPVILREIFSSIQGEGPYVGCRHLFVRFVGCNLACAYCDTPREVPMKCRVEMKPGTGNFVTIPNPLTPEEVGVLISGLNVARHHAVSLTGGEPLLNPDFIRELIPLLHGAHRGIYLETNGTLVEELEAVVDLVDVISMDIKLPTATGMEALWEVHRRFLQIARTKEVILKAVVAAETPPEEVLAAAELARTAGSVLVLQPVTGRAPEESPAPAELLKLQARALEITGDVRVIPQVHRLCGML

SEQ ID NO: 27705 - protein, 251 aa, Ammonifex thiophilus
  REGION 1..251: note = tr|A0A3D8P464|A0A3D8P464_9THEO 7-carboxy-7-deazaguanine synthase OS=Ammonifex thiophilus; OX = 444093 GN=queE PE=3 SV=1
MQGEGSAVALAPLREIFSSVQGEGPYVGTRHLFVRFAGCNLACRYCDTPRDTPATCRVELVAGRQRFFHLPNPLTPEEVVLLVVNLLRQLRHGAVALTGGEPLLYPTFLRELLPALRQVGCRIYLETNGTLPHALEEVVDLVDIVAMDLKLPSSTGLRSYWSEHEEFLARLEGKEVILKAVVSRQTSKEEVERAGELAEKARAVLVLQPVTTRDPNSRPSGMRLLEMQEWALRKTSDVRLIPQVHKICGWL

SEQ ID NO: 27706 - protein, 238 aa, Ammoniphilus oxalaticus
  REGION 1..238: note = tr|A0A419SLY1|A0A419SLY1_9BACL 7-carboxy-7-deazaguanine synthase OS=Ammoniphilus oxalaticus OX=66863 GN=queE PE=3 SV=1
MDGRIMTKQSRVLPMVEIFQTVEGEGLKAGFPTTFVRLYNCNLRCKWCDTTYSYAPHQPEFYATIEEIVEQVVQLENPSICLTGGEPLMHGDKSAALIQALAEQPVIEEIHIETNGAIDLTPFCALRATNTDVREKVRFIMDVKLRSSGEKEAMVWENFPLLSGQDEIKFVIGDEREFKEAVEVIESYYEQGQLLFSPVWEQLAPAALVEMILASPYKRAKLSLQTHKYIWHPEQKGV

SEQ ID NO: 27707 - protein, 237 aa, Ammoniphilus sp.
  REGION 1..237: note = tr|A0A4Q1SS95|A0A4Q1SS95_9BACL 7-carboxy-7-deazaguanine synthase OS=Ammoniphilus sp. CFH 90114 OX=2493665 GN=queE PE=3 SV=1
MDGRLMEMTMKLPMVEIFETVEGEGLKAGFLTTFVRLYNCNLRCTWCDTKYSYAPHSPEFFATIEEITEQVRKFGNPSICLTGGEPLMHGSKSLALIAALAELPHVEDIHIETNGAILLRPFHELRESHHLVKEKVRFVLDYKLTSSGETQSMIMENFHYLGSRDEIKFVVGNAAEFAEASRIIEEFYQQGQILFSPVWDQLAPAELVKLMLQSPFKQAKLSLQTHKYIWHPDTKGV

SEQ ID NO: 27708 - protein, 242 aa, unidentified
  source 1..242: note = Amphibacillus marinus
  REGION 1..242: note = tr|A0A1H8H7Y4|A0A1H8H7Y4_9BACI 7-carboxy-7-deazaguanine synthase OS=Amphibacillus marinus; OX = 872970 GN=queE PE=3 SV=1
MAQFPVLEIFGPTIQGEGMVAGRKTMFIRTAGCDYSCSWCDSAFTWDGSAKDDIEMLSSETIIERLEALGGDQFNHVTVSGGNPALLKHLDELIEQLHKRGIQVALETQGSRWQPWFGKLDDLTISPKPPSSNMQTNWETLDTIIDNLIEQERLHHISLKVVIFNDGDFSYAEQVHKRYPQVPFYLQVGNDDLTETDDSQLALKLLSQYEWLINKTLASATLNSARVLPQLHALIWGNKRGV

SEQ ID NO: 27709 - protein, 212 aa, unidentified
  source 1..212: note = Amphiplicatus metriothermophilus
  REGION 1..212: note = tr|A0A239PPR8|A0A239PPR8_9PROT 7-carboxy-7-deazaguanine synthase OS=Amphiplicatus metriothermophilus OX=1519374 GN=queE PE=3 SV=1
MTTYSVKERYYTLQGEGAQAGRAAVFLRFAGCNLWTGLEKDRDSADCRFCDTDFVGTDGPGGGRFRSADALADHVAAAWPAGAGGRPLVVCTGGEPLLQLDAPLIDALHARGFEVAVETNGTIAAPAGLDWICVSPKAGAPLVQTEGDELKLVFPQDGAPPAAFERLRFKRFFLQPMDGPEVSRHTAAAVEYCKAHPQWRLSLQTHKLIGIP

SEQ ID NO: 27710 - protein, 216 aa, Amphritea atlantica
  REGION 1..216: note = tr|A0A1H9FLI3|A0A1H9FLI3_9GAMM 7-carboxy-7-deazaguanine synthase OS=Amphritea atlantica; OX = 355243 GN=queE PE=3 SV=1
MSKIYSVKEMFYTLQGEGAQAGRPAVFCRFTGCNLWSGREQDRSKAVCDFCDTDFIGTDGQNGGKFQSAEALVAAIRGFWPTGKETTQGRPYVVCTGGEPLLQLDQPLIDALHQQGFEVAVETNGTLPVPEAVDWICVSPKADAALIQQSGDELKLVYPQPLAQPEQFIHLPFKHFYLQPMDGPMQRIHTQDCIRYCLANPQWKLSLQTHKLLGID

SEQ ID NO: 27711 - protein, 209 aa, Amphritea balenae
  REGION 1..209: note = tr|A0A3P1SLG2|A0A3P1SLG2_9GAMM 7-carboxy-7-deazaguanine synthase OS=Amphritea balenae; OX = 452629 GN=queE PE=3 SV=1
MYSVKEMFYTLQGEGAQAGRPAVFCRFTGCNLWSGREQDRSKAVCDFCDTDFIGTDGQNGGKFHSAESLAKAVRQLWPGDKGQPYVVCTGGEPLLQLDPQLITAFHSEGLEIAIETNGTLPLPEGIDWVCVSPKADSKIVVTDGDELKLVYPQPLALPETFDKLNFKHFYLQPMDGPMQSMNSSDCIQYCLNNPQWKLSLQTHKLLGID

SEQ ID NO: 27712 - protein, 207 aa, Amphritea sp.
  REGION 1..207: note = tr|A0A430KWB9|A0A430KWB9_9GAMM 7-carboxy-7-deazaguanine synthase OS=Amphritea sp. MCCC 1K03512 OX=2490544 GN=queE PE=3 SV=1
MFYTLQGEGAQAGRPAVFCRFSGCNLWSGREQDRHKAVCDFCDTDFVGTDGQNGGKFNSAEALAKAVRSFWPELPDTQQGKPYVVCTGGEPLLQLDTALIDALHQEDFEIAVETNGTLAVPASIDWICVSPKADAELVQLSGDELKLVYPQPLAQPEQFQSLAFSHFYLQPMDGPMQPMNTRDTIQFCLQHPQWKLSLQTHKLLGID

SEQ ID NO: 27713 - protein, 242 aa, Amycolatopsis alba
  REGION 1..242: note = tr|A0A229RBY5|A0A229RBY5_9PSEU 7-carboxy-7-deazaguanine synthase OS=Amycolatopsis alba DSM 44262 OX=1125972 GN=queE PE=3 SV=1
MKPPTVPAPDRDLVVNETFGPTFQGEGPSTGRYAHFIRLFGCHLSCTWCDTPHTHDPTRYDLTAEQRILSIDDILSWLAAAPVDLLVITGGEPMLQPRVLERLLLAIRDRSLATDIEIEIETSGTIPPTDLLTAAATRFNVSPKLAHSGLRRHQRIRPAVLRHLAGTGKAVWKFVVQEIDDLDEVQELTEAYDLHPVWIMPEGTDSSTVLTRMRLLAEPVLSRRWHLSPRLHTLLWENDRGR

SEQ ID NO: 27714 - protein, 231 aa, unidentified
  source 1..231: note = Amycolatopsis albispora
  REGION 1..231: note = tr|A0A344LLH1|A0A344LLH1_9PSEU 7-carboxy-7-deazaguanine synthase OS=Amycolatopsis albispora OX=1804986 GN=queE PE=3 SV=1
MTLAPERVEGSAILTEKFESFQGEGPWTGQRCVFVRFSRCNLRCGYCDTPESWDWSRYNPVEVSDRVPVAELVSWVRERGVDMMVITGGEPMLQQPAMTALARGLADIRVQVETNGTVAPTPELTSLVDLWVVSPKLANSGMTYSTRIKPEALSALVATDRAVFKFVVTEPDRDLDEIAQLVEEHHLAPVWVMPEGTTQEKVLAGMDALYGRATERGWNVSTRLHILTGAR

SEQ ID NO: 27715 - protein, 219 aa, unidentified
  source 1..219: note = Amycolatopsis antarctica
  REGION 1..219: note = tr|A0A263CXY0|A0A263CXY0_9PSEU 7-carboxy-7-deazaguanine synthase OS=Amycolatopsis antarctica OX=1854586 GN=queE PE=3 SV=1
MLTEKFESFQGEGPWTGQRCVFVRFSRCNLRCGFCDTPESWDWSRYNPAEVSDRVPISELVSWVRERGVDMMVITGGEPMLQQPAMTALARGLAKVRVQVETNGTVAPTPELAALVDLWGVSPKLANSGMTYSTRIKPEALSALVATDRAVFKFVVTEPERDLDEIARLVEEHRLAPVWVMPEGTTQEKVLAGMNALYGPATDRGWNVSTRLHILTGAR

SEQ ID NO: 27716 - protein, 239 aa, unidentified
  source 1..239: note = Amycolatopsis cihanbeyliensis
  REGION 1..239: note = tr|A0A542DPP9|A0A542DPP9_9PSEU 7-carboxy-7-deazaguanine synthase OS=Amycolatopsis cihanbeyliensis OX=1128664 GN=queE PE=3 SV=1
MTTTLLPLRDALLITETFGPTFQGEGPSCGQPAIFIRTSRCNLTCDWCDEPRTWDHSRFNLAEHTSWQSIADLTDWVLSYDTDLVVITGGEPLLQQYRLVPLVAALLEAGRRVEFETNGTIVPVQDVRLDQVQFNVSPKLASSGIPAQRRIVPEALNALPQTNTVFKFVITAEHREADLAEADHLVDTYGLRRVWLMPEGTTRDAVTSGLQALAEPALKRGWGLTTRLHVQLWENAHGR

SEQ ID NO: 27717 - protein, 240 aa, Amycolatopsis coloradensis
  REGION 1..240: note = tr|A0A1R0L074|A0A1R0L074_9PSEU 7-carboxy-7-deazaguanine synthase OS=Amycolatopsis coloradensis OX=76021 GN=queE PE=3 SV=1
MKPPVVSDVDRDLVVNEAFGPTFQGEGPSTGRYAHFIRLFGCHLSCTWCDTPQTHDPARHDLAAEQRILSIEDILSWLASTPADLLVITGGEPLLQPRALERLLCAIRERELATDVEIETSGTIAPTDVLISAVTRFNVSPKLAHSGLRRRQRIRPAVLRDLAGSGKAVWKFVVQQVDDLDEVQELVGTYGLHPVWIMPEGTDSSTVLARMRLLADPVLARRWHLSTRLHTLLWENSRGR

SEQ ID NO: 27718 - protein, 244 aa, Amycolatopsis decaplanina
  REGION 1..244: note = tr|M2Y0E8|M2Y0E8_9PSEU 7-carboxy-7-deazaguanine synthase OS=Amycolatopsis decaplanina DSM 44594 OX=1284240; GN = queE PE=3 SV=1
MVPMIPKQATGVESLVVSEIFGPTFQGEGVSTGRHASFVRLGGCDLHCSWCDSPYTWDSSRFDLRAELARRPVADILQDVDERGAALTVLTGGEPLLHQRQRGWGTLLRGLTTRGRELEIETNGTKAPDPETVENTHRFTVSPKLAHSGDPQEMRVRPNALKAFVDSGKASFKFVVASVHDLPEVDLLVTTVGIPPERVWIMPEGTGSDVILARSQELADSILQRGYNFSSRLHVLLWADERKR

SEQ ID NO: 27719 - protein, 240 aa, Amycolatopsis japonica
  REGION 1..240: note = tr|A0A075UH28|A0A075UH28_9PSEU 7-carboxy-7-deazaguanine synthase OS=Amycolatopsis japonica OX=208439 GN=queE PE=3 SV=1
MKPPAVSDVARDLVVNETFGPTFQGEGPSTGRYAHFIRLFGCHLSCAWCDTPQTHDPARYDLAAEQQVLSIDDILSWLASTPAELLVITGGEPLLQPRALERLLCTIRERALAADIEIETSGTIPPTDLLTSAVTRFNVSPKLAHSGLRRHQRVRPAVLRHFAGTGKAIWKFVVQETGDLDEVQELVGTYDLKPVWIMPEGTDSATVLARMRLLAEPVLARRWHLSTRLHTLLWENDRGH

SEQ ID NO: 27720 - protein, 240 aa, Amycolatopsis keratiniphila
  REGION 1..240: note = tr|A0A1H2JC14|A0A1H2JC14_9PSEU 7-carboxy-7-deazaguanine synthase OS=Amycolatopsis keratiniphila OX=129921 GN=queE PE=3 SV=1
MKPPAVSDVARDLVVNETFGPTFQGEGPSTGRYAHFIRLFGCHLSCAWCDTPQTHDPARYDLAAEQQVLSIDDILSWLASTPAELLVITGGEPLLQPRALERLLCTIREHVLAADIEIETSGTIPPTDLLTSAVTRFNVSPKLAHSGLHRHQRVRPAALRHFASTGKAIWKFVVQETGDLDEVQELVGTYDLKPVWIMPEGADSATVLARMRLLAEPVLARRWHLSTRLHTLLWENDRGR

SEQ ID NO: 27721 - protein, 213 aa, Amycolatopsis marina
  REGION 1..213: note = tr|A0A1I1BX63|A0A1I1BX63_9PSEU 7-carboxy-7-deazaguanine synthase OS=Amycolatopsis marina; OX = 490629 GN=queE PE=3 SV=1
MTYQVKEIFYTLQGEGSHAGRPAVFCRFAACNLWSGRESSRASAICQFCDTDFVGTDGPGGGAFRTSADLVQAITTTWQGDAHPRAKPFVVCTGGEPLLQVDGELVNGLHDAGFEVAVETNGTKPAPKGLDWICVSPKANTELVLTAGDELKLVFPQEGADPAGYEELDFPSLLLQPMDGPHLEEYTKRAIEYCLEHPQWRLSVQNHKFIGIR

SEQ ID NO: 27722 - protein, 240 aa, Amycolatopsis marina
  REGION 1..240: note = tr|A0A1I1BLR7|A0A1I1BLR7_9PSEU 7-carboxy-7-deazaguanine synthase OS=Amycolatopsis marina; OX = 490629 GN=queE PE=3 SV=1
MKPPLVSDVDRDLVVNETFGPTFQGEGPSTGRYAHFIRLFGCHLSCDWSDSPETHDPNRYDLNAEQQILSIEDILSWLAAGPADLLVITGGEPLLQPHVLGRLVCAIRQRALAADIEIETSGTIAPTDMITSAVTRFNVSPKLAHSGLRRHQRIRPAVLRDLADSGKAIWKFVVQEIDDLDEIQELVGTYGLHPVWVMPEGTDSATVLARMRMLADPVLARRWHLSTRLHTLLWENDRGR

SEQ ID NO: 27723 - protein, 240 aa, Amycolatopsis orientalis
  REGION 1..240: note = tr|A0A193C9Y7|A0A193C9Y7_AMYOR 7-carboxy-7-deazaguanine synthase OS=Amycolatopsis orientalis OX=31958 GN=queE PE=3 SV=1
MKLPAVSDVDRDLVVNETFGPTFQGEGPSTGRYAHFIRLFGCHLSCAWCDTPQTHDAIRYDLAAEQRTLSIEDMLSWLAADPADLLVITGGEPLLQARAIERLLRAIRERSLATDIEIETSGTIAPTDLLTSAVTRFNVSPKLAHSGLRRRQRIRPAVLRDLAGTGKAVWKFVVQQVDDLDEVQELVGTYGLHPVWIMPEGTDRSTVLARMRLLADPVLARRWHLSTRLHTLLWENDRGR

SEQ ID NO: 27724 - protein, 237 aa, Amycolatopsis rubida
  REGION 1..237: note = tr|A0A1I5WK30|A0A1I5WK30_9PSEU 7-carboxy-7-deazaguanine synthase OS=Amycolatopsis rubida; OX = 112413 GN=queE PE=3 SV=1
MTITLADDELLVAERFGPTVQGEGPSTGRRAVFVRLMNCNLTCKTCDTPYTWDDSRFDLDAEATVTSVSDLLAWATAQPVDLVVITGGEPLIQQRRLIALAQGLVDAGLRVEIETNGTIAPAPDLLAWVSQFNVSPKLSTFGAGMPASKRIKRRVLGHFAVSGRAVFKFVVSSIADLDEITELVSSHDLAPVYVMPEGRTAEEVTRRLAEIADPAIERGFHLSTRLHLLTWGDQRGR

SEQ ID NO: 27725 - protein, 234 aa, Amycolatopsis saalfeldensis
  REGION 1..234: note = tr|A0A1H8YMG8|A0A1H8YMG8_9PSEU 7-carboxy-7-deazaguanine synthase OS=Amycolatopsis saalfeldensis OX=394193 GN=queE PE=3 SV=1
MNTLALAPERVEGSAILTEKFESFQGEGPWTGQRCVFVRFSRCNLKCGFCDTPESWDWSRYNPSEASEKVPVTELVSWVRDRAVDMMVITGGEPMLQQPAMAALARGAKGIRVQVETNGTLAPTPELASRVDLWVVSPKLANSGMNYSARIKPDALAALVTTGRAAFKFVVSDPDRDLDEIAQLVTEYGLGPVWVMPEGTTREKVLAGMDALYTPATERGWNVSTRLHILTGAR

SEQ ID NO: 27726 - protein, 221 aa, Amycolatopsis sp.
  REGION 1..221: note = tr|A0A229TFX7|A0A229TFX7_9PSEU 7-carboxy-7-deazaguanine synthase OS=Amycolatopsis sp. H5; OX = 1905142 GN=queE PE=3 SV=1
MQGEGPSAGRRASFVRLGGCNLACGWCDTPYTWDGNRFDLRAELARQPVEAIVDRALAGSPELVVISGGEPLLHQLQPAWTRMLTMLRAAGADIEVETNGTIVPTAATLEPDLAVRFNVSPKLAHSGDPAARRIRPDVLAAFVASGRANFKFVCATPDDVDEAAELADRYHLDAPVWISPEGTTVEAVLIHTKLIADRVIERGFNLGTRLHVLAWGNERGR

SEQ ID NO: 27727 - protein, 249 aa, Amycolatopsis sp.
  REGION 1..249: note = tr|A0A2K8MCF1|A0A2K8MCF1_9PSEU 7-carboxy-7-deazaguanine synthase OS=Amycolatopsis sp. AA4; OX = 1896961 GN=queE PE=3 SV=1
MGRVRPGRAERSMTITLADDELLVAERFGPTVQGEGPSIGRRAVFIRLMNCNLTCKNCDTPYTWDRTRFDLDAEGTVASISDLLAWVTVQSVDLVVITGGEPLMQQRSLTALAQGLADAGLEVEVETNGTIVPAPDLLAWVTRFNVSPKLSSFGAGMPISKRIKGRVLGHFAASGLAVFKFVVSSIADLDEITELVADHDLAPVYVMPEGRTAEEVTRRLAEIAEPAIERGFHLTTRLHVLVWGDQRGR

SEQ ID NO: 27728 - protein, 239 aa, Amycolatopsis sulphurea
  REGION 1..239: note = tr|A0A2A9FH04|A0A2A9FH04_9PSEU 7-carboxy-7-deazaguanine synthase OS=Amycolatopsis sulphurea OX=76022 GN=queE PE=3 SV=1
MKLPDVSDADGGLVVNETFGPTFQGEGPSTGRYAHFIRLFGCHLSCAWCDSPHTHDTRYDLDAEQRVLSIEDILSWLAADPADLLVITGGEPLLQAHLLGRLLCAIRERALATEIEIETSGTIAPTNMITSAVKRFNVSPKLAHSGLRRHQRIRPTVLRDFAEGGKAIWKFVVQELADLAEIQELADTYGLHPVWIMPEGTDSTTVLARMRMLADPVLARRWRLSTRLHTLLWENDRGR

SEQ ID NO: 27729 - protein, 248 aa, Amycolatopsis thailandensis
  REGION 1..248: note = tr|A0A229RUW3|A0A229RUW3_9PSEU 7-carboxy-7-deazaguanine synthase OS=Amycolatopsis thailandensis OX=589330 GN=queE PE=3 SV=1
MTTPRTLPLAPAHPGDRARLIVAECFGIQTPTFQGEGPSCGQPALFIRLSRCNLTCARCDTKYTWDWTTYDPRAESTRRSGADLADWATTSPVDLVVITGGEPLIQQRGLIPVVHRLLESGKRIEVETNGTLPPDPALLVEGVTFNVSPKLASFGVDERRSIIPHALDAFAASGRAVFKFVASTRPDLDRIADLADTHHLAPIWVMPEGASDTEIAARTRDLAGAVAARRWNFTTRLHIHAFDGARGR

SEQ ID NO: 27730 - protein, 211 aa, Amycolatopsis xylanica
  REGION 1..211: note = tr|A0A1H3PBT9|A0A1H3PBT9_9PSEU 7-carboxy-7-deazaguanine synthase OS=Amycolatopsis xylanica OX=589385 GN=queE PE=3 SV=1
MTYHIKEIFYTLQGEGRHAGRPAVFCRFSRCNLWTGLEKDRHRAICQFCDTDFVGTDGENGGKFRTPEALAEAVESLWPSESHEQRFVVCTGGEPLLQLDTAAIDALHAKGFEISVETNGTQAPPDGIDWLCVSPKLGSRLLVERGDELKLVYPQENGEPEQFEHLKFDSFRLQPMDGPDAEANTRAAVRYCLEHPLWHLSLQTHKYLGIA

SEQ ID NO: 27731 - protein, 265 aa, Anabaena cylindrica
  REGION 1..265: note = tr|K9ZKW7|K9ZKW7_ANACC 7-carboxy-7-deazaguanine synthase OS=Anabaena cylindrica (strain ATCC 27899 / PCC 7122) OX=272123 GN=queE PE=3 SV=1
MIAKTIVKPTARLVEVFSAIQGEGLNVGTRQIFIRFGLCDLRCHFCDSAQTWDAPSVCKIERSPGLRDFEMHSNPVPLPILLQWVERQNLPSLHDSISLTGGEPLLHAPFLEQFLPEVRSLTNLPIYLETGGHRPEQLAMILPYLDSVGMDLKLPSVSGETHWTEHEKFLQLCFDANLEVFVKIIVSQRTDPGELKRSGMLVGGVHQDIPIFLQPVTPLADSEQFSQVPVLAPSPDQILEWQALMKQFVKQVRVIPQTHKMLKQM

SEQ ID NO: 27732 - protein, 208 aa, Anabaena sp.
  REGION 1..208: note = tr|A0A1B7VQG1|A0A1B7VQG1_9NOST 7-carboxy-7-deazaguanine synthase OS=Anabaena sp. WA113; OX = 1710889 GN=queE PE=3 SV=1
MSLLKIKLPIHETFQSTVQGEGYWTGSLVDFIRLSGCPVRCPWCDTGYADGGANLPRLERSIGELLAEIKSPRVVITGGEPFIHKHLPALVQVLSTADKQVNIETSGSFWQEISPAAWITLSPKEHINSKYPVQSQFWSRANEVKIVIETGTEIDFYEKYLSTHPNLLVYLQPEWYSFSKSLPLIFQILQKKPDYKLSLQTHKYIGVQ

SEQ ID NO: 27733 - protein, 208 aa, Anabaena sp.
  REGION 1..208: note = tr|A0A1B7V031|A0A1B7V031_9NOST 7-carboxy-7-deazaguanine synthase OS=Anabaena sp. AL09; OX = 1710891 GN=queE PE=3 SV=1
MSLLKIKLPIHETFQSTVQGEGFWTGCLVDFIRLSGCPVGCPWCDTGYADPGANLPRVERPIAELLAEIKSPRVVISGGEPFIHKHLPDLVQALLAADKRVNIETSGSFWQEVSPAAWITLSPKEHINPKYPVKSQFWSRANEVKIVIETGGEIDFYQEHLSTHPNLLVYLQPEWNSSSKSIPLILQILQQKPDYKLSLQTHKYIGVQ

SEQ ID NO: 27734 - protein, 266 aa, Anabaenopsis circularis
  REGION 1..266: note = tr|A0A1Z4GM05|A0A1Z4GM05_9CYAN 7-carboxy-7-deazaguanine synthase OS=Anabaenopsis circularis NIES-21 OX=1085406 GN=queE PE=3 SV=1
MTANTTVEPTARLIEVFSAIQGEGLNVGTRQIFIRFALCDLRCHFCDSSHTWNAPTTCKVERSPGLRDFEIHSNPVPLTILLEWIKRQNLPLLHDSISVTGGEPLLHAPFLHEFLPQVRSLTGLPIYLETGGHRPDQLAMILPYLDSVGMDWKLPSVSGETYWQAHAKFLQLCHNNPSVDVFIKIIISQSTNPDELKQAALLIADINPNIPVFLQPVTPLPVAEQFTPTPILAPNPDQVLMWQVLMKKFVPHVRVVPQTHKMLNQL

SEQ ID NO: 27735 - protein, 241 aa, Anaerobacillus alkalidiazotrophicus
  REGION 1..241: note = tr|A0A1S2MAY1|A0A1S2MAY1_9BACI 7-carboxy-7-deazaguanine synthase OS=Anaerobacillus alkalidiazotrophicus OX=472963 GN=queE PE=3 SV=1
MKIPVIEIFGPTIQGEGAVIGKKTIFIRTAGCDYQCSWCDSAFTWDGSGKEDITMMNAEEIFRELEKIGLDNFEHVTISGGNPALIKSLSTLIRLLKEKNFKVGLETQGSVWQDWMVEIDDLTISPKPPSSGMKTDFDRLEDILQLLTKRIDNGHVSIKVVIFNDKDLQYAKNVHKKFPAVPFYLQVGNEDLSDESNERLALMLIQKLEWLVSKVVVDPEFNNVRVLPQLHTLLWGNKKGV

SEQ ID NO: 27736 - protein, 241 aa, Anaerobacillus alkalilacustris
  REGION 1..241: note = tr|A0A1S2LXV6|A0A1S2LXV6_9BACI 7-carboxy-7-deazaguanine synthase OS=Anaerobacillus alkalilacustris OX=393763 GN=queE PE=3 SV=1
MKIPVIEIFGPTIQGEGAVIGKKTVFIRTAGCDYQCSWCDSAFTWDGSGKEDIAMMNAEEIFGELEKIGLDNFEHVTISGGNPALIKSLGTLIRLLKEKKIKVGLETQGSVWQDWMLEIDDLTVSPKPPSSGMETDFNRLEDIVQLLTKRIDNGHVSIKVVIFNDNDLQYAKDVHKKFPTVPFYLQVGNEDLSDESNERLALILIQKLEWLISKVVVDPELNNVRVLPQLHTLLWGNKKGV

SEQ ID NO: 27737 - protein, 241 aa, unidentified
  source 1..241: note = Anaerobacillus isosaccharinicus
  REGION 1..241: note = tr|A0A1S2MFH8|A0A1S2MFH8_9BACI 7-carboxy-7-deazaguanine synthase OS=Anaerobacillus isosaccharinicus OX=1532552 GN=queE PE=3 SV=1
MKIPVLEIFGPTIQGEGAVIGKKTVFIRTAGCDYQCSWCDSAFTWDGSGKDDIKMMTANEIVTELKAIGLENFQHVTISGGNPALLKQLGELIDILKELNLRIGLETQGTVWQDWMLNIDDLTISPKPPSSGMETNYSKLNEMIEQLTERVTNGHVSLKVVIFDDKDLNYAKKIHTKYSSVPFYLSVGNEDLTMENDVELAQKLLQKLDWLVGKVINDPEFNDARVLPQLHALLWGNKKGV

SEQ ID NO: 27738 - protein, 242 aa, unidentified
  source 1..242: note = Anaerobacillus macyae
  REGION 1..242: note = tr|A0A0J6CTA4|A0A0J6CTA4_9BACI 7-carboxy-7-deazaguanine synthase OS=Anaerobacillus macyae; OX = 157733 GN=queE PE=3 SV=1
MNKWLLPERSEYMKWELPMVEVFETVEGEGTRAGFPTVFVRVFHCNLRCSWCDTPYSYAPDKAEYTGSIEAIVDQISQYKSRQICFTGGEPLIHREKSMALLQAMVDLPHIEDIHIETNGAIDLTPYEAVRLEDKKWQEKVRFVMDYKLPDSGEQHRMLHENFNLLDTQDEIKFVIGSDEDFTVATDVVAKHHDKGQVLYSPVWETMPPHKLVEKILEAGLSKVKLSMQLHKIIWDPNKRGV

SEQ ID NO: 27739 - protein, 209 aa, unidentified
  source 1..209: note = Anaerobacterium chartisolvens
  REGION 1..209: note = tr|A0A369BI20|A0A369BI20_9FIRM 7-carboxy-7-deazaguanine synthase OS=Anaerobacterium chartisolvens OX=1297424 GN=queE PE=3 SV=1
MKVNEIFLSIQGEGLSSGFPTVFVRFAGCNLRCRYCDTVYAYYEGEEMTCPEIFNIIQKYGYKRVCLTGGEPLLQDGLDELLGLLKGYAVTIETNGSVRINKITMIEGHSFVMDMKAPSSGHDNDMLMENFDCLRENDEIKFVIGSRQDYEWAKSIIDSYHSKGSITFSPVYGTVSYQIIVDWILKDRLDVRFQLQLHKLIWDPSVRGV

SEQ ID NO: 27740 - protein, 222 aa, unidentified
  source 1..222: note = Anaerobium acetethylicum
  REGION 1..222: note = tr|A0A1D3TN71|A0A1D3TN71_9FIRM 7-carboxy-7-deazaguanine synthase OS=Anaerobium acetethylicum OX=1619234 GN=queE PE=3 SV=1
MAEYRVVEKFVSINGEGILAGQLAVFVRFQGCNLDCSFCDTAWANRENAPYTLMTEKEIYDYIKETGVRNVTLTGGEPLLQKDVRVLLELLASDPSIRIEIETNGSIDLTPFKDIGDSIAFTMDYKLPGSLMESRMDECNFDRLSAGDTVKFVAGSQEDLERARDIIEKHGLSEKCHVYISPVFGKIELESIVDYMKENRMNGVNMQLQMHKVIWNPESRGV

SEQ ID NO: 27741 - protein, 221 aa, unidentified
  source 1..221: note = Anaerobutyricum hallii
  REGION 1..221: note = tr|C0ERV4|C0ERV4_9FIRM 7-carboxy-7-deazaguanine synthase OS=Anaerobutyricum hallii DSM 3353 OX=411469; GN = queE PE=3 SV=1
MITYPVVEKFVSINGEGQKAGKIAAFIRMRGCNLACNYCDTSWANTKDCPCEFLSAEELITWLKEHSIENVTLTGGEPLLTEEIAPLIEALGTAGFSVEIETNGSVSLNTFDTLAHRPAFTMDYKCPDSGMENAMNTDNFSLLIPKDTVKFVVSSISDLDKAREICIQYKVAEHCPIFLSPVFGRIEPKEIVEYMIEHHWNEARLQLQMHKFIWPPEQRGV

SEQ ID NO: 27742 - protein, 221 aa, unidentified
  source 1..221: note = Anaerobutyricum hallii
  REGION 1..221: note = tr|A0A174IXM9|A0A174IXM9_9FIRM 7-carboxy-7-deazaguanine synthase OS=Anaerobutyricum hallii OX=39488 GN=queE PE=3 SV=1
MITYPVVEKFVSINGEGQKAGEIAAFIRMRGCNLACNYCDTSWANTKDCPCEFLSAEELITWLKEHSIENVTLTGGEPLLTEEIAPLIEALGTAGFSVEIETNGSVSLNTFDTLAHRPAFTMDYKCPDSGMENAMNTDNFSLLIPKDTVKFVVSSISDLDKARKICIQYKVAEHCPIFLSPVFGRIEPKEIVEYMIEHHWNEARLQLQMHKFIWPPEQRGV

SEQ ID NO: 27743 - protein, 218 aa, unidentified
  source 1..218: note = Anaerococcus nagyae
  REGION 1..218: note = tr|A0A3E2TI01|A0A3E2TI01_9FIRM 7-carboxy-7-deazaguanine synthase OS=Anaerococcus nagyae; OX = 1755241 GN=queE PE=3 SV=1
MKDKKLDINEIFYSIDGEGITAGQIAIFIRLNSCNLRCSYCDTSYALEAKNNYIDFDHIFDIINQYPSKNITITGGEPLYQQGIIDFIEQLSKRGYRVNIETNGSISVKGLIHIDKTIITLDIKTPYSNMDQENLYENLNYLRGNDVCKFVVGSIEDLEFTYKIIDKYKPKSQIFLSPVYNSIDTADIVEFMKIKGYDNVKLQLQIHKYIWDPDKRGV

SEQ ID NO: 27744 - protein, 217 aa, Anaeroglobus geminatus
  REGION 1..217: note = tr|G9YHC9|G9YHC9_9FIRM 7-carboxy-7-deazaguanine synthase OS=Anaeroglobus geminatus F0357 OX=861450 GN=queE; PE = 3 SV=1
MKVAEKFVSINGEGCRAGELALFIRFQGCNLSCSYCDTAWANEATCPYEDLSPAELRDYAVREGIKNITLTGGEPLLPEGLKELIGLFLAEGFHVEIETNGAVSLAPFCGASRPTFTVDYKLPDSGCEEAMVHANFDLLQRTDTVKFVVSSRRDLERAREVVDTYGLLFTCGVYVSPVFGSIEAEEIVEFMKARRLNGWRLQIQMHKVIWEPEKRGV

SEQ ID NO: 27745 - protein, 198 aa, unidentified
  source 1..198: note = Anaerolineaceae bacterium
  REGION 1..198: note = tr|A0A2E9ABE5|A0A2E9ABE5_9CHLR 7-carboxy-7-deazaguanine synthase OS=Anaerolineaceae bacterium OX=2024896 GN=queE PE=3 SV=1
MLKYPIVEIFHSVQGEGFHTGLPHVFVRFGNCNLRCEWCDTEFMTFEELGINEIVDKVLSYDCDRVIFTGGEPALQDLSSIGRRLKQHGISLSIETNGTIPIDPIIDWICVSPKDQIYPNVAIKQRSGDELKVVYCGQDLSIYDGLRLGFEHHYIQPCYMENESIEENGASFKIVEKLVKNNPGWRLSLQTQKWMGIL

SEQ ID NO: 27746 - protein, 221 aa, unidentified
  source 1..221: note = Anaeromicrobium sediminis
  REGION 1..221: note = tr|A0A267MD49|A0A267MD49_9CLOT 7-carboxy-7-deazaguanine synthase OS=Anaeromicrobium sediminis OX=1478221 GN=queE PE=3 SV=1
MMYKVVEHFISINGEGKRAGELALFIRFKGCNLTCSYCDTMWANREHTKFTFMNKEEIHNLIKESKVKNVTLTGGEPLLQDNMYELLEFISQDKSVNIEIETNGSVDIGTFSKLDNPPSFTLDYKLPSSNMEDLMYTNNYNYLKNSDVVKFVAGTKSDLDRAKEIIKKYDLTNKCHVYLSPSFEEITPAQIVEYMKENRLNDVKLQLQMHKFIWDPEERGV

SEQ ID NO: 27747 - protein, 210 aa, Anaeromyxobacter dehalogenans
  REGION 1..210: note = tr|B8JDE6|B8JDE6_ANAD2 7-carboxy-7-deazaguanine synthase OS=Anaeromyxobacter dehalogenans (strain 2CP-1 / ATCC BAA-258) OX=455488 GN=queE PE=3 SV=1
MRVTEIFFSIQGEGSRAGRPCVFVRFTGCDLRCGYCDTAYAFHGGADMDRAAILAEVARHPARFVCLTGGEPMLQRELPDLARELLARGYEVAVETHGQRPLDALPAEAIRVVDVKTPGSGEVATDLAYLDRLQPHDEVKFVVCSEDDFRWSREVVRRHALEGRVQVLFSPAWGQVAPRDLVRWMLESGLDARLSLQVHKVVWGPDVHGV

SEQ ID NO: 27748 - protein, 210 aa, Anaeromyxobacter dehalogenans
  REGION 1..210: note = tr|Q2IQJ3|Q2IQJ3_ANADE 7-carboxy-7-deazaguanine synthase OS=Anaeromyxobacter dehalogenans (strain 2CP-C); OX = 290397 GN=queE PE=3 SV=1
MRVTEIFFSIQGEGSRAGRPCVFVRFTGCDLRCGYCDTAYAFHGGVDMDRAAVLAEVARHPARFVCLTGGEPMLQRELPDLARDLVARGYEVAVETHGQRPLDALPAEAIRVVDVKTPGSGEVTTDFAYLDRLQPHDEVKFVVCSEDDFRWSREVVRRHALEGRVQVLFSPAWGQVAPRDLVRWMLESGLDARLSLQVHKVIWGPDVHGV

SEQ ID NO: 27749 - protein, 210 aa, Anaeromyxobacter sp.
  REGION 1..210: note = tr|A7HD72|A7HD72_ANADF 7-carboxy-7-deazaguanine synthase OS=Anaeromyxobacter sp. (strain Fw109-5); OX = 404589 GN=queE PE=3 SV=1
MRVTEIFFSLQGEGTRAGRPCVFVRFTGCDLRCGYCDSAYAFHGGRELTRAEILAEIARHPAKLVCLTGGEPMLQRELPELARELVARGHEVTVETHGQRPLDALPPETIRIVDVKTPGSREEAKDLAYLDGLRPQDEVKFVVCSEPDYRWSVDVVRRHRLEGRAHLLFSPAWGEVEPRELARWILRDGLDARLSLQIHKVIWGPDARGV

SEQ ID NO: 27750 - protein, 210 aa, Anaeromyxobacter sp.
  REGION 1..210: note = tr|A0A0D6QGS9|A0A0D6QGS9_9DELT 7-carboxy-7-deazaguanine synthase OS=Anaeromyxobacter sp. PSR-1 OX=1300915 GN=queE PE=3 SV=1
MRVTEIFFSIQGEGSRAGRPCVFVRFTGCDLRCGYCDTAYAFHGGVDMDRAAILAEVARHPARFVCLTGGEPMLQRELPDLARDLVARGYEVAVETHGQRPLDALPAEAIRVVDVKTPGSGEVTTDFAYLDRLQPHDEVKFVVCSEEDFRWSREVVRRHALEGRVQVLFSPAWGQVAPRDLVRWMLESGLDARLSLQVHKVIWGPDVHGV

SEQ ID NO: 27751 - protein, 198 aa, unidentified
  source 1..198: note = Anaerosporomusa subterranea
  REGION 1..198: note = tr|A0A154BMD0|A0A154BMD0_ANASB 7-carboxy-7-deazaguanine synthase OS=Anaerosporomusa subterranea OX=1794912 GN=queE PE=3 SV=1
MTIVRYPIVEVFESLQGEGTHSGIGATFVRLAGCNLRCSWCDTTHSFAVDKATTYTTGELIEAFSFKQPLVVITGGEPTLHDLGPLVRELHNRKKYVCIETNGTNPIPIEWGINWITVSPKPQSGYTITCPADELKYVVDDEFKLEFIRFDLVKQGRVFLQIESGRLESAKKAYDMIIRNPDLHLRLGVQLHKVVGFE

SEQ ID NO: 27752 - protein, 222 aa, Anaerostipes caccae
  REGION 1..222: note = tr|B0ME52|B0ME52_ANACD 7-carboxy-7-deazaguanine synthase OS=Anaerostipes caccae (strain DSM 14662 / NCIMB 13811 / L1-92) OX=411490 GN=queE PE=3 SV=1
MEVFKIAESFVSINGEGKKAGRLSMFIRLRGCNLNCSYCDTKWAISKKGEAELMTAAEVSQMVKESGVDLVTLTGGEPLLDENISGLIGSILSLPKMELEIETNGSIPIRPWRERDARLSMTMDYKLPSSGMEESMCLENMEELKPWDVVKFVIGTREDLEKAKEVIERFSLCEKAIVYFSPVFGAIPPDEIVEFMKEHRMNKVRFQIQIHKVVWDPERKGV

SEQ ID NO: 27753 - protein, 222 aa, unidentified
  source 1..222: note = Anaerostipes hadrus
  REGION 1..222: note = tr|A0A174LQ35|A0A174LQ35_ANAHA 7-carboxy-7-deazaguanine synthase OS=Anaerostipes hadrus; OX = 649756 GN=queE PE=3 SV=1
METFKVVETFVSINGEGKKAGRLAMFIRLKGCNLNCSYCDTTWANKRDARCELLTAPQIIERIKEAGVELVTLTGGEPLLDENVSELIGSILMMPKVEIEIETNGSVPIKYYKDRDNRLTMTMDYKLPSSNMEESMCLENMEYLKPWDVVKFVIGSREDLNRAKEIIERFSLCEKAIVYFSPVFGKIEPEEIVEFMKENKLNKVRFQIQIHKVVWDPDKTGV

SEQ ID NO: 27754 - protein, 222 aa, unidentified
  source 1..222: note = Anaerostipes hadrus
  REGION 1..222: note = tr|D4MWU1|D4MWU1_ANAHA 7-carboxy-7-deazaguanine synthase OS=Anaerostipes hadrus OX=649756 GN=queE PE=3 SV=1
METFKVVETFVSINGEGKKAGRLAMFIRLKGCNLNCSYCDTTWANKRDARCELLTAPQIVERIKEAGVELVTLTGGEPLLDENVSELIGSILMMPKVEIEIETNGSVPIRYYKERDNRLTMTMDYKLPSSNMEENMCLENMEYLKPWDVVKFVIGSREDLNRAKEIIERFRLCEKAIVYFSPVFGKIEPEEIVEFMKENKLNKVRFQIQIHKVVWDPDKTGV

SEQ ID NO: 27755 - protein, 222 aa, unidentified
  source 1..222: note = Anaerostipes rhamnosivorans
  REGION 1..222: note = tr|A0A4P8IDL1|A0A4P8IDL1_9FIRM 7-carboxy-7-deazaguanine synthase OS=Anaerostipes rhamnosivorans OX=1229621 GN=queE PE=3 SV=1
METFKIAESFVSINGEGKKAGRLAMFIRLRGCNLNCSYCDTKWAISKKGDAELMTAPETAQMVKEAGVELVTLTGGEPLLDENISGLIGSILALPKVELEIETNGSIPIRPWRERDARLSMTMDYKLPSSGMEESMCLENMEELKPWDVVKFVIGTREDLERAKEITDRFSLCERAIVYFSPVFGALLPEEIVEFMKEHKLNKVRFQIQIHKVVWDPEQKGV

SEQ ID NO: 27756 - protein, 222 aa, Anaerostipes sp.
  REGION 1..222: note = tr|R6QNP5|R6QNP5_9FIRM 7-carboxy-7-deazaguanine synthase OS=Anaerostipes sp. CAG:276 OX=1262699 GN=queE; PE = 3 SV=1
MEVFKIAESFVSINGEGKKAGRLSMFIRLRGCNLNCSYCDTKWAISKKGEAELMTAAEVSQMVKESGVDLVTLTGGEPLLDENISELIGGILSLPKMELEIETNGSIPIRPWRERDARLSMTMDYKLPSSGMEESMCLENMEELKPWDVVKFVIGTREDLEKAKEVIERFSLCEKAIVYFSPVFGAIPPDEIVEFMKEHRMNKVRFQIQIHKVVWDPERKGV

SEQ ID NO: 27757 - protein, 222 aa, Anaerostipes sp.
  REGION 1..222: note = tr|A0A1Q9JQ24|A0A1Q9JQ24_9FIRM 7-carboxy-7-deazaguanine synthase OS=Anaerostipes sp. 494a; OX = 1261636 GN=queE PE=3 SV=1
MEEYQVVETFISINGEGKKAGRLAMFIRLKGCNLDCSYCDTKWANERKAPFEWMTSKQITDRIVESGVQLVTLTGGEPLMNDNIGELIGSILMIPQVELEIETNGSMPIRFYKERDARLSMTMDYKLPSSFMEESMCLENMEYLKPWDVVKFVIGSREDLERAKEIIERFSLCEKAIVYFSPVFGQIEPVEIVEFMKEEHLNKVRFQIQIHKVVWDPEKTGV

SEQ ID NO: 27758 - protein, 243 aa, Anaerovibrio lipolyticus
  REGION 1..243: note = tr|A0A1M6E6T8|A0A1M6E6T8_9FIRM 7-carboxy-7-deazaguanine synthase OS=Anaerovibrio lipolyticus DSM 3074 OX=1120997 GN=queE PE=3 SV=1
MNANLIEIFSSVQGEGRYVGCRQLFVRFEGCNLNCKYCDTENQAGTHPLCGVETFPGSRKFHDAINPLETTEVAAYINRFVMELPHQAISFTGGEPLLHTAFLQELLPMVTTKVMLETNGTLPDKLVQVIDRVDIISMDIKLPQATGEEHWEEHRRFLEIAKEKDVYVKLVVSGDINMDDYQKAIDLVAGVDPNILLILQPVTPLNGVEAALPEQMLELQQQALESLKDVRIIPQTHRMMDQL

SEQ ID NO: 27759 - protein, 243 aa, Anaerovibrio lipolyticus
  REGION 1..243: note = tr|A0A0B2K1S3|A0A0B2K1S3_9FIRM 7-carboxy-7-deazaguanine synthase OS=Anaerovibrio lipolyticus OX=82374 GN=queE PE=3 SV=1
MNANLIEIFSSVQGEGRYVGCRQLFVRFEGCNLNCKYCDTENQAGTHPLCGVETFPGSRKFHDAINPLETTEVAAYINRFVMELPHQAISFTGGEPLLHTAFLQELLPMVNTKVMLETNGTLPEKLARIIDIVDIISMDIKLPQATGEEHWDEHRRFLEIAKKKDVYVKLVVSGDINMDDYQRAVDLVAGVDPNILLILQPVTPLNGVEAARPEQMLELQQQALESLKDVRIIPQTHRMMDQL

SEQ ID NO: 27760 - protein, 243 aa, Anaerovibrio sp.
  REGION 1..243: note = tr|A0A3D4ALK6|A0A3D4ALK6_9FIRM 7-carboxy-7-deazaguanine synthase OS=Anaerovibrio sp.; OX = 1872532 GN=queE PE=3 SV=1
MNANLIEIFSSVQGEGRYVGCRQLFVRFEGCNLNCKYCDTENQAGTHPLCGVETFPGSRKFHDAINPLEPTEVAAYINRFVMELPHQAISFTGGEPLLHTVFLQELLPMVTTKVMLETNGTLPDKLVQIIDRVDIISMDIKLPQATGEEHWEEHRRFLEIAKKKDVYVKLVVSGDINMDDYQKAIDLVAGVDPNILLILQPVTPLNGVEAALPEQMLELQQQALESLKDVRIIPQTHRMMDQL

SEQ ID NO: 27761 - protein, 243 aa, Anaerovibrio sp.
  REGION 1..243: note = tr|A0A1X1Q644|A0A1X1Q644_9FIRM 7-carboxy-7-deazaguanine synthase OS=Anaerovibrio sp. JC8; OX = 1240085 GN=queE PE=3 SV=1
MNANLIEIFSSVQGEGRYVGCRQLFVRFEGCNLNCKYCDTENQAGTHPICGVETFPGSRKFHDAINPLEPTEVAAYINRFTMELPHQAISFTGGEPLLHSAFLQELLPMVNTKVMLETNGTLPDRLARVIDMVDIISMDIKLPQATGEDHWDDHRRFLEIARAKDVYVKLVVSGDINMDDFQKAVDLVAGVDPDILLILQPVTPLNGVEAALPEQMLELQQQALESLHDVRIIPQTHRMMDQL

SEQ ID NO: 27762 - protein, 212 aa, unidentified
  source 1..212: note = Ancylomarina sp.
  REGION 1..212: note = tr|A0A425XWU7|A0A425XWU7_9BACT 7-carboxy-7-deazaguanine synthase OS=Ancylomarina sp. M1P; OX = 2283627 GN=queE PE=3 SV=1
MMRDKYKDIFEAGTDLPLVEDFYTIQGEGYHTGKPAYFIRIGGCDIGCRWCDSKISWNPKEHRLISVEEVVRKAVESPAKSVVVTGGEPSLYNLEPLCSELKKHNIENFLETSGAYEITGEWDWICLSPKANKAPVESSYKKANELKFIIFDLEKDFALAEEHAKLVGDDCLLYLQSEWSQYVHNIKAIVEYVKNNPKWNISLQSHKFMRIP

SEQ ID NO: 27763 - protein, 212 aa, unidentified
  source 1..212: note = Ancylomarina sp.
  REGION 1..212: note = tr|A0A4Q1JKX0|A0A4Q1JKX0_9BACT 7-carboxy-7-deazaguanine synthase OS=Ancylomarina sp. SHSM-M15 OX=2501299 GN=queE PE=3 SV=1
MMRDKYKEIFEAGTDLPLVEDFYTIQGEGYHTGKPAYFIRIGGCDIGCRWCDSKISWNPKEHRLISVEEVVRKAVESPAKSVVVTGGEPSLYNLEPLCTELKKHNIENFLETSGAYEITGEWDWICLSPKANKAPVASSYKKANELKFIIFDLEKDFALAEEHAKLVGDDCLLYLQSEWSQYVHNIKAIVEYVKNNPKWNISLQSHKFMRIP

SEQ ID NO: 27764 - protein, 211 aa, unidentified
  source 1..211: note = Ancylomarina subtilis
  REGION 1..211: note = tr|A0A4V2FT33|A0A4V2FT33_9BACT 7-carboxy-7-deazaguanine synthase OS=Ancylomarina subtilis; OX = 1639035 GN=queE PE=3 SV=1
MRDKYKEIFEAGTDLPLVEDFYTIQGEGYHTGKPAYFIRIGGCDIGCRWCDSKISWNPKEHRLISVEEVVRKAVESPAKSVVVTGGEPSLYNLEPLCTELKKHNIENFLETSGAYEITGEWDWICLSPKANKAPVESSYKKANELKFIIFDLEKDFALAEEHAKLVGDDCLLYLQSEWSQYVHNIKAIVEYVKNNPKWNISLQSHKFMRIP

SEQ ID NO: 27765 - protein, 208 aa, unidentified
  source 1..208: note = Anditalea andensis
  REGION 1..208: note = tr|A0A074KWY4|A0A074KWY4_9BACT 7-carboxy-7-deazaguanine synthase OS=Anditalea andensis; OX = 1048983 GN=queE PE=3 SV=1
MQVREEVAKGNMLPLMEAFYTIQGEGTFTGHPAYFIRLGGCDVGCVWCDVKDSWEGEKWPVKPIEEIVAEAERFPGRLVVITGGEPLMYNLGPITSLLKDRGFTINIETSGAHPFSGSFDWVCFSPKKFKAPHPSIYEKADELKVIVFHKSDIGFAEKHAAQVQSHCTLLLQPEWSKAREVSSLIVDYVKDHPNWKISLQTHKFMDIP

SEQ ID NO: 27766 - protein, 212 aa, unidentified
  source 1..212: note = Andreesenia angusta
  REGION 1..212: note = tr|A0A1S1V9A1|A0A1S1V9A1_9FIRM 7-carboxy-7-deazaguanine synthase OS=Andreesenia angusta; OX = 39480 GN=queE_1 PE=3 SV=1
MLLKVNEIFLSIQGEGISAGYPTIFVRLTGCNLRCSYCDTTHAYNEGSDMAVEKVLEEIESLGYKRVCITGGEPLLQEKGLLKLLEGLSDYEVSIETNGSVDLSAFPLRENHRFTMDIKTPSSEESEQNRLENLKLLRDQDELKAVIGSRKDYLWALGVIDAHYIKGNITFSPIFGMIEPEEIINWILEDKRDIRFQIQIHKFIWNPDRRGV

SEQ ID NO: 27767 - protein, 227 aa, unidentified
  source 1..227: note = Andreesenia angusta
  REGION 1..227: note = tr|A0A1S1V5F6|A0A1S1V5F6_9FIRM 7-carboxy-7-deazaguanine synthase OS=Andreesenia angusta; OX = 39480 GN=queE_2 PE=4 SV=1
MKVKGIQKSSFIDYPDKIVAVVFTGGCNFRCPYCHNRELVYNMGENIDEEELFSELEKRKKYLDGVCITGGEPTLQQGLDEFILKLKGMGYLIKLDTNGTSPKALRDLLERNLLDYIAMDIKAPIQNYRSVAIEKVDIETIEESIELIRESGVDYEFRTTICKELLSTADILKIAKRIKGSMKYTLQNYRDSGNILSGKSYTPYKKEELELLREEIKGYFGKFHIRY

SEQ ID NO: 27768 - protein, 214 aa, Andreprevotia lacus
  REGION 1..214: note = tr|A0A1W1X9W6|A0A1W1X9W6_9NEIS 7-carboxy-7-deazaguanine synthase OS=Andreprevotia lacus DSM 23236 OX=1121001 GN=queE PE=3 SV=1
MNDTLRITEIFFSLQGETSRMGRPTVFVRLTGCPLRCGYCDSAYAFHGGKTVSFDEIIAEIRKHPTNTVCVTGGEPLAQKYSLAFLKRLADEGFDVSLETSGAIAIDEVDPRISRIVDIKTPGSGELAKMRWENLAAIRPGDEIKFVLCDRADYEWARDLLRDKALTELAPVLFSPVWETLPPAELAQWVLADGLPVRMQVQLHKILWGEKPGV

SEQ ID NO: 27769 - protein, 240 aa, Aneurinibacillus aneurinilyticus
  REGION 1..240: note = tr|U1Y7V1|U1Y7V1_ANEAE 7-carboxy-7-deazaguanine synthase OS=Aneurinibacillus aneurinilyticus ATCC 12856; OX = 649747 GN=queE PE=3 SV=1
MIDIEKLRRDLKLPMVELFETVEGEGRMAGYPTTFVRVFNCNLRCTWCDTPYSYAPEKAAFITSIAEIVERTVSYGHGVICLTGGEPLMHGVKSQSLIYHLSQLPTVWDIHIETNGAIDLMPFSSLREQDRSMGSKVRFVMDYKLPTSGETAKMHLENFFILGPQDEVKFVVGDEADFFHALNILGQHPTQATALFSPVWETMPPADLAALILRYRPQEGRARLNMQIHKVIWDPETRGV

SEQ ID NO: 27770 - protein, 241 aa, Aneurinibacillus danicus
  REGION 1..241: note = tr|A0A511V7U6|A0A511V7U6_9BACL 7-carboxy-7-deazaguanine synthase OS=Aneurinibacillus danicus OX=267746 GN=queE PE=3 SV=1
MSSITELYNKEWKLPMVELFETVEGEGKMTGYPTTFVRVFNCNLRCTWCDTPYSYAPEKPEFTATIDEISRRVESYGHGVVCLTGGEPLMHGDKSLALVYHLAHLSSVWDIHIETNGAVDLFPFVALREKDEAASDKVRFVMDYKLPISGETARMHLPNFSLLGAQDEVKFVVGDEADFFHALDILERYPTRATALFSPVWETMPPAELVQLLLRYRPQEGRARLNIQIHKVIWDPETRGV

SEQ ID NO: 27771 - protein, 240 aa, Aneurinibacillus migulanus
  REGION 1..240: note = tr|A0A0K2WK55|A0A0K2WK55_ANEMI 7-carboxy-7-deazaguanine synthase OS=Aneurinibacillus migulanus OX=47500 GN=queE PE=3 SV=1
MIDMKELRRDFKLPMVELFETVEGEGRMAGYPTTFVRVFNCNLRCTWCDTPYSYAPEKAAFTASIEEIVEQTASYGHGVICLTGGEPLMHGLKSQALVYHLSQLPTVWDIHIETNGAINLMPFSLLRERDGSMGRKVRFVMDYKLPASGETAKMYLSNFSILEPQDEVKFVVGDEADFFHALDILKRYPTRATALFSPVWETMPPADLVSLILRHRPQEGKARLNMQIHKVIWDPEARGV

SEQ ID NO: 27772 - protein, 240 aa, Aneurinibacillus migulanus
  REGION 1..240: note = tr|A0A0D1Y434|A0A0D1Y434_ANEMI 7-carboxy-7-deazaguanine synthase OS=Aneurinibacillus migulanus OX=47500 GN=queE PE=3 SV=1
MIDMKELRRDFKLPMVELFETVEGEGRMAGYPTTFVRVFNCNLRCTWCDTPYSYAPEKAAFTASIEEIVEQTASYGHGVICLTGGEPLMHGLKSQALVYHLSQLPTVWDIHIETNGAINLMPFSLLRERDGSMGRKVRFVMDYKLPASGETAKMHLSNFSILEPQDEVKFVVGDEADFFHALDILTRYPTRATALFSPVWETMPPADLVTLILRHRPQEGKARLNMQIHKVIWDPEARGV

SEQ ID NO: 27773 - protein, 241 aa, unidentified
  source 1..241: note = Aneurinibacillus soli
  REGION 1..241: note = tr|A0A0U5B088|A0A0U5B088_9BACL 7-carboxy-7-deazaguanine synthase OS=Aneurinibacillus soli; OX = 1500254 GN=queE PE=3 SV=1
MTDSAISFPDTWELPFVEVFETVEGEGMMAGYPTTFVRVFHCNLRCTWCDTPYSYAPAQPEFVASIKEIVARVQEYGHGVICLTGGEPLMHGEKSQALLYHLARQPYVRDVHVETNGAIDLEPFVRLRQEMRESGTPIRFIMDYKLPDSGETARMHLPNMALLAERDELKFVVASEEDFSHALTVLTDYPTEAVVSFSPVWESMPPARLVELLLVHRPNEGRARLSLQLHKIIWDPQQRGV

SEQ ID NO: 27774 - protein, 238 aa, Aneurinibacillus sp.
  REGION 1..238: note = tr|A0A0X8D9F0|A0A0X8D9F0_9BACL 7-carboxy-7-deazaguanine synthase OS=Aneurinibacillus sp. XH2 OX=1450761 GN=queE PE=3 SV=1
MLGTSGIQYDMKIPMVEIFQTVEGEGTRAGFPTTFVRVFNCNLRCTWCDTKYSYAPYKPEFTATIGEIVEQVKRFPNKHICLTGGEPLIHGERSLMLLKALAEIDYIEDIHIETNGAINISEVCRFRESHPNFKKKIRFILDYKLPSSGEMKKMILENFDYSQDNDEVKFVISDSNDFEVATRILKKLYKKGTVLFSPVWETMPPDKLVNLVLSNQLVNVKVSLQLHKIIWDPNKRGV

SEQ ID NO: 27775 - protein, 242 aa, Aneurinibacillus sp.
  REGION 1..242: note = tr|A0A120HSN6|A0A120HSN6_9BACL 7-carboxy-7-deazaguanine synthase OS=Aneurinibacillus sp. XH2 OX=1450761 GN=queE PE=3 SV=1
MHNLAWEELHTDLKVPMVELFETVEGEGRMAGYPTVFIRIFHCNLRCTWCDTTYSYAPEKPAFTASICEIVDRVSAYGHGVVCLTGGEPLMHGVKSLALVYHLARIPHVWDIHIETNGAIDLQPFQALREREKEVREKVRFVMDYKLPASGETERMHVPNLALLEERDEVKFVVGNEADFMYALDVLKRHPTRATALFSPVWETMPPADLVSFLLKYRPQEGRARLNMQIHKVIWDPEARGV

SEQ ID NO: 27776 - protein, 238 aa, Aneurinibacillus thermoaerophilus
  REGION 1..238: note = tr|A0A1G8BMK2|A0A1G8BMK2_ANETH 7-carboxy-7-deazaguanine synthase OS=Aneurinibacillus thermoaerophilus OX=143495 GN=queE PE=3 SV=1
MLGTSGIQYDMKIPMVEIFQTVEGEGTRAGFPTTFVRVFNCNLRCTWCDTKYSYAPYKPEFTATIGEIVEQVKRFPNKHICLTGGEPLIHEERSLMLLKALAEIDYIEDIHIETNGAINISEVCRFRESHPNFKKKIRFILDYKLPSSGEMKKMILENFYYLQDNDEVKFVISDSNDFEVATRILKKLYKKGTVLFSPVWETMPPDKLVNLVLSNQLVNVKVSLQLHKIIWDPNKRGV

SEQ ID NO: 27777 - protein, 242 aa, Aneurinibacillus thermoaerophilus; identical to SEQ ID NO: 27775
  REGION 1..242: note = tr|A0A1G7WYH3|A0A1G7WYH3_ANETH 7-carboxy-7-deazaguanine synthase OS=Aneurinibacillus thermoaerophilus OX=143495 GN=queE PE=3 SV=1

SEQ ID NO: 27778 - protein, 244 aa, Anoxybacillus amylolyticus
  REGION 1..244: note = tr|A0A4R1GCL5|A0A4R1GCL5_9BACI 7-carboxy-7-deazaguanine synthase OS=Anoxybacillus amylolyticus OX=294699 GN=queE PE=3 SV=1
MARTIPVLEIFGPTIQGEGMVIGQKTMFVRTAGCDYRCRWCDSAFTWDGSAKDEIEQLTADEIWRRLEAIGGRRFRHVTISGGNPLLIAALGELIALLHEKGMRVAVETQGSRWQDWLLDIDDVTLSPKPPSSGMDTDWAALDQIIERLQADQSRVRRISLKVVVFDDADLAYAKEVHCRYPSVPFYLQAGNADVADSDVDALRAKLFSRLEWLVEQAADSEELADVHILPQLHALLWGNKRGV

SEQ ID NO: 27779 - protein, 242 aa, Anoxybacillus amylolyticus
  REGION 1..242: note = tr|A0A160F3N8|A0A160F3N8_9BACI 7-carboxy-7-deazaguanine synthase OS=Anoxybacillus amylolyticus OX=294699 GN=queE PE=3 SV=1
MMKIPVLEIFGPTIQGEGMVIGQKTMFVRTAGCDYRCHWCDSAFTWDGSAKAEIMQMTAEDIWRELTVLGGNRFSHVTISGGNPALLKGLDELITLLKGKGIRIALETQGSCWQEWFYAIDDLTISPKPPSSGMETDFAVLDDIIEKLVKAGRKENVSLKVVVFDDADFAYATYVHKRYPLIPFYLQVGNEGVRETDDGTLRAKLLHQLEWLVEKVVQSSDMNDVRVLPQLHTLLWGNKRGV

SEQ ID NO: 27780 - protein, 240 aa, Anoxybacillus ayderensis
  REGION 1..240: note = tr|A0A0D0G4L1|A0A0D0G4L1_9BACI 7-carboxy-7-deazaguanine synthase OS=Anoxybacillus ayderensis OX=265546 GN=queE PE=3 SV=1
MERIPVIEIFGPTIQGEGMVIGQKTMFVRTAGCDYRCRWCDSSFTWDGSAKDEIKQMTAEDIWQQLKQLGGDRFNHVTISGGNPALLKSLHALISLLKQHRMRIGLETQGSVWQDWFYDIDDFTISPKPPSSNMETNFAMLDTIMDRLASHRGQVSIKVVVFNDEDFAYAKHVHQRYPTVPFYVQVGNDDIHEGDDVTLRLKLLQKLEWLVEQVVQSNEMNDVRVLPQLHTLLWGNRRGV

SEQ ID NO: 27781 - protein, 240 aa, Anoxybacillus ayderensis
  REGION 1..240: note = tr|A0A1X6MC72|A0A1X6MC72_9BACI 7-carboxy-7-deazaguanine synthase OS=Anoxybacillus ayderensis OX=265546 GN=queE PE=3 SV=1
MERIPVIEIFGPTIQGEGMVIGQKTMFVRTAGCDYRCRWCDSSFTWDGSAKDEIKQMTAEDIWQQLKQLGGDRFNHVTISGGNPALLKSLHALISLLKQHRMRIGLETQGSVWQDWFYDIDDFTISPKPPSSNMETNFAMLDTIMDRLASHRGQVSIKVVVFNDEDFAYAKHVHQRYPAVPFYVQVGNDDIHEGDDVTLRLKLLQKLEWLVEQVVQSNEMNDVRVLPQLHTLLWGNRRGV

SEQ ID NO: 27782 - protein, 240 aa, Anoxybacillus flavithermus
  REGION 1..240: note = tr|B7GLA2|B7GLA2_ANOFW 7-carboxy-7-deazaguanine synthase OS=Anoxybacillus flavithermus (strain DSM 21510 / WK1) OX=491915 GN=queE PE=3 SV=1
MEHIPVIEMFGPTIQGEGMVIGQKTMFVRTAGCDYRCRWCDSSFTWDGSAKNEVKQMTAEDIWQQLKQLGGDRFNHVTISGGNPALLKGLRALISLLKEHNIRIGLETQGSVWQDWFYDIDDLTISPKPPSSNMKTNFTMLDTIMERLTAHRGHVSLKVVVFDDEDFAYAKHVHQRYPTVPFYVQVGNDHIHEADDVTLRLQLLQKLEWLVEQVVQSNEMNDVRVLPQLHALLWGNRRGV

SEQ ID NO: 27783 - protein, 240 aa, Anoxybacillus flavithermus
  REGION 1..240: note = tr|R4G0Y6|R4G0Y6_9BACI 7-carboxy-7-deazaguanine synthase OS=Anoxybacillus flavithermus NBRC 109594; OX = 1315967 GN=queE PE=3 SV=1
MERIPVIEMFGPTIQGEGMVIGQKTMFVRTAGCDYRCRWCDSSFTWDGSAKDEVKQMTAEDIWQQLKQLGGDRFNHVTISGGNPALLKGLRALISLLKEHNIRIGLETQGSVWQDWFYDIDDLTISPKPPSSNMKTNFTMLDMIMERLTAHRGHVSLKVVVFDDEDFAYAKHVHQRYPTVPFYVQVGNDHIHEADDVTLRLQLLQKLEWLVDKVVQSKEMNNVRVLPQLHTLLWGNRRGV

SEQ ID NO: 27784 - protein, 240 aa, Anoxybacillus gonensis
  REGION 1..240: note = tr|M5R5F7|M5R5F7_9BACI 7-carboxy-7-deazaguanine synthase OS=Anoxybacillus gonensis OX=198467 GN=queE PE=3; SV = 1
MERIPVIEIFGPTIQGEGMVIGQKTMFVRTAGCDYRCRWCDSSFTWDGSAKDEIKQMTPEHIWQQLKQLGGDRFNHVTISGGNPALLKSLHALISLLKQHRMRIGLETQGSVWQDWFYDIDDLTISPKPPSSNMETNFAMLDTIMDRLAMHRGQVSLKVVVFNDEDFAYAKHVHQRYPTVPFYVQVGNDDIHEADDMTLRLKLLQKLEWLVEQVVQSNEMNDVRVLPQLHTLLWGNRRGV

SEQ ID NO: 27785 - protein, 240 aa, Anoxybacillus gonensis
  REGION 1..240: note = tr|A0A0A2SR73|A0A0A2SR73_9BACI 7-carboxy-7-deazaguanine synthase OS=Anoxybacillus gonensis OX=198467 GN=queE PE=3 SV=1
MERIPVIEIFGPTIQGEGRVIGQKTMFVRTAGCDYRCRWCDSSFTWDGSAKDEIKQMTPEHIWQQLKQLGGDRFNHVTISGGNPALLKSLHALISLLKQHRMRIGLETQGSVWQDWFYDIDDLTISPKPPSSNMETNFAMLDTIMDRLAMHRGQVSLKVVVFNDEDFAYAKHVHQRYPTVPFYVQVGNDDIHEADDITLRLKLLQKLEWLVEQVVQSNEMNDVRVLPQLHTLLWGNRRGV

SEQ ID NO: 27786 - protein, 240 aa, Anoxybacillus kamchatkensis
  REGION 1..240: note = tr|A0A4S3L1U3|A0A4S3L1U3_9BACI 7-carboxy-7-deazaguanine synthase OS=Anoxybacillus kamchatkensis OX=196180 GN=queE PE=3 SV=1
MERIPVIEIFGPTIQGEGMVIGQKTMFVRTAGCDYRCRWCDSSFTWDGSAKDEIKQMTPEHIWQQLKQLGGDRFNHVTISGGNPALLKSLHALISLLKQHRMRIGLETQGSVWQDWFYDIDDLTISPKPPSSSMETNFAMLDTIMDRLAMHRGQVSLKVVVFNDEDFAYAKHVHQRYPTVPFYVQVGNDDIHEADDMTLRLKLLQKLEWLVEQVVQSNEMNDVRVLPQLHTLLWGNRRGV

SEQ ID NO: 27787 - protein, 240 aa, Anoxybacillus kamchatkensis
  REGION 1..240: note = tr|A0A346DDC5|A0A346DDC5_9BACI 7-carboxy-7-deazaguanine synthase OS=Anoxybacillus kamchatkensis G10 OX=1212546 GN=queE PE=3 SV=1
MERIPVIEIFGPTIQGEGMVIGQKTMFVRTAGCDYRCRWCDSSFTWDGSAKDEIKQMTPEHIWQQLKQLGGDRFNHVTISGGNPALLKSLHALISLLKQHRMRIGLETQGSVWQDWFYDIDDLTISPKPPSSNMETNFAMLDTIMDRLAMHRGQVSLKVVVFNDEDFAYAKHVHQRYPTVPFYVQVGNDDIHEADDITLRLKLLQKLEWLVEQVVQSNEMNDVRVLPQLHTLLWGNRRGV

SEQ ID NO: 27788 - protein, 240 aa, Anoxybacillus pushchinoensis
  REGION 1..240: note = tr|A0A1I0U0I8|A0A1I0U0I8_9BACI 7-carboxy-7-deazaguanine synthase OS=Anoxybacillus pushchinoensis OX=150248 GN=queE PE=3 SV=1
MERIPVIEIFGPTIQGEGMVIGQKTMFVRTAGCDYRCRWCDSSFTWDGSAKHEVEWLTPEQIWQQLKQLGDDRFGHVTISGGNPALLKGLSALVTHLKEKGVRIGLETQGSVWHDSFDDIDDLTISPKPPSSNMETNFATLDMIMDRLATHRGRVSLKVVVFNDQDFSYATYVHQRYPSVPFYVQVGNDHIHEADDVTLRLNLLQKLEWLVEQVIQSKHMNDVCVLPQLHTLLWGNRRGV

SEQ ID NO: 27789 - protein, 243 aa, Anoxybacillus sp.
  REGION 1..243: note = tr|A0A160FA63|A0A160FA63_9BACI 7-carboxy-7-deazaguanine synthase OS=Anoxybacillus sp. B7M1 OX=1490057 GN=queE PE=3 SV=1
MGKTIPVLEIFGPTIQGEGMVIGQKTMFVRTAGCDYSCRWCDSAFTWDGTAKEEIQQMTAEEIWQRLAEIGRDCFSHVTISGGNPALLKSLGELVRLLKAKGIRVALETQGSRWQDWFYEIDDLTISPKPPSSGMKTHFAILDEIMDKLTANGRTVHMSLKVVVFDERDFAYAKHVHQRYRHIPFYLQVGNDDVAGMDEAMLRTKLLNQLRWLVERVAYDPEMNDVRVLPQLHTLLWGNKRGV

SEQ ID NO: 27790 - protein, 240 aa, Anoxybacillus sp.
  REGION 1..240: note = tr|A0A094JUW6|A0A094JUW6_9BACI 7-carboxy-7-deazaguanine synthase OS=Anoxybacillus sp. KU2-6(11) OX=1535751 GN=queE PE=3 SV=1
MERIPVIEIFGPTIQGEGMVIGQKTMFVRTAGCDYRCRWCDSSFTWDGSAKDDIQQMTAEDVWQQLKQLGGDRFNHVTISGGNPALLKGLRALISLLKEHNIRIGLETQGSVWQDWFYDIDDLTISPKPPSSNMKTNFATLDTIMEQLTAHRGHVSLKVVVFDDEDFAYAKHVHERYPTVPFYVQVGNDELQEADDVTLRLKLLQKLEWLVEQVVQSNEMNDVRVLPQLHTLLWGNRRGV

SEQ ID NO: 27791 - protein, 240 aa, unidentified
  source 1..240: note = Anoxybacillus suryakundensis
  REGION 1..240: note = tr|A0A0K6GKJ1|A0A0K6GKJ1_9BACI 7-carboxy-7-deazaguanine synthase OS=Anoxybacillus suryakundensis OX=1325335 GN=queE PE=3 SV=1
MERIPVIEIFGPTIQGEGMVIGQKTMFVRTAGCDYRCRWCDSSFTWDGSAKHEIKQMTAEAIWQQMKQLGGDRFNHVTISGGNPALLKGLRALISLLKEHNMRIGLETQGSVWQDWFYDIDDLTISPKPPSSNMETNFATLDTMMERLTAHRGHVSLKVVVFDDEDFVYAQHVHERYPTVPFYVQVGNDDIHEADDVALRLKLLQKLEWLVDKVVQSKEMNNVRVLPQLHTLLWGNRRGV

SEQ ID NO: 27792 - protein, 240 aa, Anoxybacillus thermarum
  REGION 1..240: note = tr|A0A0D0S081|A0A0D0S081_9BACI 7-carboxy-7-deazaguanine synthase OS=Anoxybacillus thermarum OX=404937 GN=queE PE=3 SV=1
MERIPVIEIFGPTIQGEGMVIGQKTMFVRTAGCDYRCRWCDSSFTWDGSAKDEIKQMTAEHIWQQLKQLGGDRFNHVTISGGNPALLKSLRALISLLKQHRMRIGLETQGSVWQDWFYDIDDLTISPKPPSSNMETNFVMLDTIMNRLAMHRGQVSIKVVVFNDEDFAYAKHVHQRYPTVPFYVQVGNDDIHEGDDITLRLKLLQKLEWLVEQVVQSNEMNDVRVLPQLHTLLWGNRRGV

SEQ ID NO: 27793 - protein, 243 aa, unidentified
  source 1..243: note = Anoxybacillus vitaminiphilus
  REGION 1..243: note = tr|A0A327YSS9|A0A327YSS9_9BACI 7-carboxy-7-deazaguanine synthase OS=Anoxybacillus vitaminiphilus OX=581036 GN=queE PE=3 SV=1
MAKTIPVLEIFGPTIQGEGMVIGQKTMFVRTAGCDYSCRWCDSAFTWDGSAKEEIRQMTAEEVWHRLVELGGDRFSHVTISGGNPALIKALDELISLLKENKIRVALETQGSRWQDWFYDIDDLTISPKPPSSEMNTDFAVLDDIIERLNKRGRVANVSLKVVVFDEKDFAYAKFVHARYPNIPFYLQVGNDDVTELDDLTLRTKLLEKLEWLIEKTVQTKEMNDARVLPQLHALVWGNKRGV

SEQ ID NO: 27794 - protein, 224 aa, unidentified
  source 1..224: note = Anseongella ginsenosidimutans
  REGION 1..224: note = tr|A0A4R3KSE1|A0A4R3KSE1_9SPHI 7-carboxy-7-deazaguanine synthase OS=Anseongella ginsenosidimutans OX=496056 GN=queE PE=3 SV=1
MLNVDLERTSINQQVTAPPKEVPADGSFLPLMEEFYTIQGEGYNTGKAAYFIRLGGCDVGCHWCDVKESWDAALHPLTAADTIVANAARHPARAVVITGGEPLLYNLDYLCNELRKKGIKTFIETSGAYPLSGSWDWICLSPKKFKKPVPEILSLANELKVIVFNKSDFGWAEEHASHVSSLCKLYLQPEWSKAEETTPLIIDYVKENPRWQISLQTHKFMNIP

SEQ ID NO: 27795 - protein, 210 aa, unidentified
  source 1..210: note = Antarcticibacterium flavum
  REGION 1..210: note = tr|A0A5B7X3C4|A0A5B7X3C4_9FLAO 7-carboxy-7-deazaguanine synthase OS=Antarcticibacterium flavum OX=2058175 GN=queE PE=3 SV=1
MIKEETQELVDQGKMLPLMEAFYTIQGEGYHKGTAAYFIRIGGCDVGCHWCDVKESWNADLHPPTAVDTMVEEAVKYSKTIVITGGEPLTWDMGPLTSSLKEKGCAIHIETSGAYELTGHWDWICLSPKKIKLPTEEIYAVANELKVIVFNAHDLKFAEEQAAKVNNDCILYLQPEWSKREKMIPLIVDYVMKNPKWKVSLQTHKYLNIP

SEQ ID NO: 27796 - protein, 210 aa, unidentified
  source 1..210: note = Antarcticibacterium sp.
  REGION 1..210: note = tr|A0A5B8YPF0|A0A5B8YPF0_9FLAO 7-carboxy-7-deazaguanine synthase OS=Antarcticibacterium sp. PAMC 28998 OX=2585771 GN=queE PE=3 SV=1
MIKEEINAQVEQGTMLPLMEAFYTIQGEGFHKGTAAYFIRIGGCDVGCHWCDVKESWNAELHPPTGVEAMVEEATKYSKTVVITGGEPLTWNMKPLTDKLKERGCKIHIETSGAYKLTGQWDWICLSPKKLKLPTEEIYKVANELKVIVFNAHDLKFAEEQAARVNSECILYLQPEWSKREKMIPLIVDFVMQNPKWKVSLQTHKYLNIP

SEQ ID NO: 27797 - protein, 208 aa, Aphanizomenon flosaquae
  REGION 1..208: note = tr|A0A1B7VYL4|A0A1B7VYL4_APHFL 7-carboxy-7-deazaguanine synthase OS=Aphanizomenon flos-aquae LD13 OX=1710894 GN=queE PE=3 SV=1
MSLLKIKLPIHETFQSTVQGEGYWTGSLVDFIRLSGCPVRCPWCDTGYADGGANLPRLERSIGELLAEIISPRVVITGGEPFIHKHLPALVQVLSTADKQVNIETSGSFWQEISPAAWITLSPKEHINSKYPVQSQFWSRANEVKIVIETGTEIDFYQKYLSTHPNLLVYLQPEWYSFSKSLPLIFQILQKKPDYKLSLQTHKYIGVQ

SEQ ID NO: 27798 - protein, 208 aa, Aphanizomenon flosaquae
  REGION 1..208: note = tr|A0A0B0QWN9|A0A0B0QWN9_APHFL 7-carboxy-7-deazaguanine synthase OS=Aphanizomenon flos-aquae 2012/KM1/D3 OX=1532906 GN=queE PE=3 SV=1
MSFSEIKLPIHETFQSTVQGEGYWTGCLVDFIRLSGCPVACPWCDTGYADPRANLPRIERPIAELLGEIKSPRVVITGGEPFIHKHLPELVQALLVADKLVSIETSGSFWQEVSPAAWITLSPKEHLNAKYPVQSQFWSRANEVKIIIETGRELDFYEKYLSTHPNLLVYLQPEWNSSSKSLPLIFQILQQKPDYRLSLQTHKYIGVQ

SEQ ID NO: 27799 - protein, 205 aa, unidentified
  source 1..205: note = Aphanocapsa feldmannii
  REGION 1..205: note = tr|A0A524RMX9|A0A524RMX9_9CYAN 7-carboxy-7-deazaguanine synthase OS=Aphanocapsa feldmannii 277cV OX=2507553 GN=queE PE=3 SV=1
MAGSAVTSPSLPVLETFHSIQGEGTQTGFSAFFIRLGGCTVACPWCDTKHSWPMAGHPRRTLEELAAEARAHRPAFVLITGGEPLHHDLTELCAVLQQAGLAIHLETSGVDPLSGQFDWITLSPKAHRPPRPELLTACHALKVVVHSEDDLAFAVAMAARVAETTALLLQPGAGSETGQRLAIAFIKQHPRWRLSLQTHKWLGLR

SEQ ID NO: 27800 - protein, 205 aa, unidentified; identical to SEQ ID NO: 27799
  source 1..205: note = Aphanocapsa feldmannii
  REGION 1..205: note = tr|A0A524RKB1|A0A524RKB1_9CYAN 7-carboxy-7-deazaguanine synthase OS=Aphanocapsa feldmannii 288cV OX=2507555 GN=queE PE=3 SV=1

SEQ ID NO: 27801 - protein, 203 aa, unidentified
  source 1..203: note = Aphanothece cf.
  REGION 1..203: note = tr|A0A2T1F3A3|A0A2T1F3A3_9CHRO 7-carboxy-7-deazaguanine synthase OS=Aphanothece cf. minutissima CCALA 015 OX=2107695 GN=queE PE=3 SV=1
MVETFHSLQGEGLHAGRSAFFIRLAGCDVGCPWCDTKHSWPQAAHPTRPLADLAAEASAAAVAGAAFVVITGGEPLQQPMDGLCKALAATGLPLHLETSGVGQLSGRFDWITLSPKPHRPPAADLLARCDELKVVVTSPADLAFAEAMAAEAARLRPPAAPGPALLLQPAWDEPAGRELAVAYVRAHPDWRLSLQSHKWLGVR

SEQ ID NO: 27802 - protein, 204 aa, unidentified
  source 1..204: note = Aphanothece hegewaldii
  REGION 1..204: note = tr|A0A2T1M289|A0A2T1M289_9CHRO 7-carboxy-7-deazaguanine synthase OS=Aphanothece hegewaldii CCALA 016 OX=2107694 GN=queE PE=3 SV=1
MKTINRTLTYPIVETFHSVQGEGFWTGVNAYFIRLGGCDVYCPWCDQKESWNAKRHPQQSVNDLVQQAKNANPAIVIITGGEPLLHDLTPLTRQLKEYGLRTHLETSGSHPFSGVFDWVTFSPKQYKSPDESIYPQVQELKVVIANEDDLRWAQEQALLVPSHALKYLQSEWNTPSSQQLIFDYVLKHPEWRISLQSHKFLGVR

SEQ ID NO: 27803 - protein, 217 aa, unidentified
  source 1..217: note = Aphanothece sacrum
  REGION 1..217: note = tr|A0A401IN15|A0A401IN15_APHSA 7-carboxy-7-deazaguanine synthase OS=Aphanothece sacrum FPU1 OX=1920663 GN=queE PE=3 SV=1
MINNGYSLTLLAMKTIAPLIKTYPIVETFHSIQGEGAYMGVSAFFIRLAGCDVYCPWCDQKETWSVKPYAQQSIETLGNMAKNAKAAIIIITGGEPLMHDLNPLTKELQDLGLKVHLETSGSHPFTGEFDWVTFSPKPFKSPHDTIYPHVNELKIVIAQEKDLQWAQQQGQKVPVETLKYLQPEWNSPISQSLVFDYVLQHPEWRVSLQIHKFLGVQ

SEQ ID NO: 27804 - protein, 208 aa, unidentified
  source 1..208: note = Apibacter adventoris
  REGION 1..208: note = tr|A0A2S8ACW1|A0A2S8ACW1_9FLAO 7-carboxy-7-deazaguanine synthase OS=Apibacter adventoris; OX = 1679466 GN=queE PE=3 SV=1
MTGNDINLEMGLSLPIMEHFYTIQGEGRYTGTAAYFIRIGGCDVGCHWCDVKESWNANIHPIKKIDDIVKTAISFSKTIVLTGGEPLMWNLVPLTQKLKESGCNIHIETSGAYSINGQIDWICLSPKKTSLPKEDVYASAHELKVIVYNQHDFKFAEEQALKINKNALLYLQPEWSNREKMTPKIIDYVMKNPQWHISLQTHKYLNIP

SEQ ID NO: 27805 - protein, 209 aa, unidentified
  source 1..209: note = Apibacter mensalis
  REGION 1..209: note = tr|A0A0X3APU6|A0A0X3APU6_9FLAO 7-carboxy-7-deazaguanine synthase OS=Apibacter mensalis; OX = 1586267 GN=queE PE=3 SV=1
MKDIINRNLESGLSLPIMEHFYTIQGEGRYTGTAAYFIRIGGCDVECHWCDVKESWNPAIHPVSSVDKIAEIAASKCKTIVLTGGEPLMWNLEPLTIRLKNLGCRIHIETSGAYPLSGHIDWICLSPKKTALPLKSVYAKANELKVIIYNDHDFIFAEEQASNVNQNTILYLQPEWSKRNKVTTKIIDYVMKEPKWHISLQTHKYLNIP

SEQ ID NO: 27806 - protein, 207 aa, unidentified
  source 1..207: note = Apibacter sp.
  REGION 1..207: note = tr|A0A563DIU1|A0A563DIU1_9FLAO 7-carboxy-7-deazaguanine synthase OS=Apibacter sp. AL1; OX = 2509005 GN=queE PE=3 SV=1
MNEQSDLDLGLSLPIMEHFYTIQGEGRHTGTSAYFIRIGGCDVGCHWCDVKESWNPDLHPVSSAEEIAKMAVKHSKTIVLTGGEPLMWNLSPLTSILKELGCTIHIETSGAYPMSGTIDWICLSPKKNSLPLKEIYEKTHELKMIIYNQHDFIFAEEQAEKVNNEALLYLQPEWSNREKMTPKIIDYVMKNPKWKISLQTHKYLNIP

SEQ ID NO: 27807 - protein, 209 aa, unidentified
  source 1..209: note = Apibacter sp.
  REGION 1..209: note = tr|A0A2S8ADH3|A0A2S8ADH3_9FLAO 7-carboxy-7-deazaguanine synthase OS=Apibacter sp. wkB309; OX = 1679467 GN=queE PE=3 SV=1
MEDSITMDLESGLSLPIMEHFYTIQGEGRYTGTAAYFIRIGGCDVGCHWCDVKESWNPSIHPVSSVDKIAETAASQSKTIVLTGGEPLMWNLEPLTSRLKNLGCRIHIETSGSYPLSGHIDWICLSPKKTALPLESVYAKANELKVIVYNNHDFIFAEEQASKVNDNAILYLQPEWSNRNKVTPKIIDYVMKNSKWHVSLQTHKYLNIP

SEQ ID NO: 27808 - protein, 210 aa, Aquabacter spiritensis
  REGION 1..210: note = tr|A0A4R3M4F0|A0A4R3M4F0_9RHIZ 7-carboxy-7-deazaguanine synthase OS=Aquabacter spiritensis OX=933073 GN=queE PE=3 SV=1
MTYAVKEMFKTLQGEGAQAGRAAVFCRFAGCNLWSGREADRAQAVCRFCDTDFVGLDGEGGGRFADAAELSEALARVWGADRERRFVVFTGGEPLLQIDAPLIAAAHEAGFEIAIETNGTLPAPDGIDWICVSPKEGAALVQRRGHELKLVYPQPGLLPDQLAGLDFAHFFLQPMDGPARRENTAAAVAFCLDHPKWRLSLQTHKMIGIP

SEQ ID NO: 27809 - protein, 220 aa, Aquabacterium commune
  REGION 1..220: note = tr|A0A4R6RHZ6|A0A4R6RHZ6_9BURK 7-carboxy-7-deazaguanine synthase OS=Aquabacterium commune; OX = 70586 GN=queE PE=3 SV=1
MSYSVKEMFYTLQGEGTHAGRPAVFCRFAGCNLWSGREADRATAVCRFCDTDFVGTDGLGGGKFEHAEALAVRIASFWPDTGAGRKGQRFVVLTGGEPLLQVDADLIDALHAEGFLIAVETNGTIAAPAGLDWVCVSPKAGSTVVQTSGHELKVVVPQAGFSEADLQAMSSWQFGQRRVQAMDSADAAARQHAAAWAVQWCLDHPDWLLSVQTHKSLGIR

SEQ ID NO: 27810 - protein, 220 aa, unidentified
  source 1..220: note = Aquabacterium olei
  REGION 1..220: note = tr|A0A2U8FNI4|A0A2U8FNI4_9BURK 7-carboxy-7-deazaguanine synthase OS=Aquabacterium olei; OX = 1296669 GN=queE PE=3 SV=1
MTYSVKEIFYTLQGEGTHAGRPAVFCRFAGCNLWTGREADRAEAVCRFCDTDFVGTDGLGGGKFATPAELAARIASFWPDTPAGSQGQRFVVLTGGEPLLQVDDALVLALHAQGFEIAVETNGTVAAPAGLDWICVSPKAGSTLVQTRGHELKVVVPQAGFTEDDLRAFEKLDFQQFRVQAMDSALPGARDQAMNWAVQWCLDHPRWLLSVQTHKTLGIR

SEQ ID NO: 27811 - protein, 220 aa, Aquabacterium sp.
  REGION 1..220: note = tr|A0A426VCC8|A0A426VCC8_9BURK 7-carboxy-7-deazaguanine synthase OS=Aquabacterium sp. SJQ9 OX=2493092 GN=queE PE=3 SV=1
MTYSVKEIFYTLQGEGTHAGRPAVFCRFAGCNLWTGREEDRPKAICQFCDTDFVGTDGLGGGKFGTAQDLAARIASFWPDTAQGRDGRRFVVLTGGEPLLQVDVELIEALHAQGFEIAVETNGTVAAPPGLDWICVSPKAGSTLVQTSGHELKLVVPQAGFDDAKLAEFEAMDFVQRRVQPMDSASPEARRHATEWAVQWCLDHPRWMLSVQTHKTLGIR

SEQ ID NO: 27812 - protein, 220 aa, Aquabacterium sp.
  REGION 1..220: note = tr|A0A0A0DML4|A0A0A0DML4_9BURK 7-carboxy-7-deazaguanine synthase OS=Aquabacterium sp. NJ1; OX = 1538295 GN=queE PE=3 SV=1
MTYSVKEIFYTLQGEGTHAGRPAVFCRFAGCNLWTGREADRASAVCQFCDTDFVGTDGLGGGKFDTAQALAERIASFWPVTEAGAQGQRFVVMTGGEPLLQVDTALIEALHAKGFELAVETNGTIAAPAGLDWICVSPKAGSTLVQRSGHELKVVVPQAGFTEADLLAFEQLDFKQMRVQAMDSAQPQDRKKAMEWAVQWCLDHPRWLLSVQTHKTLGIR

SEQ ID NO: 27813 - protein, 242 aa, Aquamicrobium sp.
  REGION 1..242: note = tr|A0A4U6BZV7|A0A4U6BZV7_9RHIZ 7-carboxy-7-deazaguanine synthase OS=Aquamicrobium sp. LC103 OX=1120658 GN=queE PE=3 SV=1
MANVRIRVAEIFGPTIQGEGILIGLPTVFVRTGGCDYRCAWCDSLHAVDPAYRNDWSTMTTDAVWAKVKALSGGEPVMVSLSGGNPAIQPFGDLIRLGHEARYRFALETQGSVARDWFVDLDVLVLSPKPPSSGMDTDWHAFEDCLRAAGEGPQTALKIVVFDETDYAYARKAAARYPQLPLYLQPGNHTPPPADAQDAPIDITGVMKRMHWLVDRVARDRWFEARVLPQLHILLWGNRRGV

SEQ ID NO: 27814 - protein, 209 aa, Aquaspirillum sp.
  REGION 1..209: note = tr|A0A1U9JIN8|A0A1U9JIN8_9NEIS 7-carboxy-7-deazaguanine synthase OS=Aquaspirillum sp. LM1; OX = 1938604 GN=queE PE=3 SV=1
MYTVKELFYSLQGEGHHTGRPAVFCRFSGCNLWSGREADRAKAQCRFCDTDFVGTGPDGGKFAQAEALAERIAALWPANCGGQRYVVCTGGEPLLQLDSPLVDALHAQGFEVAVETNGTLPAPRALDWICVSPKGTARLAQTWGHELKLVYPQADCQPEQLAHLDFRHFYLQALDDPAHPEHQQAALDYCLQHPRWKLSVQTHKWLNIR

SEQ ID NO: 27815 - protein, 213 aa, Aquicella lusitana
  REGION 1..213: note = tr|A0A370GF47|A0A370GF47_9COXI 7-carboxy-7-deazaguanine synthase OS=Aquicella lusitana; OX = 254246 GN=queE PE=3 SV=1
MDRLRISEIFFSLQGETRTVGLPTVFVRLTGCPLRCQYCDTAYAFQGGTWYNLEAILAEVRQYNARYVTVTGGEPLAQKPCLKLLQCLCDDGYEVSLETSGALDVSLVDPRVIKVVDIKTPGSGEVEKNNWQNIRSLLPHDQIKFVICNEADYEWAKSIIAQYDLNSVCQILFSPSYQQVLPGDLADWILRDRLAVRFQIQLHKYLWGDVAGR

SEQ ID NO: 27816 - protein, 213 aa, Aquicella siphonis
  REGION 1..213: note = tr|A0A5E4PEP2|A0A5E4PEP2_9COXI 7-carboxy-7-deazaguanine synthase OS=Aquicella siphonis; OX = 254247 GN=queE PE=3 SV=1
MDRLRISEIFYSLQGETRTVGLPTVFVRLTGCPLRCQYCDTAYAFQGGQWMEKEAVLAEVRKYTVRYVTVTGGEPLAQKSCLSLLTRLCDEGYEVSLETSGALSVAQVDPRVIKVVDVKTPGSSESEKNDWANFAHLLPHDQIKFVICDQADYEWAKQIMDQYRLASRCHVLFSPSYHQLKAGELADWILHDQLPVRLQIQLHKYLWGDVAGK

SEQ ID NO: 27817 - protein, 219 aa, unidentified
  source 1..219: note = Aquifex aeolicus
  REGION 1..219: note = sp|O67826|QUEE_AQUAE 7-carboxy-7-deazaguanine synthase OS=Aquifex aeolicus (strain VF5) OX=224324; GN = queE PE=3 SV=1
MLRNKVRKTDTLIALNEVYESIQGEGLLVGLPSVFIRLQGCNLRCPWCDQPEALSFSGRKVKLSSLINELKKFTAKHIVITGGEPFAHRELPFIVEFLLSEGYSVQIETNGTLWVEEMEKFAEGIHITCSPKGVAKYYVHPKILKYAKELKFVVDKEFSKEVLKKEEFERFLREGKVVLQPESNRKEMMEKALKIQKELLKECYTVRVIPQVHKCFDLK

SEQ ID NO: 27818 - protein, 219 aa, Aquifex sp.
  REGION 1..219: note = tr|A0A432PZT6|A0A432PZT6_9AQUI 7-carboxy-7-deazaguanine synthase OS=Aquifex sp. OX=313370; GN = queE PE=3 SV=1
MLRDKVRKTNTLIAINEIYESIQGEGLLVGLPSVFIRLQGCNLRCPWCDQPEALSFKKNYRKLSDLMKELTSFSAKHVVITGGEPFAHKELPSLVETLLDEGYSVQIETNGTLWIEDIDRLASRIHITCSPKAVARFFVHPKILLYAKELKFVVDEELNKEVLLRDEFKEFLRKGKVVLQPESNRKDMLEKAMSLQKELLMENFTVRVIPQVHKCFQIK

SEQ ID NO: 27819 - protein, 219 aa, Aquifex sp.
  REGION 1..219: note = tr|A0A432Q1Y1|A0A432Q1Y1_9AQUI 7-carboxy-7-deazaguanine synthase OS=Aquifex sp. OX=313370; GN = queE PE=3 SV=1
MLRDKVRKTNTLIALNEVYESIQGEGLLVGLPSIFIRLQGCNLRCPWCDQPEALTFSVKSTKLSVLIEEIKKFTAKHVVITGGEPFAHKELPYIVEALLSEGYSIQIETNGTLWVEGMEKFAKEIHITCSPKGVAKFFVHPQILNYARELKFVVDEELSKEILKRKEFERFLKEGKVVLQPESNRKEMMKKALKIQKELAKEGFTVRVIPQVHKCFDLK

SEQ ID NO: 27820 - protein, 213 aa, unidentified
  source 1..213: note = Aquificaceae bacterium
  REGION 1..213: note = tr|A0A432EXT3|A0A432EXT3_9AQUI 7-carboxy-7-deazaguanine synthase OS=Aquificaceae bacterium OX=2053503 GN=queE PE=3 SV=1
MPSLQITEIFYSLQGETKTSGLPTVFIRLTGCPLRCHYCDTEYAFTGGEAIKLARILTLVKSYKTHYVTVTGGEPLAQKECLNLLKMLCDEGYEVSLETSGAISLVGVDERVCQVMDLKTPASGEADKNLWGNLQYLKPSDQIKFVICDRDDYNWMKTIADAHDLYRRCEILVSPSFGEVDHRELADWILEDKLAVRYQLQLHKLLWDDEAGR

SEQ ID NO: 27821 - protein, 215 aa, unidentified
  source 1..215: note = Aquificaceae bacterium
  REGION 1..215: note = tr|A0A350CZE0|A0A350CZE0_9AQUI 7-carboxy-7-deazaguanine synthase OS=Aquificaceae bacterium OX=2053503 GN=queE PE=3 SV=1
MLRSEVRKASISINEVYPSIQGEGLLVGLPSLFIRVQGCNLRCPWCDQPSALPFKNPSTSLEDLISLVETYPHKHIVITGGEPFTEVSLPDLVKELLKMGKSVQIETNGTLWQEELEDVAENIHITCSPKAVAGWYVHQKIRKYAKELKFVVDENLNLDVLLAFEDFLKRSCVVLQPESNKAQFLEKALDLQNKLLHLGYEVRVLPQVHKLLGLK

SEQ ID NO: 27822 - protein, 214 aa, unidentified
  source 1..214: note = Aquificae bacterium
  REGION 1..214: note = tr|A0A3M0WEF0|A0A3M0WEF0_9BACT 7-carboxy-7-deazaguanine synthase OS=Aquificae bacterium; OX = 2202151 GN=queE PE=3 SV=1
MVKTKKIKVVEIFKTVEGEGSWVGLPVSFIRLEGCNLRCPWCDTPYSYDGKSYKEYTIEEIFSSVEKFGLKRLCITGGEPFLTEELPDILEIFLKNGYKVLVETNGTLWNERIKDIFTENLFIVCSPKPPSYYIHPELIPYISELKFVVDSFITFENIYRKEILEKVRNKMIILQPESNLKDMVFKALDLQEKLLKKEIESRIIPQCHKVLGLP

SEQ ID NO: 27823 - protein, 218 aa, unidentified
  source 1..218: note = Aquificae bacterium
  REGION 1..218: note = tr|A0A3M2B0H5|A0A3M2B0H5_9BACT 7-carboxy-7-deazaguanine synthase OS=Aquificae bacterium; OX = 2202151 GN=queE PE=3 SV=1
MLRDKAVRTATISLNEVYTSIQGEGLLVGTPCIFVRLQGCNLRCPWCDQPSALSFSQKGVEIGKVIDLVESFPHRHVVITGGEPFAHRNLHILVRELLSLGRSVQIETNGTLWQEEIDELASLLHITCSPKGEVNWYAHPKILEHAKELKFVVDEKLSPRVLLRGEFSKFLEKGLVVLQPEGNKKEFFTKALAIQEELLRLGLSVRVIPQVHKFLGLR

SEQ ID NO: 27824 - protein, 209 aa, Aquiflexum balticum
  REGION 1..209: note = tr|A0A1W2H227|A0A1W2H227_9BACT 7-carboxy-7-deazaguanine synthase OS=Aquiflexum balticum DSM 16537 OX=758820 GN=queE PE=3 SV=1
MENIIKEVKSGIKLPLMEAFYTIQGEGMHSGTAAYFIRLGGCDVGCVWCDVKESWDVSKWPEVDIEDIVDSALEYPGRLVVITGGEPLMHDLGPLTKLLKEKGFVTNIETSGVYPVTGEFDWICFSPKKFKKPHPSIYELADELKVVIYHQSDFAFAEKHAEKVKESCKKLLQPEWSKKDRMTEHIINYVKSSPNWKISLQTHKFMDIP

SEQ ID NO: 27825 - protein, 209 aa, unidentified
  source 1..209: note = Aquimarina aggregata
  REGION 1..209: note = tr|A0A163BC46|A0A163BC46_9FLAO 7-carboxy-7-deazaguanine synthase OS=Aquimarina aggregata; OX = 1642818 GN=queE PE=3 SV=1
MQESVQKLVNIGEMLPLMEEFYTIQGEGYHKGTAAYFIRIGGCDVGCHWCDVKESWNADLHPPTLTEKIVDNALKYSNVVVVTGGEPLTWDMTLLTQGLKSKGAQTHIETSGAYPLTGDWDWICLSPKKVKRPTKQIYGVANELKCIIYNKSDFAFAEEQAAKVSEDCILYLQPEWSVRDKMIPLMVDFVMKNPKWRVSLQTHKYLNIP

SEQ ID NO: 27826 - protein, 209 aa, unidentified
  source 1..209: note = Aquimarina algiphila
  REGION 1..209: note = tr|A0A554VLC3|A0A554VLC3_9FLAO 7-carboxy-7-deazaguanine synthase OS=Aquimarina algiphila; OX = 2047982 GN=queE PE=3 SV=1
MQESVQKLVNDGKMLPLMEEFYTIQGEGFHKGTAAYFVRIGGCDVGCHWCDVKESWNADLHPPTDTGLIIENSLKYSDVVVVTGGEPLTWDMSLLTQGLRDRGAKTHIETSGAYALTGEWDWICLSPKKVKLPKEEIYQKAHELKCIVYNKSDFAFAEEQAAKVSDHCILYLQPEWSVREKMIPMIVDYVMKNPKWKVSLQTHKYLNIP

SEQ ID NO: 27827 - protein, 209 aa, unidentified
  source 1..209: note = Aquimarina amphilecti
  REGION 1..209: note = tr|A0A1H7WEP0|A0A1H7WEP0_9FLAO 7-carboxy-7-deazaguanine synthase OS=Aquimarina amphilecti; OX = 1038014 GN=queE PE=3 SV=1
MQESTEKLVNEGRMLPLMEEFYTIQGEGYHKGTAAYFVRIGGCDVGCHWCDVKESWNAALHPPTSTRVIVDNAVKYSNVVVVTGGEPLTWDMSELTKGLKSKGAKTHIETSGAYTLTGNWDWICLSPKKVKLPTKEIYSKAHELKCIVYNKSDFDFAEEQASQVSKDCVLYLQPEWSVREKMIPLIVDYVMKNPKWKVSLQTHKYLNIP

SEQ ID NO: 27828 - protein, 209 aa, unidentified
  source 1..209: note = Aquimarina atlantica
  REGION 1..209: note = tr|A0A023BSL5|A0A023BSL5_9FLAO 7-carboxy-7-deazaguanine synthase OS=Aquimarina atlantica; OX = 1317122 GN=queE PE=3 SV=1
MQKSIQKLVNDGKMLPLMEEFYTIQGEGYHKGTAAYFVRIGGCDVGCHWCDVKESWNADLHPPTDTNVIVENALQYSDVIVVTGGEPLTWDMTMLTQGLKSKGAKTHIETSGAYPLTGEWDWICLSPKKVKLPKEEVYKKADELKCIVYNKSDFEFAERQADKVSDHCVLYLQPEWSVREKVIPLIVDYVMKNPKWKVSLQTHKYLNIP

SEQ ID NO: 27829 - protein, 209 aa, Aquimarina brevivitae
  REGION 1..209: note = tr|A0A4Q7NY32|A0A4Q7NY32_9FLAO 7-carboxy-7-deazaguanine synthase OS=Aquimarina brevivitae; OX = 323412 GN=queE PE=3 SV=1
MEKSINDLVAAGKMLPLMEEFYTIQGEGYHKGTAAYFIRVGGCDVGCHWCDVKESWNADVHPPTDVDKIIESASVFSDTIVVTGGEPLTWDMTYLTNGLKRKGMKTHIETSGAYKLTGQWDWICLSPKKMKPPTEEVYQKADELKCIVYNKSDFAFAEHQASKVGKDCLLYLQPEWSKRDKIIPLIVDYVMENPKWKVSLQTHKYLNIP

SEQ ID NO: 27830 - protein, 209 aa, Aquimarina sp.
  REGION 1..209: note = tr|A0A3A9W125|A0A3A9W125_9FLAO 7-carboxy-7-deazaguanine synthase OS=Aquimarina sp. AD10; OX = 1714849 GN=queE PE=3 SV=1
MQESVQKLVNIGEMLPLMEEFYTIQGEGYHKGTAAYFIRIGGCDVGCHWCDVKESWNADLHPPTLTEKIVDNALKYSNVVVVTGGEPLTWDMTLLTQGLKSKGAQTHIETSGAYPLTGDWDWICLSPKKVKLPTKQIYGVANELKCIIYNKSDFAFAEEQAAKVSEDCILYLQPEWSVRDKMIPLMVDFVMKNPKWRVSLQTHKYLNIP

SEQ ID NO: 27831 - protein, 209 aa, Aquimarina sp.
  REGION 1..209: note = tr|A0A3A9VK86|A0A3A9VK86_9FLAO 7-carboxy-7-deazaguanine synthase OS=Aquimarina sp. BL5; OX = 1714860 GN=queE PE=3 SV=1
MQKSTEKLVNEGKMLPLMEEFYTIQGEGYHKGTAAYFVRIGGCDVGCHWCDVKESWNADLHPPTATDVIVENAVKYSNVVVVTGGEPLTWDMTELTKGLKNKGAQTHIETSGAYPLTGHWDWICLSPKKVKLPKQEIYSEAHELKCIIYNKNDFDFAEEQAAQVSENCVLYLQPEWSVRDKVIPLIVDYVMKNPKWKVSLQTHKYLNIP

SEQ ID NO: 27832 - protein, 209 aa, Aquimarina spongiae
  REGION 1..209: note = tr|A0A1M6KJF3|A0A1M6KJF3_9FLAO 7-carboxy-7-deazaguanine synthase OS=Aquimarina spongiae; OX = 570521 GN=queE PE=3 SV=1
MQKSTQELVNLGEMLPLMEEFYTIQGEGYHKGTAAYFIRIGGCDVGCHWCDVKESWNAELHPPTHTDFIVNTALKYSDVVVVTGGEPLTWDMTLLTKGLREGGAKTHIETSGAYSLSGEWDWICLSPKKVKLPVAEIYPMADELKCIVYNKSDFAFAEEQASKVSEDCILYLQPEWSVREKMIPLIVDYVMKNPKWKVSLQTHKYLNIP

SEQ ID NO: 27833 - protein, 245 aa, Aquimonas voraii
  REGION 1..245: note = tr|A0A1G6ZAH7|A0A1G6ZAH7_9GAMM 7-carboxy-7-deazaguanine synthase OS=Aquimonas voraii; OX = 265719 GN=queE PE=3 SV=1
MSTERRATNPPPSRASDSAVNPESPIPNPIAQSDRLRLTEIFLSLQGESRSVGWPTVFVRLTGCPLRCGYCDTAYAFHGGEWWEIEDILAEVARHGAHHVCVTGGEPLAQKRCLLLLERLCDAGYSVSLETSGAIDIAPVDLRVQRVIDLKTPGSGELAKNRWQNLDHLQPSDQIKFVVCDRADFDWAMQVTREHRLHERCEVLVSPSFGQVQAAELADWLLAEKLPIRFQMQLHKQLWGEAQGR

SEQ ID NO: 27834 - protein, 220 aa, Aquisalimonas asiatica
  REGION 1..220: note = tr|A0A1H8U1C5|A0A1H8U1C5_9GAMM 7-carboxy-7-deazaguanine synthase OS=Aquisalimonas asiatica OX=406100 GN=queE PE=3 SV=1
MNETTETARLRITEIFHSLQGEARSVGWPTVFVRLTGCPLRCHYCDTAYAFHGGDTRSLPEIMAEVQRHGSRHVTVTGGEPLAQRKGCHALLQALVDAGHEVSIETSGAMDIDGIDSRVSRVVDLKTPASGESSRNLWSNIELLEPNDQVKFVICDRADYEWACAVLADYALADRCEVLFSPSFGQLSGRDLADWVVADALPVRFQLQLHKLLWGDVPGR

SEQ ID NO: 27835 - protein, 366 aa, Aquisphaera giovannonii
  REGION 1..366: note = tr|A0A5B9W631|A0A5B9W631_9BACT 7-carboxy-7-deazaguanine synthase OS=Aquisphaera giovannonii OX=406548 GN=queE_2 PE=4 SV=1
MAVQLESIPSTVPTRYWHALEDGRVQCDLCPRLCKLHEGQRGFCFVRAREGDRIVLTTYGRSSGFCVDPIEKKPLYHFLPGTPVLSFGTAGCNLACKFCQNWDISKSRETDTLADSASPDVIANAAERLGCRSVAFTYNDPVIFHEYAIDVAEACRARGIKAVAVTAGEVCAEPRAEFYRVMDAANVDLKGFTERFYRDVCASSLRPVLETLKYLKHETPVWFELTTLLIPGENDSDGELDDLTRWVAEELGPDVPIHFSAFHPDYRMQDKPRTPAATLRRARSIAIGNGLRYAYVGNVHDPEADSTRCHACGHLLIGRDWYTLTGWDLTPDGRCPGCQAPCAGLFEAEPGTWGPRRQPVRLADFR

SEQ ID NO: 27836 - protein, 241 aa, Aquisphaera giovannonii
  REGION 1..241: note = tr|A0A5B9VYM6|A0A5B9VYM6_9BACT 7-carboxy-7-deazaguanine synthase OS=Aquisphaera giovannonii OX=406548 GN=queE_1 PE=3 SV=1
MISAASNSVDHPADALARRLKALRSKPPGSLVIHEIYRSLQGESTFMGLPCVFIRLTACHLRCVYCDTRHAFHEGGPMTLDEVVERALGFGDDLVEITGGEPLLQPEVLPLMSRLADLGKTVLLETSGAVDTSAVDPRVRVILDLKTPGSGEVAANIWRNLDHLRPTDELKLVLCDRRDFDWAVEIVRELRLLERCPVLFSAAAGRLNATELAGWILETRLPIRLQIQQHKVLWDPNARGV

SEQ ID NO: 27837 - protein, 209 aa, Aquitalea magnusonii
  REGION 1..209: note = tr|A0A318J672|A0A318J672_9NEIS 7-carboxy-7-deazaguanine synthase OS=Aquitalea magnusonii; OX = 332411 GN=queE PE=3 SV=1
MYTVKEIFYTLQGEGRQAGRAAVFCRFAGCNLWSGREEDRSKAVCQFCDTDFVGTGPDGGKFASAAELAARIASEWPAGSGGTPYVVCTGGEPLLQLDAELIAALHAEGFEIAVETNGTIAAPAGIDWICVSPKAGAPLLQTSGNELKLVYPQATQLPETVAHLQFDTFYLQPMDGPELAANTRAAIAYCMAHPRWRLSVQTHKVVNIR

SEQ ID NO: 27838 - protein, 209 aa, Aquitalea magnusonii
  REGION 1..209: note = tr|A0A0F3K8X4|A0A0F3K8X4_9NEIS 7-carboxy-7-deazaguanine synthase OS=Aquitalea magnusonii; OX = 332411 GN=queE PE=3 SV=1
MYTVKEIFYTLQGEGRQAGRAAVFCRFSGCNLWSGREEDRSKAVCQFCDTDFVGTGPDGGKFATAAELAARIASEWPAGSGGTPYVVCTGGEPLLQLDAALIEALHAEGFEIAVETNGTIAAPAGIDWICVSPKAGAPLLQTSGNELKLVYPQATQLPETVAHLQFDTFYLQPMDGPELAANTRAAIAYCMAHPRWRLSVQTHKVVNIR

SEQ ID NO: 27839 - protein, 209 aa, Aquitalea sp.
  REGION 1..209: note = tr|A0A454JMI9|A0A454JMI9_9NEIS 7-carboxy-7-deazaguanine synthase OS=Aquitalea sp. MWU14-2217 OX=2480983 GN=queE PE=3 SV=1
MYTVKEIFYTLQGEGRQAGRAAVFCRFAGCNLWSGREEDRSKAVCQFCDTDFVGTGPDGGKFATATELAAHIASQWPAGSGGTPYVVCTGGEPLLQLDAELIAALHAVGFEIAVETNGTIAAPDGLDWICVSPKAGAPLLQTSGNELKLVYPQATQLPETVAHLQFDTFYLQPMDGPELAANTRAAIAYCMAHPRWRLSVQTHKVVNIR

SEQ ID NO: 27840 - protein, 209 aa, Aquitalea sp.
  REGION 1..209: note = tr|A0A3N7CVS8|A0A3N7CVS8_9NEIS 7-carboxy-7-deazaguanine synthase OS=Aquitalea sp. FJL05; OX = 2153366 GN=queE PE=3 SV=1
MYTVKEIFYTLQGEGRQAGRAAVFCRFAGCNLWSGREEDRSKAVCQFCDTDFVGTGPDGGKFATAAALAARIASQWPAGSGGTPYVVCTGGEPLLQLDTELIAALHAEGFEIAVETNGTIAAPAGIDWICVSPKAGAPLLQTSGNELKLVYPQATQLPETVAHLQFDTFYLQPMDGPELAANTRAAIAYCMAHPRWRLSVQTHKVVNIR

SEQ ID NO: 27841 - protein, 247 aa, unidentified
  source 1..247: note = Arachidicoccus rhizosphaerae
  REGION 1..247: note = tr|A0A1H3X926|A0A1H3X926_9BACT 7-carboxy-7-deazaguanine synthase OS=Arachidicoccus rhizosphaerae OX=551991 GN=queE PE=3 SV=1
MSEVAMERAELQIQIDAGKSLPVMEAFYTLQGEGNYQGRAAYFIRLGGCDVGCVWCDVKESWDAELHPVKTVEQIVQDAIQEILSDIKAAEIASGAESMEALGDAAGTDMIRGCIVVVTGGEPLMYELGPLTKALHAAGFRVHIETSGAYPLSGEIDWVCVSPKKFKAPLPEVISRAQELKVVVFNKSDFLWAEQHAAQVSPDCKLYLQPEWSKEKQMLPLMIDYVKTHPLSTWSLCVQVHKYINVP

SEQ ID NO: 27842 - protein, 198 aa, unidentified
  source 1..198: note = Arachidicoccus sp.
  REGION 1..198: note = tr|A0A386HTK5|A0A386HTK5_9BACT 7-carboxy-7-deazaguanine synthase OS=Arachidicoccus sp. KIS59-12 OX=2341117 GN=queE PE=3 SV=1
MESFYTIQGEGFYQGRAAYFIRLGGCDVGCVWCDVKDSWDAAAHPSYSVEEIISKALNEVGGNAKNIIAVITGGEPLMYNLDALTNGLHKAGFQINIETSGAYTLSGNIDWICLSPKKFKEPLPEVIAKAQELKIIIYNKSDFAWAEKYAAQTPSECKLYLQPEWSKEKQMLPLMIDYIKQHPKWELSVQIHKYINVP

SEQ ID NO: 27843 - protein, 213 aa, unidentified
  source 1..213: note = Arachidicoccus sp.
  REGION 1..213: note = tr|A0A191TNL0|A0A191TNL0_9BACT 7-carboxy-7-deazaguanine synthase OS=Arachidicoccus sp. BS20 OX=1850526 GN=queE PE=3 SV=1
MEIINQTSQIKHTLPVMEAFYTIQGEGFYQGRAAYFIRLGGCDVGCVWCDVKESWDANLHPQQTVTKIVTDALQETNKAKNVIAVITGGEPLMYNLDELTNALQEVGFQTNIETSGAYSLSGNLDWICLSPKKFKAPLPEVIAKANELKIIIYNKSDFAWAEKYAAQTKPDCKLYLQPEWSKEKEMLPLIVDYIKQNPKWELSLQIHKYINVP

SEQ ID NO: 27844 - protein, 210 aa, unidentified
  source 1..210: note = Arboricoccus pini
  REGION 1..210: note = tr|A0A212RN74|A0A212RN74_9PROT 7-carboxy-7-deazaguanine synthase OS=Arboricoccus pini; OX = 1963835 GN=queE PE=3 SV=1
MTYAVKELFKTLQGEGARTGRAAVFCRFAGCNLWSGRERDRAEAVCRFCDTDFVGLDGEGGGRFADAASLASAIVDTWDGEEQLRYVVFTGGEPLLQLDQALVDAVRAAGFEVAVETNGTLLPPVPLDWVCVSPKARAELALASGDELKLVYPQDGLDPANFTGLDFRHFFLQPLDGPTREQNVQAAIAYCLAHPRWRLSLQTHKMIGIP

SEQ ID NO: 27845 - protein, 230 aa, Archangium gephyra
  REGION 1..230: note = tr|A0A2W5TLU0|A0A2W5TLU0_9DELT 7-carboxy-7-deazaguanine synthase OS=Archangium gephyra; OX = 48 GN=queE PE=3 SV=1
MLALRPHIEPRRIASADSVMVKEIYLSLQGESTHQGLLCAFVRLTGCHLRCTYCDSEFAFRGGTRMKNRDVVKEIVALNTPMVEVTGGEPLLQPGVYPLMEQLLDAGLTVLLETSGAIDVREVPDAVHAIVDMKTPSSGEVDRNDYKNFTSMDARDELKFVIGSREDFEWSVKLIREHQLTKKPFGMLFSSVFEKLHPQQLAQWIIDERLPVRFQLQQHKYVWEPNARGV

SEQ ID NO: 27846 - protein, 230 aa, Archangium gephyra
  REGION 1..230: note = tr|A0A0G2ZM07|A0A0G2ZM07_9DELT 7-carboxy-7-deazaguanine synthase OS=Archangium gephyra; OX = 48 GN=queE PE=3 SV=1
MPVARPHIEPRRVPTADSVVVKEFYLSVQGESSHAGLLCSFVRLTGCHLRCTYCDSEFAFHGGTRMKIPEVVARVKELGSPRVEVTGGEPLLQPGVYPLMEELLAAGLIVLLETSGAIDVRLVPPAVHKIVDMKTPSSGECDRNDYRNLTSMNANDELKFVIGSREDYEWSKKLIAEHRLLEKPYGLLFSTIFGKLTTKELAEWIIADRLPVRFQLQMHKYIWEPNERGV

SEQ ID NO: 27847 - protein, 230 aa, Archangium sp.
  REGION 1..230: note = tr|A0A1Q3H5B0|A0A1Q3H5B0_9DELT 7-carboxy-7-deazaguanine synthase OS=Archangium sp. Cb G35; OX = 1920190 GN=queE PE=3 SV=1
MPVARPHIEPRRVPTADSVVVKEFYLSVQGESSHAGLLCSFVRLTGCHLRCTYCDSEFAFHGGTRMKIPEVVARVKELGAPRVEVTGGEPLLQPGVYPLMEELLASGLTVLLETSGAIDVRLVPPAVHKIVDMKTPSSGECERNDYRNLTSMNANDELKFVIGSREDYEWSKKLIAEHRLLEKPYGLLFSTIFGKLTTKELAEWIIADRLPVRFQLQMHKYIWEPNERGV

SEQ ID NO: 27848 - protein, 230 aa, unidentified
  source 1..230: note = Archangium violaceum
  REGION 1..230: note = tr|A0A084SRJ5|A0A084SRJ5_9DELT 7-carboxy-7-deazaguanine synthase OS=Archangium violaceum Cb vi76 OX=1406225 GN=queE PE=3 SV=1
MPVARPHIEPRRVPTADSVVVKEFYLSVQGESSHAGLLCSFVRLTGCHLRCTYCDSEFAFHGGTRMKIPEVVARVKELGAPRVEVTGGEPLLQPGVYPLMEELLAAGLIVLLETSGAIDVRLVPPAVHKIVDMKTPSSGECDRNDYRNLTSMNAQDELKFVIGSREDYEWSKKLITEHRLLEKPYGLLFSTIFGKLTTKELAEWIIEDRLPVRFQLQMHKYIWDPNERGV

SEQ ID NO: 27849 - protein, 209 aa, Arcicella aurantiaca
  REGION 1..209: note = tr|A0A316ED38|A0A316ED38_9BACT 7-carboxy-7-deazaguanine synthase OS=Arcicella aurantiaca; OX = 591202 GN=queE PE=3 SV=1
MVTENIQSTTQALPVMEAFYTLQGEGFHQGRAAYFIRLGGCDVGCHWCDVKESWDINAHPKLSLEQIVEEASQHQGRLAVVTGGEPLMHNLEELTTALHQAGFETNIETSGVCEQVTGDWDWICFSPKKFKKPNPEIYPRANELKVIIYNQSDFEWAESFADVISSNCMLYLQPEWSRMETMLPEIIEYIKNNPKWRISLQVHKFMDIP

SEQ ID NO: 27850 - protein, 249 aa, unidentified
  source 1..249: note = Arcobacter anaerophilus
  REGION 1..249: note = tr|A0A4Q0XYF8|A0A4Q0XYF8_9PROT 7-carboxy-7-deazaguanine synthase OS=Arcobacter anaerophilus OX=877500 GN=queE PE=3 SV=1
MLEINEIFGPTIQGEGKLIGTPSIFIRVGKCNMKCVGFNVEYETPSGIKKCSCDSYYAVDTAFKEQWHKMLCEDIIKKVEELKPAYKVDIVITGGEPLLYWSNVEFQKLLKYYIENGYKVTIETNASLNIDFKEQYQKNILFSMSVKLSNSLEPLKKRVNTDTLTKILTNTKESYLKFVIDKKFIDTANKEIDSILEQIPKCDVYLMPMGDTADEINKNSEAVINMAIKNGFRYCDRLHIRVWDNKRGV

SEQ ID NO: 27851 - protein, 254 aa, unidentified
  source 1..254: note = Arcobacter aquimarinus
  REGION 1..254: note = tr|A0A4Q0UST3|A0A4Q0UST3_9PROT 7-carboxy-7-deazaguanine synthase OS=Arcobacter aquimarinus OX=1315211 GN=queE PE=3 SV=1
MLEINEIFGPTIQGEGKLVGTPSIFIRFGKCNFSCVGFAVEYETPSGIKKCACDSYYAVDTEFKDTWTKYKSYEEIVDEVNKLINIFQYNYKIDIVITGGEPLLYWNKKEFQKLLEHYINDGHNVTIETNASLNLNFEHEYQKKLLFSMSVKLSNSLEPIKKRINKETLTKILSNTKDSYLKFVIGKDFLTQAKKEIIEIIKEIPKCEVYLMPLGDTAEEINKNCEEVINMAIQNGFKYCDRLHIRVWDNKRGV

SEQ ID NO: 27852 - protein, 251 aa, unidentified
  source 1..251: note = Arcobacter bivalviorum
  REGION 1..251: note = tr|A0A345J048|A0A345J048_9PROT 7-carboxy-7-deazaguanine synthase OS=Arcobacter bivalviorum OX=663364 GN=queE PE=3 SV=1
MSLLEVNEIFGPTIQGEGKLVGTPSIFIRLGKCNFKCEGFNVEYETPSGIKKCSCDSYYAVDMAFKEQWQQMNAQQIIKEVLLLEPNYKIDIVITGGEPLLYWKNEEFQKLLKHYIENNYKVTIETNGSLNIDLTETYQKQILFSMSVKLSNSLEPLKKRVNVNTLTKIITETEGSYLKFVIDEGFKEEANIEIQNILSSIPKVDVFLMPMGDTAEQINKNSEAVINLAIENGYKYCDRLHIRVWDNKRGV

SEQ ID NO: 27853 - protein, 254 aa, Arcobacter butzleri
  REGION 1..254: note = tr|A0A2W5JSC4|A0A2W5JSC4_9PROT 7-carboxy-7-deazaguanine synthase OS=Arcobacter butzleri; OX = 28197 GN=queE PE=3 SV=1
MLEINEIFGPTIQGEGKLVGTPSIFIRFGKCNFSCTGFGVIYETPSGIKKCACDSYYAVDKEFKDTWTKYQSYNDIVAEVDNLISTYNYNYKIDIVITGGEPLLYWNKKEFQKLLKHYIENGHKVTIETNASLNINFEFDYQKEILFSMSVKLSNSLEPLNKRINKNTLVKILENTKDSYMKFVIGKDFLNKAKAEIIEILKDIPKCEVYLMPLGDTADEINKNCEDVINMAIENGFKYCDRLHIRVWNNKRGV

SEQ ID NO: 27854 - protein, 254 aa, Arcobacter butzleri
  REGION 1..254: note = tr|A8EWF3|A8EWF3_ARCB4 7-carboxy-7-deazaguanine synthase OS=Arcobacter butzleri (strain RM4018) OX=367737; GN = queE PE=3 SV=1
MLEINEIFGPTIQGEGKLVGTPSIFIRFGKCNFSCTGFGVVYETPSGIKKYACDSYYAVDKEFKDTWTKYQSYNDIVAEVDNLISTYNYNYKIDIVITGGEPLLYWNKKEFQKLLKHYIENGHKVTIETNASLNINFEFDYQKEILFSMSVKLSNSLEPLNKRINKNTLVKILENTKDSYMKFVIGKDFLNKAKTEIIEILKDIPKCEVYLMPLGDTADEINKNCEDVINMAIENGFKYCDRLHIRVWNNKRGV

SEQ ID NO: 27855 - protein, 250 aa, unidentified
  source 1..250: note = Arcobacter canalis
  REGION 1..250: note = tr|A0A2G1CVX0|A0A2G1CVX0_9PROT 7-carboxy-7-deazaguanine synthase OS=Arcobacter canalis; OX = 1912871 GN=queE PE=3 SV=1
MLEVNEIFGPTIQGEGKRVGTASVFIRFGKCNFKCEGFAVEYETPSGIKKCACDSYYAVDPAFKDQWHTFSNANDLIEEVNKILPSYKCDIVITGGEPLLYWKNKEFQKLLKYYVTNDYKVTIETNASLNIYITEKYQEDILFSMSVKLSNSLEPLKKRVNIKTLTSIINKCKDKYLKFVVNKDFLTQANNEIQDILKQLPYVETYLMPMGDNTQEMNKNSEAVINLALENGFKYCDRLHIRVWDNKRGV

SEQ ID NO: 27856 - protein, 254 aa, Arcobacter cibarius
  REGION 1..254: note = tr|A0A5J6RF66|A0A5J6RF66_9PROT 7-carboxy-7-deazaguanine synthase OS=Arcobacter cibarius; OX = 255507 GN=queE PE=4 SV=1
MLEVNEIFGPTIQGEGKLIGTPSIFIRFGKCNFKCVGFNVEYETPSGIKKCACDSYYAVDMEFKDSWKKYKSHADIVDEVENLLSSFEYDFKIDIVITGGEPLLYWNNDEFQKLLEYYINRNHKVTIETNGSLNIDFTKEYQNKILFSMSVKLSNSLEPLKKRVNKLTLTKILTNTKESYLKFVIGDDFLTNAIVEIKEIIKDIPSCEIFLMPLGDTAENIDRNSLNVVNLAIKYGFKYSDRLHIRLWDNKRGV

SEQ ID NO: 27857 - protein, 254 aa, unidentified
  source 1..254: note = Arcobacter cloacae
  REGION 1..254: note = tr|A0A4Q0V9F6|A0A4Q0V9F6_9PROT 7-carboxy-7-deazaguanine synthase OS=Arcobacter cloacae; OX = 1054034 GN=queE PE=3 SV=1
MLEINEIFGPTIQGEGKLVGTPSIFIRFGKCNFSCVGFAVEYETPSGIKKCACDSYYAVDTEFKDTWTKYKSYEEIVNEVNKLMNLFPYNYKIDIVITGGEPLLYWNKKEFQKLLEHYINDGHNVTIETNASLNLNFEYEYQKKLLFSMSVKLSNSLEPIKKRVNKETLTKILSNTKDSYLKFVIGKDFLTQAKKEIMEIINNIPKCEVYLMPLGDTAEEINKNCEEVINMAIQNGFKYCDRLHIRVWDNKRGV

SEQ ID NO: 27858 - protein, 254 aa, unidentified
  source 1..254: note = Arcobacter cloacae
  REGION 1..254: note = tr|A0A4Q0ZAA7|A0A4Q0ZAA7_9PROT 7-carboxy-7-deazaguanine synthase OS=Arcobacter cloacae; OX = 1054034 GN=queE PE=3 SV=1
MLEINEIFGPTIQGEGKLVGTPSIFIRFGKCNFSCVGFAVEYETPSGIKKCACDSYYAVDTEFKDTWTKYKSYEEIVNEVNKLMNLFPYNYKIDIVITGGEPLLYWNKKEFQKLLEHYINDGHNVTIETNASLNLNFEYEYQKKLLFSMSVKLSNSLEPIKKRVNKDTLTKILSNTKDSYLKFVIGKDFLNQAKKEIIEIINDIPKCEVYLMPLGDTAEEINKNCEEVINMAIQNGFKYCDRLHIRVWDNKRGV

SEQ ID NO: 27859 - protein, 254 aa, Arcobacter cryaerophilus
  REGION 1..254: note = tr|A0A494T0T9|A0A494T0T9_9PROT 7-carboxy-7-deazaguanine synthase OS=Arcobacter cryaerophilus D2610 OX=1032071 GN=queE PE=3 SV=1
MLEVNEIFGPTIQGEGKLVGNLSIFIRFGKCNFKCVGFNVEYETPSGVKKCACDSYYAVDMEFKNSWKSYENYLDIVNEVDKLLENCNYKNRVDIVITGGEPLLYWNNQEFQNLIKHYINKNHKLTIETNASLNIDFQDEYQKNILFSMSVKLSNSLEPLKKRVNKSTLTKILENTKESYLKFVIGNDFLENAIIEIEDILKNIPQCEVYLMPLGDSSETIDINSEKVVNLAIKYGFKYSDRLHIRIWNNKRGV

SEQ ID NO: 27860 - protein, 254 aa, Arcobacter cryaerophilus
  REGION 1..254: note = tr|A0A5B7XCP0|A0A5B7XCP0_9PROT 7-carboxy-7-deazaguanine synthase OS=Arcobacter cryaerophilus ATCC 43158 OX=1032070 GN=queE PE=3 SV=1
MLEINEIFGPTIQGEGKLIGSPSIFIRFGKCNFKCVGFNVEYETPSGKKKCACDSYYAVDIEFKDSWKSYDNHLDIVNEVDKLLENYSYKNIVDIVITGGEPLLYWNNKEFQNLIKHYINKNHKLTIETNASLNIDFQEEYQKNILFSMSVKLSNSLEPLKKRVNKISLTKILKNSKESYLKFVIGDDFLENAINEIEDILKDIPKCEVYLMPLGDNSKTIDDNSKEVVNLAIKYGFKYSDRLHIRLWDNKRGV

SEQ ID NO: 27861 - protein, 254 aa, Arcobacter defluvii
  REGION 1..254: note = tr|A0A4Q0UN41|A0A4Q0UN41_9PROT 7-carboxy-7-deazaguanine synthase OS=Arcobacter defluvii; OX = 873191 GN=queE PE=3 SV=1
MLEINEIFGPTIQGEGKLVGTPSIFIRFGKCNFKCEGFAVEYETPSGIKKCACDSYFAVDTEFKDTWTKYKTYEEIVKEVNKLINKFPYNYKIDIVITGGEPLLYWNKEEFQKLIKHYINEGHKVTIETNASLNLNFEYDYQRNILFSMSVKLSNSLEPLKKRINKETLTKILTNSNDSYLKFVIGKDFLNNAKNEIKDILNGIPKCEVYLMPLGDTADEINKNCEDVINMAIENGYKYCDRLHIRVWNNKRGV

SEQ ID NO: 27862 - protein, 249 aa, unidentified
  source 1..249: note = Arcobacter ebronensis
  REGION 1..249: note = tr|A0A4V1M0J6|A0A4V1M0J6_9PROT 7-carboxy-7-deazaguanine synthase OS=Arcobacter ebronensis; OX = 1462615 GN=queE PE=3 SV=1
MLEINEIFGPTIQGEGKLIGTPSIFIRVGKCNMKCEGFNVEYETPSGVKKCSCDTYYAVDPAFKDQWQQLSSKEIIEKVNELKPDYNVDIVITGGEPLLYWFNEEFQELLKYYVTNAYKVTIETNASLNIDLQQEYQKKILFSMSVKLSNSLEPLKKRVNIATLTTIINGTKESYLKFVVDKKFIAQAAKEIEEILKEIPEVEVYLMPMGDTAEEINQNSEAVINMAIKKGFKYCDRLHIRVWDNKRGV

SEQ ID NO: 27863 - protein, 249 aa, unidentified
  source 1..249: note = Arcobacter ebronensis
  REGION 1..249: note = tr|A0A4Q0YJ10|A0A4Q0YJ10_9PROT 7-carboxy-7-deazaguanine synthase OS=Arcobacter ebronensis; OX = 1462615 GN=queE PE=3 SV=1
MLEINEIFGPTIQGEGKLIGTPSIFIRVGKCNMKCEGFNVEYETPSGVKKCSCDTYYAVDPAFKDQWQQLSSKEIIEKVNELKPDYKVDIVITGGEPLLYWFNEEFQELLKYYVTNGYKVTIETNASLNIDLQQEYQKKILFSMSVKLSNSLEPLKKRLNIATLTTIINGTEESYLKFVVDKKFIAQATKEIDEILKEIPEVEVYLMPMGDTAEEINQNSEDVINMAIKKGFKYCDRLHIRVWDNKRGV

SEQ ID NO: 27864 - protein, 254 aa, Arcobacter ellisii
  REGION 1..254: note = tr|A0A347UBB2|A0A347UBB2_9PROT 7-carboxy-7-deazaguanine synthase OS=Arcobacter ellisii; OX = 913109 GN=queE PE=3 SV=1
MLEINEIFGPTIQGEGKLVGTPSIFIRFGKCNFKCEGFQVEYETPSGIKKCACDSYFAVDTEFKDTWTKYKSYDEIVKEVDDLLSSYPNNYKIDIVITGGEPLLYWNKIEFQKLLEHYINDGHKVTIETNASLNLNFEFDYQKNILFSMSVKLSNSLEPSKKRINKETLTKILTNTKESYLKFVIGKDFLENANEEINEILKDIPKSEVYLMPLGDTADEINKNCEDVINMAIKNGFKYCDRLHIRVWNNKRGV

SEQ ID NO: 27865 - protein, 250 aa, Arcobacter halophilus
  REGION 1..250: note = tr|A0A2N1J3Y4|A0A2N1J3Y4_9PROT 7-carboxy-7-deazaguanine synthase OS=Arcobacter halophilus; OX = 197482 GN=queE PE=3 SV=1
MLEVNEIFGPTIQGEGKRVGTSSVFIRFGKCNFRCEGFAVEYETPSGIKKCACDSYYAVDLAFKDQWHTFSTSKELIEEVNNFLPSYKCDIVITGGEPLLYWKNEEFQKTLEYYISNNYHVTIETNASLNIDITKDYQKKILFSMSVKLSNSLEPLKKRVNIKTLSNIINKCEDKYLKFVVNKDFLSQANSEIEEILKQLPKVEVYLMPMGDNAQQMNENSESVINLALEKGFKYCDRLHIRVWDNKRGV

SEQ ID NO: 27866 - protein, 250 aa, Arcobacter marinus
  REGION 1..250: note = tr|A0A347THS4|A0A347THS4_9PROT 7-carboxy-7-deazaguanine synthase OS=Arcobacter marinus; OX = 505249 GN=queE PE=3 SV=1
MLEVNEIFGPTIQGEGKRVGTASVFIRFGKCNFKCEGFAVEYETPSGIKKCACDSYYAVDPAFKDQWHTFSNANDLIEEVNKILPSYKCDIVITGGEPLLYWKNKEFQKLLKYYITNDYKVTIETNASLNIDITEKYQEDILFSMSVKLSNSLEPLKKRVNIKTLTSIINKCKDKYLKFVVNKDFLTQANNEIQDILKQLPNVETYLMPMGDNTQEMNKNSEAVINLALENGFKYCDRLHIRVWDNKRGV

SEQ ID NO: 27867 - protein, 250 aa, Arcobacter molluscorum
  REGION 1..250: note = tr|A0A2G1DKP8|A0A2G1DKP8_9PROT 7-carboxy-7-deazaguanine synthase OS=Arcobacter molluscorum LMG 25693 OX=870501 GN=queE PE=3 SV=1
MLEVNEIFGPTIQGEGKRVGTSSVFIRFGKCNFRCEGFAIEYETPSGVKKCACDSYYAVDPAFKDQWLTFSSSNDLIKEVEKYLPSYKCDIVITGGEPLLYWKNKEFQRLLKYYVENEYKVTIETNASLNIDITQNYQKKILFSMSVKLSNSLEPLRKRVNIKTLTNIITKSDDKYLKFVINKDFLNDAKKEIFDILKQIPEVEVYLMPMGDNAISMQENSESVINLALETGFKYCDRLHIRVWDNKRGV

SEQ ID NO: 27868 - protein, 250 aa, Arcobacter mytili
  REGION 1..250: note = tr|A0A345J2E0|A0A345J2E0_9PROT 7-carboxy-7-deazaguanine synthase OS=Arcobacter mytili LMG 24559 OX=1032238 GN=queE PE=3 SV=1
MLEVNEIFGPTIQGEGKRVGSPSVFIRFGKCNFRCEGFAVEYETPSGVKKCSCDSYYAVDPAFKDQWHTFSSAKELILKVNTFLPSYKCDIVITGGEPLLYWKNEEFQKVLKYYIENEYTVTLETNASLNMQITQEYQKKILFSMSVKLSNSLEPLKKRVNIKTLTQIINNCEDKYLKFVINKDFLVKAKEEIDEILKQIPKVEVYLMPMGDTALQMNENSEAVINLALESGFKYCDRLHIRVWDNKRGV

SEQ ID NO: 27869 - protein, 249 aa, Arcobacter nitrofigilis
  REGION 1..249: note = tr|D5UZC6|D5UZC6_ARCNC 7-carboxy-7-deazaguanine synthase OS=Arcobacter nitrofigilis (strain ATCC 33309 / DSM 7299 / LMG 7604 / NCTC 12251 / CI) OX=572480 GN=queE; PE = 3 SV=1
MLEVNEIFGPTIQGEGKYVGNPSIFIRFGKCNFRCEGFAVEYETPSGVKKCSCDSFYAVDPAFKDQWHKMNKNEIINQVKKLEPSYKVDIVITGGEPLLYWKDEEFQEILKYYISNGYKVTIETNGSLNIDFTKEYQKELIFSMSVKLSNSLEPLKKRVNEETLKKIITNTKESYLKFVISKEFITKAKEEIELISSIIPNCDIYLMPMGDSAYEINKHSESVINMAINSGYKYCDRLHIRVWDNKRGV

SEQ ID NO: 27870 - protein, 254 aa, unidentified
  source 1..254: note = Arcobacter pacificus
  REGION 1..254: note = tr|A0A5C2H3Z1|A0A5C2H3Z1_9PROT 7-carboxy-7-deazaguanine synthase OS=Arcobacter pacificus; OX = 1080223 GN=queE PE=3 SV=1
MLEVNEIFGPTIQGEGKLVGTPSVFIRFGKCNFTCEGFMVEYETPSGIKKCACDSYFAVDKEFKDTWTKYKSYEDIVSEVDKLTNIYTYDYKMDIVITGGEPLLYWNKEEFQKLLEHYINDGHKVTIETNASLNLNFTKEYQKKILFSMSVKLSNSLEPLKKRVNKETLTKVLTNTNESYLKFVIGKDFKNDAKEEIREILKDIPKCEVFLMPMGDTAQQISENSEDVINMAIQNGYKYCDRLHIRVWDNKRGV

SEQ ID NO: 27871 - protein, 254 aa, Arcobacter skirrowii
  REGION 1..254: note = tr|A0A2U2C2V7|A0A2U2C2V7_9PROT 7-carboxy-7-deazaguanine synthase OS=Arcobacter skirrowii; OX = 28200 GN=queE PE=3 SV=1
MLEVNEIFGPTIQGEGKLIGSPSIFIRFGKCNFKCVGFNVLYETPSGVKKCACDSYYAVDMEFKDSWKSYENHLDIVNITNKLLENYSYKNSVDVVITGGEPLLYWNNQEFQNLIKHYINKNQRVTIETNGSLNIDFKENYQKKIIFSMSVKLSNSLEPLKKRVNKSTLTKILTNTKESYLKFVIGDDFLEKAIDEIEDILKDIPKCEVYLMPLGDSSKAIDKNSKDVVNLAIKYGFKYSDRLHIRLWDNKRGV

SEQ ID NO: 27872 - protein, 254 aa, Arcobacter skirrowii
  REGION 1..254: note = tr|A0A4Q0UG17|A0A4Q0UG17_9PROT 7-carboxy-7-deazaguanine synthase OS=Arcobacter skirrowii CCUG 10374 OX=1032239 GN=queE PE=3 SV=1
MLEVNEIFGPTIQGEGKLIGSPSIFIRFGKCNFKCVGFNVLYETPSGVKKCACDSYYAVDMEFKDSWKSYENHLDIVNVTNKLLENYSYKNSVDVVITGGEPLLYWNNQEFQNLIKHYINKNQRVTIETNGSLNIDFKEDYQKKIIFSMSVKLSNSLEPLKKRVNKSTLTKILTNTKESYLKFVIGDDFLEKAIDEIEDILKDIPKCEVYLMPLGDSSKAIDKNSKNVVNLAIKYGFKYSDRLHIRLWDNKRGV

SEQ ID NO: 27873 - protein, 252 aa, Arcobacter sp.
  REGION 1..252: note = tr|A0A2G2G5R1|A0A2G2G5R1_9PROT 7-carboxy-7-deazaguanine synthase OS=Arcobacter sp.; OX = 1872629 GN=queE PE=3 SV=1
MIYLVEHFYSIQGEGKYLGTPSLFFRFGGCNMKCEGFGCSETSPNGVQIVGCDTVYAVDKKHFGSTWLGLESLDELIKIYNSYTLPIKADIVMTGGEPLIYANDELFVSFVEFLQGKGHRVTFETNGAINVDFEKFRAYQSCVFALSVKLSNSGEPKSKRINPEAIQNIATYSKDAFFKFTVDKESIQRDVDEEINEIIKYAPSISVCCMPKGGSKEELEYHSEAVIDYCKTKGYVYSDRLHIRLWDMNKGV

SEQ ID NO: 27874 - protein, 251 aa, Arcobacter sp.
  REGION 1..251: note = tr|A0A1Y5E1D5|A0A1Y5E1D5_9PROT 7-carboxy-7-deazaguanine synthase OS=Arcobacter sp. 31_11_sub10_T18 OX=1856277 GN=queE PE=3 SV=1
MLEITEIFGPTIQGEGKKLGSPSIFIRFGKCNLSCKGFEVEYTTPSGEKKYSCDSYYAADSQFKEYWTKYENFEEIINEVKKFEPKNYKPDIVITGGEPLLYWRDDEFQKLLEYYINNFYNVTIETNATINIDINKEYQKKILFSMSVKLSNSAESLKKRVNPKALTNIIQNIDDKYLKFVLSKECIDTSKDEIESILKQIPHVNVYLMPMGDTIETLNLNSEAVIDFAVENGYLYSDRLHIRIWNDKRGV

SEQ ID NO: 27875 - protein, 254 aa, unidentified
  source 1..254: note = Arcobacter suis
  REGION 1..254: note = tr|A0A443TJS7|A0A443TJS7_9PROT 7-carboxy-7-deazaguanine synthase OS=Arcobacter suis; OX = 1278212 GN=queE PE=3 SV=1
MLEINEIFGPTIQGEGKLVGTPSIFIRFGKCNFKCEGFQVEYETPSGVKKCACDSYYAVDTEFKDTWTKYKSYDEIVNEVDILLSKYPNNYKIDIVITGGEPLLYWNKEEFQKLLKHYIENGHKVTIETNASLNLNFEFDYQKKILFSMSVKLSNSLEPLKKRINKETLTKILTNTKESYLKFVIGKDFLNDAKTEINSILEDIPKCEVYLMPLGDTADEINKNCEEVINMAIENGFKYCDRLHIRVWNNKRGV

SEQ ID NO: 27876 - protein, 254 aa, Arcobacter trophiarum
  REGION 1..254: note = tr|A0A4Q1A6W1|A0A4Q1A6W1_9PROT 7-carboxy-7-deazaguanine synthase OS=Arcobacter trophiarum LMG 25534 OX=1032241 GN=queE PE=3 SV=1
MLEINEIFGPTIQGEGKLVGNLSIFIRFGKCNFKCVGFNVFYETPSGKKKCACDSYYAVDMEFKDSWRSYENHLEIIHEVDKLLENYSYKNRVDIVITGGEPLLYWNNKEFQNLIKYYIEKNHKLTIETNASLNIDFKEEYQKNILFSMSVKLSNSLEPLKKRVNKTTLTKILENTKESYLKFVIGDDFLENAISEIEDILKDIPKSEVYLMPLGDSSKTIDTNSEKVVNLAIKHGFKYSDRLHIRIWNNKRGV

SEQ ID NO: 27877 - protein, 254 aa, unidentified
  source 1..254: note = Arcobacter venerupis
  REGION 1..254: note = tr|A0A443TSQ6|A0A443TSQ6_9PROT 7-carboxy-7-deazaguanine synthase OS=Arcobacter venerupis; OX = 1054033 GN=queE PE=3 SV=1
MLEINEIFGPTIQGEGKLVGTPSIFIRFGKCNFKCEGFQVEYETPSGIKKCACDSYYAVDTEFKDTWTKYKSYEEIVSEVNELLSKYPNNYKIDIVITGGEPLLYWNKIEFQKLIKHYINDGHKVTIETNASLNLNFEFDYQKEILFSMSVKLSNSLEPLKKRINKETLTKILTNTKKSYLKFVIGKDFLQDANKEIHAILEDIPKCEVYLMPLGDTADEINKNCEDVINMAIENGFRYCDRLHIRVWNNKRGV

SEQ ID NO: 27878 - protein, 207 aa, unidentified
  source 1..207: note = Arcticibacter pallidicorallinus
  REGION 1..207: note = tr|A0A2T0U2W2|A0A2T0U2W2_9SPHI 7-carboxy-7-deazaguanine synthase OS=Arcticibacter pallidicorallinus OX=1259464 GN=queE PE=3 SV=1
MSLQVPEDGTLLPLMEEFYTIQGEGYHSGKAAYFIRLGGCDVGCHWCDVKESWDASLHPLTHADQIVANAEQYPGKAVVITGGEPLIYNLDYLTSELQKRGIKTFIETSGAYPLSGQWDWICLSPKKFKSPVPSIGQHAGELKVIVFNKSDFAWAESHAQLVSPGCKLYLQPEWSKSQEMIPLIIDYVKENPKWEISLQTHKFLNIP

SEQ ID NO: 27879 - protein, 207 aa, unidentified
  source 1..207: note = Arcticibacter svalbardensis
  REGION 1..207: note = tr|R9H2E1|R9H2E1_9SPHI 7-carboxy-7-deazaguanine synthase OS=Arcticibacter svalbardensis MN12-7 OX=1150600; GN = queE PE=3 SV=1
MIQKVPEDGTLLPLMEEFYTIQGEGYHSGKAAYFIRLGGCDVGCHWCDVKESWDASIHPLTPVDQIVANAEKYPGKAVVITGGEPLMYNLDYLTTELQNKGIKTFVETSGAYPLSGFWDWICLSPKKFKSPDPSIYPHAGELKVIVFNKSDFAWAENHADLVSEGCKLYLQPEWSKSQEIIPLIIDYVKANPRWEISLQTHKFLNIP

SEQ ID NO: 27880 - protein, 193 aa, unidentified
  source 1..193: note = Arcticibacterium luteifluviistationis
  REGION 1..193: note = tr|A0A2Z4GI82|A0A2Z4GI82_9BACT 7-carboxy-7-deazaguanine synthase OS=Arcticibacterium luteifluviistationis OX=1784714 GN=queE PE=3 SV=1
MESFYTIQGEGVHNGKAAYFIRLGGCDVGCVWCDVKESWDAEKHPLTSIETLVIEAKEHPGRLVVITGGEPLMYDMLPLTEALRAEGFETNIETSGAYEMSGAWDWVCFSPKKFKEPHESIFPVANELKAIIFNKSDFAFAEKYAELVNDDCQLLLQPEWDKQEQMLPLIIDYVKANPKWKISLQTHKFMDIP

SEQ ID NO: 27881 - protein, 221 aa, unidentified
  source 1..221: note = Arenibacter algicola
  REGION 1..221: note = tr|A0A221URJ9|A0A221URJ9_9FLAO 7-carboxy-7-deazaguanine synthase OS=Arenibacter algicola; OX = 616991 GN=queE PE=3 SV=1
MPERGIFYLCAMVKEDVLALVDQGLMLPLMEEFYTIQGEGFHKGTAAYFIRVGGCDVGCHWCDVKESWNAETHPPTGIDHIVTNAAKYSDTIVITGGEPLTWDMGPLTEALKAKNLKTHIETSGAYPLTGTWDWICLSPKKNKLPEGIIYDKAHELKMIVYNKHDFIFAEEQAAKTNKDCILYLQPEWSVRDKVVPWIVEYVMQNPKWKVSLQTHKYLNIP

SEQ ID NO: 27882 - protein, 221 aa, Arenibacter echinorum
  REGION 1..221: note = tr|A0A327R1A8|A0A327R1A8_9FLAO 7-carboxy-7-deazaguanine synthase OS=Arenibacter echinorum; OX = 440515 GN=queE PE=3 SV=1
MPERGIFYLCAMVKEDVLALVDQGLMLPLMEEFYTIQGEGFHKGTAAYFIRVGGCDVGCHWCDVKESWNAETHPPTGIDHIVTNAAKYSDTIVITGGEPLTWDMGPLTEALKAKNLKTHIETSGAYPLSGTWDWICLSPKKNKLPEGIIYDKAHELKMIVYNKHDFIFAEEQAAKTNKDCILYLQPEWSVRDKVVPWIVEYVMQNPKWKVSLQTHKYLNIP

SEQ ID NO: 27883 - protein, 210 aa, Arenibacter nanhaiticus
  REGION 1..210: note = tr|A0A1M6LH76|A0A1M6LH76_9FLAO 7-carboxy-7-deazaguanine synthase OS=Arenibacter nanhaiticus OX=558155 GN=queE PE=3 SV=1
MVKDEILGLVDKGLMLPLMEEFYTIQGEGFHKGTAAYFIRVGGCDVGCHWCDVKESWNAETHPPTGIEHIVNNAAKYSDTIVITGGEPLTWDMGPLTTALKEKNLKTHIETSGAYPLSGQWDWICLSPKKNKLPEGIIYEKAHELKMIVYNKHDFIFAEEQAAKTNKDCILYLQPEWSVKDKVTPWIVDYVMKNPKWKVSLQTHKYLNIP

SEQ ID NO: 27884 - protein, 221 aa, Arenibacter palladensis
  REGION 1..221: note = tr|A0A1M5DT06|A0A1M5DT06_9FLAO 7-carboxy-7-deazaguanine synthase OS=Arenibacter palladensis OX=237373 GN=queE PE=3 SV=1
MPERGIFYLCAMVKEDVLALVDQGLMLPLMEEFYTIQGEGFHKGTAAYFIRVGGCDVGCHWCDVKESWNAETHPPTGIDHIVTNAAKYSDTIVITGGEPLTWDMGPLTDALKAKNLKTHIETSGAYPLSGTWDWICLSPKKNKLPEGIIYEKAHELKMIVYNKHDFIFAEEQAAKTNKDCILYLQPEWSVRDKVVPWIVEYVMQNPKWKVSLQTHKYLNIP

SEQ ID NO: 27885 - protein, 221 aa, Arenibacter palladensis; identical to SEQ ID NO: 27881
  REGION 1..221: note = tr|A0A543W1U6|A0A543W1U6_9FLAO 7-carboxy-7-deazaguanine synthase OS=Arenibacter palladensis OX=237373 GN=queE PE=3 SV=1

SEQ ID NO: 27886 - protein, 221 aa, Arenibacter sp.
  REGION 1..221: note = tr|A0A318I2P1|A0A318I2P1_9FLAO 7-carboxy-7-deazaguanine synthase OS=Arenibacter sp. ARW7G5Y1 OX=2135619 GN=queE PE=3 SV=1
MVERGIFYLCAMVKEDVLALVDQGLMLPLMEEFYTIQGEGFHKGTAAYFIRVGGCDVGCHWCDVKESWNAETHPPTGIDHIVTNAAKYSDTIVITGGEPLTWDMGPLTAALRAKNLKTHIETSGAYPLSGTWDWICLSPKKNKLPEGIIYDKAHELKMIVYNKHDFIFAEEQAAKTNKDCILYLQPEWSVRDKVTPWIVDYVMQNPKWKVSLQTHKYLNIP

SEQ ID NO: 27887 - protein, 210 aa, Arenibacter sp.
  REGION 1..210: note = tr|A0A372GVM7|A0A372GVM7_9FLAO 7-carboxy-7-deazaguanine synthase OS=Arenibacter sp. P308M17 OX=2303391 GN=queE PE=3 SV=1
MVKEDVLALVDQGQMLPLMEEFYTIQGEGFHKGTAAYFIRVGGCDVGCHWCDVKESWNAETHPPTGIAHIVTNAAKYSDTIVITGGEPLTWDMGPLTEALKAKNLKTHIETSGAYPLSGTWDWICLSPKKNKLPEGIIYDRAHELKMIVYNKHDFIFAEEQAAKTNKDCILYLQPEWSVRDKVVPMIVEYVMQNPKWKVSLQTHKYLNIP

SEQ ID NO: 27888 - protein, 221 aa, Arenibacter troitsensis; identical to SEQ ID NO: 27882
  REGION 1..221: note = tr|A0A1X7K9C9|A0A1X7K9C9_9FLAO 7-carboxy-7-deazaguanine synthase OS=Arenibacter troitsensis OX=188872 GN=queE PE=3 SV=1

SEQ ID NO: 27889 - protein, 212 aa, Arenicella xantha
  REGION 1..212: note = tr|A0A395JS01|A0A395JS01_9GAMM 7-carboxy-7-deazaguanine synthase OS=Arenicella xantha; OX = 644221 GN=queE PE=3 SV=1
MTIRITEIFYSIQGESGTIGYPTVFVRLTGCPMRCSYCDTAYAFHGGNKMELADIVVEVGKYQVKHVCVTGGEPLAQPECHDLMRTLCDAGYKVSVETGGAIDISQVDKRVYIVLDIKTPASNEEPNNKYGNLDHIKASDCLKFVICDDNDYQWAKDFVDQRGLTEKCDVFFSPSADQLSATQLADWIIRDQLAVRMQVQLHKILWNNEAGR

SEQ ID NO: 27890 - protein, 218 aa, unidentified
  source 1..218: note = Arenimonas caeni
  REGION 1..218: note = tr|A0A2P6MBW2|A0A2P6MBW2_9GAMM 7-carboxy-7-deazaguanine synthase OS=Arenimonas caeni; OX = 2058085 GN=queE PE=3 SV=1
MDTPAADRLRLTEIFLSVQGESRSVGWPTVFVRLTGCPLRCQYCDTAYAFHGGEWWEIDAILAEVARHGARHVCVTGGEPLAQKRCLALLEKLCDAGYEVSLETSGALDISGVDPRVSRVVDLKTPGSKEMQRNRLENIALLTPRDQLKFVICDRADYEWARAMVAEHQLANRCEVLFSPSQGQLEPRQLAEWLLADKLPVRFQLQLHKVLWGDVAGK

SEQ ID NO: 27891 - protein, 233 aa, Arenimonas composti
  REGION 1..233: note = tr|A0A091BK91|A0A091BK91_9GAMM 7-carboxy-7-deazaguanine synthase OS=Arenimonas composti TR7-09 = DSM 18010 OX=1121013 GN=queE PE=3 SV=1
MNTEATSTAVPSGDTAGTPGGDRLRLTEIFLSVQGEARHVGWPTVFVRLTGCPLRCTYCDTAYAFHGGAWWDIDAILAEVARHGVRHVCVTGGEPLAQKRVLGLLARLCDAGYEVSLETSGALDIAGVDPRVSRVVDLKTPASAEMHRNRLENLPLLTAHDQLKFVICDRADYEWARGMLAEHRLAGRCEVLFSPGMGLVAPGELAEWILADRLPVRFQLQLHKVLWGDAPGR

SEQ ID NO: 27892 - protein, 218 aa, Arenimonas donghaensis
  REGION 1..218: note = tr|A0A087MG50|A0A087MG50_9GAMM 7-carboxy-7-deazaguanine synthase OS=Arenimonas donghaensis DSM 18148 = HO3-R19 OX=1121014 GN=queE PE=3; SV = 1
MDTPAAERLRLTEIFLSVQGESRSVGWPTVFVRLTGCPLRCQYCDTAYAFHGGEWWEIDTILAEVARHGARHVCVTGGEPLAQKRCLLLLEKLCDAGYEVSLETSGAIDIADVDPRVSRVVDLKTPGSKEMHRNLLENIPLLTARDQVKFVVCDRADYDWAKTMLAEHALADRCEVLFSPSQGQQSPAELAEWLLADKLPVRFQLQLHKVLWGDVAGK

SEQ ID NO: 27893 - protein, 218 aa, Arenimonas malthae
  REGION 1..218: note = tr|A0A091BAB5|A0A091BAB5_9GAMM 7-carboxy-7-deazaguanine synthase OS=Arenimonas malthae CC-JY-1 OX=1384054 GN=queE PE=3 SV=1
MDTPAAERLRLTEIFLSVQGESRTVGWPTVFVRLTGCPLRCQYCDTAYAFHGGDWWDIDAILAEVAKHGVRHVCVTGGEPLAQKRCLALLERLCDAGYEVSLETSGALDIAGVDPRVSRVMDLKTPGSKEAHRNRLENLPLLTAHDQIKFVICDRADYDWAKDMLATHALEKRCEVLFSPSQGQLAPRELAEWIIADRLPVRFQLQLHKVLWGDQPGR

SEQ ID NO: 27894 - protein, 218 aa, unidentified
  source 1..218: note = Arenimonas metalli
  REGION 1..218: note = tr|A0A091B3X3|A0A091B3X3_9GAMM 7-carboxy-7-deazaguanine synthase OS=Arenimonas metalli CF5-1 OX=1384056 GN=queE PE=3 SV=1
METPAAERLRLTEIFLSVQGEARAVGWPTVFVRLTGCPLRCQYCDTAYAFHGGEWWEIDTILAEVARHGVRHVCVTGGEPLAQKRCLKLLEALCDAGYEVSLETSGALDIAGVDPRVSRVVDLKTPGSKEMHRNLLSNLPLLTAHDQVKFVICDRADYEWARAMVAEHAIAGRCDVLFSPSQSELAPRDLADWIIADRLPVRFQLQLHKVLWGDTPGK

SEQ ID NO: 27895 - protein, 218 aa, Arenimonas oryziterrae
  REGION 1..218: note = tr|A0A091AUJ1|A0A091AUJ1_9GAMM 7-carboxy-7-deazaguanine synthase OS=Arenimonas oryziterrae DSM 21050 = YC6267 OX=1121015 GN=queE PE=3 SV=1
MQVPVADRLRLTEIFLSLQGESRSAGWPTVFVRLTGCPLRCQYCDTAYAFHGGDWWEIDAILAEVARHGVRHVCVTGGEPLAQKRCLVLLQRLCDAGYEVSLETSGAIDVADVDPRVVRVVDLKTPGSLEQHRNRLENIPLLTPRDQVKFVICSREDYDWAKGMLVEHRLDSRCEVLFSPSFTEVAPRDLAEWIIADRLPVRFQTQLHKQLWGEEKGR

SEQ ID NO: 27896 - protein, 218 aa, Arenimonas sp.
  REGION 1..218: note = tr|A0A352QR22|A0A352QR22_9GAMM 7-carboxy-7-deazaguanine synthase OS=Arenimonas sp.; OX = 1872635 GN=queE PE=3 SV=1
MDTPAAERLRLTEIFLSVQGESRTVGWPTVFVRLTGCPLRCQYCDTAYAFHGGDWWDIDAILAEVAKHGVRHVCVTGGEPLAQKRCLALLERLCDAGYEVSLETSGALDIAGVDPRVSRVMDLKTPGSKEAHRNRLENLLLLTAHDQLKFVICDRADYDWAKDMLATHALDKRCEVLFSPSQGQLAPRELAEWIIADRLPVRFQLQLHKVLWGDQPGR

SEQ ID NO: 27897 - protein, 223 aa, Arenimonas sp.
  REGION 1..223: note = tr|A0A5B2ZAD8|A0A5B2ZAD8_9GAMM 7-carboxy-7-deazaguanine synthase OS=Arenimonas sp. 3729k; OX = 2608255 GN=queE PE=3 SV=1
METQVTDSPAAERLRLTEIFLSVQGESRSVGWPTVFVRLTGCPLRCQYCDTAYAFHGGHWWDMDAILAEVAQHGVRHVCVTGGEPLAQKRCLLLLQKLCDAGYEVSLETSGALDISGVDPRVSRVVDLKTPGSKEMARNRLENIPLLTPRDQVKFVICDRTDYDWARAMLAEHRLAERCEVLFSPSHGQVRPHELAEWILADKLPVRYQLQLHKVLWGDTPGR

SEQ ID NO: 27898 - protein, 209 aa, unidentified
  source 1..209: note = Arenitalea lutea
  REGION 1..209: note = tr|A0A1M6ABH3|A0A1M6ABH3_9FLAO 7-carboxy-7-deazaguanine synthase OS=Arenitalea lutea; OX = 1178825 GN=queE PE=3 SV=1
MNLEIQELVNKGEMLPLMEEFYTIQGEGYFKGTAAYFVRIGGCDVGCHWCDVKESWNANLHPPTETDKIVANAKKYSDTIVVTGGEPLTWDMTLLTTKLKAEGLQTHIETSGAYKLTGVWDWICLSPKKMKLPTEEVYAEADELKMIIYNKDDFRFAEEQAAKVNKDCILYLQPEWSKRDKVVPEIVDYVMKNPKWKVSLQTHKYLNIP

SEQ ID NO: 27899 - protein, 230 aa, unidentified
  source 1..230: note = Armatimonadetes bacterium
  REGION 1..230: note = tr|A0A1Y0HCR1|A0A1Y0HCR1_9BACT 7-carboxy-7-deazaguanine synthase OS=Armatimonadetes bacterium Uphvl-Ar2 OX=2004468 GN=queE PE=3 SV=1
MAKLRISEIFTSVQGEGQWIGVPSVFVRVSGCNLRCVWCDTPYASWHPEGPVREVDDVVAEVQAQGVRHVVVTGGEPMLFEPTVDLVNALQAAGHVITIETAGTVDLPLTPQLFSISPKLSHSAPEGEWHDRHEAARWRPEIIKAMMQRAPVQFKFVVNPDHPSDDWAEIDAMLAQLPPVAPDSVFLMAEGRDTAVLHDRERRLVPEAIRRGWRIAPRLQIDLFGDTKGT

SEQ ID NO: 27900 - protein, 234 aa, unidentified
  source 1..234: note = Armatimonadetes bacterium
  REGION 1..234: note = tr|A0A1Y0H2L4|A0A1Y0H2L4_9BACT 7-carboxy-7-deazaguanine synthase OS=Armatimonadetes bacterium Uphvl-Ar1 OX=2004467 GN=queE PE=3 SV=1
MSNLRISEIFSSVQGEGQFLGVPSTFVRTSGCNLRCVWCDTPYASWSPEGPMMSIDQIVSECQDLKNQHVVLTGGEPMLFDPIEELAKHLQAKGHFITIETAGTISRTLPGCFMSISPKPAHSAPPKDTPGDWYQRHESTRFQPETIRHLVAHHDYQFKFVVKPEEPGSIEEIQSMLTAIDHTIPPEKIFLMPEGRDQATLNERLKLLVPICHKTGYRLAPRLQIDLFGDTRGT

SEQ ID NO: 27901 - protein, 221 aa, unidentified
  source 1..221: note = Aromatoleum aromaticum
  REGION 1..221: note = tr|Q5P4Z3|Q5P4Z3_AROAE 7-carboxy-7-deazaguanine synthase OS=Aromatoleum aromaticum (strain EbN1) OX=76114; GN = queE PE=3 SV=1
MQQASDRHDVKVRLTEIFASLQGESTRVGLPTVFVRLTGCPLRCVWCDTEYAFQGGESRSIASIVEEVLGHGIEHVCVTGGEPLAQKSCLALLAALCDAGLSVSLETSGALDIAAVDPRVSRVMDLKAPGSGEVARNRWDNLARLNERDEVKIVLADRLDYEWAVQCLAEHRLAQRCTVLLSPVQGKLDPAQLAEWIVRDRLPVRFQLQLHKILWNDARGR

SEQ ID NO: 27902 - protein, 207 aa, unidentified
  source 1..207: note = Arsenicibacter rosenii
  REGION 1..207: note = tr|A0A1S2VLN8|A0A1S2VLN8_9BACT 7-carboxy-7-deazaguanine synthase OS=Arsenicibacter rosenii OX=1750698 GN=queE PE=3 SV=1
MVTEQQTTTHTLPVMEAFYTLQGEGAHTGRAAYFIRLGGCDVGCHWCDVKESWDAGLHPQLSIDTILDGALQYSGRMAVITGGEPLMHDLTGLTNALQTAGFRTNIETSGVYPVTGSWDWICFSPKKFKEPHPGIYAQANELKVIIYNKSDFAFAESFVPHLRPDCRLFLQPEWSRTNEMLPLIVEYVKSNPQWQVSLQTHKYMDIP

SEQ ID NO: 27903 - protein, 224 aa, unidentified
  source 1..224: note = Arsenophonus endosymbiont
  REGION 1..224: note = tr|A0A4Q1B9B0|A0A4Q1B9B0_9GAMM 7-carboxy-7-deazaguanine synthase OS=Arsenophonus endosymbiont of Bemisia tabaci Asia II 3 OX=1868623; GN = queE PE=3 SV=1
MDYPINQIFQTIQGEGYFTGVAAIFTRLQGCPVGCSWCDTKHTWAKNKQQQGPLSIILAKKIESDEWAACSSEQIIDLFEQNNYTARHIVITGGEPCLYDLTELTDNLEKNGYQCQIETSGTHNIYCSEKTWVTVSPKVAMRGGFSILPAALNRANEIKHPVGRQKDIDALESLINQLEPNHPAPHICLQPISQNANATQLCIETCIKRNWRLSVQMHKYLDIA

SEQ ID NO: 27904 - protein, 224 aa, Arsenophonus nasoniae
  REGION 1..224: note = tr|D2U3T2|D2U3T2_9GAMM 7-carboxy-7-deazaguanine synthase OS=Arsenophonus nasoniae OX=638 GN=queE PE=3 SV=1
MDYPINQIFQTIQGEGYFTGVAAIFVRLQGCPVGCSWCDTKHTWAKNKQQQRPLSIILAKKSDNEEWATCSSEQIIDLFEQNHYTARHIVITGGEPCLYDLTELTTNLEKKGYQCQIETSGTHNIYCSEKTWVTVSPKVAMRGGYKILPAALNRANEIKHPVGRQRDIDALEYLINQLAPNHPAPHICLQPISQNANATNLCIETCIKRNWRLSVQMHKYLDIA

SEQ ID NO: 27905 - protein, 224 aa, Arsenophonus sp.
  REGION 1..224: note = tr|A0A2A2GZJ3|A0A2A2GZJ3_9GAMM 7-carboxy-7-deazaguanine synthase OS=Arsenophonus sp. ENCA; OX = 1987579 GN=queE PE=3 SV=1
MDYPINQIFQTIQGEGYFTGVAAIFIRLQGCPVGCSWCDTKHTWAKNKQQQRSLSIILAKKIESDEWAACSSKQIIDLFEQNNYTARHIVITGGEPCLYNLTELTDNLEKKGYQCQIETSGTHNIYCSEKTWVTVSPKVAMRVGFSILPAALNRANEIKHPVGRQKDIDALESLINQLEPNHPAPHICLQPISQNANATQLCIETCIKRNWRLSVQMHKYLDIA

SEQ ID NO: 27906 - protein, 221 aa, unidentified
  source 1..221: note = Arsukibacterium ikkense
  REGION 1..221: note = tr|A0A0M2V722|A0A0M2V722_9GAMM 7-carboxy-7-deazaguanine synthase OS=Arsukibacterium ikkense OX=336831 GN=queE PE=3 SV=1
MYKVNEIFETIQGEGSFTGVPAIFIRLQGCPVGCSWCDTKHTWAVNPDLQVKLDSVMAKSAETEQWAAITAEQLLALFQEKGYQARHVVITGGEPCMYDLNPLCNTLHAAGYQTQIETSGTFAVQVPAKSWVTVSPKVNMKGGYKVLQSALDRADEIKHPVAMDKHIEQLLQLLQQTDISNKLIYLQPISQQAKATALAISYCKKYNWRLSVQVHKYIGIA

SEQ ID NO: 27907 - protein, 222 aa, unidentified
  source 1..222: note = Arsukibacterium sp.
  REGION 1..222: note = tr|A0A0M2VHA6|A0A0M2VHA6_9GAMM 7-carboxy-7-deazaguanine synthase OS=Arsukibacterium sp. MJ3 OX=1632859 GN=queE PE=3 SV=1
MLYKVNEVFETIQGEGSFTGVPAIFVRLQGCPVGCSWCDTKHTWSINPDLNITLDAVMVKSAETEQWAAVSAEQILALFKAKGYQARHVVITGGEPCMYDLHPLCDLLHDAGYQSQIETSGTFEILAPLQSWVTVSPKVNMKGGYKVLQSALDRANEIKHPVAMDKHIEQLLQLLHRTDTSAKLIYLQPISQQTKATALAIAYCKKHNWRLSVQVHKYLGIE

SEQ ID NO: 27908 - protein, 211 aa, Arthrobacter sp.
  REGION 1..211: note = tr|A0A2V5DV04|A0A2V5DV04_9MICC 7-carboxy-7-deazaguanine synthase OS=Arthrobacter sp. RC1.1 241 OX=2183924 GN=queE PE=3 SV=1
MNYKVKEIFYTLQGEGTHAGRPAVFCRFSLCNLWTGREADRARAICKFCDTDFVGTDGEGGGKFATPEDLADAVEAAWPSGWTENRMVVCTGGEPLLQLDAAAVAELKRRGFYVAVETNGTQLPPSGVDWLCVSPKIGADLVVAGGQELKFVYPQAGVDPRVFEELDFDTFRVQPMDGPDVVENTRLAVEFCLEHPNWQLSMQTHKYLGIP

SEQ ID NO: 27909 - protein, 211 aa, Arthrobacter sp.
  REGION 1..211: note = tr|A0A4V1E9J4|A0A4V1E9J4_9MICC 7-carboxy-7-deazaguanine synthase OS=Arthrobacter sp. 24S4-2 OX=2575374 GN=queE PE=3 SV=1
MNYKVKEIFYTLQGEGTHAGRPAVFCRFSLCNLWTGREADRARAVCKFCDTDFVGTDGEGGGKFATPEDLADAVEAAWPSGWEGNRMVVCTGGEPLLQLDNEAVAALKRRGFYVAVETNGTQVPPEGVDWLCVSPKIGADLVVSGGNELKFVYPQAGVNPTTFEQLDFDAFRVQPMDGPDIVENTRLAVEFCLEHPNWQLSMQTHKYLGIP

SEQ ID NO: 27910 - protein, 204 aa, unidentified
  source 1..204: note = Arthrospira maxima
  REGION 1..204: note = tr|B5W3G9|B5W3G9_LIMMA 7-carboxy-7-deazaguanine synthase OS=Arthrospira maxima CS-328 OX=513049 GN=queE; PE = 3 SV=1
MITIPVHETFQQTIQGEGYWAGTPVDFIRLAGCPVGCPWCDTGYADGGKGLPRNMRSFDELLAELVSPRVVISGGEPFIYPQLPDLVRVLEETGRQVSIETSGAFWQDVSDLCWITLSPKEHISPRYPVVSQMWRRASEIKLVIDVGDELEFYRSRLAENSTIPVFLQPQWTDIDRTLPLVLAKLKQFPGYRLSVQLHKYIGVE

SEQ ID NO: 27911 - protein, 204 aa, unidentified
  source 1..204: note = Arthrospira platensis
  REGION 1..204: note = tr|K1WC27|K1WC27_ARTPT 7-carboxy-7-deazaguanine synthase OS=Arthrospira platensis C1 OX=459495 GN=queE; PE = 3 SV=1
MITIPVHETFQQTIQGEGYWAGTPVDFIRLAGCPVGCPWCDTGYADGGKGLARNMRSFDELLAELVSPRVVNSGGEPFIYPQLPDLVRVLEETGRQVSIETSGAFWQDVSDLCWITLSPKEHISPRYPVVSQMWRRASEIKLVIDVGDELEFYRSRLAENSTIPVFLQPQWTDIDRTLPLVLAKLKQFPGYRLSVQLHKYIGVE

SEQ ID NO: 27912 - protein, 204 aa, unidentified
  source 1..204: note = Arthrospira platensis
  REGION 1..204: note = tr|D5A347|D5A347_ARTPN 7-carboxy-7-deazaguanine synthase OS=Arthrospira platensis (strain NIES-39 / IAM M-135) OX=696747 GN=queE PE=3 SV=1
MITIPVHETFQQTIQGEGYWAGTPVDFIRLAGCPVGCPWCDTGYADGGKGLPRNVRSFDQLLAELVSPRVVISGGEPFIYPQLPDLVRVLEDSGRQVSIETSGAFWQDVSDLCWITLSPKEHISPGYPVVSPMWRRASEIKLVIDVGDELEFYGCRLAENSTIPVFLQPQWTDIERTLPLVLEKLKQFPGYRLSVQLHKYIGVQ

SEQ ID NO: 27913 - protein, 261 aa, Asaccharobacter celatus
  REGION 1..261: note = tr|A0A369NWT4|A0A369NWT4_9ACTN 7-carboxy-7-deazaguanine synthase OS=Asaccharobacter celatus OX=394340 GN=queE PE=3 SV=1
MVPEEENDGLLDAERHQARHTIAPRAQLFPVAEKFVSVNGEGLAAGRPAAFIRFAGCNMWCTYCDTRWANHPLVEVEGWSVPDLAAWVAETGVSCVTLTGGEPLLQPYLPDLVQTLLAVDDPRPLRVEIETNGSRDLSPMAHLREACVEAGLLGSLHFTVDWKTPTAGEAVSAAMRRENYELLDTRDAVKFVVGTEDDLAFMECCADEAGLWDRCAVLVSPVWGAIEPAEIAAYLIDHGLDRARLQLQLHKIIWPDETRGV

SEQ ID NO: 27914 - protein, 261 aa, Asaccharobacter celatus
  REGION 1..261: note = tr|A0A369P1D6|A0A369P1D6_9ACTN 7-carboxy-7-deazaguanine synthase OS=Asaccharobacter celatus OX=394340 GN=queE PE=3 SV=1
MVPEEENDGLLDAERHQARHTIAPRAQLFPVAEKFVSVNGEGLAAGRPAAFIRFAGCNMWCTYCDTRWANHPLVEVEGWSVPDLVAWVAETGVSCVTLTGGEPLLQPYLPDLVQTLLAVDDPRPLRVEIETNGSRDLSPMAHLREACAEAGLPGSLHFTVDWKTPTAGEAVSAAMRRENYDLLDTRDAVKFVVGTEDDLAFMERCADEAGLWDRCSVLASPVWGAIEPAEIAAYLIDHGLDRARLQLQLHKIIWPDETRGV

SEQ ID NO: 27915 - protein, 224 aa, unidentified
  source 1..224: note = Asaccharospora irregularis
  REGION 1..224: note = tr|A0A1M5QME9|A0A1M5QME9_9FIRM 7-carboxy-7-deazaguanine synthase OS=Asaccharospora irregularis DSM 2635 OX=1121321 GN=queE PE=3 SV=1
MRKFNIVEKFVSIDGEGPMAGSLATFIRFKGCNLRCSWCDTSYSWEATEKSEEMSADEIYSYIKEKKINHVTLTGGEPLIQEGIMDLIKLLSEDKSLLVHIETNGTVDITPFKTVYTSSNLRYIIDYKLPSSTMTKYMEPRNLDVVGENDVYKFVIGSKDDLNKAYEVIKKHDLEKKCQVYLSPVTDYIDPSVIVDFMKENLLKNVKLQLQLHKIIWDKNRRGV

SEQ ID NO: 27916 - protein, 209 aa, Asaia bogorensis
  REGION 1..209: note = tr|A0A0P0YEG4|A0A0P0YEG4_9PROT 7-carboxy-7-deazaguanine synthase OS=Asaia bogorensis NBRC 16594 OX=1231624 GN=queE PE=3 SV=1
MKEMFATLQGEGAHTGRASVFCRFTGCNLWSGREEDRHKAACQFCDTDFIGTDGEGGGRFATADALAEALVQCWKSEAGDQAGRYVVFTGGEPLLQIDPALIAAVKAADFEIAIESNGTINAPQGIDWICVSPKPSSVVTQQTGQELKLVFPQESLPPELFEGWDFEHFWLQPMDGPDRIANTAKAVAYCLKHPRWRLSLQTHKLIGIP

SEQ ID NO: 27917 - protein, 209 aa, Asaia platycodi
  REGION 1..209: note = tr|A0A060QJ28|A0A060QJ28_9PROT 7-carboxy-7-deazaguanine synthase OS=Asaia platycodi SF2.1; OX = 1382230 GN=queE PE=3 SV=1
MKEMFATLQGEGAHTGRASVFCRFTGCNLWSGREEDRHKAACQFCDTDFIGTDGEGGGRFATADALAEALVRCWQSEASDQAGRYVVFTGGEPLLQIDPALIAAVKAADFEIAIESNGTINAPKGIDWICVSPKPSSTVTQQTGQELKLVFPQESLPPELFEGWDFEHFWLQPMDGPDRIANTARAVAYCLKHPRWRLSLQTHKLIGIP

SEQ ID NO: 27918 - protein, 213 aa, Asaia sp.
  REGION 1..213: note = tr|A0A433WSJ9|A0A433WSJ9_9PROT 7-carboxy-7-deazaguanine synthase OS=Asaia sp. W19; OX = 2067395 GN=queE PE=3 SV=1
MSYAVKEIFATLQGEGAHAGRASVFCRFAGCNLWSGREEDRHRAACQFCDTDFVGTDGIGGGRFADAAALTARLLACWKEQAGEAAGRYVVFTGGEPLLQIDPPLITAMHEAGFEIAIESNGTIAVPEGIDWICVSPKPQSRLIQCRGQELKLVYPQEALPPALFESWDFDHFWLQPMDGPDRIANTEKAVAYCLSHPRWRLSLQTHKLIGIP

SEQ ID NO: 27919 - protein, 212 aa, Asanoa ishikariensis
  REGION 1..212: note = tr|A0A1H3UB67|A0A1H3UB67_9ACTN 7-carboxy-7-deazaguanine synthase OS=Asanoa ishikariensis; OX = 137265 GN=queE PE=3 SV=1
MYRVKEIFYTLQGEGTHAGRPAVFCRFTSCNLWTGREQDRHRALCQFCDTDFVGTDGPGGGRFRSAADLAAAVARTWEGEPHPRSRPYVVCTGGEPLLQLDDEAVHALHNLGFEVAVETNGTRPAPAGLDWICVSPKAGAPVVLTAGHDLKLVFPQAGAEPELFEDLEFEHFMLQPMDGPDRVANTEAAVRYCMKHPQWRLSLQTHKYIGIA

SEQ ID NO: 27920 - protein, 210 aa, Asticcacaulis benevestitus
  REGION 1..210: note = tr|V4PN57|V4PN57_9CAUL 7-carboxy-7-deazaguanine synthase OS=Asticcacaulis benevestitus DSM 16100 = ATCC BAA-896 OX=1121022 GN=queE PE=3 SV=1
MYSFKEIFLTLQGEGGQAGRVNVFARFAGCNLWSGREQDRAMAACTFCDTDFVGIDGENGGKFPKPVDVVAALDAVWGMADPSQKAVVFTGGEPLLQLDPALIEAVKAAGYFIAVETNGTIKAPEGIDWICVSPKADNRLHQTFGQELKLVWPQAEVDPAEFLAFDFERYYLQPMDSDRQAANTQAVIDYCLQHPQWRMSVQTHKLVGLK

SEQ ID NO: 27921 - protein, 210 aa, unidentified
  source 1..210: note = Asticcacaulis biprosthecum
  REGION 1..210: note = tr|F4QT10|F4QT10_9CAUL 7-carboxy-7-deazaguanine synthase OS=Asticcacaulis biprosthecum C19 OX=715226; GN = queE PE=3 SV=1
MYSFKEIFLTLQGEGGQAGRVNVFARFAGCNLWSGREQDRATAACDFCDTDFVGTDGENGGRFPTPADVVAALDAVWGEGRAAGKAVVFTGGEPLLQLDSDLIAAVKAAGYFIAVETNGTLKAPAGIDWVCVSPKGQNRLHQTSGQELKLVWPQENVDPSDFLEMQFERFYLQPKDNPRQAANTQAVIDYCLLHPQWRMSVQTHKLVGLK

SEQ ID NO: 27922 - protein, 215 aa, Asticcacaulis excentricus
  REGION 1..215: note = tr|A0A3G9G5R5|A0A3G9G5R5_9CAUL 7-carboxy-7-deazaguanine synthase OS=Asticcacaulis excentricus OX=78587 GN=queE PE=3 SV=1
MYSFKEIFLTLQGEGGQAGRVAVFARFAGCNLWSGREQDRATAACTFCDTDFVGTDGEGGGKFDTPEAVAAALDAHWGQIDPAHKSVVFTGGEPLLQLDAPLIAAVKAAGYFIAVESNGTLRAPEGIDWLCISPKGENRLHQTSGQELKLVWPQERVDPAEFAAMDFERFYLQPKDPLDQNLLTRAAHTQAVIDYCLAHPQWRMSVQTHKVVGIR

SEQ ID NO: 27923 - protein, 216 aa, Asticcacaulis excentricus
  REGION 1..216: note = tr|E8RV80|E8RV80_ASTEC 7-carboxy-7-deazaguanine synthase OS=Asticcacaulis excentricus (strain ATCC 15261 / DSM 4724 / VKM B-1370 / CB 48) OX=573065 GN=queE PE=3 SV=1
MVYSFKEIFLTLQGEGGQAGRVAVFARFAGCNLWSGREQDRATAACTFCDTDFVGTDGEGGGKFDTPEAAVAALDAHWGQIDPAHKSVVFTGGEPLLQLDAPLIAAVKSAGYFIAVESNGTLRAPIGIDWLCISPKGENRLHQTSGQELKLVWPQDRVDPAEFARMDFERFYLQPKDPLDQNPAMRAAHTQAVIDYCLAHPQWRMSVQTHKVVGVR

SEQ ID NO: 27924 - protein, 210 aa, Asticcacaulis sp.
  REGION 1..210: note = tr|V4QWZ5|V4QWZ5_9CAUL 7-carboxy-7-deazaguanine synthase OS=Asticcacaulis sp. AC466 OX=1282362 GN=queE; PE = 3 SV=1
MYSFKEIFLTLQGEGGQAGRVNVFARFAGCNLWSGREQDRATAACTFCDTDFVGTDGENGGKFAAPADVVSALDRVWGEGRSQDKAVVFTGGEPLLQLDAALITAVKDAGYFIAVETNGTLHAPDGIDWVCVSPKADNRLHQTRGQELKLVWPQAGVDPAEFAGLNFERFYLQPKDDPNQAANTQAVINYCLAHPQWRMSVQTHKLVGLK

SEQ ID NO: 27925 - protein, 221 aa, Asticcacaulis sp.
  REGION 1..221: note = tr|V4NS68|V4NS68_9CAUL 7-carboxy-7-deazaguanine synthase OS=Asticcacaulis sp. YBE204 OX=1282363 GN=queE; PE = 3 SV=1
MARRQMTYSFKEIFLTLQGEGGQAGRVAVFARFAGCNLWSGREQDRVTAACTFCDTDFVGTDGENGGKFTTPDAVVAALDAQWGSIDTTEKSVVFTGGEPLLQLDAPLIAAVKAAGYFIAVESNGTVRAPAGIDWLCISPKGENRVHQTSGQELKLVWPQDNVDPAEFTDMAFERFYLQAKDPLDQDPAVRALHTQKVIDYCLTHPQWRMSVQTHKMVGLK

SEQ ID NO: 27926 - protein, 210 aa, Asticcacaulis taihuensis
  REGION 1..210: note = tr|A0A1G4PXP1|A0A1G4PXP1_9CAUL 7-carboxy-7-deazaguanine synthase OS=Asticcacaulis taihuensis OX=260084 GN=queE PE=3 SV=1
MYSFKEIFLTLQGEGGQAGRVNVFARFAGCNLWSGREQDRATAACTFCDTDFVGTDGENGGRFRTASETVTALDAVWGGADPSQKAVVFTGGEPLLQLDADLIAAVKAAGYFIAVETNGTLKVPVGIDWICVSPKADNRLHQTHGQELKLVWPQEGVNPAEFLALNFERYYLQPKDDPQQAANTQAVIDYCLKHPQWRMSVQTHKLVGLK

SEQ ID NO: 27927 - protein, 208 aa, unidentified
  source 1..208: note = Atelocyanobacterium thalassa
  REGION 1..208: note = tr|D3EPE5|D3EPE5_ATETH 7-carboxy-7-deazaguanine synthase OS=Atelocyanobacterium thalassa (isolate ALOHA); OX = 1453429 GN=queE PE=3 SV=1
MEKLTELNSDLTTYPIAETFHSIQGEGAWTGVSAFFIRLAGCNVGCPWCDQKESWTDKTFPKYSSEMLSTKAQQANASIVVITGGEPLMYNLFPLTDKLRKLGMKIHLETSGSYPFSGNFNWVTFSPKPFKAPHESIYVKASELKIIIADQKDFEWAEKQKSKTNSQSINFLQPEWNSRTSSSLIYKYICKHPEWRMSLQTHKFLGVR

SEQ ID NO: 27928 - protein, 223 aa, unidentified
  source 1..223: note = Atlantibacter hermannii
  REGION 1..223: note = tr|H5V0G2|H5V0G2_ATLHE 7-carboxy-7-deazaguanine synthase OS=Atlantibacter hermannii NBRC 105704 OX=1115512; GN = ygcF PE=3 SV=1
MQYPINEMFQTLQGEGYFTGVPAIFIRLQGCPVGCAWCDTKHTWDKLADREVSLYSILAKTKESDKWGSASPEELLAVIERQGWTARHVVITGGEPCIHDLIPLTHLLEKSGFSCQIETSGTHEVRAIATTWVTVSPKVNMRGGYDVLHQALERADEIKHPVGRVRDIEALDELLATLNDQKQRVIALQPISQKEDATRLCIETCIARNWRLSMQTHKYLNIA

SEQ ID NO: 27929 - protein, 223 aa, unidentified; identical to SEQ ID NO: 27928
  source 1..223: note = Atlantibacter hermannii
  REGION 1..223: note = tr|A0A447LSR6|A0A447LSR6_ATLHE 7-carboxy-7-deazaguanine synthase OS=Atlantibacter hermannii OX=565 GN=queE PE=3 SV=1

SEQ ID NO: 27930 - protein, 223 aa, unidentified
  source 1..223: note = Atlantibacter subterranea
  REGION 1..223: note = tr|A0A427UNQ7|A0A427UNQ7_9ENTR 7-carboxy-7-deazaguanine synthase OS=Atlantibacter subterranea OX=255519 GN=queE PE=3 SV=1
MQYPINEMFQTLQGEGYFTGVPAIFIRLQGCPVGCAWCDTKHTWDKLADREVSLYSILAKTKESDKWGAASPEELLAVIERQGWTARHVVITGGEPCIHDLIPLTHLLEKSGFSCQIETSGTHEIRAVATTWVTVSPKVNMRGGYDVLHQALERADEIKHPVGRMRDIEALDELLATLNDQKQRVIALQPISQKEDATRLCIETCIARNWRFSMQTHKYLNIA

SEQ ID NO: 27931 - protein, 265 aa, Aulosira laxa
  REGION 1..265: note = tr|A0A1Z4TXP9|A0A1Z4TXP9_9CYAN 7-carboxy-7-deazaguanine synthase OS=Aulosira laxa NIES-50; OX = 1541988 GN=queE PE=3 SV=1
MTAKTTVKPTARLIEVFSAIQGEGLNVGTRQIFIRFALCDLRCHFCDSAHTWNAPSTCKIERTPGLRDFEEHSNPIPLPILLEWVERQNQPSIHDSISLTGGEPLLHAPFLELFLPQVRSLTNLPIYLETGGHRPEQLAMILPYLDSVGMDLKLPSVSGESYWQEHAQCLKLSYDSHLNVFVKIIISQQTDPTELERSALLVAAVSPDIPVFLQPVTPLPVSEKSTAKTILAPTPDQVLHWQAFMKRWLKRVLVVPQTHKMLNQL

SEQ ID NO: 27932 - protein, 241 aa, unidentified
  source 1..241: note = Aureibacillus halotolerans
  REGION 1..241: note = tr|A0A4R6U3K6|A0A4R6U3K6_9BACI 7-carboxy-7-deazaguanine synthase OS=Aureibacillus halotolerans OX=1508390 GN=queE PE=3 SV=1
MIPVLEIFGPTIQGEGMVVGRKTMFVRTAGCDYRCTWCDSAFTWDGSAKEDIRQLSVEDVWHELKQAGGENFDHVTISGGNPALLRHLGDLIDLLHNNGCQVALETQGSVWQDWFLNIDDLTISPKPPSSGMETDFSKLDDILSKVEEADRTTTHTSLKVVVFDKADFAYAEHVHQRYPQVPFYVQVGNPDPLTDEQTNLVSGLLDDYEALVDRVVASSAMNNVRVLPQLHVLIWGNKRGV

SEQ ID NO: 27933 - protein, 234 aa, Aureimonas altamirensis
  REGION 1..234: note = tr|A0A1M6K2L2|A0A1M6K2L2_9RHIZ 7-carboxy-7-deazaguanine synthase OS=Aureimonas altamirensis DSM 21988 OX=1121026 GN=queE PE=3 SV=1
MIRVSEIFGPTIQGEGALIGQPTVFVRSGGCDYRCAWCDTLHAVDSEYRHEWLPMTAETIFARIVQLSGGRPLTVSLSGGNPAIQPFGPLIALGRAAGYGFALETQGSVAKDWFRQLDTLVLSPKPPSSGMATDWSAFDACLHAAGDGPRVVLKMVVFDDADYAYARAASARYPHLPVFLQPGNPIGNEAAAADIDGLMAAMRNLVARVVEDGWFSACVLPQLHVLMWGNRKGV

SEQ ID NO: 27934 - protein, 210 aa, unidentified
  source 1..210: note = Aureimonas flava
  REGION 1..210: note = tr|A0A3A1WEU3|A0A3A1WEU3_9RHIZ 7-carboxy-7-deazaguanine synthase OS=Aureimonas flava; OX = 2320271 GN=queE PE=3 SV=1
MSYAVKEIFYTLQGEGRNAGRAAVFCRFAGCNLWSGREEDRETAVCRFCDTDFVGMDGTGGGRFRSAEALAGAVAASWGEHEGERLVVLTGGEPLLQVDEALTGALHDHGFEIAVETNGTVLPPAGIDWLCVSPKAGAELAVTAGDELKLVYPQAGAEPERFAALRFRHHLLQPMDGPRQAENTRDAVAYCMANPRWRLTLQTHKMLGIR

SEQ ID NO: 27935 - protein, 242 aa, Aureimonas sp.
  REGION 1..242: note = tr|A0A0S2EUA3|A0A0S2EUA3_9RHIZ 7-carboxy-7-deazaguanine synthase OS=Aureimonas sp. AU20; OX = 1349819 GN=queE PE=3 SV=1
MSGEAPIRISEIFGPTIQGEGVLIGEPTVFVRSGGCDYRCVWCDTLHAVDASFRDEWRPLSPEAIWQEVERLSGGRPLTVSLSGGNPAIQPFGPLIARGRAAGYGFALETQGSVARDWFAELETLVLSPKPPSSGMATDWSALDACLAAAGAKPRVVLKFVVFDEADYAFAKAAAARHPALPVFLQPGNPVEAARSGSESADLPAMMDRMRWLVEQTLAEGWFAPRILPQLHALIWGHRKGV

SEQ ID NO: 27936 - protein, 242 aa, Aureimonas ureilytica
  REGION 1..242: note = tr|A0A175RKX3|A0A175RKX3_9RHIZ 7-carboxy-7-deazaguanine synthase OS=Aureimonas ureilytica; OX = 401562 GN=queE PE=3 SV=1
MNGEAVIRVSEIFGPTIQGEGVLIGEPTVFVRSGGCDYRCVWCDTLHAVDPAYREEWRPLGTDEIWRYVEALSGGQPLTVSLSGGNPAIQPFGPLIGRGRAAGYRFALETQGSVAKPWFADLSTLILSPKPPSSQMETDWAAFDACLAAAGSAPRTVLKIVVFDEADYAYAKDAGARYPHLSLFLQPGNPVGPAQTESSEVDLEANLGRMRWLVERTLEDGWFAPRILPQLHVLLWGNRKGV

SEQ ID NO: 27937 - protein, 242 aa, Aureimonas ureilytica
  REGION 1..242: note = tr|A0A175RF33|A0A175RF33_9RHIZ 7-carboxy-7-deazaguanine synthase OS=Aureimonas ureilytica; OX = 401562 GN=queE PE=3 SV=1
MSAEAVIRVSEIFGPTIQGEGVLIGEPTVFVRSGGCDYRCVWCDTLHAVDPAYREEWRPLGTDEIWRYVEALSGGQPLTVSLSGGNPAIQPFGPLIGRGRAAGYRFALETQGSVAKPWFADLSTLILSPKPPSSQMETDWAAFDACLSAAGSAPRTVLKIVVFDEADYAYARNAGARYPHLSLFLQPGNPVGPAQTESSEVDLEANLGRMRWLVERTLEDGWFAPRILPQLHVLLWGNRKGV

SEQ ID NO: 27938 - protein, 209 aa, Aureitalea marina
  REGION 1..209: note = tr|A0A2S7KQK3|A0A2S7KQK3_9FLAO 7-carboxy-7-deazaguanine synthase OS=Aureitalea marina; OX = 930804 GN=queE PE=3 SV=1
MDKAVSNLVSKGMMLPLMEAFYTIQGEGYHKGRAAYFVRIGGCDVGCHWCDVKESWNAKLHPPTAIDQIAEDAAHYSNTVVVTGGEPLMWDMGPLTAAFKEKGMQVHIETSGAYTLTGNWDWICLSPKKNKLPLEQVYIEADELKVIIYNRDDLRFAEEQAERVGPSCKLFLQPEWSKREKVMPMIVDYAMANPKWIVSLQTHKYLNIP

SEQ ID NO: 27939 - protein, 209 aa, Aureitalea sp.
  REGION 1..209: note = tr|A0A2S0HTR8|A0A2S0HTR8_9FLAO 7-carboxy-7-deazaguanine synthase OS=Aureitalea sp. RR4-38; OX = 2094025 GN=queE PE=3 SV=1
MQEEIQIQVEKGLMLPLMEEFYTIQGEGYHKGTAAYFIRIGGCDVGCHWCDVKESWNPAIHPPTGVGQIADNAEKFSKTIVVTGGEPLTWDMGPLTRLLKDKGLDVHIETSGAYPLTGKWDWICLSPKKIKLPVDEIYPLANELKVIVYNRDDLRFAEEQALKVSEKCLLYLQPEWSKRDTVMPLIVDYVMANPKWKVSLQTHKYLNIP

SEQ ID NO: 27940 - protein, 236 aa, unidentified
  source 1..236: note = Auricoccus indicus
  REGION 1..236: note = tr|A0A1Q1G3B5|A0A1Q1G3B5_9STAP 7-carboxy-7-deazaguanine synthase OS=Auricoccus indicus; OX = 1849491 GN=queE PE=3 SV=1
MIPVLEIFGPTIQGEGAVIGKKTMFVRTAGCDFRCSWCDSSFTWDGSQKHLIQRMTAEEVYNELNKLAPNNFNHVTISGGNPALIKSLDSLVRLLKNQHIEIAVETQGTVFHSWLNQVDDLTISPKPRSSGMNQSLEQLDQFIDSTKAVRRRSLKVVIFDEDDILDALIYHKRYPDIPFYIQVGNPFLDESVENHRDYLLSRYEWLIDSVMNDERFLNVHILPQLHTILWSNKQKV

SEQ ID NO: 27941 - protein, 208 aa, Avibacterium avium
  REGION 1..208: note = tr|A0A379AQ99|A0A379AQ99_AVIAV 7-carboxy-7-deazaguanine synthase OS=Avibacterium avium; OX = 751 GN=queE PE=3 SV=1
MSELISNPSYPIVEIFQSLQGEGANTGMPSIFIRFGKCNLACPWCDTPYNDFEPWSLQQILAKVRSFSAKNIIITGGEPTIQPQLGLLLDQLKAEGYFLAIETNGLKPVPAQIDYIATSPKREYAQKYRQRCITQANEVRIVADADVQEFCALIESQIQAQHYYLSPCESNGEMNLLHTITQLGLLNQRPNKPKWQLSIQTHKLIGIE

SEQ ID NO: 27942 - protein, 208 aa, Avibacterium endocarditidis
  REGION 1..208: note = tr|A0A2S5AI11|A0A2S5AI11_9PAST 7-carboxy-7-deazaguanine synthase OS=Avibacterium endocarditidis OX=380674 GN=queE PE=3 SV=1
MAELISNPSYPIVEIFQSLQGEGANTGMPSIFIRFGKCNLACPWCDTPYNDFEPWSLQQILAKVRSFSAKNIIITGGEPTIQPQLSLLLDQLKAEGYFLAIETNGLKPVPAQIDYIATSPKREYAQKYRQRCIVQANEVRIVADADVQEFCALIESQIQAQHYYLSPCESNGEMNLLHTITQLGLLNQRPNKPKWQLSIQTHKLIGIE

SEQ ID NO: 27943 - protein, 213 aa, Avibacterium gallinarum
  REGION 1..213: note = tr|A0A379AYS4|A0A379AYS4_AVIGA 7-carboxy-7-deazaguanine synthase OS=Avibacterium gallinarum OX=755 GN=queE PE=3 SV=1
MAGKLMAELISNPSYPIVEIFQSLQGEGANTGMPSIFIRFGKCNLACPWCDTPYNDFEPWSLQQILAKVRSFSAKNIIITGGEPTIQPQLSLLLDQLKTEGYFLAIETNGLKPVPAQIDYIATSPKREYAQKYRQRCITQANEVRIVADADVQEFCALIENQIQAQHYYLSPCENNGEMNLLHTITQLGLLNQRPNKPKWQLSIQTHKLIGIE

SEQ ID NO: 27944 - protein, 208 aa, Avibacterium paragallinarum
  REGION 1..208: note = tr|A0A0F5EXU8|A0A0F5EXU8_AVIPA 7-carboxy-7-deazaguanine synthase OS=Avibacterium paragallinarum OX=728 GN=queE PE=3 SV=1
MAALISNPHYPIVEIFESLQGEGANTGMPSIFVRFGKCNLACPWCDTPYNQFSQWSLQAILQKVRSFSAKNIIITGGEPTIQPQLALLLDQLKAEGYFLAIETNGLKTIPTQIDYIATSPKREYEAKYRQRCISHADEVRIVADGDVQDFCALIESKIQATHYYLSPCEINGEMNLLHTITQLGLLNQRLNKPKWQLSIQTHKLIGIE

SEQ ID NO: 27945 - protein, 208 aa, Avibacterium paragallinarum
  REGION 1..208: note = tr|A0A377IB35|A0A377IB35_AVIPA 7-carboxy-7-deazaguanine synthase OS=Avibacterium paragallinarum OX=728 GN=queE PE=3 SV=1
MAALISNPHYPIVEIFESLQGEGANTGMPSIFVRFGKCNLACPWCDTSYNQFSQWSLQAILQKVRSFSAKNIIITGGEPTIQPQLALLLDQLKAEGYFLAIETNGLKTIPTQIDYIATSPKREYEAKYRQRCISHADEVRIVADGDVQDFCALIESKIQATHYYLSPCEINGEMNLLHTITQLGLLNQRLNKPKWQLSIQTHKLIGIE

SEQ ID NO: 27946 - protein, 208 aa, Avibacterium volantium
  REGION 1..208: note = tr|A0A3S4KY50|A0A3S4KY50_AVIVO 7-carboxy-7-deazaguanine synthase OS=Avibacterium volantium OX=762 GN=queE PE=3 SV=1
MAELISNPSYPIVEIFQSLQGEGANTGMPSIFIRFGKCNLACPWCDTPYNDFEPWSLQQILAKVRSFSAKNIIITGGEPTIQPQLGLLLDQLKAEGYFLAIETNGLKPVPAQIDYIATSPKREYAQKYRQRCITQANEVRIVADADVQEFCALIESQIQAQHYYLSPCENNGEMNLLHTITQLGLLNQRPNKPKWQLSIQTHKLIGIE

SEQ ID NO: 27947 - protein, 222 aa, Azoarcus communis
  REGION 1..222: note = tr|A0A2U8H498|A0A2U8H498_9RHOO 7-carboxy-7-deazaguanine synthase OS=Azoarcus communis; OX = 41977 GN=queE PE=3 SV=1
MADQENVSRSTTLRLSEIFASLQGESTRVGLPTVFVRLTGCPLRCTWCDTAYAFKGGETVSLESVLEDVASHGLHSVCVTGGEPLAQTACLALLTALCDAGHSVSLETSGALDISAVDPRVSRIMDLKAPGSGESARNRFENIALLNAHDEIKIVLADEADYEWAKGRIAEYDLAARCTVLLSPVAGKLDPARLAEWIVRDRLPVRFQLQLHKVLWQDARGR

SEQ ID NO: 27948 - protein, 221 aa, Azoarcus communis
  REGION 1..221: note = tr|A0A323V2X1|A0A323V2X1_9RHOO 7-carboxy-7-deazaguanine synthase OS=Azoarcus communis SWub3 = DSM 12120 OX=1121029 GN=queE PE=3 SV=1
MAVSLADRAAKLRLTEIFASLQGESTRVGLPTVFVRLTGCPLRCTWCDTAYAFQGGEASTVQTVIDEVARHGLQHVCVTGGEPLAQKSCLPLLSALCDDGYSVSLETSGALDIAGVDPRVSRIMDLKAPGSGEVDKNRFENIACLRPSDEVKIVLADEADYQWACARIAEYDLARRCTVLLSPVAGDLAPSTLADWIVRDRLPVRFQLQLHKVLWNDARGR

SEQ ID NO: 27949 - protein, 222 aa, Azoarcus indigens
  REGION 1..222: note = tr|A0A4R6E162|A0A4R6E162_9RHOO 7-carboxy-7-deazaguanine synthase OS=Azoarcus indigens; OX = 29545 GN=queE PE=3 SV=1
MAVSTAAPAAAKLRITEIFASVQGESTRVGLPTVFVRLTGCPLRCVWCDTAYAFQGGEGRDVASVLEEVASHGLRHVCVTGGEPLSQKSCPALLTALCDAGHSVSLETSGALDISAVDPRVSRIMDLKAPGSGEEARNRYENIPFLNAADEVKIVLADATDYEWAKACIAEHALTRRCAVLLSPVAGNLEPADLAEWIVRDRLPVRFQLQLHKILWNDARGR

SEQ ID NO: 27950 - protein, 220 aa, Azoarcus sp.
  REGION 1..220: note = tr|A1K2H6|A1K2H6_AZOSB 7-carboxy-7-deazaguanine synthase OS=Azoarcus sp. (strain BH72) OX=62928 GN=queE; PE = 3 SV=1
MTEVVRQPVKLRLTEIFASIQGESTRVGLPTTFVRLTGCPLRCSWCDTAYAFTGGEARALSDVLDDVAALGLRHVCVTGGEPLAQKYCLALLTALCDAGYSVSLETSGALDIGGVDPRVSRVMDLKAPGSAEVTRNRLENIPLLRARDELKIVLADQADYDWARAMIADHDLAARCPVLLSPVAGTLDPAQLAEWIVRDRLPVRFQLQLHKILWNDARGR

SEQ ID NO: 27951 - protein, 222 aa, Azoarcus sp.
  REGION 1..222: note = tr|A0A558DI36|A0A558DI36_9RHOO 7-carboxy-7-deazaguanine synthase OS=Azoarcus sp. PHD; OX = 1628740 GN=queE PE=3 SV=1
MADQENVSRSTTLRLSEIFASLQGESTRVGLPTVFVRLTGCPLRCTWCDTAYAFKGGETVSLESVLEDVSSHGLNSVCVTGGEPLAQTACLPLLTALCDAGHSVSLETSGALDISAVDPRVSRIMDLKAPGSGESARNRFENIALLNARDEIKMVLADEADYGWAKARIAEYDLAARCTVLLSPVAGKLDPTRLAEWIVRDRLPVRFQLQLHKVLWQDARGR

SEQ ID NO: 27952 - protein, 220 aa, Azoarcus tolulyticus
  REGION 1..220: note = tr|A0A1N6N935|A0A1N6N935_9RHOO 7-carboxy-7-deazaguanine synthase OS=Azoarcus tolulyticus; OX = 34027 GN=queE PE=3 SV=1
MTLPETAGPRLRITEIFASIQGESTRVGLPTVFVRLTGCPLRCSWCDTEYAFQGGENRSIAEVRDAVAAHGIRHVCVTGGEPLAQKSCLALLAALCDAGFSVSLETSGALDIAAVDPRVSRIMDLKAPGSGEVSRNRWENLAHLTAHDEIKIVLADEADYAWAKAQIALHGLGGRCTVLLSPVQGSLDPTLLAEWIVRDRLPVRFQLQLHKILWNDARGR

SEQ ID NO: 27953 - protein, 226 aa, Azomonas agilis
  REGION 1..226: note = tr|A0A562I147|A0A562I147_9GAMM 7-carboxy-7-deazaguanine synthase OS=Azomonas agilis; OX = 116849 GN=queE PE=3 SV=1
MACFAVAPVADMHSKLRITEIFYSLQGESRTCGLPTVFIRLTGCPLRCHYCDTSYAFSGGVQRTLEDILTEVASFGASHVCVTGGEPLAQPDCLHLLRHLADAGYQVSLETSGALDVSAVDARISRVLDLKTPDSGEMTRNRYDNLRHLTLQDQIKFVICSRADYEWAVGCIHQYRLSELVGELLFSPAYGLIEPSLLADWILADRLPVRFQLQLHKLLWQDARGR

SEQ ID NO: 27954 - protein, 212 aa, Azonexus fungiphilus
  REGION 1..212: note = tr|A0A495VPI2|A0A495VPI2_9RHOO 7-carboxy-7-deazaguanine synthase OS=Azonexus fungiphilus; OX = 146940 GN=queE PE=3 SV=1
MTLRLTEIFYSLQGEASRVGLPTVFVRLTGCPLRCTWCDTTYSFTGGETSTVSDVLAEVARHPVRQVCVTGGEPLAQKACLDLLVALCDAGYDVSLETSGALDIAPVDPRVSCIMDLKAPDSGESGRNLWANLQHLKPRDEIKIVIASREDYEWACEVLQVHALDSRCPVLFSPAQGSIEPAALASWILEDGLPVRFQLQLHKLLWGNMQGK

SEQ ID NO: 27955 - protein, 212 aa, Azonexus hydrophilus
  REGION 1..212: note = tr|A0A1R1I3L4|A0A1R1I3L4_9RHOO 7-carboxy-7-deazaguanine synthase OS=Azonexus hydrophilus; OX = 418702 GN=queE PE=3 SV=1
MTLRITEIFYSLQGEASRVGLPTVFVRLTGCPLRCTWCDTTYSFTGGETSTVAAVLAEVGKYPARQVCVTGGEPLAQKACLTLLSALCDAGYDVSLETSGALDIAPVDPRVSCIMDLKAPDSGESAKNLWANLTHLKPRDEIKIVIASREDYEWAREVLLAHRLDARCPVLFSPAQGSIEPAELASWILEDGLPVRFQLQLHKLLWGNMQGK

SEQ ID NO: 27956 - protein, 212 aa, Azorhizobium caulinodans
  REGION 1..212: note = tr|A8HQX3|A8HQX3_AZOC5 7-carboxy-7-deazaguanine synthase OS=Azorhizobium caulinodans (strain ATCC 43989 / DSM 5975 / JCM 20966 / NBRC 14845 / NCIMB 13405 / ORS 571)OX=438753 GN=queE PE=3 SV=1
MSYAVKEIFKTLQGEGAQAGRAAVFCRFAGCNLWSGREEDRASAICRFCDTDFVGMDGEGGGRFADAPSLAATIARTWGEKGAGGRPYVVFTGGEPLLQLDAALIEAVHAEGFEIAIETNGTLPAPAGIDWICVSPKAGAEIVQRTGSELKLVYPQPEVPPEAVAGLTFEHYFLQPMDGPARIENTQAVIAYCLAHPQWRLSLQTHKITGIP

SEQ ID NO: 27957 - protein, 210 aa, Azorhizobium sp.
  REGION 1..210: note = tr|A0A258K0V4|A0A258K0V4_9RHIZ 7-carboxy-7-deazaguanine synthase OS=Azorhizobium sp. 32-67-21 OX=1970319 GN=queE PE=3 SV=1
MTYSVKEMFKTLQGEGAQAGRAAVFCRFSGCNLWTGREEDREKAVCRFCDTDFIGMDGEGGGRFADALALADALVRVWDGAPARRFVVFTGGEPLLQVDADLVAAVHARGFEIAIETNGTRLPPDGIDWICVSPKAGADLVLTRGHELKLVYPQPELRPETVAELDFAHFFLQPMDGPDRSANTQAAVAYCLDHPQWRLSVQTHKMIGIP

SEQ ID NO: 27958 - protein, 215 aa, Azospira oryzae
  REGION 1..215: note = tr|G8QPN4|G8QPN4_AZOOP 7-carboxy-7-deazaguanine synthase OS=Azospira oryzae (strain ATCC BAA-33 / DSM 13638 / PS) OX=640081 GN=queE PE=3 SV=1
MTAPTLKISEIFYSLQGETSRTGLPTVFVRLTGCPLRCVWCDTAYSFSGGTLMSLPAILAEVARHPTQRVCVSGGEPLAQKNCLPLLTALCDAGCDVSLETSGALDVSGVDPRVSKIVDLKAPGSGEVERNLWSNLEYLTPHDELKLVLADRADYDWAVAQLRQHGLIGRCPILMAPVQGSLEPGTLADWILADGLPVRLQVQLHKLLWGNMRGK

SEQ ID NO: 27959 - protein, 215 aa, Azospira oryzae
  REGION 1..215: note = tr|A0A2W5HQT6|A0A2W5HQT6_9RHOO 7-carboxy-7-deazaguanine synthase OS=Azospira oryzae; OX = 146939 GN=queE PE=3 SV=1
MNPVRLRVTEIFHSLQGETSRVGLPTVFVRLTGCPLRCVWCDTEYAFHGGALKTIPQILEAVSAYGTRRVCVTGGEPLAQRACLALLTALCDAGFEVSLETSGALDVSAVDPRVAKVMDLKAPGSGEEAENRWENLAYLTPRDELKIVLADEADYEWARRVLAERRLAEICPVLLSPVYGRLDPARLAEWILRDRLPVRLQIQLHKVLWGEAPGH

SEQ ID NO: 27960 - protein, 215 aa, Azospira sp.
  REGION 1..215: note = tr|A0A2R5EAT8|A0A2R5EAT8_9RHOO 7-carboxy-7-deazaguanine synthase OS=Azospira sp. I13; OX = 1765050 GN=queE PE=3 SV=1
MSTTTLKISEIFYSLQGETSRTGLPTVFVRLTGCPLRCTWCDTEYSFSGGTVMALDDILAEVARHPTRRVCVTGGEPLAQKNCLPLLAALCDAGCDVSLETSGALDVSGVDVRISKIVDLKAPGSGEVERNLWSNLQYLTPHDELKLVLADRADYDWAVARIAEHGLAGHCPILMAPVQGRLEPGQLADWILADGLEVRLQVQLHKLLWGNMRGK

SEQ ID NO: 27961 - protein, 215 aa, Azospira sp.
  REGION 1..215: note = tr|A0A5H2Y7L4|A0A5H2Y7L4_9RHOO 7-carboxy-7-deazaguanine synthase OS=Azospira sp. I09; OX = 1765049 GN=queE PE=4 SV=1
MTAPTLKISEIFYSLQGETSRTGLPTVFVRLTGCPLRCVWCDTAYSFSGGTLMSLPAILAEVARHPTKRVCVSGGEPLAQKNCLPLLTALCDAGCDVSLETSGALDVSGVDPRVSKIVDLKAPGSGEVERNLWSNLEYLTPHDELKLVLADRADYDWAVAQLRQHGLIGRCPILMAPVQGSLEPGTLADWILADGLPVRLQVQLHKLLWGNMRGK

SEQ ID NO: 27962 - protein, 210 aa, Azospirillum brasilense
  REGION 1..210: note = tr|A0A2W5GEY9|A0A2W5GEY9_AZOBR 7-carboxy-7-deazaguanine synthase OS=Azospirillum brasilense OX=192 GN=queE PE=3 SV=1
MSYAVKEIFATLQGEGAQAGRPSVFCRFAGCNLWSGREEDRAGAVCQFCDTDFVGMDGEGGGRFADAEALAAAIEAAWPGGPSHRYVVFTGGEPLLQLDAALIAAVHARGFEIAVESNGTVEPPEGIDWLCISPKAGAPLKVRRGSELKLVFPQHRLMPDSLPPLEFRHFYLQPMDGPDRLAHTEAAVRYCLEHPQWRLSLQTHKLIGIP

SEQ ID NO: 27963 - protein, 231 aa, Azospirillum brasilense
  REGION 1..231: note = tr|G8AIV5|G8AIV5_AZOBR 7-carboxy-7-deazaguanine synthase OS=Azospirillum brasilense Sp245 OX=1064539; GN = queE PE=3 SV=1
MRGANPVRPQEGGDGQSLWIQEVFYTLQGEGPFVGEPSVFVRTGGCNLRCHWCDTDFESSPWRPSLDELLARIGELRPAVCDLIVLTGGEPLRQNVVPLIRALLERGLRVQIETNGTLWLDGMPDDPRLTIVCSPKTPGLHPDLVPRVSVYKYVLAAGESDSGDGLPTLSTQLPGQGARLFRPPPGAAVTVMPRDDDDAERNFANRQACTAVALAHGYRMSVQLHKLLGIA

SEQ ID NO: 27964 - protein, 210 aa, Azospirillum sp.
  REGION 1..210: note = tr|A0A2U1YLN9|A0A2U1YLN9_9PROT 7-carboxy-7-deazaguanine synthase OS=Azospirillum sp. TSO5; OX = 716760 GN=queE PE=3 SV=1
MSYAVKELFKTLQGEGAQAGRAAVFCRFAGCNLWSGREQDRHSAICRFCDTDFVGIDGEGGGRFSDGRALAAVIAQAWGPSRSHRYVVFTGGEPLLQLDAALLEAVHAEGFEAAVETNGTLEPPLGLDWVCVSPKAGSEWVLRRGHELKLVYPQPELPPEGLEGLDFQHFWLQPMDGPERNHNIEAAVAYCQKNPKWRLSLQTHKFIGIP

SEQ ID NO: 27965 - protein, 226 aa, Azotobacter beijerinckii
  REGION 1..226: note = tr|A0A1H6WFB0|A0A1H6WFB0_9GAMM 7-carboxy-7-deazaguanine synthase OS=Azotobacter beijerinckii OX=170623 GN=queE PE=3 SV=1
MACFAVTPVADMQETLRITEIFHSLQGETRTAGLPTVFVRLTGCPLRCQYCDTAYAFSGGENLPLSEILERVAGYQSRRVCVTGGEPLAQPNSVALLRRFCEAGYEVSLETSGAFDVSDVDARVSRVLDLKTPGSGEVARNRYENIALLTRHDQMKFVLCSREDYDWAVSKLIEYRLDSRVGEVLFSPSHGQLEGRELADWIVADNLPVRLQLQLHKILWNDARGR

SEQ ID NO: 27966 - protein, 226 aa, Azotobacter beijerinckii
  REGION 1..226: note = tr|A0A1I4D4P8|A0A1I4D4P8_9GAMM 7-carboxy-7-deazaguanine synthase OS=Azotobacter beijerinckii OX=170623 GN=queE PE=3 SV=1
MACFAVTPVADMQETLRITEIFHSLQGETRTAGLPTVFVRLTGCPLRCQYCDTAYAFSGGENLPLSEILERVAGYQSRRVCVTGGEPLAQSNSVALLRRLCEAGYEVSLETSGAFDVSDVDARVSRVLDLKTPGSGEVARNRYENIALLTRHDQMKFVLCSREDYDWAVSKLIEYRLDSRVGEVLFSPSHGQLEGRELADWIVADNLPVRLQLQLHKILWNDARGR

SEQ ID NO: 27967 - protein, 226 aa, Azotobacter chroococcum
  REGION 1..226: note = tr|A0A0C4WKY0|A0A0C4WKY0_9GAMM 7-carboxy-7-deazaguanine synthase OS=Azotobacter chroococcum NCIMB 8003 OX=1328314 GN=queE PE=3 SV=1
MACFAVTPVADMQETLRITEIFHSLQGETRTAGLPTVFVRLTGCPLRCHYCDTAYAFSGGEILSLSAILERVAGYKPRYVCVTGGEPLAQPNGIALLRRLCDAGYEVSLETSGAFDVSAVDGRVSRVLDLKTPGSGEVARNRYENLALLTRNDQVKFVLCSRQDYDWAVSKLIEYRLDERAGEVLFSPSHGQLDGRELADWIVADNLPVRLQLQLHKILWNDAQGR

SEQ ID NO: 27968 - protein, 215 aa, Azotobacter chroococcum
  REGION 1..215: note = tr|A0A4Q9VQ59|A0A4Q9VQ59_9GAMM 7-carboxy-7-deazaguanine synthase OS=Azotobacter chroococcum OX=353 GN=queE PE=3 SV=1
MQETLRITEIFYSLQGETRTAGLPTVFVRLTGCPLRCHYCDTTYAFSGGEILSLSAILERVAGYKPRYVCVTGGEPLAQPNGIALLRRLCDAGYEVSLETSGAFDVSAVDGRVSRVLDLKTPGSGEVARNRYENLALLTRNDQVKFVLCSRQDYDWAVSKLIEYRLDERAGEVLFSPSHGQLDGRELADWIVADNLPVRLQLQLHKILWNDAQGR

SEQ ID NO: 27969 - protein, 193 aa, Azotobacter vinelandii
  REGION 1..193: note = tr|C1DRF0|C1DRF0_AZOVD 7-carboxy-7-deazaguanine synthase OS=Azotobacter vinelandii (strain DJ / ATCC BAA-1303) OX=322710 GN=queE PE=3 SV=1
MPTVFVRLTGCPLRCGYCDTAYAFSGGAVLPLSVILERVASYGPRYVCVTGGEPLAQPNSIELLRLLCDAGYEVSLETSGAFDISAVDCRVSRVLDLKTPDSGEVARNRYANMTLLTRNDQMKFVLCSRQDYEWAVSKLIEYRLDERVGEVLFSPSHGQLEGRELADWIVADNLPVRLQLQLHKILWNDARGR

SEQ ID NO: 27970 - protein, 193 aa, Azotobacter vinelandii; identical to SEQ ID NO: 27969
  REGION 1..193: note = tr|M9YHZ2|M9YHZ2_AZOVI 7-carboxy-7-deazaguanine synthase OS=Azotobacter vinelandii CA6 OX=1283331 GN=queE; PE = 3 SV=1

SEQ ID NO: 27971 - protein, 243 aa, unidentified
  source 1..243: note = Bacillaceae bacterium
  REGION 1..243: note = tr|A0A3E0JRK4|A0A3E0JRK4_9BACI 7-carboxy-7-deazaguanine synthase OS=Bacillaceae bacterium; OX = 1889774 GN=queE PE=3 SV=1
MMKKIPVIEIFGPTIQGEGMVIGQKTMFVRTAGCDYSCSWCDSAFTWNGSAKDEIKQMTAAEILDDLIELGGDRFNHVTISGGNPALIRGLDELIILLREQGFRTALETQGSRYQDWFLLIDDLTLSPKPPSSGMKTNFTVLDDIMKRLIDGGRKDNVSLKVVVFNEEDFDYAKNVHLRYPNISFYLQPGNDQVNEQNDHLLRNQLLEKLEWLIELTVQSKEMNDARVLPQLHALVWGNKRGV

SEQ ID NO: 27972 - protein, 241 aa, unidentified
  source 1..241: note = Bacillaceae bacterium
  REGION 1..241: note = tr|A0A271M0E5|A0A271M0E5_9BACI 7-carboxy-7-deazaguanine synthase OS=Bacillaceae bacterium SAOS 7 OX=2015052 GN=queE PE=3 SV=1
MNRKIPVLEIFGPTVQGEGMVIGRKTMFVRTAGCDYSCSWCDSAFTWDGSAKEDIRLLTAEEIWSELEQLGGQTFDHVTISGGNPALFPQIAGLVSELHQHGVQTALETQGSRWQDWFYDIDELTISPKPPSSGMTTDFKQLAMIIQRLEEKEKLISLKVVVFDEADLAYAKIVHQQFPQVPFFLQTGNDRLEEINDAELLSYLVKKYEWLIEQTMPDADWKNVRVLPQLHTFVWGNKKGV

SEQ ID NO: 27973 - protein, 241 aa, unidentified
  source 1..241: note = Bacilli bacterium
  REGION 1..241: note = tr|A0A0K0GE39|A0A0K0GE39_9FIRM 7-carboxy-7-deazaguanine synthase OS=Bacilli bacterium VT-13-104 OX=1637974 GN=queE PE=3 SV=1
MRKIPVLEIFGPTIQGEGMVIGQKTMFVRTAGCDYSCSWCDSKFTWDGSEKESIQMMEPQEIVEALYEKGGGRFQHVTISGGNPGLLAQLNALVDLLHENQVKVALETQGSRWQEWFTKIDDLTISPKPPSSGMTTNFETLDFIIRSLKEKQQGDFSLKVVVFGKKDLQYAINIHKRYPDVKLFLQVGNDDLETGEQEKLLAYLLEKYERLVDLVMNSSELNDVRVLPQLHTYLWGNKRGV

SEQ ID NO: 27974 - protein, 243 aa, Bacillus aerius
  REGION 1..243: note = tr|A0A3A9DHY8|A0A3A9DHY8_9BACI 7-carboxy-7-deazaguanine synthase OS=Bacillus aerius; OX = 293388 GN=queE PE=3 SV=1
MAKPIPVLEIFGPTVQGEGMVIGQKTMFVRTAGCDYSCSWCDSAFTWDGSAKKDIKWMTAEEVYESLKDIGGNAFSHVTISGGNPALLKQLDGLISLLKENGIRTALETQGTFYQDWFAGIDDLTISPKPPSSNMKTDFNKLDHIVEKLKEHGRAAAASLKVVIFTGEDLQFAKQVHQRYPDVPFFLQVGNDDVHTEDQERLVERLLQKYEQLVEAVTRDPELNRVRVLPQLHTLIWGNKRGV

SEQ ID NO: 27975 - protein, 243 aa, Bacillus aerophilus
  REGION 1..243: note = tr|A0A410KUE5|A0A410KUE5_9BACI 7-carboxy-7-deazaguanine synthase OS=Bacillus aerophilus; OX = 293389 GN=queE PE=3 SV=1
MTKAIPVLEIFGPTIQGEGMVIGQKTMFVRTAGCDYSCSWCDSSFTWDGSAKHDIQWLQAEDIVKELKRIGGKAFSHVTISGGNPALLKQMESLIDLLHEEGIDTALETQGTMYQDWFLKIDDLTISPKPPSSNMKTDFTKLTRIIDELKNGNRLQHASLKVVIFDDLDLAYAKDVHAKYPELPFYLQVGNDDTTTADDAYLLTHLLKKYEMLVDQVAQDPDLNRVRVLPQLHTLLWGNKRGV

SEQ ID NO: 27976 - protein, 235 aa, Bacillus akibai
  REGION 1..235: note = tr|W4QX81|W4QX81_BACA3 7-carboxy-7-deazaguanine synthase OS=Bacillus akibai (strain ATCC 43226 / DSM 21942 / JCM 9157 / 1139) OX=1236973 GN=queE PE=3 SV=1
MKIPVMEIFGPTIQGEGMVIGQKTMFVRTGGCDYSCSWCDSSFTWDGSTRSHLMQAADIVEELIQIGGNRFSHVTISGGNPALHKGIEELIGLCHSNGWKVAVETQGSIWQEWMKQIDDVTISPKPPSSGMNTDYQRLDFYMEELQGHHVSLKVVVFNDEDFEFAEEVHKRYPNVPFYLQIGNENVASTNNAELLSMLLERYEWLIEKATQSSAMNDAKVLPQLHTLIWGNKRGV

SEQ ID NO: 27977 - protein, 238 aa, unidentified
  source 1..238: note = Bacillus albus
  REGION 1..238: note = tr|A0A1J9SXU6|A0A1J9SXU6_9BACI 7-carboxy-7-deazaguanine synthase OS=Bacillus albus; OX = 2026189 GN=queE PE=3 SV=1
MSKIPVLEIFGPTIQGEGMVVGQKTMFIRTAGCDYSCAWCDSAFTWDGSAKDQIRQMTAEDVWNELVEIGGENFSHVTISGGNPALLKNIEFLLSILKENGMRTAIETQGSKWQDWLLQIDEITISPKPPSSAMNTDFQKLDDVIQKLAGKDISLKVVVFDDYDFEYAVKMHERYPDVPFFLQVGNDDTKTVDDAMLIKKLLDKYEWLIEKAVNCKEMNNAKVLPQLHALVWGNKRGV

SEQ ID NO: 27978 - protein, 236 aa, Bacillus alcalophilus
  REGION 1..236: note = tr|A0A094WRV4|A0A094WRV4_BACAO 7-carboxy-7-deazaguanine synthase OS=Bacillus alcalophilus ATCC 27647 = CGMCC 1.3604 OX=1218173 GN=queE PE=3 SV=1
MKKIPVMEIFGPTIQGEGMVIGQKTMFVRTSGCDYSCSWCDSAFTWDGTGKSTLMTAEAIVEQLQQIGGDNFSHVTISGGNPALHKGIAALVDLLKEKQIQTAIETQGSIWQDWLLDIDEVTISPKPPSSKMETNLEKLDEIIHKLSDRNISLKVVIFDDVDFDYAETIHKRYPDVPFYLQVGNEDAKTEENHNLLQQLLNRYEWLIERTIDSQVMNDAKVLPQLHTLLWGNKRGV

SEQ ID NO: 27979 - protein, 243 aa, Bacillus altitudinis
  REGION 1..243: note = tr|A0A5D4PW56|A0A5D4PW56_9BACI 7-carboxy-7-deazaguanine synthase OS=Bacillus altitudinis; OX = 293387 GN=queE PE=3 SV=1
MTKAIPVLEIFGPTIQGEGMVIGQKTMFVRTAGCDYSCSWCDSSFTWDGSAKHDIQWLQAEDIVKELKRIGGKAFSHVTISGGNPALLKQMESLIDLLHEEGIDTALETQGTMYQDWFLKIDDLTISPKPPSSNMKTDFTKLTRIIDELKNGNRLHHASLKVVIFDDLDLAYAKDVHAKYPELPFYLQVGNDDTTTADDAYLLTHLLKKYEMLVDQVAQDPDLNRVRVLPQLHTLLWGNKRGV

SEQ ID NO: 27980 - protein, 243 aa, Bacillus altitudinis; identical to SEQ ID NO: 27975
  REGION 1..243: note = tr|A0A5C2C9W5|A0A5C2C9W5_9BACI 7-carboxy-7-deazaguanine synthase QueE OS=Bacillus altitudinis OX=293387 GN=queE PE=4 SV=1

SEQ ID NO: 27981 - protein, 243 aa, Bacillus amyloliquefaciens
  REGION 1..243: note = tr|A0A5C8IUJ2|A0A5C8IUJ2_BACAM 7-carboxy-7-deazaguanine synthase OS=Bacillus amyloliquefaciens OX=1390 GN=queE PE=3 SV=1
MAKGIPVLEIFGPTIQGEGMVIGQKTMFVRTAGCDYSCSWCDSAFTWDGSAKKDIRWMTAEDIYRELREIGGDAFSHVTISGGNPALLKQLDALILLLKDHGVRAALETQGTVYQDWFTMINDLTISPKPPSSGMTTDFAKLDHIVSSLDAAERLSAVSLKVVIFNDEDLQFAKTVHKRYPNIPFYLQVGNDNVHTTDDQALIAHLLGKYEKLVDKVSADADLNLVRVLPQLHTLLWGNKRGV

SEQ ID NO: 27982 - protein, 243 aa, Bacillus amyloliquefaciens
  REGION 1..243: note = tr|A0A5C0ZC15|A0A5C0ZC15_BACAM 7-carboxy-7-deazaguanine synthase OS=Bacillus amyloliquefaciens OX=1390 GN=queE PE=3 SV=1
MAKGIPVLEIFGPTIQGEGMVIGQKTMFVRTAGCDYSCSWCDSAFTWDGSAKKDIRWMTAEDIYRELREIGGDAFSHVTISGGNPALLKQLDALILLLKEHGVRAALETQGTVYQDWFTMINDLTISPKPPSSGMTTDFAKLDYIVSSLDAAERLNAVSLKVVIFSDEDLQFAKTVHKRYPNIPFYLQVGNDNVHTTDDRALIAHLLGKYETLVDKVSADSDLNLVRVLPQLHTLLWGNKRGV

SEQ ID NO: 27983 - protein, 238 aa, Bacillus anthracis
  REGION 1..238: note = tr|A0A2C3GQL6|A0A2C3GQL6_BACAN 7-carboxy-7-deazaguanine synthase OS=Bacillus anthracis; OX = 1392 GN=queE PE=3 SV=1
MSKIPVLEIFGPTIQGEGMVVGQKTMFIRTAGCDYSCAWCDSAFTWDGSAKDQIRQMTAEDVWNELVEIGGENFSHVTISGGNPALLKNIEFLLSILKENGMRTAIETQGSKWQDWLLEIDEITISPKPPSSTMNTDFQKLDDVIQKLAGKDISLKVVVFDDYDFEYAVKMHERYPDVPFFLQVGNDDTKTVDDAMLIKKLLDKYEWLIEKAVNCKEMNNAKVLPQLHALVWGNKRGV

SEQ ID NO: 27984 - protein, 238 aa, Bacillus anthracis
  REGION 1..238: note = tr|A0A3P1UCK3|A0A3P1UCK3_BACAN 7-carboxy-7-deazaguanine synthase OS=Bacillus anthracis; OX = 1392 GN=queE PE=3 SV=1
MSKIPVLEIFGPTIQGEGMVVGQKTMFIRTAGCDYSCAWCDSAFTWDGSAKDQIRQMTAEDVWNELVEIGGENFSHVTISGGNPVLLKNIEFLLSILKENGMRTAIETQGSKWQDWLLQIDEITISPKPPSSTMNTDFQKLDDVIQKLAGKDISLKVVVFDDYDFEYAVKMHERYPDVPFFLQVGNDDTKTVDDAMLIKKLLDKYEWLIEKAVNRKEMNNAKVLPQLHALVWGNKRGV

SEQ ID NO: 27985 - protein, 240 aa, Bacillus aquimaris
  REGION 1..240: note = tr|A0A366EZ69|A0A366EZ69_9BACI 7-carboxy-7-deazaguanine synthase OS=Bacillus aquimaris; OX = 189382 GN=queE PE=3 SV=1
MKKIPVLEVFGPTIQGEGMVIGQKTMFVRTAGCDYSCSWCDSAFTWDGSAKEDIQLMTAEEVWNRLKEVGGNKFSHVTISGGNPALLAHLKELIDLLKENGIASALETQGSRWQDWFYDIDDLTLSPKPPSSNMETDFEKLDFIVQRLIENGSQFSLKVVVFDDEDLEYATKIHKLYPDVPFYIQTGNPSVSEGDTPKLVSNLLLDYEALIEKVCEKEELNHVRVLPQLHTLVWGNKRGV

SEQ ID NO: 27986 - protein, 240 aa, Bacillus aquimaris
  REGION 1..240: note = tr|A0A5D4UUW5|A0A5D4UUW5_9BACI 7-carboxy-7-deazaguanine synthase OS=Bacillus aquimaris; OX = 189382 GN=queE PE=3 SV=1
MKKIPVLEVFGPTIQGEGMVIGQKTMFVRTAGCDYSCSWCDSAFSWDGSAKEDIQLMTAEEVWNRLKEVGGNKFSHVTISGGNPALLAHLKEFIEILKENGIGSALETQGSRWQDWFYDIDDLTLSPKPPSSKMETDFEKLDFIVHRLIQNGSQFSLKVVVFDDKDLEYATKIHKHYPDVPFYIQTGNPSVSEEDTPKLLSNLLLDYEALIEKICEKEELNHVRVLPQLHTLVWGNKRGV

SEQ ID NO: 27987 - protein, 243 aa, Bacillus aryabhattai
  REGION 1..243: note = tr|A0A1G6Q5B5|A0A1G6Q5B5_9BACI 7-carboxy-7-deazaguanine synthase OS=Bacillus aryabhattai B8W22 OX=1358420 GN=queE PE=3 SV=1
MANTIPVLEIFGPTIQGEGMVVGRKTMFVRTAGCDYSCSWCDSAFTWDGSAKNDIRQLTAEQIWTELKEIGGECFDHVTISGGNPALIKAIDSLVELLHSHGVKAALETQGSRYQDWFLKIDDLTISPKPPSSLMKTNFSVLDDIIETLIKEKRMAHISIKVVVFNDEDFEYAASVHERYLEVPFFVQVGNEDLTTIDNASLTQELLKKYEWLIDKAVAAKNMNDVRVLPQVHALVWGNKRGV

SEQ ID NO: 27988 - protein, 224 aa, Bacillus aryabhattai
  REGION 1..224: note = tr|A0A1S2CBT4|A0A1S2CBT4_9BACI 7-carboxy-7-deazaguanine synthase OS=Bacillus aryabhattai; OX = 412384 GN=queE PE=3 SV=1
MVVGRKTMFVRTAGCDYSCSWCDSAFTWDGSAKNDIRQLTAEQIWMELKEIGGECFDHVTISGGNPALIKAIGSLVELLHSHGVKAALETQGSRYQDWFLKIDDLTISPKPPSSLMKTNFSVLDDIIETLIKEKRMGHISIKVVIFNDEDFEYAASVHERYPEVPFFVQVGNEDLTTIDNASLTQELLKKYEWLIDKAVAAKNMNDVRVLPQVHALVWGNKRGV

SEQ ID NO: 27989 - protein, 240 aa, Bacillus asahii
  REGION 1..240: note = tr|A0A398BAW9|A0A398BAW9_9BACI 7-carboxy-7-deazaguanine synthase OS=Bacillus asahii; OX = 228899 GN=queE PE=3 SV=1
MSKIPVMEIFGPTIQGEGSMIGQKTMFVRTAGCDYSCSWCDSAFTWDGSGKEYITQLTAEEIWAELKRIGGDGFSFVTISGGNPALLKNLDSLVALLKEQGIKMGVETQGSRWQDWFYEINELTISPKPPSSGMKTDFGILDEIFTKLQNNQHHVSLKVVIFNDEDYEYGKAIHHRYPDIPFFFQVGNDDSTTTDDSKLISRLLQKYEWLIDKVVQDQDVTNVKVLPQLHTYVWGNKRGV

SEQ ID NO: 27990 - protein, 240 aa, Bacillus asahii
  REGION 1..240: note = tr|A0A3T0KQ68|A0A3T0KQ68_9BACI 7-carboxy-7-deazaguanine synthase OS=Bacillus asahii; OX = 228899 GN=queE PE=3 SV=1
MSKIPVMEIFGPTIQGEGSMIGQKTMFVRTAGCDYSCSWCDSAFTWDGSGKEYITQMTAEEIWDELKRIGGDGFSFVTISGGNPALLKNLGSLVALLKEQGIKMGVETQGSRWQDWFYEINELTISPKPPSSGMKTDFGILDEIFTKLQNNQHHVSLKVVIFNDEDYEYGKAMHHRYPDIPFFFQVGNDDSTTTDDSRLISRLLQKYDWLIDKVVQDQTVTNVKVLPQLHTYIWGNKRGV

SEQ ID NO: 27991 - protein, 243 aa, Bacillus atrophaeus
  REGION 1..243: note = tr|A0A0H3DXZ2|A0A0H3DXZ2_BACA1 7-carboxy-7-deazaguanine synthase OS=Bacillus atrophaeus (strain 1942) OX=720555 GN=queE PE=3 SV=1
MAKGIPVLEIFGPTIQGEGMVIGQKTMFVRTAGCDYSCSWCDSAFTWDGSAKKDIRWMTAEDIYSELKEIGGDAFSHVTISGGNPALLKQLDSFITLLKEQNIRTALETQGTVYQEWFTLIDDLTISPKPPSSGMTTDFKKLDHILTSLKDENRLRAVSLKVVIFNDRDLEYAKTVHKRYSDIPLYLQVGNDNVHTTDDQSLITHLLGKYETLVDKVAADAELNLVRVLPQLHTLLWGNKRGV

SEQ ID NO: 27992 - protein, 243 aa, Bacillus atrophaeus
  REGION 1..243: note = tr|A0A384IJR8|A0A384IJR8_BACAT 7-carboxy-7-deazaguanine synthase OS=Bacillus atrophaeus; OX = 1452 GN=queE PE=3 SV=1
MAKGIPVLEIFGPTIQGEGMVIGQKTMFVRTAGCDYSCSWCDSAFTWDGSAKKDIRWMAADDIYSELKEIGGDAFSHVTISGGNPALLKQLDTFITLLKEQNIRTALETQGTVYQEWFTLIDDLTISPKPPSSGMTTDFKKLDHILTSLTAENRLHAVSLKVVIFNDGDLEYAKTVHKRYPDIPLYLQVGNDNVHTTDDQSLIAHLLGKYEKLVDKVAADAELNLVRVLPQLHTLLWGNKRGV

SEQ ID NO: 27993 - protein, 243 aa, unidentified
  source 1..243: note = Bacillus australimaris
  REGION 1..243: note = tr|A0A0P7G909|A0A0P7G909_9BACI 7-carboxy-7-deazaguanine synthase OS=Bacillus australimaris OX=1326968 GN=queE PE=3 SV=1
MAKAIPVLEIFGPTIQGEGMVIGQKTMFVRTAGCDYSCSWCDSSFTWDGSAKHDIQWLQAEDIVQELKRIGGQAFSHVTISGGNPALLKQMESLIDLLHEEGIDTALETQGTMYQDWFLKIDDLTISPKPPSSNMKTDFTKLTRIIDELKSGNRLQHASLKVVIFDERDLAYAKDVHAKYPELTFYLQVGNDDTTTSDDAYLLTHLLKKYEALVDQVAQDPDLNRVRVLPQLHTLLWGNKRGV

SEQ ID NO: 27994 - protein, 239 aa, Bacillus azotoformans
  REGION 1..239: note = tr|A0A072NJ26|A0A072NJ26_BACAZ 7-carboxy-7-deazaguanine synthase OS=Bacillus azotoformans MEV2011 OX=1348973 GN=queE PE=3 SV=1
MSRIPVLEIFGPTIQGEGAVIGRKTMFVRTAGCDYHCNWCDSAFTWDGSAKDEIEQMTPEEIWNELFELGGNRFDHVTISGGNPALITAIGELVSLLNEKGIQTALETQGSKWQDWMKNIDDLTLSPKPPSSGMETNFEILDSIVATLSEVGNATIKVVVFDDVDFEYAIKIRERYRDVPFYLQVGNDDITTVDNDLLTKKLLQKYEWLMNKVMESPQMNDVRVLPQLHALVWGNKRGV

SEQ ID NO: 27995 - protein, 239 aa, Bacillus azotoformans
  REGION 1..239: note = tr|K6D701|K6D701_BACAZ 7-carboxy-7-deazaguanine synthase OS=Bacillus azotoformans LMG 9581 OX=1131731; GN = queE PE=3 SV=1
MSRIPVLEIFGPTIQGEGAVIGRKTMFVRTAGCDYHCNWCDSAFTWDGSAKDEIKQMTPEKIWDELFELGGNRFDHVTISGGNPALITAIGELVSLLNEKGIQTALETQGSKWQDWMKNIDDLTLSPKPPSSGMETNFEILDSIVATLLEVGNETIKVVVFDDVDFEYAIKIRERYRDVPFYLQVGNDDITTVDNDLLTKKLLQKYEWLINKVMESPQMNDVRVLPQLHALVWGNKRGV

SEQ ID NO: 27996 - protein, 238 aa, unidentified
  source 1..238: note = Bacillus bacterium
  REGION 1..238: note = tr|A0A506QML7|A0A506QML7_9BACI 7-carboxy-7-deazaguanine synthase OS=Bacillus bacterium; OX = 2053512 GN=queE PE=3 SV=1
MSKIPVLEIFGPTIQGEGMVVGQKTMFIRTAGCDYSCAWCDSAFTWDGSAKDQIRQMTAEEIWNELVEIGGENFSHVTISGGNPALLKNIEFLLSILKENGMRTAIETQGSKWQDWLLQIDEITISPKPPSSTMNTDFQKLDTIIQKLAGKDISLKVVVFDDYDFEYAVKMHERYPDVPFFLQVGNDDTKTVDDAMLIKKLLDKYEWLIEKAVNCKEMNNAKVLPQLHALVWGNKRGV

SEQ ID NO: 27997 - protein, 241 aa, unidentified
  source 1..241: note = Bacillus bacterium
  REGION 1..241: note = tr|A0A3D0E4B6|A0A3D0E4B6_9BACI 7-carboxy-7-deazaguanine synthase OS=Bacillus bacterium; OX = 2053512 GN=queE PE=3 SV=1
MSKIPVMEIFGPTIQGEGMVIGQKTMFVRTAGCDYSCSWCDSSFTWDGSGKDSIKQMDAEEIWQELKLLGGDGFSFVTISGGNPALLKNLGSLTQLLKKNDIQIGLETQGSKWQDWFLEIDELTVSPKPPSSGMVTNFDILDTILEKLKGVDSTHSSLKVVIFDDQDFDYAKKVHLRYPGIPFYLQVGNDDYQTTDNQQLVRHLLQKYGWLVDKVIADHELRNVKVLPQLHTLVWGNKRGV

SEQ ID NO: 27998 - protein, 240 aa, Bacillus badius
  REGION 1..240: note = tr|A0A0C2YDD0|A0A0C2YDD0_BACBA 7-carboxy-7-deazaguanine synthase OS=Bacillus badius; OX = 1455 GN=queE PE=3 SV=1
MRKIPVLEIFGPTVQGEGAVIGRKTMFVRTAGCDYRCSWCDSAFTWDGSAKEQIRLLTAEEIWEELIQTGGQTFDHVTISGGNPALLPQIADLLAKLAEKGVSTALETQGSRWQEWFYQIDELTISPKPPSSGMETDFEQLSLIVERLTAKGRAASLKVVVFDENDLAFAKKVHQLYPTLPFFLQVGNDRLQEQKQGDLLPYLVSRYEWLINKVMPDKEWKSVRVLPQLHTFVWGNKQGV

SEQ ID NO: 27999 - protein, 240 aa, Bacillus badius
  REGION 1..240: note = tr|A0A162YV46|A0A162YV46_BACBA 7-carboxy-7-deazaguanine synthase OS=Bacillus badius; OX = 1455 GN=queE PE=3 SV=1
MRKIPVLEIFGPTVQGEGAVIGRKTMFVRTAGCDYRCSWCDSAFTWDGSAKEQIRLLTAEEIWEELIQTGGQTFDHVTISGGNPALLPQIADLLAKLAEKGVSTALETQGSRWQEWFYQIDELTISPKPPSSGMETDFEQLSLIVERLTAKGRAASLKVVVFDENDLAFAKKVHQLYPALPFFLQVGNDRLQEQKQGDLLPYLVSRYEWLINKVMPDKEWKSVRVLPQLHTFVWGNKQGV

SEQ ID NO: 28000 - protein, 238 aa, Bacillus bataviensis
  REGION 1..238: note = tr|A0A561DEG3|A0A561DEG3_9BACI 7-carboxy-7-deazaguanine synthase OS=Bacillus bataviensis; OX = 220685 GN=queE PE=3 SV=1
MSKIPVMEVFGPTIQGEGMVIGQKTMFVRTAGCDYSCSWCDSAFTWDGSGKDDIRMMEAEEIWTELKQIGGDNFSFVTISGGNPALLKNLDTLIDILKDHHIKIGLETQGSKWQDWFYKIDELTISPKPPSSNMVTDFQVLDMIVDNLKESNVSLKVVVFDDQDYEYARNIHLRYPGVPFFVQVGNNDITTPDNKELLLHLLNQYERLIDKVMLDSDLNDVKVLPQLHTFLWGNKRGV

SEQ ID NO: 28001 - protein, 238 aa, unidentified
  source 1..238: note = Bacillus bombysepticus
  REGION 1..238: note = tr|A0A023P305|A0A023P305_9BACI 7-carboxy-7-deazaguanine synthase OS=Bacillus bombysepticus str. Wang OX=1330043 GN=queE PE=3 SV=1
MSKIPVLEIFGPTIQGEGMVVGQKTMFIRTAGCDYSCAWCDSAFTWDGSAKDQIRQMTPEDIWDELVAIGGENFSHVTISGGNPALLKNIEFLLSILKENGMRTAIETQGSKWQDWLLQIDEVTISPKPPSSTMKTDFHKLDAIIQKLAGKDISLKVVVFDDHDFEYAVKMHERYPKVPFFLQVGNDDTKTVDDAMLIKNLLDKYEWLIDKAVNCKEMNDAKVLPQLHALVWGNKRGV

SEQ ID NO: 28002 - protein, 236 aa, Bacillus boroniphilus
  REGION 1..236: note = tr|W4RUD6|W4RUD6_9BACI 7-carboxy-7-deazaguanine synthase OS=Bacillus boroniphilus JCM 21738 OX=1294265; GN = queE PE=3 SV=1
MEIFGPTIQGEGMVIGQKTMFVRTAGCDYSCAWCDSSFTWDGSGKDLVRQMDADEIWSEMRALGGDGFSYVTISGGNPALLKNLSGLVELLKENEVSVCLETQGSKWQDWFLKIDVLTLSPKPPSSGMKTNFEVLDQIVYGLKENGSLKNASLKIVVFDEVDYEYAKLVHQRYPELPFFLQVGNDDIETEDQMNLMSSLVDKYEWLINKVMCDVEMNNVRVLPQLHVYVWGNKRGV

SEQ ID NO: 28003 - protein, 242 aa, Bacillus butanolivorans
  REGION 1..242: note = tr|A0A0M0EZD9|A0A0M0EZD9_9BACI 7-carboxy-7-deazaguanine synthase OS=Bacillus butanolivorans OX=421767 GN=queE PE=3 SV=1
MSKLPVMEIFGPTIQGEGMVIGQKTMFVRTAGCDYSCAWCDSAFTWDGTGKEDTDQMTAEEIWNELKRIGGEGFSFVTISGGNPALLKNLDGLIAILKDNGMKIGVETQGSRWQDWFLDIDELTISPKPPSSRMNTDFEVLDRIISNLANRNPDNHVSLKVVVFDDEDYQYAKNVHFRYPDIPFYLQVGNDDSRTANDQQLISGLLKKYEELIDKVIADDELRNVKVLPQLHTYIWGNKRGV

SEQ ID NO: 28004 - protein, 242 aa, Bacillus butanolivorans
  REGION 1..242: note = tr|A0A2A7WHL7|A0A2A7WHL7_9BACI 7-carboxy-7-deazaguanine synthase OS=Bacillus butanolivorans OX=421767 GN=queE PE=3 SV=1
MSKLPVMEIFGPTIQGEGMVIGQKTMFVRTAGCDYSCAWCDSAFTWDGTGKEDTVQMTAEEILDELKRIGGEGFSFVTISGGNPALLKNLDGLIAILKDNGMKIGVETQGSRWQDWFLDIDELTISPKPPSSRMNTDFEVLDRIISNLANRNPDNHVSLKVVVFDDEDYQYAKNIHFRYPDIPFYLQVGNDDSRTANDQQLISGLLKKYEELIDKVIADDELRNVKVLPQLHTYIWGNKRGV

SEQ ID NO: 28005 - protein, 244 aa, unidentified
  source 1..244: note = Bacillus caldolyticus
  REGION 1..244: note = tr|A0A2H5KFW7|A0A2H5KFW7_BACCL 7-carboxy-7-deazaguanine synthase OS=Bacillus caldolyticus; OX = 1394 GN=queE PE=3 SV=1
MARTIPVLEIFGPTIQGEGMVIGQKTMFVRTAGCDYRCRWCDSAFTWDGSAKDEIEQLTADEIWRRLEAIGGRRFRHVTISGGNPLLIAALGELIALLHEKGMRVAVETQGSRWQDWLLDIDDVTLSPKPPSSGMDTDWAALDQIIERLQADQSRVRRISLKVVVFDDADLAYAKEVHCRYPSVPFYLQAGNADVADSDVDALRAKLFSRLEWLVEQAADSEELADVHILPQLHTLLWGNKRGV

SEQ ID NO: 28006 - protein, 237 aa, unidentified
  source 1..237: note = Bacillus camelliae
  REGION 1..237: note = tr|A0A2N3LMB3|A0A2N3LMB3_9BACI 7-carboxy-7-deazaguanine synthase OS=Bacillus camelliae; OX = 1707093 GN=queE PE=3 SV=1
MSKIPVIEIFGPTIQGEGMVIGRKTMFVRTAGCDYRCAWCDSAFTWDGSEKDNIRLLTPSEVFQELKLLGSHNFNHVTISGGNPALIGKPMMELIKIFHEHDIRVGLETQGSRWQEWFTLVDDLTISPKPPSSGMKTDFDVLDRIIENLDENRMSLKVVVFNDEDFDYSRMVHKRYPSIDFYVSVGNKDPYETGDISSRLLNSLDWLWSKVIEDPEMNNVRALPQLHALVWANKRGV

SEQ ID NO: 28007 - protein, 242 aa, unidentified
  source 1..242: note = Bacillus campisalis
  REGION 1..242: note = tr|A0A0M2SV64|A0A0M2SV64_9BACI 7-carboxy-7-deazaguanine synthase OS=Bacillus campisalis; OX = 1408103 GN=queE PE=3 SV=1
MSKIPVMEIFGPTIQGEGMVIGQKTMFVRTAGCDYSCSWCDSSFTWDGTGKHLIRQMEPAQIWEELKSLGGAKFSHVTISGGNPALLKNLDGLVTVLKENNIKLCLETQGSKWQEWMTRIDELTLSPKPPSSGMITNYEKLDDIVGRLRSSDFTGNISLKVVVFTDEDYEFAREIHNRYPGVPFFVQVGNEDPVTTDNGTLIASLLQKYETLIDKVASDQELNDVKVLPQLHTLLWGNKRGV

SEQ ID NO: 28008 - protein, 242 aa, Bacillus canaveralius
  REGION 1..242: note = tr|A0A3R9NAZ7|A0A3R9NAZ7_9BACI 7-carboxy-7-deazaguanine synthase OS=Bacillus canaveralius; OX = 1403243 GN=queE PE=3 SV=1
MSEIPVMEVFGPTIQGEGMVIGQKTMFVRTAGCDYSCSWCDSSFTWDGTGKELIKQMSAEEILAELRRIGGDGFSFVTISGGNPALLKNMGSLIELLQQNQIKVCLETQGSRWQDWFYEIDELTLSPKPPSSGMVTDFGALDMIITNLEQRPPNKNISLKVVVFTDDDYDYARSLHFRYPEVPFFLQVGNEDTTTKDDGKLILNLLEKYQLLIDKVMNDQDLKNVKVLPQLHTYIWGNKRGV

SEQ ID NO: 28009 - protein, 242 aa, Bacillus canaveralius
  REGION 1..242: note = tr|A0A2N5GG47|A0A2N5GG47_9BACI 7-carboxy-7-deazaguanine synthase OS=Bacillus canaveralius; OX = 1403243 GN=queE PE=3 SV=1
MSKIPVMEVFGPTIQGEGMVIGQKTMFVRTAGCDYSCSWCDSSFTWDGTGKELIKQMSAEEILAELRRIGGDGFSFVTISGGNPALLKNMGSLIELLQQNQIKVCLETQGSRWQDWFYEIDELTLSPKPPSSGMVTDFGALDMIITNLEQRPLNKNISLKVVVFTDDDYDYARSLHFRYPEVPFFLQVGNEDTTTKDDGKLILNLLEKYQLLIDKVMNDQDLKNVKVLPQLHTYIWGNKRGV

SEQ ID NO: 28010 - protein, 242 aa, unidentified
  source 1..242: note = Bacillus caseinilyticus
  REGION 1..242: note = tr|A0A1H3IJ46|A0A1H3IJ46_9BACI 7-carboxy-7-deazaguanine synthase OS=Bacillus caseinilyticus OX=1503961 GN=queE PE=3 SV=1
MSSIPVMEIFGPTIQGEGMVIGQKTMFVRTAGCDYSCVWCDSAFTWDGSAKEEIVPMSAAEIWKKLNELAAENFSHVTISGGNPGLLRNLAELIGLLKENGVAVAIETQGSCWQDWFLLVDNLTISPKPPSSKMNTNDQVLDNIIARLTAENRQDHISLKVVVFDEDDFQYAKSIANRYPEVPFFLQAGNDDITSKDHAALTGKLLKKYAWLTERAMADKQLTNVRVLPQLHAFVWGNKRGV

SEQ ID NO: 28011 - protein, 242 aa, unidentified
  source 1..242: note = Bacillus cavernae
  REGION 1..242: note = tr|A0A433HRP6|A0A433HRP6_9BACI 7-carboxy-7-deazaguanine synthase OS=Bacillus cavernae; OX = 1674310 GN=queE PE=3 SV=1
MSRIPVMEIFGPTIQGEGMVIGQKTMFVRTAGCDYSCAWCDSAFTWDGTGKQDIIQMEAEEIWEELKRLGGSGFSFVTISGGNPALLKNLSGLIDLLQKNNIKVCLETQGSKWQDWFLRINELTISPKPPSSKMKTDFVMLDSILEKLKNREPDNSVSMKIVVFDDDDFQYAKKVYLRYPNTPFFLQVGNDDSKTNNDQELIGRLLNKYEWLIEKVMADNELTNIKVLPQLHTYIWGNKRGV

SEQ ID NO: 28012 - protein, 242 aa, Bacillus cellulosilyticus
  REGION 1..242: note = tr|E6TRC0|E6TRC0_BACCJ 7-carboxy-7-deazaguanine synthase OS=Bacillus cellulosilyticus (strain ATCC 21833 / DSM 2522 / FERM P-1141 / JCM 9156 / N-4) OX=649639; GN = queEPE=3 SV=1
MYKFPVLEIFGPTIQGEGMVVGRKTMFVRTAGCDYSCSWCDSAFTWDGSSKEDIKQLTADEILCRLKKDGGKSFDYVTISGGNPALFSHLDELINLLHSENVKVALETQGSRWQEWFLKIDDLTLSPKPPSSQMITNWKILDEIIGHLSSNNRLQYTSLKIVIFTNEDLTYAKKIHERFPHIPLYLQVGNEDLDEDNEERLMKKLLEKYKWLVNEVMVSSTLNSVHVLPQLHTLLWGNRRGV

SEQ ID NO: 28013 - protein, 238 aa, Bacillus cereus
  REGION 1..238: note = sp|Q81G67|QUEE_BACCR 7-carboxy-7-deazaguanine synthase OS=Bacillus cereus (strain ATCC 14579 / DSM 31 / JCM 2152 / NBRC 15305 / NCIMB 9373 / NRRL B-3711); OX = 226900 G N=queE PE=3 SV=1
MSKIPVLEIFGPTIQGEGMVVGQKTMFIRTAGCDYSCAWCDSAFTWDGSAKDQIRQMTPEDIWDELVAIGGENFSHVTISGGNPALLKNIEFLLSILKENGMRTAIETQGSKWQDWLLQIDEITISPKPPSSTMKTDFQRLDAIIQKLAGKDISLKVVVFDDHDFEYAVKMHERYPKVPFFLQVGNDDTKTVDDAMLIKKLLDKYEWLIDKAVNCKEMNDAKVLPQLHALVWGNKRGV

SEQ ID NO: 28014 - protein, 238 aa, Bacillus cereus
  REGION 1..238: note = tr|J8J9I3|J8J9I3_BACCE 7-carboxy-7-deazaguanine synthase OS=Bacillus cereus VD102 OX=1053228 GN=queE PE=3; SV = 1
MSKIPVLEIFGPTIQGEGMVVGQKTMFIRTAGCDYSCAWCDSAFTWDGSAKDQIRQMTAEDVWNELVEIGGENFSHVTISGGNPVLLKNIEFLLSILKENGMRTAIETQGSKWQDWLLEIDEITISPKPPSSTMNTDFQKLDDVIQKLAGKDISLKVVVFDDYDFEYAVKMHERYPDVPFFLQVGNDDTKTVDDAMLIKKLLDKYEWLIEKAVNCKEMNNAKVLPQLHALVWGNKRGV

SEQ ID NO: 28015 - protein, 240 aa, Bacillus circulans
  REGION 1..240: note = tr|A0A553SMI2|A0A553SMI2_BACCI 7-carboxy-7-deazaguanine synthase OS=Bacillus circulans; OX = 1397 GN=queE PE=3 SV=1
MSKIPVLEIFGPTIQGEGMVVGRKTMFIRTAGCDYRCSWCDSAFTWDGTGKDDIVLMTAEEIWDRLYEIGGDCFDHVTISGGNPALLTNLIHFIELAKKKNIQLALETQGSKWQDWFEHIDDLTISPKPPSSGMNTNFAILDDIIEKLSELNNIFSLKVVVFNEADYEYAKQVHKRYPQVPFYLQVGNDDITNGNNEELLHKLLAKYEWLIDLTMNTKEMNAVRVLPQLHALVWGNKRGV

SEQ ID NO: 28016 - protein, 242 aa, Bacillus circulans
  REGION 1..242: note = tr|A0A0J1IM12|A0A0J1IM12_BACCI 7-carboxy-7-deazaguanine synthase OS=Bacillus circulans; OX = 1397 GN=queE PE=3 SV=1
MSKVPVMEIFGPTIQGEGMVIGQKTMFVRTAGCDYSCAWCDSAFTWDGSGKELIKQMQAEEIWEELVRLGGDGFSFVTLSGGNPALLKNLSFLVNLLKEKEIKIGLETQGSKWQDWFIDIDELTISPKPPSSKMNTDFDMLDSIVQRLRDANRSTHISLKVVVFSDEDYNYAKKVHLRYPDIPFFLQVGNEDNKTTDDTKLVEHLLAKYEWLIDKTMLDHQFKNVKVLPQLHTYIWGNKRGV

SEQ ID NO: 28017 - protein, 237 aa, Bacillus clausii
  REGION 1..237: note = tr|A0A268RVK4|A0A268RVK4_BACCS 7-carboxy-7-deazaguanine synthase OS=Bacillus clausii; OX = 79880 GN=queE PE=3 SV=1
MAKLIPVVELFGPTIQGEGMVIGQKTMFVRTGGCDYRCHWCDSAFTWDGSEKSEPLSAEGIIERLNSLSENGYSHVTISGGNPALHKGIGELVALLNEKGVATAIETQGTIFQCWINRVDEVTVSPKPPSSGMETDWTKLDLFLQQLQAPAVSLKVVVFDDADYQYAKRVHKRYPTVPFYLQTGNEDFAKKEDPRFLEKRMGAYEALVEKALADKEMINVRVLPQLHTWLWGNKRGV

SEQ ID NO: 28018 - protein, 217 aa, Bacillus clausii
  REGION 1..217: note = tr|Q5WG43|Q5WG43_BACSK 7-carboxy-7-deazaguanine synthase OS=Bacillus clausii (strain KSM-K16) OX=66692; GN = queE PE=3 SV=1
MIGQKTMFVRTGGCDYRCRWCDSAFTWDGSEKSEPLSAEEIIERLDSLCENGYSHVTISGGNPAIHKGIGELVALLNEKGVATAIETQGSIFQCWINRVDEVTVSPKPPSSGMETDWTKLDLFLQQLQAPAVSLKVVVFDDADYQYAKHVHKRYPTVPFYLQTGNEDFAEKEDPRFLEKRMGAYEALVEKALADKEMNNVRVLPQLHTWLWGNKRGV

SEQ ID NO: 28019 - protein, 241 aa, Bacillus coagulans
  REGION 1..241: note = tr|A0A150JRD8|A0A150JRD8_BACCO 7-carboxy-7-deazaguanine synthase OS=Bacillus coagulans; OX = 1398 GN=queE PE=3 SV=1
MASKIPVLEIFGPTIQGEGMVIGKKTMFVRTAGCDYACSWCDSAFTWNGKEKERIVLMTAEEIFQKLKETGGENFSHVTISGGNPLLLKGLGELVDLLKSHQIRTAVETQGSRWQNWLPDVDDVTISPKPPSSGMDTDFEALDWMIGQLTMAGSHCCLKIVVFDEEDFDYAKKIHKRYPPVPFYLQVGNPDVTLPDRDALAKMLTGRYEWLINLALQAEEMNDAYVLPQLHALVWGNKRGV

SEQ ID NO: 28020 - protein, 241 aa, Bacillus coagulans
  REGION 1..241: note = tr|A0A0C5CCX6|A0A0C5CCX6_BACCO 7-carboxy-7-deazaguanine synthase OS=Bacillus coagulans; OX = 1398 GN=queE PE=3 SV=1
MVSKIPVIEIFGPTIQGEGMVIGKKTMFVRTAGCDYACSWCDSAFTWNGEEKGRIVLMTAEEIFQKLKETGGENFSHVTISGGNPLLLKGLGELVDLLKTHQIRTAVETQGSRWQNWLPDVNDVTISPKPPSSGMHTDFETLDRMIEQLTLAGSHFCLKVVVFDEKDFDYAKKIHKRYPAVPFYLQVGNPDIALPDRDALAKMLIGRYEWLVNLTLQAEEMNDAYVLPQLHALVWGNKRGV

SEQ ID NO: 28021 - protein, 240 aa, Bacillus coahuilensis
  REGION 1..240: note = tr|A0A147K8T1|A0A147K8T1_9BACI 7-carboxy-7-deazaguanine synthase OS=Bacillus coahuilensis p1.1.43 OX=1150625 GN=queE PE=3 SV=1
MNKFPVLEIFGPTVQGEGMVIGQKTMFIRTAGCDYSCSWCDSSFTWDGSAKEDIRLLSADEIWSELVQVGGDCFNHVTISGGNPALLKHLNELLDVFHNHGIQSALETQGSRWQDWFLDIDDLTLSPKPPSSGMTTDFSLLDSIIQKLLVNNKAFSLKVVIFDELDLSYATLVHKRYPQVDLYLQTGNPEITEGDDNKLLSILIERYAWLINEVMKSSILKNVRVLPQLHTYVWGNKRGV

SEQ ID NO: 28022 - protein, 239 aa, Bacillus cohnii
  REGION 1..239: note = tr|A0A223KPP2|A0A223KPP2_9BACI 7-carboxy-7-deazaguanine synthase OS=Bacillus cohnii; OX = 33932 GN=queE PE=3 SV=1
MNKKIPVLEIFGPTIQGEGMVIGQKTMFVRTSGCDYRCVWCDSAFTWDGSAKDDIRMLTAEQIWSELLELGGNSFKHVTISGGNPALLQSISYLVELLHDNGVKVALETQGSKWKDWMKAIDDLTLSPKPPSSTMKTDFAMLDSIISKLEMNKISLKVVVFNDEDLLYAKKVHQRYPNVPFFVQVGNDDIETTSTADLREHLFVKYEWLIEKVMKDEEMNFVRVLPQLHTYIWGNKRGV

SEQ ID NO: 28023 - protein, 238 aa, unidentified
  source 1..238: note = Bacillus cucumis
  REGION 1..238: note = tr|A0A2N5HSM1|A0A2N5HSM1_9BACI 7-carboxy-7-deazaguanine synthase OS=Bacillus cucumis; OX = 1740721 GN=queE PE=3 SV=1
MSKIPVMEVFGPTIQGEGMVIGQKTMFVRTAGCDYSCSWCDSSFTWDGTGKDNIRMMEAEEIWAELKQIGGENFSFVTISGGNPALLKNLDALIDILKAHDIKIGLETQGSKWQDWFYKIDELTISPKPPSSTMVTDFNILDMILNHLNENNVSLKVVVFDDQDYEYAKKVHLRYPDVPFFVQVGNNDLTTTDNQKLLLHLLNQYEHLIDKVMVDPELNNVKVLPQLHTFLWGNKRGV

SEQ ID NO: 28024 - protein, 238 aa, unidentified
  source 1..238: note = Bacillus cytotoxicus
  REGION 1..238: note = tr|A7GMN4|A7GMN4_BACCN 7-carboxy-7-deazaguanine synthase OS=Bacillus cytotoxicus (strain DSM 22905 / CIP 110041 / 391-98 / NVH 391-98) OX=315749 GN=queE PE=3 SV=1
MSKIPVLEIFGPTIQGEGMVVGQKTMFIRTAGCDYSCAWCDSAFTWDGSAKDQIRQMTPEEIWKELIEIGGENFSHVTISGGNPVLLKHMKELLERLKENNIRTAIETQGSKWQEWLLDIDEITISPKPPSSKMKTNFTMLDLVVERLVDKNMSLKVVIFDDDDFEYAKNVHERYPHVPFFLQVGNDDTKTAEDAVLIPKLLQKYEWLIEKAVHSKEMNDVKVLPQLHALVWGNKRGV

SEQ ID NO: 28025 - protein, 238 aa, unidentified; identical to SEQ ID NO: 28024
  source 1..238: note = Bacillus cytotoxicus
  REGION 1..238: note = tr|A0A2S1AA25|A0A2S1AA25_9BACI 7-carboxy-7-deazaguanine synthase OS=Bacillus cytotoxicus; OX = 580165 GN=queE PE=3 SV=1

SEQ ID NO: 28026 - protein, 246 aa, Bacillus daliensis
  REGION 1..246: note = tr|A0A1G9ZJ87|A0A1G9ZJ87_9BACI 7-carboxy-7-deazaguanine synthase OS=Bacillus daliensis; OX = 745820 GN=queE PE=3 SV=1
MSNTKTLPVLEIFGPTFQGEGMVIGKKTMFVRTAGCDYSCSWCDSAFTWDGSAKDDIRKMTAEEVLERLNFLAPHNFSHVTISGGNPALLKHMGSLVELLHAQNVEVALETQGSRWQDWFLHIDDLTISPKPPSSLMKTNFEVLDSIIEQLMEAGRTAHVSLKVVVFNEEDFLYAKLIHARYPQISFFLQVGNEDTGDEKETDDLVPKLLEEYEKLVDRTMQDRDMNQVRVLPQLHTLVWGNKRGV

SEQ ID NO: 28027 - protein, 242 aa, unidentified
  source 1..242: note = Bacillus deserti
  REGION 1..242: note = tr|A0A2N5M814|A0A2N5M814_9BACI 7-carboxy-7-deazaguanine synthase OS=Bacillus deserti; OX = 673318 GN=queE PE=3 SV=1
MGKIPVMEIFGPTIQGEGMVVGQKTMFVRTAGCDYSCSWCDSSFTWDGTGRHLITQMEPQEIWEKLKELSGEGFSFVTISGGNPALLKNMEDVITLFKQNQIQIGLETQGSKWQDWMMEIDELTISPKPPSSKMITNFSILDDVIARLSSHDFSGNVSLKVVVFNQEDYEYAKGIHQRYPQIPFFMQVGNDETATEDNSLLITHLLNKYERLIDAVMNDNELKNVKVLPQLHALVWGNKRGV

SEQ ID NO: 28028 - protein, 240 aa, unidentified
  source 1..240: note = Bacillus enclensis
  REGION 1..240: note = tr|A0A0V8HI46|A0A0V8HI46_9BACI 7-carboxy-7-deazaguanine synthase OS=Bacillus enclensis; OX = 1402860 GN=queE PE=3 SV=1
MKKFPVLEIFGPTIQGEGMVIGRKTMFVRTAGCDYSCSWCDSAFTWDGSAKDDIRLLNAEEIWNELSEIGGKRFSHVTISGGNPALLSNLGELLDIFKENGIESALETQGSRWQDWFYDIDDLTISPKPPSSNMITDFNKLDEIIQKLNDNDSAFSLKVVVFNDGDMQYAKKVHKRYPSVPFYLQTGNPETAEENTEKLVSDLLNDFEILIDKVSMDDELNNVRVLPQLHTLVWGNKRGV

SEQ ID NO: 28029 - protein, 243 aa, Bacillus endophyticus
  REGION 1..243: note = tr|A0A329EPQ6|A0A329EPQ6_9BACI 7-carboxy-7-deazaguanine synthase OS=Bacillus endophyticus; OX = 135735 GN=queE PE=3 SV=1
MSHKIPVLEIFGPTIQGEGMVIGRKTMFVRTAGCDYSCAWCDSSFTWDGSAKEDIKMMEASEILQKLFDIGGEHFNHVTISGGNPALLKHLDELIDLLSQKGIETGLETQGSRYQDWFLKINDLTISPKPPSSKMKPNLEVLDEVMERLKQGERLNHVSLKVVVFNDEDFEFAEAIHSRYPDVSFYLQVGNDDVTTANDEDLLKNLLVKYEWLIDKAVQSKTMNHARVLPQLHTLVWGNKRGV

SEQ ID NO: 28030 - protein, 243 aa, Bacillus endophyticus
  REGION 1..243: note = tr|A0A3N6B0B8|A0A3N6B0B8_9BACI 7-carboxy-7-deazaguanine synthase OS=Bacillus endophyticus; OX = 135735 GN=queE PE=3 SV=1
MSHKIPVLEIFGPTIQGEGMVVGRKTMFVRTAGCDYSCAWCDSSFTWDGSAKEDIKMMEASEILQKLFHIGGEHFNHVTISGGNPALLKHLDELIDLLSQKGIETGLETQGSRYQDWFLKINDLTISPKPPSSKMKPNLEVLDEVMERLKQGERLNHVSLKVVVFNDEDFEFAEAIHSRYPDVSFYLQVGNDDVTTANDEDLLKNLLVKYEWLIDKAVQSKTMNHARVLPQLHTLVWGNKRGV

SEQ ID NO: 28031 - protein, 242 aa, unidentified
  source 1..242: note = Bacillus endozanthoxylicus
  REGION 1..242: note = tr|A0A5J5HV64|A0A5J5HV64_9BACI 7-carboxy-7-deazaguanine synthase QueE OS=Bacillus endozanthoxylicus OX=2036016 GN=queE PE=4 SV=1
MSKIPVLEIFGPTIQGEGMVIGQKTMFVRTAGCDYSCAWCDSSFTWDGTGKEDIRQMSANEIWEELKALGGDGFSFVTISGGNPALLKNISTFINILQKNQIKICLETQGSLWQEWFYKIDELTLSPKPPSSGMTTDFDRLDTIIGNLEQSERKQNISLKVVIFNDEDYQYAKKVHFRYPAIPFFFQIGNDDSKTSDDNQLLEKLLQKYEWLINKVMFDDSLKDVKVLPQLHTYIWGNKRAV

SEQ ID NO: 28032 - protein, 243 aa, unidentified
  source 1..243: note = Bacillus filamentosus
  REGION 1..243: note = tr|A0A1X7EZ31|A0A1X7EZ31_9BACI 7-carboxy-7-deazaguanine synthase OS=Bacillus filamentosus; OX = 1402861 GN=queE PE=3 SV=1
MSHKIPVLEIFGPTIQGEGMVVGRKTMFVRTAGCDYSCAWCDSSFTWDGSAKEDIKMMEASEILQKLFDIGGEHFNHVTISGGNPALLKHLDELIDLLSQKGIETGLETQGSRYQDWFLKINDLTISPKPPSSKMKPNLEVLDEVMERLKQGERLNHVSLKVVVFNDEDFEFAEAIHSRYPDVSFYLQVGNDDVTTANDEDLLNNLLVKYEWLIDKAVGSKKMNHARVLPQLHTLVWGNKRGV

SEQ ID NO: 28033 - protein, 243 aa, Bacillus firmus
  REGION 1..243: note = tr|W7L4U4|W7L4U4_BACFI 7-carboxy-7-deazaguanine synthase OS=Bacillus firmus DS1 OX=1307436 GN=queE PE=3; SV = 1
MSKIPVLEIFGPTIQGEGMVIGQKTMFVRTAGCDYSCSWCDSSFTWDGSAKDSIRQMEPDEIWKELKELGGDGFSFVTISGGNPALLKNLGEFISLLKAERIKLCLETQGSRWQDWFYEIDELTLSPKPPSSGMNTDFDVLDLIVNKLQTGRREDQQFSLKIVVFDDEDYEYAKNVYQRYPGVPFYLQVGNDDTVTADDRNLLQRLLDKYDWLIEKTIHDSELTNIKVLPQLHTYVWGNKRGV

SEQ ID NO: 28034 - protein, 243 aa, Bacillus firmus
  REGION 1..243: note = tr|A0A0J5VJB1|A0A0J5VJB1_BACFI 7-carboxy-7-deazaguanine synthase OS=Bacillus firmus; OX = 1399 GN=queE PE=3 SV=1
MSKIPVLEIFGPTIQGEGMVIGQKTMFVRTAGCDYSCSWCDSSFTWDGSAKDSIRQMEPDEIWKELKELGGDGFSFVTISGGNPALLKNLGEFISLLKAERIKLCLETQGSRWQDWFYEIDELTLSPKPPSSGMNTDFEVLDLIVNKLQAGRREDQQFSLKIVVFDDADYEYAKDVHKRYPGVPFYLQVGNDDTVTADDRNLLQRLLDKYDWLIEKTIHDNELTDVKVLPQLHTYVWGNKRGV

SEQ ID NO: 28035 - protein, 243 aa, Bacillus flexus
  REGION 1..243: note = tr|A0A4P8XCW7|A0A4P8XCW7_9BACI 7-carboxy-7-deazaguanine synthase OS=Bacillus flexus; OX = 86664 GN=queE PE=3 SV=1
MNNKVPVLEIFGPTIQGEGMVVGRKTMFVRTAGCDYSCSWCDSAFTWDGSAKSDIRQLTDEEVWHELQTLGGDRFDHVTISGGNPALLKSLDKLIDRLHDHQKQVALETQGSRFQEWFYKIDDLTLSPKPPSSGMKTNYEVLDDIVERLQNNGRSQHISIKVVVFDETDFDYAKHIHQRYPSVPFFVQVGNDDLTTTDDEALTRKLLGKYEWLIDLVVATTDMNNVRVLPQVHALVWGNKRGV

SEQ ID NO: 28036 - protein, 242 aa, Bacillus foraminis
  REGION 1..242: note = tr|A0A4R2BJS0|A0A4R2BJS0_9BACI 7-carboxy-7-deazaguanine synthase OS=Bacillus foraminis; OX = 279826 GN=queE PE=3 SV=1
MSKIPVMEIFGPTIQGEGMVIGQKTMFVRTAGCDYSCSWCDSAFTWDGSGKHLIRQMEPEEIWKQLQELGGVGFSHVTISGGNPALLKNMDGLVELLKGNGIKLCLETQGSKWQDWMMEIDELTISPKPPSSGMITNYEALDGIIERLSTPSFKGNVSIKVVIFNDDDFEYARNIHKRYPHLPFFMQVGNEDTVTMDRSELVSCLLAQYESLIEKVIADPELKEVKVLPQLHALVWGNKRGV

SEQ ID NO: 28037 - protein, 242 aa, unidentified
  source 1..242: note = Bacillus freudenreichii
  REGION 1..242: note = tr|A0A448FGD3|A0A448FGD3_9BACI 7-carboxy-7-deazaguanine synthase OS=Bacillus freudenreichii OX=1783501 GN=queE PE=3 SV=1
MSKVPVIEIFGPTIQGEGMVIGQKTMFVRTAGCDYSCTWCDSSFTWDGSGKDSIKQMDAEEIWQELKLLGGDGFSFVTISGGNPALLKNLSYLIDLLKKNEIQVGLETQGSKWQDWFLDIDELTISPKPPSSGMVTDFDTLDMIIEKLKGANSTHSCSLKVVIFDDQDFDYAKKVHFRYPEITFYLQVGNDDHRTSENKRLINQLLHKYEWLVNKVVEDNDLRNVKVLPQLHTLIWGNKRGV

SEQ ID NO: 28038 - protein, 238 aa, unidentified
  source 1..238: note = Bacillus gaemokensis
  REGION 1..238: note = tr|A0A073KML7|A0A073KML7_9BACI 7-carboxy-7-deazaguanine synthase OS=Bacillus gaemokensis; OX = 574375 GN=queE PE=3 SV=1
MSKLPVLEIFGPTIQGEGMVVGQKTMFIRTAGCDYSCAWCDSSFTWDGSAKEQIRQMTPEEIWDELFEIGGENFSHVTISGGNPVLLKNIEGFLDLLKEKQIRTAIETQGSKWQEWLLHIDEVTISPKPPSSQMKTDFLMLDSVIERLVGKDFSLKVVVFDDHDFEYAVKVHERYPHVPFFLQVGNDDTKTIDDAMLIKKLLEKYEWLIEKAVHCKEMNDAKVLPQLHALVWGNKRGV

SEQ ID NO: 28039 - protein, 240 aa, Bacillus galactosidilyticus
  REGION 1..240: note = tr|A0A177ZHM4|A0A177ZHM4_9BACI 7-carboxy-7-deazaguanine synthase OS=Bacillus galactosidilyticus OX=217031 GN=queE PE=3 SV=1
MKIPVLEIFGPTIQGEGMVIGQKTMFVRTAGCDYSCSWCDSAFTWNGSEKENIRRLEPEEIWQALKEQGGQTFSHVTISGGNPALLKQMGELVNLLHSHDVQVALETQGSRWQSWFTEIDELTLSPKPPSSGMKTNFAILDQIIHSLQDKQKGSFSLKIVVFDEQDLHYAIDLYKRYPGVTFFLQVGNNDLANFDDQQLLAHLLERYHWLIEKVMESEELRNVRVLPQLHTYLWGNKRGV

SEQ ID NO: 28040 - protein, 239 aa, Bacillus ginsengihumi
  REGION 1..239: note = tr|A0A0A6VF88|A0A0A6VF88_9BACI 7-carboxy-7-deazaguanine synthase OS=Bacillus ginsengihumi; OX = 363870 GN=queE PE=3 SV=1
MSRGKIPVIETFGPTIQGEGMVIGRKTMFVRTAGCDYRCKWCDSAFTWDGSEKHRIRMMEPAELFEELIQLAGNNFDHVTISGGNPALIGEAMNDFIMLLQEHGMKIGLETQGSKWQDWFLLVDDLTISPKPPSSGMETNFEILDEIIARLNPAAFSLKVVVFDDHDFAYAKKVHKRYPAANFYLSVGNANPNEKGDISSRLLKSLDWLWGKVIEDPEMNNVKALPQLHALVWANKRGV

SEQ ID NO: 28041 - protein, 243 aa, unidentified
  source 1..243: note = Bacillus glycinifermentans
  REGION 1..243: note = tr|A0A0J6EN99|A0A0J6EN99_9BACI 7-carboxy-7-deazaguanine synthase OS=Bacillus glycinifermentans OX=1664069 GN=queE PE=3 SV=1
MAKPIPVLEIFGPTIQGEGMVIGRKTMFVRTAGCDYSCSWCDSAFTWDGSAKKDIKWMTAEEVYRSLKEIGGDSFSHVTISGGNPALLKQLDGLISLLKEKNIRTALETQGTFYQDWFAKIDDLTISPKPPSSNMKTDFQKLDHIIGKLKGHGRLAAASLKVVIFTPEDLQFAKNVHQRYPEIPFYLQVGNEDVHTEEQERLVEKLLRKYEELVDAVTRDPELNRVRVLPQLHTLIWGNKRGV

SEQ ID NO: 28042 - protein, 243 aa, unidentified
  source 1..243: note = Bacillus glycinifermentans
  REGION 1..243: note = tr|A0A1C3SBR1|A0A1C3SBR1_9BACI 7-carboxy-7-deazaguanine synthase OS=Bacillus glycinifermentans OX=1664069 GN=queE PE=3 SV=1
MAKPIPVLEIFGPTIQGEGMVIGQKTMFVRTAGCDYSCSWCDSAFTWDGSAKKDIKWMTAEEVYGSLKEIGGDSFSHVTISGGNPALLKQLDELISLLKENDIRTALETQGTFYQDWFAKIDDLTISPKPPSSNMKTDFQKLDHIIGKLKEQGRLAAASLKVVIFSPEDLQFAKNVHQRYPEIPFYLQVGNEDVHTEEQDRLVEKLLRKYEELVDAVTRDPELNRVRVLPQLHTLIWGNKRGV

SEQ ID NO: 28043 - protein, 243 aa, unidentified
  source 1..243: note = Bacillus gobiensis
  REGION 1..243: note = tr|A0A0M4FPK2|A0A0M4FPK2_9BACI 7-carboxy-7-deazaguanine synthase OS=Bacillus gobiensis; OX = 1441095 GN=queE PE=3 SV=1
MNKPIPVLEIFGPTVQGEGSVIGQKTMFVRTAGCDYSCSWCDSAFTWDGSAKGDIKWLEPNEVLDSLRETGGGCFSHVTISGGNPALLKPLGGLTALLKEKGYRIALETQGSIFQEWFADIDDLTISPKPPSSGMVCDFTKLTAIFESLEKMNRLQSVTLKIVIFSDEDLEFAKGVHQKYPGLPLFLQVGNDDLNSRDTNDLAQKLLEKYEGLVEKVCADEDLTNVRVLPQLHTLIWGNKRGV

SEQ ID NO: 28044 - protein, 236 aa, Bacillus halodurans
  REGION 1..236: note = tr|A0A4Y7X1D0|A0A4Y7X1D0_BACHO 7-carboxy-7-deazaguanine synthase OS=Bacillus halodurans; OX = 86665 GN=queE PE=3 SV=1
MKRIPVMEIFGPTVQGEGMVIGQKTMFVRTGGCDYSCSWCDSAFTWDGSLKATLRTADEIIAKLEEIGGERFSHVTISGGNPALHKGIGELVDKLHDKGIRVALETQGSLWQDWFLKIDDLTISPKPPSSQMKTDFTKLDQIIERLDTKQMSLKVVVFNDEDFRYAEYVHERYPHVPFFLQVGNEDTVTGDNALLIRTLLDRYEWLINKATDSTIMNDAKILPQLHTLVWGNKRGV

SEQ ID NO: 28045 - protein, 236 aa, Bacillus halodurans
  REGION 1..236: note = tr|Q9KAP5|Q9KAP5_BACHD 7-carboxy-7-deazaguanine synthase OS=Bacillus halodurans (strain ATCC BAA-125 / DSM 18197 / FERM 7344 / JCM 9153 / C-125) OX=272558 GN=queE PE =3 SV=1
MKRIPVMEIFGPTVQGEGMVIGQKTMFVRTGGCDYSCSWCDSAFTWDGSLKATLRTADEIIAKLEEIGGERFSHVSISGGNPALHKGIGELVDKLHDKGIRVALETQGSLWQDWFLKIDDLTISPKPPSSQMKTDFTKLDQIIERLDTKQMSLKVVVFNDEDFRYAEYVHERYPHVPFFLQVGNEDTVTGDNDLLIRTLLDRYEWLIAKATDSTIMNDAKILPQLHTLVWGNKRGV

SEQ ID NO: 28046 - protein, 243 aa, unidentified
  source 1..243: note = Bacillus halotolerans
  REGION 1..243: note = tr|A0A3Q9RSD3|A0A3Q9RSD3_9BACI 7-carboxy-7-deazaguanine synthase OS=Bacillus halotolerans; OX = 260554 GN=queE PE=3 SV=1
MAKGIPVLEIFGPTIQGEGMVIGQKTMFVRTAGCDYSCSWCDSAFTWDGSAKKDIRWMTAEEIFSELKEIGGDAFSHVTISGGNPALLKQLDALIELLKENNIRAALETQGTVYQDWFTLIDDLTISPKPPSSKMVTNFDKLDHILTSLKENNRQHAVSLKVVIFNDEDLEFAKTVHKRYPGIPFYLQVGNDDVHTADDKSLIAHLLGKYEALVDQVAADAELNLVRVLPQLHTLLWGNKRGV

SEQ ID NO: 28047 - protein, 243 aa, unidentified
  source 1..243: note = Bacillus halotolerans
  REGION 1..243: note = tr|A0A2S9WEQ3|A0A2S9WEQ3_9BACI 7-carboxy-7-deazaguanine synthase OS=Bacillus halotolerans; OX = 260554 GN=queE PE=3 SV=1
MAKGIPVLEIFGPTIQGEGMVIGQKTMFVRTAGCDYSCSWCDSAFTWDGSAKKDIRWMTAEEIFSELKEIGGDAFSHVTISGGNPALLKQLDALIELLKENNIRTALETQGTVYQDWFTLIDDLTISPKPPSSKMVTNFNKLDHILTSLKENNRQHAVSLKVVIFNDEDLEFAKTVHKRYPGIPFYLQVGNDDVHTADDKSLIAHLLGKYEALVDQVAADAELNLVRVLPQLHTLLWGNKRGV

SEQ ID NO: 28048 - protein, 243 aa, unidentified
  source 1..243: note = Bacillus haynesii
  REGION 1..243: note = tr|W7RPD5|W7RPD5_9BACI 7-carboxy-7-deazaguanine synthase OS=Bacillus haynesii OX=1925021 GN=queE PE=3 SV=1
MAKPIPVLEIFGPTVQGEGMVIGQKTMFVRTAGCDYSCSWCDSAFTWDGSAKKDIKWMTAEEVYESLKDIGENAFSHVTISGGNPALLKQLDGLISLLKENGIRTALETQGTFYQDWFTEIDDLTISPKPPSSNMKTDFNKLDHIIEKLKEHGRAAAASLKVVIFTADDLQFAKQVHQRYPDIPFFLQVGNDDVHTEDQERLVERLLQKYEQLVEAVTRDPELNRVRVLPQLHTLIWGNKRGV

SEQ ID NO: 28049 - protein, 243 aa, unidentified
  source 1..243: note = Bacillus haynesii
  REGION 1..243: note = tr|A0A1R1RRG7|A0A1R1RRG7_9BACI 7-carboxy-7-deazaguanine synthase OS=Bacillus haynesii; OX = 1925021 GN=queE PE=3 SV=1
MAKPIPVLEIFGPTVQGEGMVIGQKTMFVRTAGCDYSCSWCDSAFTWDGSAKKDIKWMTAEEVYESLKDIGENAFSHVTISGGNPALLKQLDRLISLLKENGIRTALETQGTFYQDWFTGIDDLTISPKPPSSNMKTDFNKLDHIVEKLKEHGRAAAASLKVVIFTADDLQFAKQVHQRYPDIPFFLQVGNDDVHTEDQERLVERLLQKYEQLVEAVTRDPELNRVRVLPQLHTLIWGNKRGV

SEQ ID NO: 28050 - protein, 52 aa, Bacillus hemicellulosilyticus
  REGION 1..52: note = tr|W4QH36|W4QH36_9BACI Queuosine Biosynthesis QueE Radical SAM OS=Bacillus hemicellulosilyticus JCM 9152; OX = 1236971 GN=JCM9152_2376 PE=4 SV=1
MKIPVMEVFGPTIQGEGRVIGQKTMFVRTAGCDYRCSWCDSSFTWMVQEKVC

SEQ ID NO: 28051 - protein, 182 aa, Bacillus hemicellulosilyticus
  REGION 1..182: note = tr|W4QI10|W4QI10_9BACI Queuosine Biosynthesis QueE Radical SAM OS=Bacillus hemicellulosilyticus JCM 9152; OX = 1236971 GN=JCM9152_2377 PE=4 SV=1
MDASAIVTALKEQGDNRFSHVTISGGNPALHKGLAEFVELCHGEKWTVALETQGSYWQDWLTMVDEVTISPKPPSSKMKTDLNRLDDVMSRLSVEQVNLKVVIFDQDDFQYAKVIHQRYPDVAMFLQVGNDQVTSTKKDELVSQLLIRYEWLIELTLSSVEMNDVRVLPQLHTFVWGNKRGV

SEQ ID NO: 28052 - protein, 239 aa, Bacillus horikoshii
  REGION 1..239: note = tr|A0A1Y0CM45|A0A1Y0CM45_9BACI 7-carboxy-7-deazaguanine synthase OS=Bacillus horikoshii; OX = 79883 GN=queE PE=3 SV=1
MSSLIPVLEIFGPTIQGEGMVIGQKTMFVRTAGCDYRCSWCDSAFTWDGSAKDDIVMMSPEEIYEQLVEIGGKAFNHVTISGGNPALLKNIGELVQLLHENDIKVALETQGSKWQDWLTEIDDLTISPKPPSSEMDTNFSILGDLLERVKNSSVSLKVVVFDEDDLTYAKKIHKLYPDVAFYVQVGNDDTTTEDDQMLISKLLAKYEWLIDQVMNDDEMNNVRVLPQLHTLVWGNKRGV

SEQ ID NO: 28053 - protein, 239 aa, Bacillus horikoshii
  REGION 1..239: note = tr|A0A5D4SD14|A0A5D4SD14_9BACI 7-carboxy-7-deazaguanine synthase OS=Bacillus horikoshii; OX = 79883 GN=queE PE=3 SV=1
MSSLIPVLEIFGPTIQGEGMVIGQKTMFVRTAGCDYRCSWCDSAFTWDGSAKDDIVMMSPEEIYEQLVEIGGKAFNHVTISGGNPALLKNIRVLVQLLHENDIKVALETQGSKWQDWLTEIDDLTISPKPPSSGMDTNFSILSDLLERVKNSSVSLKVVVFDEDDLTYAKKVHKLYPDVAFYVQVGNDDTTTEDDQMLISKLLAKYEWLIDQVMVDDEMNNVRVLPQLHTLVWGNKRGV

SEQ ID NO: 28054 - protein, 238 aa, Bacillus horneckiae
  REGION 1..238: note = tr|A0A2N0ZEY3|A0A2N0ZEY3_9BACI 7-carboxy-7-deazaguanine synthase OS=Bacillus horneckiae; OX = 549687 GN=queE PE=3 SV=1
MSKIPVMEIFGPTIQGEGMVIGQKTMFVRTAGCDYSCAWCDSSFTWDGTGKHLITQMEPEDIWTKLKQLGGSGFRFVTISGGNPALIKNIDGLVDILKKNGIQIGLETQGSKWQDWFYKIDELTISPKPPSSRMITDFDRLDEIILRISRQNISLKVVVFNDEDYDYAKKIHQRYSEIPFFLQVGNDDCSTTDDDQLMMTLLNKYSWLIDKTMVDDEFQNVKVLPQLHTYIWGNKRGV

SEQ ID NO: 28055 - protein, 242 aa, Bacillus hwajinpoensis
  REGION 1..242: note = tr|A0A4U1MNY7|A0A4U1MNY7_9BACI 7-carboxy-7-deazaguanine synthase OS=Bacillus hwajinpoensis OX=208199 GN=queE PE=3 SV=1
MNKWVLPERSEYMKWELPMVEVFETVEGEGTRAGFPTVFVRVFHCNLRCSWCDTPYSYAPDKAEYTGSIEAIVNQINQYKSRHICFTGGEPLIHREKSMALLQAMVDLPHIEDIHIETNGAIDLTPYEAVRNEDDEWQKKVRFVMDYKLPDSGEQHRMLHENFNLLDTQDEIKFVIGSDEDFTVASDVVAQHHDKGQVLYSPVWETMPPHKLVEKILEAGLSKVKLSMQLHKIIWDPNKRGV

SEQ ID NO: 28056 - protein, 242 aa, Bacillus indicus
  REGION 1..242: note = tr|A0A084H2U2|A0A084H2U2_BACID 7-carboxy-7-deazaguanine synthase OS=Bacillus indicus; OX = 246786 GN=queE PE=3 SV=1
MKKFPVLEIFGPTIQGEGMVIGQKTMFVRTAGCDYSCSWCDSAFTWDGSAKDDIRQLTAEQIWNELSELGGDLFSHVTISGGNPALLVHLSELVDLLHEKEIKVAIETQGSRLQPWFSKIDDLTISPKPPSSGMSTDFDKLKEIIDYLDIENRLGHASLKVVVFDEADLEFAKKVHITYPELPFYIQVGNDLVQETSDDKLIGHLLSRYEWLIERSAKEKELNSARILPQLHTLVWGNKRGV

SEQ ID NO: 28057 - protein, 241 aa, Bacillus infantis
  REGION 1..241: note = tr|U5L426|U5L426_9BACI 7-carboxy-7-deazaguanine synthase OS=Bacillus infantis NRRL B-14911 OX=1367477; GN = queE PE=3 SV=1
MSKIPVMEIFGPTIQGEGMVIGQKTMFVRTAGCDYSCSWCDSSFTWDGTGKELIRQMDAEEIWNELKAIGGEGFSFVTISGGNPALLKNLDKLISLLKKENIQLCLETQGSRWQDWFYSIDQLTISPKPPSSGMITDFEILDDIFERLADRFTHQVSLKVVIFDENDFEYSKKVMKRYPGIPLYLQAGNEHLSAANNDEFLSQQLKKYSWLIEKAMLEEEMKEVRVLPQLHTFVWGNMRGV

SEQ ID NO: 28058 - protein, 241 aa, Bacillus infantis
  REGION 1..241: note = tr|A0A5D4RDH1|A0A5D4RDH1_9BACI 7-carboxy-7-deazaguanine synthase OS=Bacillus infantis; OX = 324767 GN=queE PE=3 SV=1
MSKIPVMEIFGPTIQGEGMVIGQKTMFVRTAGCDYSCSWCDSSFTWDGTGKELIRQMDAEEIWNELKAIGGEGFSFVTISGGNPALLKNLDKLISLLKKENIKLCLETQGSRWQDWFYSIDQLTISPKPPSSGMITDFEILDDIFKRLADRFTHQVSFKVVIFDENDFEYSKKVMKRYPGIPLYLQAGNENLSAANNGEFLSEQLKKYSWLIEKAMLDDEMKEVRVLPQLHTFVWGNMRGV

SEQ ID NO: 28059 - protein, 243 aa, unidentified
  source 1..243: note = Bacillus intestinalis
  REGION 1..243: note = tr|A0A136G6C2|A0A136G6C2_9BACI 7-carboxy-7-deazaguanine synthase OS=Bacillus intestinalis; OX = 1963032 GN=queE PE=3 SV=1
MAKGIPVLEIFGPTIQGEGMVIGQKTMFVRTAGCDYSCSWCDSAFTWDGSAKKDIRWVTAEEIFAELKDIGGDAFSHVTISGGNPALLKQLDAFIELLKENNIRAALETQGTVYQDWFTLIDDLTISPKPPSSKMVTNFQKLDHILTSLKENNRQHACSLKVVIFNDEDLEFAKTVHKRYPGIPFYLQVGNDDVHTTDDQSLIAHLLGKYEALVDKVAVDAELNLVRVLPQLHTLLWGNKRGV

SEQ ID NO: 28060 - protein, 238 aa, Bacillus kochii
  REGION 1..238: note = tr|A0A248TER1|A0A248TER1_9BACI 7-carboxy-7-deazaguanine synthase OS=Bacillus kochii; OX = 859143 GN=queE PE=3 SV=1
MSKIPVMEIFGPTIQGEGIVIGQKTMFVRTAGCDYACTWCDSSFTWDGSSKHLIKQMTATEIWHELKNIGGDYFDFVTISGGNPALLKNLGELVTLLKDKKVQTALETQGSKWQDWFKDIDFLTLSPKPPSSQMETDFNKLDEIIAQLEEKQPNLKVVVFNEEDLAYAKKVHLRYPKLSFCLQVGNDDSMTTNNDVLRSNLLAKYEWLLEKTMHDSEFKNIRVLPQLHTYIWGNKRGV

SEQ ID NO: 28061 - protein, 242 aa, Bacillus koreensis
  REGION 1..242: note = tr|A0A0M0LHR6|A0A0M0LHR6_9BACI 7-carboxy-7-deazaguanine synthase OS=Bacillus koreensis; OX = 284581 GN=queE PE=3 SV=1
MANIPVLEIFGPTIQGEGMVVGRKTMFVRTAGCDYSCAWCDSAFTWDGSAKDDIRQLSAHEIWSELTQIGGKKFDHVTISGGNPALIRAIGELVELLHENGVKVALETQGSRWQDWFEQIDDLTISPKPPSSRMETNFDVLDDIITRLSSKAREMAPSLKVVVFNEEDFHYAKEVHARYPDIPFFVQVGNEDVHTSDDGELISTLLRKYEDLIDRVVEDEMMNDVRVLPQLHALVWGNKRGV

SEQ ID NO: 28062 - protein, 235 aa, Bacillus krulwichiae
  REGION 1..235: note = tr|A0A1X9MFC0|A0A1X9MFC0_9BACI 7-carboxy-7-deazaguanine synthase OS=Bacillus krulwichiae; OX = 199441 GN=queE_2 PE=3 SV=1
MKVPVMEVFGPTIQGEGMVIGQKTMFVRTGGCDYSCSWCDSSFTWDGTLRSQLMNVNEIIRKLEEVGGERFSHVTISGGNPALHKGIGELVEACHQKGWKVAIETQGSIWQNWMMLVDDVTISPKPPSSNMETDFEKLDYYIEQLTGHNVSLKVVVFNDQDFTYAKMIHKRYPSVPFFLQIGNNSVETDDNETLLSNLLNRYEWLIEKTTESVSMNNARVLPQLHTLLWGNKRGV

SEQ ID NO: 28063 - protein, 370 aa, Bacillus krulwichiae
  REGION 1..370: note = tr|A0A1X9M6C8|A0A1X9M6C8_9BACI 7-carboxy-7-deazaguanine synthase OS=Bacillus krulwichiae; OX = 199441 GN=queE_1 PE=4 SV=1
MIETFPQITPANDPWEAYQDIDEFGKLTLTNVEFTTTTLCNMRCEHCAVGYTLQPKDPTPLPLDLLIQRLEEIPNLKAFSITGGEPMLSMKSVDHYVVPLLKYAHERGVRTQINSNLTLDLKRYEKIIPYLDVLHISHNYGSVHDFAEIGFAVMKRKPSFEQRSALFHRMVENAKALTSQGVLVSAETMINKRTLPHLESIHEQIVEMGCQRHEIHPMYPSDFASTLEVATLEEIRNGINRLLDVKKDDYWMLFGTLPFYPCSQNEEDLRLQKRLLTEKNVTVRNDPDGRSRLNVNIFDGNIIVTDFGDTPPLGNIKNTSLPEAYSKWIKSDLANSLNCHCPSVKCLGPNVLVKDAYYPTVDFTKKSSNI

SEQ ID NO: 28064 - protein, 238 aa, unidentified
  source 1..238: note = Bacillus kyonggiensis
  REGION 1..238: note = tr|A0A4U1DAL7|A0A4U1DAL7_9BACI 7-carboxy-7-deazaguanine synthase OS=Bacillus kyonggiensis; OX = 1037680 GN=queE PE=3 SV=1
MSKIPVMEIFGPTIQGEGMVIGQKTMFVRTAGCDYSCSWCDSSFTWDGSGKDLIKQMEAEEIWEELKRLGGDGFSFVTISGGNPALLKNLSYFVTLLKENNIQIGLETQGSKWQDWFLDIDQLTISPKPPSSGMDTNFEVLDRIIGRLSPSKTSLKVVVFDDKDYVYAKQVHLRYPDILFYLQVGNDDSKTINTASLVHHLLKKYEWLIDKTIEDPELKNIRVLPQLHTLIWGNKRGV

SEQ ID NO: 28065 - protein, 237 aa, Bacillus lehensis
  REGION 1..237: note = tr|A0A4Y7WPV5|A0A4Y7WPV5_9BACI 7-carboxy-7-deazaguanine synthase OS=Bacillus lehensis; OX = 300825 GN=queE PE=3 SV=1
MSSVIPVLEVFGPTIQGEGAVIGQKTMFVRTGGCDYRCSWCDSAFTWDGTGKSEALTAEEIIERLDTLAPASYGHVTISGGNPLLHKGIGQLVNLLQARGIQTAVETQGTFWQDWLKQIDAVTISPKPPSSGMKTNWETLNKCLTQLDTRQVSLKVVVFNKTDYRFAKEVHHRFPAYEFYLQVGNEDPTTADQQKLMQDLLQQYEQLIDWTMNDKEMNRVRVLPQLHTLLWGNKRGV

SEQ ID NO: 28066 - protein, 237 aa, Bacillus lehensis; identical to SEQ ID NO: 28065
  REGION 1..237: note = tr|A0A060M3M6|A0A060M3M6_9BACI 7-carboxy-7-deazaguanine synthase OS=Bacillus lehensis G1; OX = 1246626 GN=queE PE=3 SV=1

SEQ ID NO: 28067 - protein, 242 aa, Bacillus lentus
  REGION 1..242: note = tr|A0A2X4W0W6|A0A2X4W0W6_BACLE 7-carboxy-7-deazaguanine synthase OS=Bacillus lentus; OX = 1467 GN=queE PE=3 SV=1
MSKIPVMEIFGPTIQGEGMVIGQKTMFVRTAGCDYSCAWCDSAFTWDGSGKDMIKQMDAKTIWEELKSIGGDGFSFVTISGGNPALLKNLAYLVQLLKQNNIKTGLETQGSRWQDWFLDIDELTISPKPPSSKMITDFDILDTIIEKLEQQSTSQNTSLKVVVFDDQDFQYAKQVHQRYPNIPFFLQVGNDDSSTIDHAKLISALLEKYEWLINKVIADPEMNQVKALPQLHTYIWGNKRGV

SEQ ID NO: 28068 - protein, 243 aa, Bacillus licheniformis
  REGION 1..243: note = tr|Q65KI4|Q65KI4_BACLD 7-carboxy-7-deazaguanine synthase OS=Bacillus licheniformis (strain ATCC 14580 / DSM 13 / JCM 2505 / NBRC 12200 / NCIMB 9375 / NRRL NRS-1264 /Gibson 46) OX=279010 GN=queE PE=3 SV=1
MAKPIPVLEIFGPTVQGEGMVIGQKTMFVRTAGCDYSCSWCDSAFTWDGSAKKDIKWMTAEEVYESLKDIGGNAFSHVTISGGNPALLKQLDGLISLLKENGIRTALETQGTFYQDWFTGIDDLTISPKPPSSNMKTDFNRLDHIVDRLKEHGRAAAASLKVVIFTADDLQFAKQVHQRYPDIPFFLQVGNDDVHTEDQERLVERLLQKYEQLVEAVTRDPELNRVRVLPQLHTLIWGNKRGV

SEQ ID NO: 28069 - protein, 243 aa, Bacillus licheniformis
  REGION 1..243: note = tr|A0A1Q9G2E9|A0A1Q9G2E9_BACLI 7-carboxy-7-deazaguanine synthase OS=Bacillus licheniformis OX=1402 GN=queE PE=3 SV=1
MAKGIPVLEIFGPTIQGEGMVIGQKTMFVRTAGCDYSCSWCDSAFTWDGSAKKDIRWMTAEEILTELKAIGGDAFSHVTISGGNPALLKQLDAFIELLKENNIRAALETQGTVYQDWFTLIDDLTISPKPPSSKMVTNFQKLDHILTSLKENNRQHAVSLKVVIFNDEDLEFAKTVHKRYPGIPFYLQVGNDDVHTTDDQTLIAHLLGKYEALVDKVAADAELNLVRVLPQLHTLLWGNKRGV

SEQ ID NO: 28070 - protein, 224 aa, Bacillus litoralis
  REGION 1..224: note = tr|A0A179T1C8|A0A179T1C8_9BACI 7-carboxy-7-deazaguanine synthase OS=Bacillus litoralis; OX = 152268 GN=queE PE=3 SV=1
MVIGQKTMFVRTAGCDYSCSWCDSAFTWDGSAKNDIRQMTAEEIWSELTELGGNRFSHVTISGGNPALLANLDVFVHLLKEKGKKIAIETQGSKYQAWLKSIDDLTISPKPPSSGMKTDFTKLDEIINTLTNSNKHNSLSLKVVVFHTEDLSFAKCVHLRYPEIPFYLQVGNENVHTAETDRLVQTLLEKYEWLIDQVIEDSQLNNVRVLPQLHTLVWGNKRGV

SEQ ID NO: 28071 - protein, 242 aa, Bacillus litoralis
  REGION 1..242: note = tr|A0A5C6W2I1|A0A5C6W2I1_9BACI 7-carboxy-7-deazaguanine synthase OS=Bacillus litoralis; OX = 152268 GN=queE PE=3 SV=1
MKKIPVLEVFGPTIQGEGMVIGQKTMFVRTAGCDYSCSWCDSAFTWDGSAKDDIRQLTADDIWSELIQLGGDRFSHVTISGGNPALLTNLFELVSLLKQNGKKIAIETQGSKYQEWLNDIDDLTISPKPPSSGMKTDFDKLDEIIEKVSLHNQENLISLKVVVFDLNDLAYAKKVHLRYPSIPFYLQVGNEDVSKSDTTELAQTLLTKYEWLIEQVIEDSDLNDVRVLPQLHTLVWGNKRGV

SEQ ID NO: 28072 - protein, 242 aa, unidentified
  source 1..242: note = Bacillus loiseleuriae
  REGION 1..242: note = tr|A0A0K9GQ24|A0A0K9GQ24_9BACI 7-carboxy-7-deazaguanine synthase OS=Bacillus loiseleuriae; OX = 1679170 GN=queE PE=3 SV=1
MSKIPVMEIFGPTIQGEGMVIGQKTMFVRTAGCDYACSWCDSSFTWDGSGKHLIKQMEPDEIWCQLKELGGDGFSHVTISGGNPALLKNLTGLVQLLKQENMKTCLETQGSKWQDWMLSINELTISPKPPSSGMITNFDSLDMILNKLMSDDFSGNVSLKVVVFNDADFNYAKAIHRRYPGIPFYMQVGNDDTKTVNDAVLITHLLQKYEELIDRVIQDEELKEIKVLPQLHALVWGNKRGV

SEQ ID NO: 28073 - protein, 239 aa, unidentified
  source 1..239: note = Bacillus lonarensis
  REGION 1..239: note = tr|A0A1G6H6Z4|A0A1G6H6Z4_9BACI 7-carboxy-7-deazaguanine synthase OS=Bacillus lonarensis; OX = 1464122 GN=queE PE=3 SV=1
MTGQKPIPVMEIFGPTIQGEGMVIGRKTMFVRTGGCDYRCRWCDSAFTWDGTGKSKPMVAEDIISKLDTLAAGRFDHVTLSGGNPALHAGIGDLIHKLHAKNIQAAVETQGTIWQDWLTHVDDVTISPKPPSSGMETDWKKLDTFMTKLSPQKTSLKVVIFNEEDYAFAKLVHMRYPHISFFLQVGNDDIHTTDDTTLLTQLRYHYEQLIEKVMLDSTLTNVRVLPQLHTWMWGNKRGV

SEQ ID NO: 28074 - protein, 238 aa, Bacillus luciferensis
  REGION 1..238: note = tr|A0A1E2W0E2|A0A1E2W0E2_9BACI 7-carboxy-7-deazaguanine synthase OS=Bacillus luciferensis; OX = 178774 GN=queE PE=3 SV=1
MSKIPVLEIFGPTVQGEGMAIGQKTMFIRTAGCDYSCSWCDSSFTWDGSEKENIKWMTAEEVWKNLTNIGGDTFSHITISGGNPALLPSLGPVVEFLKEKNMTLALETQGSKWQPWLPSIDEVTLSPKPPSSGMNTDFDMLGSIIQNLENHPKFCLKVVIFDEKDLAYAETVHQKFPHVPFFLQVGNSWLNADDSTLLQYMLKRYEWLIDEAMKSNVFKNVKVLPQLHAFVWGNKRGV

SEQ ID NO: 28075 - protein, 238 aa, unidentified
  source 1..238: note = Bacillus luti
  REGION 1..238: note = tr|A0A1K0AM30|A0A1K0AM30_9BACI 7-carboxy-7-deazaguanine synthase OS=Bacillus luti; OX = 2026191 GN=queE PE=3 SV=1
MSKIPVLEIFGPTIQGEGMVVGQKTMFIRTAGCDYSCAWCDSAFTWDGSAKDQIRQMTAEDIWNELVAIGGENFSHVTISGGNPALLKNIEFLLSILKENGMRTAIETQGSKWQDWLLQIDEVTISPKPPSSTMHTDFQKLDAVIQKLAGKDISLKVVVFDDSDFEYAVKMHERYPDVPFFLQVGNDDTKTVDDAMLIKKLLDKYEWLIDKAINCKAMNDAKVLPQLHALVWGNKRGV

SEQ ID NO: 28076 - protein, 238 aa, unidentified
  source 1..238: note = Bacillus manliponensis
  REGION 1..238: note = tr|A0A073JZB1|A0A073JZB1_9BACI 7-carboxy-7-deazaguanine synthase OS=Bacillus manliponensis OX=574376 GN=queE PE=3 SV=1
MSNIPVLEVFGPTIQGEGMVVGQKTMFVRTAGCDYSCTWCDSAFTWDGSAKEQIRQMGPEEIWNELVELGGGNFSHVTISGGNPVLLKKLDAFLTLLQEKGIRTAIETQGSKWQDWLLQVDEVTISPKPPSSTMKTNFEMLDTVIHKLAGKDFSLKVVVFDEVDFEYAKEIHERYPHVPFFLQVGNDDTVTTDDTALVSRLLQKYEWLIEKAVHCKEMNDAKVLPQLHALVWGNKRGV

SEQ ID NO: 28077 - protein, 240 aa, Bacillus marisflavi
  REGION 1..240: note = tr|A0A0M0GR15|A0A0M0GR15_9BACI 7-carboxy-7-deazaguanine synthase OS=Bacillus marisflavi; OX = 189381 GN=queE PE=3 SV=1
MRKIPVLEVFGPTIQGEGMVIGQKTMFVRTAGCDYSCAWCDSAFTWDGSAKDDIRLMAATEVWDKLKEIGGDRFSHVTISGGNPALLPQIGDLLEILKANGIGSALETQGSRWQDWFYDINDLTISPKPPSSTMETDYDRLDLIVSRLKENGSNFSLKVVVFDEKDLEYAKGIHMRYEGVPFYIQTGNPEVSMEDTPRLVSNLLLDYERLIDVVCEQKELNDVRVLPQLHTLVWGNKRGV

SEQ ID NO: 28078 - protein, 240 aa, Bacillus marisflavi
  REGION 1..240: note = tr|A0A5D4RWD9|A0A5D4RWD9_9BACI 7-carboxy-7-deazaguanine synthase OS=Bacillus marisflavi; OX = 189381 GN=queE PE=3 SV=1
MRKIPVLEVFGPTIQGEGMVIGQKTMFVRTAGCDYSCAWCDSAFTWDGSAKDDIRLMAATEVWDKLKEIGGDRFSHVTISGGNPALLPQIGDLLEILKANGIGSALETQGSRWQDWFYDINDLTISPKPPSSTMETDYDRLDLIVSRLKENGSNFSLKVVVFDEKDLEYAKGIHRRYEGVPFYIQTGNPEVSMEDTPRLVSNLLLDYERLIDVVCEQKELNDVRVLPQLHTLVWGNKRGV

SEQ ID NO: 28079 - protein, 236 aa, Bacillus marmarensis
  REGION 1..236: note = tr|U6SS25|U6SS25_9BACI 7-carboxy-7-deazaguanine synthase OS=Bacillus marmarensis DSM 21297 OX=1188261; GN = queE PE=3 SV=1
MKKIPVMEIFGPTIQGEGMVIGQKTMFVRTGGCDYRCSWCDSAFTWDGTGKSNLMTAEDIIKQLKEIGGDRFSHVTISGGNPAIHQGIGKLVSSLKSLGIKTAVETQGSLWQEWMMEVSDVTISPKPPSSKMETDYDKLDYYIDRLKDQHVSLKVVVFNEGDLEYAKHIHERYPEIPMYLQVGNDEVESVENDSLISHLLDRYEWLIDQAVASETLNDVKVLPQLHTLVWGNKRGV

SEQ ID NO: 28080 - protein, 243 aa, Bacillus megaterium
  REGION 1..243: note = tr|D5DZE5|D5DZE5_BACMQ 7-carboxy-7-deazaguanine synthase OS=Bacillus megaterium (strain ATCC 12872 / QMB1551) OX=545693 GN=queE PE=3 SV=1
MANTIPVLEIFGPTIQGEGMVVGRKTMFVRTAGCDYSCSWCDSAFTWDGSAKNDIRQLTAEQIWTELKEIGGECFDHVTISGGNPALIKAIGSLVELLHSHGVKAALETQGSRYQDWFLKIDDLTISPKPPSSLMKTNFSVLDDIIETLIKEKRMAHISIKVVVFNDDDFEYAASVHERYPEVPFFVQVGNEDLTTIDNASLTQELLKKYEWLIDKAVAAKNMNDVRVLPQVHALVWGNKRGV

SEQ ID NO: 28081 - protein, 243 aa, Bacillus megaterium
  REGION 1..243: note = tr|A0A2A8VW76|A0A2A8VW76_BACME 7-carboxy-7-deazaguanine synthase OS=Bacillus megaterium; OX = 1404 GN=queE PE=3 SV=1
MANTIPVLEIFGPTIQGEGMVVGRKTMFVRTAGCDYSCSWCDSAFTWDGSAKNDIRQLTAEQIWTELKEIGGECFDHVTISGGNPALIKAIGSLVELLHSHGVKAALETQGSRYQDWFLKIDDLTISPKPPSSLMKTNFSVLDDIIETLIKEKRMAHISIKVVVFNDEDFEYAASVHERYPEVPFFVQVGNEDLTTIDNASLTQELLKKYEWLIDKAVAAKNMNDVRVLPQVHALVWGNKRGV

SEQ ID NO: 28082 - protein, 240 aa, unidentified
  source 1..240: note = Bacillus mesonae
  REGION 1..240: note = tr|A0A3T0HZY3|A0A3T0HZY3_9BACI 7-carboxy-7-deazaguanine synthase OS=Bacillus mesonae; OX = 1193713 GN=queE PE=3 SV=1
MSKLPVIEIFGPTIQGEGMVIGQKTMFVRTAGCDYSCSWCDSAFTWDGSAKDEIRLMDAEEIWQELTEIGGDRFSFVTISGGNPALLKNMDALIELLKANGIKCGLETQGSKWQDWFLNVDELTISPKPPSSKMNTNFEILDMIFSRLKDFKNHVSLKVVIFDEADLEYAKMVHQRYEHIPFYLQVGNNDLTNLNDHELIDKLLQKYEWLVNCVAADAQLNNVRVLPQLHTLLWGNKRGV

SEQ ID NO: 28083 - protein, 224 aa, Bacillus methanolicus
  REGION 1..224: note = tr|A0A068LR60|A0A068LR60_BACMM 7-carboxy-7-deazaguanine synthase OS=Bacillus methanolicus (strain MGA3 / ATCC 53907) OX=796606 GN=queE PE=3 SV=1
MVIGQKTMFVRTAGCDYSCSWCDSSFTWDGTGKDFVRQMEAEEIWSELKKLGGDGFSFVTISGGNPALIKNLQYLIQLLKENNIKICLETQGSKWQDWFFDIDELTLSPKPPSSNMVTDFDVLDTIIKNLDKNNSSQHISLKVVVFDDQDYEYAKKVHQRYPDIPFFLQVGNDDITTTENHQLISSLLGKYEWLINKVLKDSDLKNVKVLPQLHTYIWGNKRGV

SEQ ID NO: 28084 - protein, 242 aa, Bacillus methanolicus
  REGION 1..242: note = tr|I3DVL3|I3DVL3_BACMT 7-carboxy-7-deazaguanine synthase OS=Bacillus methanolicus PB1 OX=997296 GN=queE; PE = 3 SV=1
MSKIPVMEIFGPTIQGEGMVIGQKTMFVRTAGCDYSCSWCDSSFTWDGTGKDLVRQMEAEEIWSELKKLGGDGFSFVTISGGNPALLKNLRYLIQLLKENNIKICLETQGSKWQDWFFEIDELTLSPKPPSSNMVTDFDVLDAIIKNFNQKNSAQNISLKIVVFDDQDYEYAKKVHQRYPDVPFFLQVGNEDITSTEKEKLISQLLGKYEWLINKVMKDSDLKNVKVLPQLHTYIWGNKRGV

SEQ ID NO: 28085 - protein, 238 aa, unidentified
  source 1..238: note = Bacillus mobilis
  REGION 1..238: note = tr|A0A386UXL6|A0A386UXL6_9BACI 7-carboxy-7-deazaguanine synthase OS=Bacillus mobilis; OX = 2026190 GN=queE PE=3 SV=1
MSKIPVLEIFGPTIQGEGMVVGQKTMFIRTAGCDYSCAWCDSAFTWDGSAKDQIRQMTAEDVWNELVEIGGENFSHVTISGGNPALLKNIEFLLSILKENGMRTAIETQGSKWQDWLLQIDEITISPKPPSSAMNTDFQKLDAVIQKLAGKDISLKVVVFDDQDFEYAVKMHERYPNVPFFLQVGNDDTKTVDDAMLIKKLLDKYEWLIDKAVNCKEMNDAKVLPQLHALVWGNKRGV

SEQ ID NO: 28086 - protein, 238 aa, unidentified
  source 1..238: note = Bacillus mobilis
  REGION 1..238: note = tr|A0A1K0AUE7|A0A1K0AUE7_9BACI 7-carboxy-7-deazaguanine synthase OS=Bacillus mobilis; OX = 2026190 GN=queE PE=3 SV=1
MSKIPVLEIFGPTIQGEGMVVGQKTMFIRTAGCDYSCAWCDSAFTWDGSAKDQIRQMTAEDVWNELVEIGGENFSHVTISGGNPALLKNIEFLLSILKENGMRTAIETQGSKWQDWLLQIDEITISPKPPSSTMNTDFQKLDAVIQKLAGKDISLKVVVFDDYDFEYAVKMHERYPDVPFFLQVGNDDTKTVDDAMLIKKLLDKYEWLIEKAVNCKEMNNAKVLPQLHALVWGNKRGV

SEQ ID NO: 28087 - protein, 242 aa, Bacillus muralis
  REGION 1..242: note = tr|A0A1B3XSM7|A0A1B3XSM7_9BACI 7-carboxy-7-deazaguanine synthase OS=Bacillus muralis; OX = 264697 GN=queE PE=3 SV=1
MSKLPVMEIFGPTIQGEGMVIGQKTMFVRTAGCDYSCSWCDSAFTWDGSGKEDTVQMTAEEIWDELKRIGGSAFSFVTISGGNPALLKNLNGLIALLHEHEMKIGVETQGSRWQDWFLDIDELTLSPKPPSSGMNTDFTVLDRIMENLADGNPNNHVSLKIVVFNEEDYQYAKRIHGRYPGIPFYLQVGNDDSRTADDQQLIGRLLKKYEELIDKVIADDELNDVKVLPQLHTYIWGNKRGV

SEQ ID NO: 28088 - protein, 238 aa, Bacillus mycoides
  REGION 1..238: note = tr|A0A1E8AYJ8|A0A1E8AYJ8_BACMY 7-carboxy-7-deazaguanine synthase OS=Bacillus mycoides; OX = 1405 GN=queE PE=3 SV=1
MSKIPVLEIFGPTIQGEGMVIGQKTMFIRTAGCDYSCSWCDSAFTWDGSAKEQVRQMAPEEIWNELVEIGGENFSHVTISGGNPVLLKNIQFLLTVLKENGIRTAIETQGSKWQEWLLQIEEVTISPKPPSSKMKTDFTMLDSVIHKLERKDFSLKVVVFEDYDFEYAVKVHKRYPQVPFFLQVGNDDTKTVDDAVLIKNLLQKYERLIEKAVRCKEMNDAKVLPQLHALVWGNKRGV

SEQ ID NO: 28089 - protein, 238 aa, Bacillus mycoides
  REGION 1..238: note = tr|A0A1S9Y0N9|A0A1S9Y0N9_BACMY 7-carboxy-7-deazaguanine synthase OS=Bacillus mycoides; OX = 1405 GN=queE PE=3 SV=1
MSKIPVLEIFGPTIQGEGMVVGQKTMFIRTAGCDYSCAWCDSAFTWDGSAKEQIKQMTPEDIWNELVEIGGENFSHVTISGGNPVLLKNMQFLLSILKENGMRTAVETQGSKWQDWLLQIDEVTISPKPPSSTMKTDFQMLDSVIHKLAGKDFSLKVVVFDDQDFEYAVKMHERYPNVPFFLQVGNDDTKTVDDAVLIKKLLEKYEWLIEKAVNCKEMNDAKVLPQLHALVWGNKRGV

SEQ ID NO: 28090 - protein, 243 aa, unidentified
  source 1..243: note = Bacillus nakamurai
  REGION 1..243: note = tr|A0A150F1Y7|A0A150F1Y7_9BACI 7-carboxy-7-deazaguanine synthase OS=Bacillus nakamurai; OX = 1793963 GN=queE PE=3 SV=1
MAKGIPVLEIFGPTIQGEGMVIGQKTMFVRTAGCDYSCSWCDSAFTWDGSAKKDIRWMTAEDIYHELREIGGNAFSHVTISGGNPALLKQLDAFILLLKQHDVRAALETQGTVYQDWFTLIDDLTISPKPPSSGMTTDFNKLDYILSSLEAANRRHAVSLKVVIFNDEDLAFAKTVHKRYPGIPFYLQVGNDNVHTTDDQALITHLLGKYEKLVDMVSADSELNLVRVLPQLHTLLWGNKRGV

SEQ ID NO: 28091 - protein, 237 aa, Bacillus nanhaiisediminis
  REGION 1..237: note = tr|A0A562QT18|A0A562QT18_9BACI 7-carboxy-7-deazaguanine synthase OS=Bacillus nanhaiisediminis OX=688079 GN=queE PE=3 SV=1
MKIPVMEVFGPTIQGEGMVIGQKTMFVRTGGCDYSCSWCDSSFTWDGSARSTAMEASEIVAKLKEIGGDAFSHVTISGGNPALHKGIDQLVDLCHENGWKVAIETQGSIWQEWMTKIDDVTISPKPPSSKMKTNVKQLDYYIEELTNANSYFSLKVVIFNEEDFLYAEMIHERYPEVPFFLQIGNEDISSTDDASLVSKLLKRYEWLIEQATKSVIMNDAKVLPQLHTLIWGNKRGV

SEQ ID NO: 28092 - protein, 240 aa, Bacillus nealsonii
  REGION 1..240: note = tr|A0A2N0Z308|A0A2N0Z308_9BACI 7-carboxy-7-deazaguanine synthase OS=Bacillus nealsonii; OX = 115979 GN=queE PE=3 SV=1
MNKIPVLEIFGPTIQGEGMVIGRKTMFVRTAGCDYKCAWCDSAFTWDGSAKHEIKQMTAEDIWEQLYALGSDRFDHVTISGGNPALLASLASFISLCKEKNIQVALETQGSKWQDWFDEIDDLTISPKPPSSRMETNFSILDEIVAKLQANHTNFSLKVVVFDDKDLEYAQKVYARYSNAPFFLQVGNDDTTNGNNDELVTKLLTKYEWLIDQVMESNEWTNVRVLPQLHAYVWGNKRGV

SEQ ID NO: 28093 - protein, 242 aa, Bacillus nealsonii
  REGION 1..242: note = tr|R9CD54|R9CD54_9BACI 7-carboxy-7-deazaguanine synthase OS=Bacillus nealsonii AAU1 OX=1202533 GN=queE; PE = 3 SV=1
MSKIPVMEIFGPTIQGEGMVIGQKTMFVRTAGCDYSCAWCDSAFTWDGSGKGLIKQMQAEEIWQELVQLGGDGFSHVTLSGGNPALLKNLSHLVDFLKEKEIKIGLETQGSKWQDWFVDIDELTISPKPPSSKMNTDFDILDSIMQRLRDANQSNHISLKVVVFSDEDYDYAKKVHLRYSDIPFFLQVGNEDNKTTDNTQLVEQLLTKYEWLIDKTMLDHEFKNVKVLPQLHTYIWGNKRGV

SEQ ID NO: 28094 - protein, 241 aa, unidentified
  source 1..241: note = Bacillus notoginsengisoli
  REGION 1..241: note = tr|A0A417YWL4|A0A417YWL4_9BACI 7-carboxy-7-deazaguanine synthase OS=Bacillus notoginsengisoli OX=1578198 GN=queE PE=3 SV=1
MNKIPVMEIFGPTIQGEGMVMGRKSMFVRTAGCDYKCSWCDSAFTWDGSEKEKVRMMTPMEVFQELKALGGNNFDHVTITGGNPALIGDAMKEFIELLHQSAIEVGLETQGSKWQDWFYLVNDLTISPKPPSSGMNPNLELLDDIIFKLRDFKSNFSLKIVVFDDEDFDYAKMLNNRYKESSIPFFLSVGNSNPGEDGDISGRLLDSLDWLWGKVLGGPEMNNVRPLPQLHALVWSNKRGV

SEQ ID NO: 28095 - protein, 243 aa, Bacillus oceanisediminis
  REGION 1..243: note = tr|A0A4R8GJF6|A0A4R8GJF6_9BACI 7-carboxy-7-deazaguanine synthase OS=Bacillus oceanisediminis OX=665099 GN=queE PE=3 SV=1
MSKIPVLEIFGPTIQGEGMVIGQKTMFVRTAGCDYSCSWCDSSFTWDGSAKDSIRQMEPEDIWNELKELGGDGFSFVTISGGNPALLKNLSDLISLLKAEKIKICLETQGSRWQDWFYEIDELTLSPKPPSSGMNTDFDVLNYIVNNLQTQSKADQQFSLKVVVFDDKDYEYAKNVHKRYPGVPFYLQVGNDDTVTADDRNLLQRLLDKYDWLIEKTIHDSDLTDVKVLPQLHTYVWGNKRGV

SEQ ID NO: 28096 - protein, 243 aa, Bacillus oceanisediminis
  REGION 1..243: note = tr|A0A160MB51|A0A160MB51_9BACI 7-carboxy-7-deazaguanine synthase OS=Bacillus oceanisediminis 2691 OX=1196031 GN=queE PE=3 SV=1
MSKIPVLEIFGPTIQGEGMVIGQKTMFVRTAGCDYSCSWCDSSFTWDGSAKDSIRQMEPDEIWKELKELGGDGFSFVTISGGNPALLKNLSELISLLKAEKIKICLETQGSRWQDWFYEIDELTLSPKPPSSGMKTDFDVLGYIVNNLQTKRKAEQQVSLKIVVFDDKDYEYAKNIHKRYPGVPFYLQVGNDDTVTADDRNLLQKLLDKYDWLIEKTIHDNDLTDVKVLPQLHTYVWGNKRGV

SEQ ID NO: 28097 - protein, 235 aa, Bacillus okhensis
  REGION 1..235: note = tr|A0A0B0ID18|A0A0B0ID18_9BACI 7-carboxy-7-deazaguanine synthase OS=Bacillus okhensis; OX = 333138 GN=queE PE=3 SV=1
MKIPVMEVFGPTIQGEGMVIGQKTMFVRTGGCDYSCSWCDSRFTWDGSARSELLEAEAIVEQLKQIGGDLFSHVTISGGNPALHKGIANLVTLCHEQGWKVAVETQGSIWQNWMREIDDVTISPKPPSSLMETDYEKLDFYIKQLEERNVSLKVVVFDDEDFRFAELIHSRYPHIPFYLQIGNEDVATTDDHALLSTLLKRYEWLIEKATKSHVMNDAKVLPQLHTLIWGNKRGV

SEQ ID NO: 28098 - protein, 236 aa, Bacillus okuhidensis
  REGION 1..236: note = tr|A0A0M0KJZ3|A0A0M0KJZ3_9BACI 7-carboxy-7-deazaguanine synthase OS=Bacillus okuhidensis; OX = 136160 GN=queE PE=3 SV=1
MKRIPVMEIFGPTVQGEGMVIGQKTMFVRTGGCDYSCSWCDSAFTWDGSLKATLRTADEIIAKLEEIGGERFSHVTISGGNPALHKGIGELVDKLHDKGIRVALETQGSLWQDWFLKIDDLTISPKPPSSQMKTDFTKLDQIIERLDTKQMSLKVVVFNDEDFRYAEYVHERYPHVPFFLQVGNEDTVTGDNDLLIRTLLDRYEWLIAKATDSTIMNDAKILPQLHTLVWGNKRGV

SEQ ID NO: 28099 - protein, 243 aa, unidentified
  source 1..243: note = Bacillus oleivorans
  REGION 1..243: note = tr|A0A285CMP0|A0A285CMP0_9BACI 7-carboxy-7-deazaguanine synthase OS=Bacillus oleivorans; OX = 1448271 GN=queE PE=3 SV=1
MAKKFPVLEIFGPTIQGEGSVIGVQTMFVRTAGCDYSCSWCDSAFTWDGSAKDEIKMITAEEIMAELQELGGNRFSHVTISGGNPALLSGLDELIDMLHKHNIKVGLETQGSRWQDWFEKIDDLTISPKPPSSEMKTNFDILDSIIEKLIAAERNGHFSLKVVVFDNQDFDYAKDLYNRYPDVPFYLQVGNDQYNSADNSGLVKHLLRRYEWLIEKVTATGKMNQARVLPQLHTLVWGNKRGV

SEQ ID NO: 28100 - protein, 238 aa, unidentified
  source 1..238: note = Bacillus pacificus
  REGION 1..238: note = tr|A0A3P1BXU8|A0A3P1BXU8_9BACI 7-carboxy-7-deazaguanine synthase OS=Bacillus pacificus; OX = 2026187 GN=queE PE=3 SV=1
MSKIPVLEIFGPTIQGEGMVVGQKTMFIRTAGCDYSCAWCDSAFTWDGSAKDQIRQMTAEDVWNELVEVGGENFSHVTISGGNPALLKNIEFLLSILKENGMRTAIETQGSKWQDWLLQIDEITISPKPPSSTMKTDFQKLDAMIQKLSGKDISLKVVVFDDYDFEYAVKMHERYPDVPFFLQVGNDDTKTVDDTMLIKKLLDKYEWLIEKAVNRKEMNNAKVLPQLHALVWGNKRGV

SEQ ID NO: 28101 - protein, 238 aa, unidentified
  source 1..238: note = Bacillus pacificus
  REGION 1..238: note = tr|A0A1J9Y814|A0A1J9Y814_9BACI 7-carboxy-7-deazaguanine synthase OS=Bacillus pacificus; OX = 2026187 GN=queE PE=3 SV=1
MSKIPVLEIFGPTIQGEGMVVGQKTMFIRTAGCDYSCAWCDSAFTWDGSAKDQIRQMTAEDVWNELVEIGGENFSHVTISGGNPALLKNIEFLLSILKENGMRTAIETQGSKWQDWLLQIDEITISPKPPSSTMKTDFQKLDAMIQKLAGKDISLKVVVFDDYDFEYAVKMHERYPHVPFFLQVGNDDTKTVDDAMLIKKLLDKYEWLIEKAVNRKEMNNAKVLPQLHALVWGNKRGV

SEQ ID NO: 28102 - protein, 243 aa, unidentified
  source 1..243: note = Bacillus paralicheniformis
  REGION 1..243: note = tr|A0A1Q8GGI3|A0A1Q8GGI3_9BACI 7-carboxy-7-deazaguanine synthase OS=Bacillus paralicheniformis OX=1648923 GN=queE PE=3 SV=1
MAKPIPVLEIFGPTVQGEGMVIGQKTMFVRTAGCDYSCSWCDSAFTWDGSAKKDIKWMTAEEVYESLKDIGGNAFSHVTISGGNPALLKQLDGLISLLKENGIRTALETQGTFYQDWFAGIDDLTISPKPPSSNMKTDFNKLDHIVEKLKEHGRAAAASLKVVIFTAEDLQFAKQVHQRYPDVPFFLQVGNDDVHTEDQVRLVERLLQKYEQLVEAVTRDPELNRVRVLPQLHTLIWGNKRGV

SEQ ID NO: 28103 - protein, 243 aa, unidentified
  source 1..243: note = Bacillus paralicheniformis
  REGION 1..243: note = tr|A0A5A9TA87|A0A5A9TA87_9BACI 7-carboxy-7-deazaguanine synthase OS=Bacillus paralicheniformis OX=1648923 GN=queE PE=3 SV=1
MAKPIPVLEIFGPTVQGEGMVIGQKTMFVRTAGCDYSCSWCDSAFTWDGSAKKDIKWMTAEEVYESLKDIGGNAFSHVTISGGNPALLKQLDGLISLLKENGIRTALETQGTFYQDWFAGIDDLTISPKPPSSNMKTDFNKLDHIVEKLKEHGRAEAASLKVVIFTAEDLQFAKQVHQRYPDVPFFLQVGNDDVHTEDQERLVERLLQKYEQLVEAVTRDPELNRVRVLPQLHTLIWGNKRGV

SEQ ID NO: 28104 - protein, 238 aa, unidentified
  source 1..238: note = Bacillus paramycoides
  REGION 1..238: note = tr|A0A1J9VF24|A0A1J9VF24_9BACI 7-carboxy-7-deazaguanine synthase OS=Bacillus paramycoides; OX = 2026194 GN=queE PE=3 SV=1
MSKIPVLEIFGPTIQGEGMVVGQKTMFIRTAGCDYSCAWCDSAFTWDGSAKEQIRQMTPEDIWSELVAIGGENFSHVTISGGNPVLLKNMQFLLSILKENGMRTAIETQGSKWQDWLLQIDEVTISPKPPSSTMKTDFQMLDSIIHKLAGKDFSLKVVVFDDQDFEYAVKMHERYPNVPFFLQVGNDDTKTVDDAMLIKNLLEKYEWLIEKAVHCKEMNDAKVLPQLHALVWGNKRGV

SEQ ID NO: 28105 - protein, 238 aa, unidentified
  source 1..238: note = Bacillus paranthracis
  REGION 1..238: note = tr|A0A4U1DRU7|A0A4U1DRU7_9BACI 7-carboxy-7-deazaguanine synthase OS=Bacillus paranthracis; OX = 2026186 GN=queE PE=3 SV=1
MSKIPVLEIFGPTIQGEGMVVGQKTMFIRTAGCDYSCAWCDSAFTWDGSAKDQIRQMTAEDVWNELVEIGGENFSHVTISGGNPVLLKNIEFLLSILKENGMRTAIETQGSKWQDWLLEIDEITISPKPPSSTMNTDFQKLDDVIQKLAGKDISLKVVVFDDYDFEYAVKMHERYPEVPFFLQVGNDDTKTVDDAMLIKKLLDKYEWLIEKAVNCKEMNNAKVLPQLHALVWGNKRGV

SEQ ID NO: 28106 - protein, 238 aa, unidentified; identical to SEQ ID NO: 28014
  source 1..238: note = Bacillus paranthracis
  REGION 1..238: note = tr|A0A1J9YNF3|A0A1J9YNF3_9BACI 7-carboxy-7-deazaguanine synthase OS=Bacillus paranthracis; OX = 2026186 GN=queE PE=3 SV=1

SEQ ID NO: 28107 - protein, 241 aa, unidentified
  source 1..241: note = Bacillus persicus
  REGION 1..241: note = tr|A0A1H8AIZ0|A0A1H8AIZ0_9BACI 7-carboxy-7-deazaguanine synthase OS=Bacillus persicus; OX = 930146 GN=queE PE=3 SV=1
MSKIPVIEIFGPTIQGEGMVIGQKTMFVRTSGCDYSCDWCDSAFTWDGSGKHLVQQMDAEEIWEELKAVGGDRFSFVTISGGNPALLKNLNHLIQLLKTNHIKIGLETQGSKWQDWFLEIDDLTLSPKPPSSKMTTDFEILDDIIAQLQQTNNQSFSLKIVVFNEQDFDYAKAIHKRYPGVPFYLQVGNEDIANSDNEKLLSELIGRYEWLIDQVVGDSELNDVKVLPQLHTYVWGNKRGV

SEQ ID NO: 28108 - protein, 236 aa, Bacillus pseudofirmus
  REGION 1..236: note = tr|A0A1Q9PTH7|A0A1Q9PTH7_BACPF 7-carboxy-7-deazaguanine synthase OS=Bacillus pseudofirmus; OX = 79885 GN=queE PE=3 SV=1
MKKIPVMEIFGPTIQGEGMVIGQKTMFVRTGGCDYRCSWCDSAFTWDGTGKSNLMTAEEIIKQLKEIGGDRFSHVTISGGNPAIHQGIGKLVSSLKSLGIKTAVETQGSLWQEWMMEVSDVTISPKPPSSKMETDYDKLDYYIDRLKDQHVSLKVVVFTEEDLEYAKHIHERYPEIPMYLQVGNDEVESVENDSLISHLLDRYEWLIDQAVASETLNDVKVLPQLHTLVWGNKRGV

SEQ ID NO: 28109 - protein, 236 aa, Bacillus pseudofirmus
  REGION 1..236: note = tr|D3FSX5|D3FSX5_BACPE 7-carboxy-7-deazaguanine synthase OS=Bacillus pseudofirmus (strain OF4) OX=398511; GN = queE PE=3 SV=1
MKKIPVMEIFGPTIQGEGMVIGQKTMFVRTGGCDYRCSWCDSAFTWDGTGKSNLMTAEEIIKQLKEIGGDRFSHVTISGGNPAIHQGIGKLVSFLKSLGIKTAVETQGSLWQEWMMEVSDVTISPKPPSSKMETDFDKLDYYIDRLKDQHVSLKVVVFTEEDLEYAKHIHERYPEIPMYLQVGNDEVESVENDSLISHLLDRYEWLIDQAVASETLNDVKVLPQLHTLVWGNKRGV

SEQ ID NO: 28110 - protein, 232 aa, Bacillus pseudomycoides
  REGION 1..232: note = tr|C3BW11|C3BW11_9BACI 7-carboxy-7-deazaguanine synthase OS=Bacillus pseudomycoides DSM 12442 OX=527000; GN = queE PE=3 SV=1
MEIFGPTIQGEGMVIGQKTMFIRTAGCDYSCSWCDSAFTWDGSTKEQIRQMAPEEIWNELVGIGGENFSHVTISGGNPVLLKNIQFLLTVLKENGIRTAIETQGSKWQEWLLQIDEVTISPKPPSSKMKTDFTMLDSVIHKLERKDFSLKVVVFEDYDFEYAVKVHKRYPQVPFFLQVGNDDTKTVDDAALIKNLLQKYERLIEKAVQCKEMNDAKVLPQLHALVWGNKRGV

SEQ ID NO: 28111 - protein, 238 aa, Bacillus pseudomycoides
  REGION 1..238: note = tr|A0A2B6Y0B5|A0A2B6Y0B5_9BACI 7-carboxy-7-deazaguanine synthase OS=Bacillus pseudomycoides OX=64104 GN=queE PE=3 SV=1
MSKIPVLEIFGPTIQGEGMVIGQKTMFIRTAGCDYSCSWCDSAFTWDGSTKEQIRQMAPEEIWNELVEIGGENFSHVTISGGNPVLLKNIQFLLTVLKENGIRTAIETQGSKWQEWLLQIDEVTISPKPPSSKMKTDFTMLDSIIHKLVRKDFSLKVVVFEDYDFEYAVKVHKRYPQVPFFLQVGNDDTKTVDDAALIKNLLQKYERLIEKAVQCKEMNDAKVLPQLHALVWGNKRGV

SEQ ID NO: 28112 - protein, 243 aa, Bacillus pumilus
  REGION 1..243: note = tr|A0A498TWW7|A0A498TWW7_BACPU 7-carboxy-7-deazaguanine synthase OS=Bacillus pumilus; OX = 1408 GN=queE_1 PE=3 SV=1
MAKAIPVLEIFGPTIQGEGMVIGQKTMFVRTAGCDYSCSWCDSSFTWDGSAKHGIQWLEAEDIVKELKRIGGQAFSHVTISGGNPALLKQMESLIDLLHEEGIDTALETQGTMYQEWFLKIDDLTISPKPPSSNMKTDFTKLTRIIDELKSGNRLQHASLKVVIFDDRDLAYAKDVHAKYPELPFYLQVGNDDTTTGDDAYLLTHLLKKYEALVNQVAQDPDLNRVRVLPQLHTLLWGNKRGV

SEQ ID NO: 28113 - protein, 243 aa, Bacillus pumilus
  REGION 1..243: note = tr|A0A3T0LHV2|A0A3T0LHV2_BACPU 7-carboxy-7-deazaguanine synthase OS=Bacillus pumilus; OX = 1408 GN=queE PE=3 SV=1
MAKAIPVLEIFGPTIQGEGMVIGQKTMFVRTAGCDYSCSWCDSAFTWDGSAKHDIQWLHAEDIVKELKRIGGQAFSHVTISGGNPALLKQMESLIDLLHEEGIDTALETQGTMYQDWFLKIDDLTISPKPPSSNMKTDFTKLTRIIDELKSGNRLQHASLKVVIFDDHDLAYAKDVHAKYPELPFYLQVGNDDTTTGDDAYLLTHLLKRYEALVDQVAQDPDLNRVRVLPQLHTLLWGNKRGV

SEQ ID NO: 28114 - protein, 243 aa, Bacillus safensis
  REGION 1..243: note = tr|A0A5C0WCY3|A0A5C0WCY3_9BACI 7-carboxy-7-deazaguanine synthase OS=Bacillus safensis; OX = 561879 GN=queE_1 PE=3 SV=1
MAKAIPVLEIFGPTIQGEGMVIGQKTMFVRTAGCDYSCSWCDSSFTWDGSAKHDIQWLEAEDIVKELKRIGGQAFSHVTISGGNPALLKQMESLIDLLHEEGIDTALETQGTMYQEWFLKIDDLTISPKPPSSNMKTDFTKLTRIIDELKSGNRLQHASLKVVIFDDRDLAYAKDVHAKYPELPFYLQVGNDDTTTGDDAYLLTHLLKKYEALVDQVAQDPDLNRVRVLPQLHTLLWGNKRGV

SEQ ID NO: 28115 - protein, 243 aa, Bacillus safensis
  REGION 1..243: note = tr|A0A494TS40|A0A494TS40_9BACI 7-carboxy-7-deazaguanine synthase OS=Bacillus safensis; OX = 561879 GN=queE PE=3 SV=1
MAKAIPVLEIFGPTIQGEGMVIGQKTMFVRTAGCDYSCSWCDSSFTWDGSAKHDIQWLEAEDIVKELKRIGGQAFSHVTISGGNPALLKQMESLIDLLHEEGIDTALETQGTMYQEWFLKIDDLTISPKPPSSNMKTDFTKLTRIIDELKSGNRLQHASLKVVIFDDRDLAYAKDVHAKYPELPFYLQVGNDDTTTGDDAYLLTHLLKKYEALVNQVAQDPDLNRVRVLPQLHTLLWGNKRGV

SEQ ID NO: 28116 - protein, 239 aa, unidentified
  source 1..239: note = Bacillus salacetis
  REGION 1..239: note = tr|A0A3A1R067|A0A3A1R067_9BACI 7-carboxy-7-deazaguanine synthase OS=Bacillus salacetis; OX = 2315464 GN=queE PE=3 SV=1
MRKIPVLEIFGPTIQGEGMVIGQKTMFVRTAGCDYSCSWCDSAFTWDGSAKDDIRMMTAIEVWEELKTIGGTRFSHVTISGGNPALIGAIEELLVIFNDNEIQSALETQGSRWQDWFMDIDDLTLSPKPPSSGMNTDFDKLDFIMGKLRGQKDCSLKVVIFDERDLEYAAALHERYPGVPFFLQVGNSNLAESDEGRLVRGLIAEYEKLIDAVIQSERLNNVRVLPQLHTFVWGNKRGV

SEQ ID NO: 28117 - protein, 239 aa, Bacillus salarius
  REGION 1..239: note = tr|A0A428MYF0|A0A428MYF0_9BACI 7-carboxy-7-deazaguanine synthase OS=Bacillus salarius; OX = 284579 GN=queE PE=3 SV=1
MKKVPVLETFGPTIQGEGMVIGQKTMFLRTGGCDYRCSWCDSAFTWDGSQKPDLMEAEEIIEQLKKQGGDVFNHVTISGGNPALHSGLAEVISQLQSLGIKTAVETQGTMWQDWMREIDDVTISPKPPSSGMETNWDQLDMYVNELLERPGKDISLKVVIFDEADLAYAANVHERYPQVEMFLQTGNDQLETSNNGWLLSHLLEKYEWLVEKVLRSERLNEVKVLPQLHTLLWGNKQGV

SEQ ID NO: 28118 - protein, 239 aa, Bacillus salarius
  REGION 1..239: note = tr|A0A428MTB1|A0A428MTB1_9BACI 7-carboxy-7-deazaguanine synthase OS=Bacillus salarius; OX = 284579 GN=queE PE=3 SV=1
MKKVPVLEIFGPTIQGEGMVIGQKTMFVRTGGCDYRCSWCDSAFTWDGSQKPDLMQADEIVEKLEKQGGDVFNHVTISGGNPALHSGLAEVISLLQNKGIKTAVETQGTIWQDWMLEIDDVTISPKPPSSGMETNWNKLDMYMRELLNHSNNDLSLKVVIFDEDDLTYAATVHERYPEVDMFLQTGNDELETSDNSWLLSHLLEKYEWLVDKVLQSERLNEVKVLPQLHTLLWGNKQGV

SEQ ID NO: 28119 - protein, 242 aa, unidentified
  source 1..242: note = Bacillus salsus
  REGION 1..242: note = tr|A0A1H0Q6M3|A0A1H0Q6M3_9BACI 7-carboxy-7-deazaguanine synthase OS=Bacillus salsus; OX = 930152 GN=queE PE=3 SV=1
MSKVPVMEVFGPTIQGEGMVIGQKTMFVRTAGCDYSCSWCDSSFTWDGTGIDLIKQMDAEEIWAELVSHGGEGFSFVTISGGNPALLKNLSYLINLLKEKKIKIGLETQGSKWQDWFLNIDELTISPKPPSSGMETDFNALDMILGKMKATDNRNQTSLKVVVFNDEDYNYAKMVHLRYPEIPFFLQVGNEDNKTTDDQMLINELLKKYEWLINKVMADDELKDVKVLPQLHTYIWGNKRGV

SEQ ID NO: 28120 - protein, 236 aa, Bacillus selenatarsenatis
  REGION 1..236: note = tr|A0A0A8X5V7|A0A0A8X5V7_9BACI 7-carboxy-7-deazaguanine synthase OS=Bacillus selenatarsenatis SF-1 OX=1321606 GN=queE PE=3 SV=1
MEIFGPTIQGEGMVIGQKTMFVRTAGCDYSCDWCDSSYTWDGSGKDLIRQMDAEEIWSEMRALGGDGFSYVTISGGNPALLKNLSGLVELLKENHINICLETQGSKWQDWFLKIDALTLSPKPPSSGMKTNFEVLDQIVYGLKENASLKNASLKIVVFDEVDYEYAKLFHQRYPELPFFLQVGNDDIETEDQMNLMSSLVDKYEWLINKVMCDVEMNNVRVLPQLHVYVWGNKRGV

SEQ ID NO: 28121 - protein, 243 aa, Bacillus selenitireducens
  REGION 1..243: note = tr|D6XXU2|D6XXU2_BACIE 7-carboxy-7-deazaguanine synthase OS=Bacillus selenitireducens (strain ATCC 700615 / DSM 15326 / MLS10) OX=439292 GN=queE PE=3 SV=1
MTETIPVLEIFGPTIQGEGMVAGRKTMFVRTAGCDYACSWCDSAFTWDGSAKDEIVQMNKDAIWQALNEEAEGLFSHVTISGGNPALLKNLGSFITLLKEKAIDVALETQGSVWQDWFTTIDDLTISPKPPSSRMETDFGVLDDIMTRLREAGRSSQVSLKVVIFDEEDLAYARRVKTRYPDVPFYLQVGNDDTVTDEDKTLRDHLMDRYEWLINETMGDAAFNDAYVLPQIHALLWGNRRGV

SEQ ID NO: 28122 - protein, 239 aa, Bacillus shackletonii
  REGION 1..239: note = tr|A0A0Q3TJK1|A0A0Q3TJK1_9BACI 7-carboxy-7-deazaguanine synthase OS=Bacillus shackletonii; OX = 157838 GN=queE PE=3 SV=1
MSSSKIPVIEIFGPTIQGEGMVIGRKTMFVRTAGCDFRCVWCDSAFTWDGSEKDNIRLLTPSEIFHELKQLGNQNFNHVTISGGNPALIGKPMMEFIELLHEHDIKVGLETQGSRWQDWFRSVDDLTISPKPPSSGMNTDFDVLDSIIENLAGKRISLKVVVFNDEDFDYARMVHKRYDAIDFYLSVGNKDPYESGDISSRLLMSLDWLWSKVMEDPEMNGVRALPQLHALVWANKRGV

SEQ ID NO: 28123 - protein, 243 aa, Bacillus siamensis
  REGION 1..243: note = tr|A0A268DY98|A0A268DY98_9BACI 7-carboxy-7-deazaguanine synthase OS=Bacillus siamensis; OX = 659243 GN=queE PE=3 SV=1
MAKGIPVLEIFGPTIQGEGMVIGQKTMFVRTAGCDYSCSWCDSAFTWDGSAKKDIRWMTAEDIYRELREIGGDAFSHVTISGGNPALLKQLDALILLLKEHGVRAALETQGTVYQDWFTMINDLTISPKPPSSGMTTDFAKLDHIVSSLDAAERLSAVSLKVVIFNDEDLQFAKTVHKRYPNIPFYLQVGNDNVHTTDDRALIAHLLEKYEKLVDKVSADSDLNLVRVLPQLHTLLWGNKRGV

SEQ ID NO: 28124 - protein, 243 aa, Bacillus siamensis
  REGION 1..243: note = tr|A0A2K9KCP1|A0A2K9KCP1_9BACI 7-carboxy-7-deazaguanine synthase OS=Bacillus siamensis; OX = 659243 GN=queE PE=3 SV=1
MAKGIPVLEIFGPTIQGEGMVIGQKTMFVRTAGCDYSCSWCDSAFTWDGSAKKDIRWMTAEDIYRELREIGGDAFSHVTISGGNPALLKQLDALILLLKEHGVRAALETQGTVYQDWFTMINDLTISPKPPSSGMTTDFAKLDHIVSSLDAAERLSAVSLKVVIFNDEDLQFAKTVHKRYPNIPFYLQVGNDNVHTTDDQALIAHLLEKYEKLVDKVSADSDLNLVRVLPQLHTLLWGNKRGV

SEQ ID NO: 28125 - protein, 242 aa, Bacillus simplex
  REGION 1..242: note = tr|A0A109MWS4|A0A109MWS4_9BACI 7-carboxy-7-deazaguanine synthase OS=Bacillus simplex; OX = 1478 GN=queE PE=3 SV=1
MSKLPVMEIFGPTIQGEGMVIGQKTMFVRTAGCDYSCSWCDSAFTWDGSGKEDTVHMTAEEIWGELKRIGGSGFSFVTISGGNPALLKNLNGLIALLHEHNIKIGVETQGSRWQDWFLDIDELTLSPKPPSSGMSTDFTVLDQILEKLAGRNPNNHVSLKIVVFNEEDYQYAKHVHERYPGIPFYLQVGNDDSRTADDQHLISGLLKKYEELIDKVIADDELNDVKVLPQLHTYIWGNKRGV

SEQ ID NO: 28126 - protein, 242 aa, Bacillus simplex
  REGION 1..242: note = tr|A0A4V5SGD9|A0A4V5SGD9_9BACI 7-carboxy-7-deazaguanine synthase OS=Bacillus simplex; OX = 1478 GN=queE PE=3 SV=1
MSKLPVMEIFGPTIQGEGMVIGQKTMFVRTAGCDYSCAWCDSAFTWDGTGKEDTVQMTAEEIWDELKRIGGSGFSFVTISGGNPALLKNLNGLIAILHENKMKIGVETQGSRWQDWFLDIDELTISPKPPSSGMKTDFTVLDQIISNLANRNPENHVSLKIVVFNEEDYQYAKHVHGRYPEIPFYLQVGNDDSRTADDRQLISGLLKKYEELIDKVIADDELNDVKVLPQLHTYIWGNKRGV

SEQ ID NO: 28127 - protein, 242 aa, Bacillus smithii
  REGION 1..242: note = tr|G9QLM1|G9QLM1_9BACI 7-carboxy-7-deazaguanine synthase OS=Bacillus smithii 7_3_47FAA OX=665952 GN=queE; PE = 3 SV=1
MAKKVPVLEIFGPTIQGEGSVIGQKTMFVRTAGCDYSCSWCDSAFTWDGSAKADIRQMTAEEIWKELKQLGGDCFSHVTISGGNPALISGLSEFIDLLKEEGIRIGLETQGSRWQDWFWQIDDLTISPKPPSSGMKNNFFVLDDIVKKLQAKNHQTFSLKVVIFDDRDFDYAVSVHQRYPSVPFFVQVGNDDPATTDDDQLIKHLLTKMKWLVEKISASAEMNDVRALPQLHTLLWGNKRGV

SEQ ID NO: 28128 - protein, 242 aa, Bacillus smithii
  REGION 1..242: note = tr|A0A0H4PF96|A0A0H4PF96_9BACI 7-carboxy-7-deazaguanine synthase OS=Bacillus smithii; OX = 1479 GN=queE PE=3 SV=1
MAKKVPVLEIFGPTIQGEGSVIGQKTMFVRTAGCDYSCSWCDSAFTWDGSAKADIRQMTAEEIWKELKQLGGDCFSHVTISGGNPALISGLSEFIDLLKEEGIRIGLETQGSRWQDWFWQIDDLTISPKPPSSGMKTNFFVLDDIVKKLQAKNHQTFSLKVVIFDDRDFDYAVSVHQRYPSVPFFVQVGNDDPATADDDQLIKHLLTKMKWLVEKISASAEMNDVRALPQLHTLLWGNKRGV

SEQ ID NO: 28129 - protein, 225 aa, unidentified
  source 1..225: note = Bacillus solimangrovi
  REGION 1..225: note = tr|A0A1E5LFM5|A0A1E5LFM5_9BACI 7-carboxy-7-deazaguanine synthase OS=Bacillus solimangrovi; OX = 1305675 GN=queE PE=3 SV=1
MSAGRKTMFVRTAGCDYHCSWCDSAFTWDGSAKEDIRQMNASDIVSELKQIGRDQFDHVTISGGNPALLKEIQLLIDILKEEGFNTALETQGSKWQDWFVKIDDLTLSPKPPSSEMKTDFLMLDQIIDNLEKDNRINEHVSLKVVVFNDDDFEYAKDIHLRYPNVPFYLQVGNDNLISESNNELALHLIKSYEWLVNKVIDCKEMNDVRVLPQLHALLWGNKRGV

SEQ ID NO: 28130 - protein, 234 aa, Bacillus sonorensis
  REGION 1..234: note = tr|M5P8J2|M5P8J2_9BACI 7-carboxy-7-deazaguanine synthase OS=Bacillus sonorensis L12 OX=1274524 GN=queE; PE = 3 SV=1
MNFDTNASLPLVEMFETIEGEGSAAGKQTTFIRLFHCNLRCVWCDTTYSYAPSKPEFEATIEEIAEKVRCLGNHYVCLTGGEPLIHGEKSMALIDRLAKIDCIQDIHVETNGAILLKPFINMRRLSTIISNKVRFIMDFKLPDSGEMKKMVYENFDLLDEQDEIKFVIGTEHDFNIAMEIIDKHYKKGRLLMSPVWETMTPADLVKKVLNSRRKDIQVNLQIHKIIWDPQTRGV

SEQ ID NO: 28131 - protein, 243 aa, Bacillus sonorensis
  REGION 1..243: note = tr|M5PDB2|M5PDB2_9BACI 7-carboxy-7-deazaguanine synthase OS=Bacillus sonorensis L12 OX=1274524 GN=queE; PE = 3 SV=1
MAKPIPVLEIFGPTIQGEGMVIGQKTMFVRTAGCDYSCSWCDSAFTWDGSAKKDIKWMSAEEIYESLREIGGNAFSHVTISGGNPALLKQLDGLISLLQENGIRTALETQGTFYQDWFTKIDDLTISPKPPSSNMKTDLTKLDHIVGMLKDHGRLSAASLKVVIFTPSDLQFAKSIHHRYPDIPFYLQIGNDDVHTEDQGRLVEKLLRKYEELVKAVTHDPELNRVRVLPQLHTLIWGNKRGV

SEQ ID NO: 28132 - protein, 238 aa, Bacillus sp.; identical to SEQ ID NO: 27984
  REGION 1..238: note = tr|A0A2S9Y8Y7|A0A2S9Y8Y7_9BACI 7-carboxy-7-deazaguanine synthase OS=Bacillus sp. M21; OX = 1155617 GN=queE_1 PE=3 SV=1

SEQ ID NO: 28133 - protein, 238 aa, Bacillus sp.; identical to SEQ ID NO: 28001
  REGION 1..238: note = tr|A0A371VF70|A0A371VF70_9BACI 7-carboxy-7-deazaguanine synthase OS=Bacillus sp. dmp5; OX = 2293328 GN=queE PE=3 SV=1

SEQ ID NO: 28134 - protein, 243 aa, Bacillus stratosphericus; identical to SEQ ID NO: 28114
  REGION 1..243: note = tr|A0A4Y9K0V2|A0A4Y9K0V2_9BACI 7-carboxy-7-deazaguanine synthase OS=Bacillus stratosphericus OX=293386 GN=queE PE=3 SV=1

SEQ ID NO: 28135 - protein, 262 aa, Bacillus stratosphericus
  REGION 1..262: note = tr|M5RE83|M5RE83_9BACI 7-carboxy-7-deazaguanine synthase OS=Bacillus stratosphericus LAMA 585 OX=1236481; GN = queE PE=3 SV=1
MSERHQQATAFTVRNELSSMTKAIPVLEIFGPTIQGEGMVIGQKTMFVRTAGCDYSCSWCDSSFTWDGSAKHDIQWLQAEDIVKELKRIGGKAFSHVTISGGNPALLKQMESLIDLLYEEGIDTALETQGTMYQDWFLKIDDLTISPKPPSSNMKTDFSKLTRIIDELKNGNRLHHASLKVVIFDDLDLAYAKDVHAKYPELPFYLQVGNDDTTTADDAYLLTHLLKKYEMLVDQVAQDPDLNRVRVLPQLHTLLWGNKRGV

SEQ ID NO: 28136 - protein, 241 aa, Bacillus subterraneus
  REGION 1..241: note = tr|A0A3R9DR66|A0A3R9DR66_9BACI 7-carboxy-7-deazaguanine synthase OS=Bacillus subterraneus; OX = 285983 GN=queE PE=3 SV=1
MTKIPVLEIFGPTIQGEGMVVGQKTMFVRTAGCDYSCAWCDSSFTWDGSGKDLIMQMDAEEIWRELERLGGDRFSHVTISGGNPALLKSLSSLVTLLKAYQIKICLETQGSRWQDWFLQIDALTLSPKPPSSGMKTDFKILDSIIANLQGKASNEVSLKVVVFDDADMQYAKMVHHRYPGLPFYLQVGNEEINMTDQPRFVSLLLDKYEWLINRVIEDSELKDVRVLPQLHSLVWGNKRGV

SEQ ID NO: 28137 - protein, 243 aa, Bacillus subtilis
  REGION 1..243: note = sp|O31677|QUEE_BACSU 7-carboxy-7-deazaguanine synthase OS=Bacillus subtilis (strain 168) OX=224308; GN = queE PE=1 SV=1
MAKGIPVLEIFGPTIQGEGMVIGQKTMFVRTAGCDYSCSWCDSAFTWDGSAKKDIRWMTAEEIFAELKDIGGDAFSHVTISGGNPALLKQLDAFIELLKENNIRAALETQGTVYQDWFTLIDDLTISPKPPSSKMVTNFQKLDHILTSLQENDRQHAVSLKVVIFNDEDLEFAKTVHKRYPGIPFYLQVGNDDVHTTDDQSLIAHLLGKYEALVDKVAVDAELNLVRVLPQLHTLLWGNKRGV

SEQ ID NO: 28138 - protein, 243 aa, Bacillus subtilis
  REGION 1..243: note = tr|A0A164YHR4|A0A164YHR4_BACIU 7-carboxy-7-deazaguanine synthase OS=Bacillus subtilis; OX = 1423 GN=queE PE=3 SV=1
MAKGIPVLEIFGPTIQGEGMVIGQKTMFVRTAGCDYSCSWCDSAFTWDGSAKKDIRWMTAEEIFAELKDIGGDAFSHVTISGGNPALLKQLDAFIELLKENNIRAALETQGTVYQDWFTLIDDLTISPKPPSSKMVTNFQKLDHILTLLQENDRQHAVSLKVVIFNDEDLEFAKTVHKRYPGIPFYLQVGNDDVHTTDDQSLIAHLLGKYEALVDKVAVDAELNLVRVLPQLHTLLWGNKRGV

SEQ ID NO: 28139 - protein, 243 aa, unidentified
  source 1..243: note = Bacillus swezeyi
  REGION 1..243: note = tr|A0A5D4QMC6|A0A5D4QMC6_9BACI 7-carboxy-7-deazaguanine synthase OS=Bacillus swezeyi; OX = 1925020 GN=queE PE=3 SV=1
MAKPIPVLEIFGPTVQGEGMVIGQKTMFVRTAGCDYSCSWCDSAFTWDGSAKKDIKWMTAEEVYESLKEIGGNAFSHVTISGGNPALLKQLDGLISLLKENDIRTALETQGTFYQDWFMNIDDLTISPKPPSSNMNTDFKKLDHIVGKLDEHGRLDAASLKVVIFNPLDLQFAKKVHHRYPDIPFYLQVGNDDVQTEDQGRLVERLLQKYEELVEAVTCDPELNRVRVLPQLHTLIWGNKRGV

SEQ ID NO: 28140 - protein, 243 aa, unidentified
  source 1..243: note = Bacillus swezeyi
  REGION 1..243: note = tr|A0A1R1RGR8|A0A1R1RGR8_9BACI 7-carboxy-7-deazaguanine synthase OS=Bacillus swezeyi; OX = 1925020 GN=queE PE=3 SV=1
MAKPIPVLEIFGPTVQGEGMVIGQKTMFVRTAGCDYSCSWCDSAFTWDGSAKKDINWMTAEEVYESLKEIGGNAFSHVTISGGNPALLKQLDGLISLLKENDIRTALETQGTFYQDWFVNIDDLTISPKPPSSNMNTDFKKLDYIVGKLDEHGRLDAASLKVIIFNPLDLQFAKKVHHRYPDTPFYLQVGNDDVHTEDQGRLVERLLQKYEELVEAVTRDPQLNRVRVLPQLHTLIWGNKRGV

SEQ ID NO: 28141 - protein, 242 aa, Bacillus taeanensis
  REGION 1..242: note = tr|A0A366XYD9|A0A366XYD9_9BACI 7-carboxy-7-deazaguanine synthase OS=Bacillus taeanensis; OX = 273032 GN=queE PE=3 SV=1
MSRWNLPSRAEYLNWKLPMVEIFETVEGEGMMAGFPTVFVRIFHCNLRCTWCDTPYSYAPAKPEFEATIAEIIGKIQTFPSKNICFTGGEPLIHREKSAALLIEMANLAHINDIHIETNGAIDLAPFAAVRNEEKNVQQKARFVMDYKLPDSNEMAKMIHENFHVLEEQDEIKFVIGSDEDFNIARDLIQNDIQKGQVLFSPVWETMKPSKLVEKVLNEPLPNVKVSMQLHKVIWDPNKRGV

SEQ ID NO: 28142 - protein, 243 aa, Bacillus tequilensis
  REGION 1..243: note = tr|A0A2X0X4P2|A0A2X0X4P2_9BACI 7-carboxy-7-deazaguanine synthase OS=Bacillus tequilensis; OX = 227866 GN=queE PE=3 SV=1
MAKGIPVLEIFGPTIQGEGMVIGQKTMFVRTAGCDYSCSWCDSAFTWDGSAKKDIRWMTAEEIFTELKEIGGDAFSHVTISGGNPALLKQLDAFIELLKENNIRAALETQGTVYQEWFTLIDDLTISPKPPSSKMVTDFQKLDHILTSLKENNRQHAVSLKVVIFNDEDLAFAKTVHKRYPGIPFYLQVGNDDVHTTDDQTLIAHLLGKYEALVDKVAADAELNLVRVLPQLHTLLWGNKRGV

SEQ ID NO: 28143 - protein, 242 aa, unidentified
  source 1..242: note = Bacillus terrae
  REGION 1..242: note = tr|A0A429X5A5|A0A429X5A5_9BACI 7-carboxy-7-deazaguanine synthase OS=Bacillus terrae; OX = 1914933 GN=queE PE=3 SV=1
MSRVPVIEIFGPTIQGEGMVIGQKTMFVRTAGCDYSCTWCDSAFTWDGSGKDSIKQMDAEEIWHELKLLGGDGFSFVTISGGNPALLKNLSYLINLLKKNKIQVGLETQGSKWQDWFLDIDELTISPKPPSSGMVTDFDTLDMIFEKLKGTNSTHRCSVKVVIFDDQDFVYAKKLHFRYPEIPFYLQVGNTDHRTSDNERLIDQLLQKYEWLVNKVVADNELRNVKVLPQLHTLIWGNRRGV

SEQ ID NO: 28144 - protein, 240 aa, unidentified
  source 1..240: note = Bacillus thermocopriae
  REGION 1..240: note = tr|A0A410XI71|A0A410XI71_9BACI 7-carboxy-7-deazaguanine synthase OS=Bacillus thermocopriae OX=1215031 GN=queE PE=3 SV=1
MERIPVIEIFGPTIQGEGMVIGQKTMFVRTAGCDYRCRWCDSSFTWDGSAKHEVEWLTPEQIWQQLKQLGDDRFSHVTISGGNPALLKGLSALVTHLKEKGVRIGLETQGSVWQDWFYDIDDLTISPKPPSSNMKTNFTMLDMIMERLTAHRGHVSLKVVVFDDEDFAYAKHVHQRYPTVPFYVQVGNDHIHEADDVTLRLQLLQKLEWLVDKVVQSKEMNNVRVLPQLHTLLWGNRRGV

SEQ ID NO: 28145 - protein, 238 aa, Bacillus thuringiensis
  REGION 1..238: note = tr|A0A1E8A927|A0A1E8A927_BACTU 7-carboxy-7-deazaguanine synthase OS=Bacillus thuringiensis OX=1428 GN=queE_2 PE=3 SV=1
MSKIPVLEIFGPTIQGEGMVIGQKTMFIRTAGCDYSCSWCDSAFTWDGSAKEQVRQMAPEEIWNELVEIGGENFSHVTISGGNPVLLKNIQFLLTVLKENGIRTAIETQGSKWQEWLLQIEEVTISPKPPSSKMKTDFTMLDSIIHKLERKDFSLKVVVFEDYDFEYAVKVHKRYPQVPFFLQVGNDDTKTVDDAALIKNLLQKYERLIEKVVQCKEMNDAKVLPQLHALVWGNKRGV

SEQ ID NO: 28146 - protein, 238 aa, Bacillus thuringiensis
  REGION 1..238: note = tr|J3UNQ3|J3UNQ3_BACTU 7-carboxy-7-deazaguanine synthase OS=Bacillus thuringiensis HD-771 OX=1218175; GN = queE PE=3 SV=1
MSKIPVLEIFGPTIQGEGMVVGQKTMFIRTAGCDYSCAWCDSAFTWDGSAKNQIRQMTAEDIWDELVAIGGEKFSHVTISGGNPALLKNIEFLLSILKENGMRTAIETQGSKWQDWLLQIDEVTISPKPPSSTMKTDFQKLDAIIQKLAGKDISLKVVVFDDHDFEYAVKMHERYPDVPFFLQVGNDDTKTVDDAMLIKKLLDKYEWLIDKAVNCKEMNDAKVLPQLHALVWGNKRGV

SEQ ID NO: 28147 - protein, 242 aa, unidentified
  source 1..242: note = Bacillus timonensis
  REGION 1..242: note = tr|A0A4S3PJN2|A0A4S3PJN2_9BACI 7-carboxy-7-deazaguanine synthase OS=Bacillus timonensis; OX = 1033734 GN=queE PE=3 SV=1
MSEIPVIEIFGPTIQGEGMVIGQKTMFVRTAGCDYSCSWCDSAFTWDGSGKDLIRQMDAEEIWQELKSIGGEGFSFVTISGGNPALLKNLDYLICLLKENNIKVVLETQGSKWQEWFLKIDELTISPKPPSSEMVTNFDALDMIIHKLNEIPTVQNTSLKVVVFDDQDYDYAKKVHYRYPEIPFFLQVGNDNNHTTDNQKLLSQLLQKYEWLINKTMLDKELKNVKVLPQLHTYIWGNKRGV

SEQ ID NO: 28148 - protein, 238 aa, unidentified; identical to SEQ ID NO: 28145
  source 1..238: note = Bacillus toyonensis
  REGION 1..238: note = tr|A0A4Q9YB14|A0A4Q9YB14_9BACI 7-carboxy-7-deazaguanine synthase OS=Bacillus toyonensis; OX = 155322 GN=queE PE=3 SV=1

SEQ ID NO: 28149 - protein, 238 aa, unidentified
  source 1..238: note = Bacillus toyonensis
  REGION 1..238: note = tr|A0A2C4E1Q9|A0A2C4E1Q9_9BACI 7-carboxy-7-deazaguanine synthase OS=Bacillus toyonensis; OX = 155322 GN=queE PE=3 SV=1
MSKIPVLEIFGPTIQGEGMVVGQKTMFIRTAGCDYSCSWCDSAFTWDGSAKDQIRQMPAEDIWNELVEIGGENFSHVTISGGNPVLLKNIESLLSILKENGMRTAIETQGSKWQDWLLQIDEITISPKPPSSGMKTAYQKLDAVIQKLAGKDISLKVVVFDDRDFEYAVKMHERYPSVPFFLQVGNDDTKTVDDAMLIKKLLDKYEWLIEKAVNCKKMNDAKVLPQLHALVWGNKRGV

SEQ ID NO: 28150 - protein, 238 aa, unidentified; identical to SEQ ID NO: 28101
  source 1..238: note = Bacillus tropicus
  REGION 1..238: note = tr|A0A4Y6F878|A0A4Y6F878_9BACI 7-carboxy-7-deazaguanine synthase OS=Bacillus tropicus; OX = 2026188 GN=queE PE=3 SV=1

SEQ ID NO: 28151 - protein, 238 aa, unidentified
  source 1..238: note = Bacillus tropicus
  REGION 1..238: note = tr|A0A5C5A562|A0A5C5A562_9BACI 7-carboxy-7-deazaguanine synthase OS=Bacillus tropicus; OX = 2026188 GN=queE PE=3 SV=1
MSKIPVLEIFGPTIQGEGMVVGQKTMFIRTAGCDYSCAWCDSAFTWDGSAKDQIRQMTAEDVWNELVEIGGENFSHVTISGGNPALLKNIEFLLSILKENGMRTAIETQGSKWQDWLLQIDEVTISPKPPSSTMKTDFQKLDAIIQKLSGKDISLKVVVFDDYDFEYAVKMHERYPDVPFFLQVGNDDTKTVDDAMLIKKLLDKYEWLIEKAVNRKEMNNAKVLPQLHALVWGNKRGV

SEQ ID NO: 28152 - protein, 245 aa, unidentified
  source 1..245: note = Bacillus urumqiensis
  REGION 1..245: note = tr|A0A2P6MEX1|A0A2P6MEX1_9BACI 7-carboxy-7-deazaguanine synthase OS=Bacillus urumqiensis; OX = 1548213 GN=queE PE=3 SV=1
MSKSKLPVLEIFGPTFQGEGMVIGQKTMFVRTAGCDYSCSWCDSAFTWDGSAKEDIRMLTPEEVVDELDQCAPDNYQHVTISGGNPALLASVGPLCAILRDRGIKTALETQGSRWQDWFLNIDDLTISPKPPSSLMKPSLSMLDDIVEKLRNGGRLQHTSLKVVVFNEEDFQFAKSIHHRYPDLAFYLQTGNEDTGESQETGRLVEKLLDRYHQLVERTMEDNEMTAVHVLPQLHTLVWGNQRGV

SEQ ID NO: 28153 - protein, 243 aa, Bacillus vallismortis
  REGION 1..243: note = tr|A0A410WI34|A0A410WI34_BACVA 7-carboxy-7-deazaguanine synthase OS=Bacillus vallismortis; OX = 72361 GN=queE PE=3 SV=1
MAKGIPVLEIFGPTIQGEGMVIGQKTMFVRTAGCDYSCSWCDSAFTWDGSAKKDIRWMTAEEIFAELKDIGGDAFSHVTISGGNPALLKQLDAFIELLKENNIRAALETQGTVYQDWFTLIDDLTISPKPPSSKMVTNFQKLDHILTSLKENNRQHAVSLKVVIFNDEDLAFAKTVHKRYPGIPFYLQVGNDDVHTTDDQSLIAHLLGKYEALVDKVAADAELNLVRVLPQLHTLLWGNKRGV

SEQ ID NO: 28154 - protein, 243 aa, Bacillus vallismortis
  REGION 1..243: note = tr|A0A1W6HH91|A0A1W6HH91_BACVA 7-carboxy-7-deazaguanine synthase OS=Bacillus vallismortis; OX = 72361 GN=queE PE=3 SV=1
MAKGIPVLEIFGPTIQGEGMVIGQKTMFVRTAGCDYSCSWCDSAFTWDGSAKKDIRWMTAEDIYRELREIGGDAFSHVTISGGNPALLKQLDALILLLKEHGVRAALETQGTVYQDWFTMINDLTISPKPPSSGMTTDFAKLDHIVSSLDAAERLNAVSLKVVIFNDEDLQFAKTVHKRYPNIPFYLQVGNDNVHTTDDRALIAHLLGKYETLVDKVSADSDLNLVRVLPQLHTLLWGNKRGV

SEQ ID NO: 28155 - protein, 239 aa, unidentified
  source 1..239: note = Bacillus velezensis
  REGION 1..239: note = tr|A0A2I5JYF7|A0A2I5JYF7_9BACI 7-carboxy-7-deazaguanine synthase OS=Bacillus velezensis; OX = 492670 GN=queE PE=3 SV=1
MAKGIPVLEIFGPTIQGEGMVIGQKTMFVRTAGCDYSCSWCDSAFTWDGSAKKDIRWMTAEDIYRELREIGGDAFSHVTISGGNPALLKQLDALILLLKEHGVRAALETQGTVYQDWFTMINDLTISPKPPSSGMTTDFAKLDHIVSSLDAAERLNAVSLKVVIFNDEDLQFAKTVHKRYPNITFYLQVGNDNVHTTDDRALIAHLLGKYETLVDKVSADSDLNLVRVLPQLHTLLWGQ

SEQ ID NO: 28156 - protein, 243 aa, unidentified; identical to SEQ ID NO: 28154
  source 1..243: note = Bacillus velezensis
  REGION 1..243: note = tr|A7Z3Y8|A7Z3Y8_BACVZ 7-carboxy-7-deazaguanine synthase OS=Bacillus velezensis (strain DSM 23117 / BGSC 10A6 / FZB42) OX=326423 GN=queE PE=3 SV=1

SEQ ID NO: 28157 - protein, 240 aa, Bacillus vietnamensis
  REGION 1..240: note = tr|A0A0P6W8K4|A0A0P6W8K4_9BACI 7-carboxy-7-deazaguanine synthase OS=Bacillus vietnamensis; OX = 218284 GN=queE PE=3 SV=1
MKKIPVLEVFGPTIQGEGMVIGQKTMFVRTAGCDYSCAWCDSAFTWDGSAKEDIVLMTAQDIWHRLLEIGGDRFSHVTISGGNPALLASLKELIDIFKENGIDSALETQGSRWQDWFYDISDLTISPKPPSSGMVTEFEKLDEIVHRLKENRSQFSLKVVVFDDFDLEYATRIHHRYPGVPFYIQTGNPAVTEGDTAKLVSDLLLDYETLIDKVCERADLNNVRVLPQLHTLVWGNKRGV

SEQ ID NO: 28158 - protein, 239 aa, Bacillus vietnamensis
  REGION 1..239: note = tr|A0A5D4KAB1|A0A5D4KAB1_9BACI 7-carboxy-7-deazaguanine synthase OS=Bacillus vietnamensis; OX = 218284 GN=queE PE=3 SV=1
MRKIPVLEVFGPTIQGEGMVIGQKTMFVRTAGCDYSCSWCDSAFTWDGSAKEDIRLLTAAEIWQELHEIGGRRFNHVTISGGNPALITAIEELLDVFKKNGISSALETQGSRWQDWFMDIDELTLSPKPPSSGMKTDFDKLDYIIERLKNHTSRSLKVVIFNAADLEYAANLHERYPGVPFFLQVGNGNLAAEEGEGFLSQLITDYENLIDAVTDSERLNDVRVLPQLHTYVWGNKRGV

SEQ ID NO: 28159 - protein, 235 aa, Bacillus wakoensis
  REGION 1..235: note = tr|W4PXR9|W4PXR9_9BACI 7-carboxy-7-deazaguanine synthase OS=Bacillus wakoensis JCM 9140 OX=1236970 GN=queE; PE = 3 SV=1
MKIPVMEVFGPTIQGEGMVIGQKTMFVRTGGCDYSCSWCDSSFTWDGTARSELLEVEAIIKKIKETGGEYFSHVTISGGNPALHKGIGELVDRCHEEGWKVAIETQGSIWQEWMKEIDDVTISPKPPSSNMKTDFEKLDFYVEQLKDRKFSLKVVVFTEEDFRYAEQIHVRYPKVPFYLQIGNEDISTTDDEALLSKLLHAYEWLIDRATKSTIMNDAKVLPQLHTLIWGNKRGV

SEQ ID NO: 28160 - protein, 224 aa, unidentified
  source 1..224: note = Bacillus weihaiensis
  REGION 1..224: note = tr|A0A1L3MXN6|A0A1L3MXN6_9BACI 7-carboxy-7-deazaguanine synthase OS=Bacillus weihaiensis; OX = 1547283 GN=queE PE=3 SV=1
MVIGQKTMFVRTAGCDYSCSWCDSAFTWDGSAKDDIRQLSAEEIWEELVQLGEDRFSHVTISGGNPALLANLQEFITLLKEKGKKIAIETQGSKYQEWLKEIDDLTISPKPPSSGMRTDFMKLDEIISRVKVEGDKHSISLKVVIFNLEDLEYAKNVHLRYPDIPFYLQVGNEDIYQAETKQLVEKLLTRYEWLIDQVIADKELNAVRVLPQLHTLIWGNKRGV

SEQ ID NO: 28161 - protein, 220 aa, unidentified
  source 1..220: note = Bacillus wiedmannii
  REGION 1..220: note = tr|C2PC63|C2PC63_9BACI 7-carboxy-7-deazaguanine synthase OS=Bacillus wiedmannii OX=1890302 GN=queE PE=3; SV = 1
MVVGQKTMFIRTAGCDYSCAWCDSAFTWDGSAKDQIRQMTAEDVWNELVEIGGENFSHVTISGGNPALLKNIEFLLSILKENGMRTAIETQGSKWQDWLLQIDEITISPKPPSSAMNTDFQKLDAVIQKLAGKDISLKVVVFDDYDFEYAVNMHERYPDVPFFLQVGNDDTKTVDDTMLIKKLLDKYEWLIDKAVNCKEMNNAKVLPQLHALVWGNKRGV

SEQ ID NO: 28162 - protein, 238 aa, unidentified; identical to SEQ ID NO: 28086
  source 1..238: note = Bacillus wiedmannii
  REGION 1..238: note = tr|A0A2B5P897|A0A2B5P897_9BACI 7-carboxy-7-deazaguanine synthase OS=Bacillus wiedmannii; OX = 1890302 GN=queE PE=3 SV=1

SEQ ID NO: 28163 - protein, 240 aa, unidentified
  source 1..240: note = Bacillus wudalianchiensis
  REGION 1..240: note = tr|A0A1B9AC36|A0A1B9AC36_9BACI 7-carboxy-7-deazaguanine synthase OS=Bacillus wudalianchiensis OX=1743143 GN=queE PE=3 SV=1
MKKIPVLEIFGPTVQGEGAVIGRKTMFVRTAGCDYRCAWCDSAFTWDGSAKERIQLLTAEEIWEELIKIGGDTFDHVTISGGNPALLPQIDDLLAKLTEKGIKTALETQGSRWQEWFYKIDELTISPKPPSSGMETDFEQLSLIVERLIKQEKAVSLKIVIFDDQDLAFAKKVHQLYPDLTFFLQVGNDKLQEQNPTNLLSYLVSRYEWLINKVMPDSDWKDVRVLPQLHTFVWGNKQGV

SEQ ID NO: 28164 - protein, 243 aa, unidentified
  source 1..243: note = Bacillus xiamenensis
  REGION 1..243: note = tr|K2N305|K2N305_9BACI 7-carboxy-7-deazaguanine synthase OS=Bacillus xiamenensis OX=1178537 GN=queE PE=3; SV = 1
MTKAIPVLEIFGPTIQGEGMVIGQKTMFVRTAGCDYSCSWCDSSFTWDGSAKHDIQWLQAEDIVKELKKIGGEAFSHVTISGGNPALLKQMETLIDLLHEEGIDTALETQGTMYQDWFLKIDDLTISPKPPSSKMKTDFTKLTRIIDELKNGNRLQHASLKVVIFDDQDLAYAKDVHAKYPELPFYLQVGNDDTTTADDAYLLTHLLKKYEALVDQVAQDPDLNRVRVLPQLHTLLWGNKRGV

SEQ ID NO: 28165 - protein, 239 aa, unidentified
  source 1..239: note = Bacillus zeae
  REGION 1..239: note = tr|A0A398AX00|A0A398AX00_9BACI 7-carboxy-7-deazaguanine synthase OS=Bacillus zeae; OX = 1917180 GN=queE PE=3 SV=1
MSKIPVIEIFGPTIQGEGMVIGQKTMFVRTAGCDYSCSWCDSSFTWDGSGNHLVRQMGAEEIWNELEGYGGDCFSFVTISGGNPALLKNLGSLIALLKQKGIKIGLETQGSKWQDWFYDIDELTISPKPPSSKMETDFEKLDTIVSRLDGSGRISLKVVVFDEQDYSYAKKVHQRYHHVPFFLQVGNADITTEDRSSLVKELLLQYEQLINNVVKDPGLNEVKVLPQLHTLLWGNKRGV

SEQ ID NO: 28166 - protein, 243 aa, unidentified
  source 1..243: note = Bacillus zhangzhouensis
  REGION 1..243: note = tr|A0A081L6Z6|A0A081L6Z6_9BACI 7-carboxy-7-deazaguanine synthase OS=Bacillus zhangzhouensis OX=1178540 GN=queE PE=3 SV=1
MAKAIPVLEIFGPTIQGEGMVIGQKTMFVRTAGCDYSCSWCDSSFTWDGSAKHDIQWLQAEDIVQELKRIGGQAFSHVTISGGNPALLKQMESLIDLLHEEGIDTALETQGTMYQDWFLKIDDLTISPKPPSSNMKTDFTKLTRIIDELKNGNRLQHASLKVVIFDDRDLAYAKDVHAKYPELPFYLQVGNDDTTTGDDAYLLTHLLKKYEALVDQVAQDSDLNRVRVLPQLHTLLWGNKRGV

SEQ ID NO: 28167 - protein, 223 aa, unidentified
  source 1..223: note = Unknown
  REGION 1..223: note = tr|A0A0J8YR51|A0A0J8YR51_9GAMM 7-carboxy-7-deazaguanine synthase OS=bacteria symbiont BFo2 of Frankliniella occidentalis OX=1628856 GN=queE PE=3; SV = 1
MLYPINEMFQTLQGEGFYTGAPAIFIRLQGCPVGCSWCDTKHTWEKYADQQQPLTNIVHKSAESEAWADASVEQLLAVIAEQGWTAKHIVITGGEPALYDLTPLTEQFEQQGFQCQIETSGTHPIQCSAATWVTVSPKVNMRGGYDVLNSALLRANEVKHPVGRQRDIDALDLLLSQVPPSTERIIALQPISCKKAATELCIATCIARNWRFSMQTHKYLNIA

SEQ ID NO: 28168 - protein, 223 aa, unidentified
  source 1..223: note = Unknown
  REGION 1..223: note = tr|A0A0J8YGZ9|A0A0J8YGZ9_9GAMM 7-carboxy-7-deazaguanine synthase OS=bacteria symbiont BFo1 of Frankliniella occidentalis OX=1628855 GN=queE PE=3; SV = 1
MQYPINEMFQTLQGEGVYTGVPAIFIRLQGCPVGCSWCDTKHTWDKLADRETSLGDILLKTVETDAWGAADAAALLEVIRQHGWTAKHVVITGGEPCIHDLTPLTAALQENGFSCQIETSGTHEVLCTPETWVTVSPKVNMRGGYDVLNQALIRADEVKHPVARQRDVDALDDLLATLSDDKTRIIALQPISQKDDATRLCIETCIARNWRLSMQTHKYLNIA

SEQ ID NO: 28169 - protein, 224 aa, unidentified
  source 1..224: note = Bacteriodetes bacterium
  REGION 1..224: note = tr|A0A522FV00|A0A522FV00_9BACT 7-carboxy-7-deazaguanine synthase OS=Bacteriodetes bacterium OX=2507565 GN=queE PE=3 SV=1
MKILSNDIKLNVSEIFYSIQGEGTRAGLPCVFIRLQGCKLRCKWCDTPYALKFNGDSSKMTFSEIIESVKKFGCKFIQITGGEPLNQENVIPFMKLLCDKKLTVSLETSGAFDVSEVDKRVIKIMDIKCPASGMVKLNKFENINYINKKDEIKFVIADRKDFDWAMEIIKQYKLTKKTTNILFSPAFDIIEPVTLANWLLESNIKARLQLQIHKYIWEPNTRGV

SEQ ID NO: 28170 - protein, 219 aa, unidentified
  source 1..219: note = Bacteriodetes bacterium
  REGION 1..219: note = tr|A0A521WPB4|A0A521WPB4_9BACT 7-carboxy-7-deazaguanine synthase OS=Bacteriodetes bacterium OX=2507565 GN=queE PE=3 SV=1
MITNNPNTLVINEIFHSIQGESCHAGLPCVFVRLTYCNIRCSYCDSEYAFYEGKEMTMDEILERVQHYGCKLVEVTGGEPLFQSNVHELMKRLCDNGYEVLLETGGSLSLEHVDRRVKCVVDFKCPSSNMVKKNLWLIIEQLKPVDEVKFVIGDRNDYDWAKQKIAEYKIGERCRILMSVVFGKLEPVELAEWILTDRLDVRFQLQMHKFIWEPEKRGV

SEQ ID NO: 28171 - protein, 231 aa, unidentified
  source 1..231: note = Bacterioplanes sanyensis
  REGION 1..231: note = tr|A0A222FND9|A0A222FND9_9GAMM 7-carboxy-7-deazaguanine synthase OS=Bacterioplanes sanyensis OX=1249553 GN=queE PE=3 SV=1
MAAQYRIKEIFYTLQGEGAQAGRPAVFCRFSKCNLWNGRESGRTAAVCNFCDTDFIGTDGHLGGVYDLEQLVVVIQQQWPGSTANGQGKPYVVCTGGEPALQLDDELVSALQHAGFEVAIETNGTLPLANGIDWVCLSPKGESELVVIECDELKLVYPQADAPPERFDYIQADHYYLQPMADYQPVVISSDKLQGAADSLSTSNTHKALSYCLKHPRWKLSLQTHKMIRIE

SEQ ID NO: 28172 - protein, 234 aa, Bacteriovorax sp.
  REGION 1..234: note = tr|T0CCW7|T0CCW7_9PROT 7-carboxy-7-deazaguanine synthase OS=Bacteriovorax sp. BAL6_X OX=1201290 GN=queE; PE = 3 SV=1
MQQYLINDIYRATEGEGVFIGRSQVFVRFQGCAVGCINCDSMDTWSFEIEPTSIESIFEKVLEESYQGKINWISITGGDPLHPKHVPSVVALSKFLKEKGFKLNIEAAGTRVVDEVFENLDYISFDLKTPSTGVQTRLALIEKLAQNYDGKFQLKAVIADRKDFDYTLGAYRKLEESLGPVDFPWVLTPCFEPSEEFPMQRFIDIQEWNQLEGGPFRVIGQQHKWIYGADKKSV

SEQ ID NO: 28173 - protein, 235 aa, Bacteriovorax sp.
  REGION 1..235: note = tr|T0RAI7|T0RAI7_9PROT 7-carboxy-7-deazaguanine synthase OS=Bacteriovorax sp. Seq25_V OX=1201288 GN=queE; PE = 3 SV=1
MDKKYLINSIYRATEGEGVHLGTPQVFVRFQGCAIGCINCDSMDTWEFAGDMLSLEDIWEKLVEETYNLKIKRVSITGGDPLHPKHEPQVLELAGFLKEKGFFVNIEAAGSRVVHTIFDLIDFISFDFKTPSTGVKTRVSNIVTLNKQYPGKFQIKAVIADERDFLATYDAYNEVLAQSESMDFPWVLTPCYEPEEEFPMERFQNILAMNEKYGSLFRVIGQQHKWVFGADKKQV

SEQ ID NO: 28174 - protein, 236 aa, Bacteriovorax stolpii
  REGION 1..236: note = tr|A0A2K9NR80|A0A2K9NR80_9PROT 7-carboxy-7-deazaguanine synthase OS=Bacteriovorax stolpii; OX = 960 GN=queE PE=3 SV=1
MNGNHLINSIYRATEGEGVFLGRPQIFVRYQGCTVGCLNCDSKDTWDFDKEAGIDLEEILARVHAEGFNGTIKNVSITGGDPLHPSHVPHVLALVKALKERKYYVNIEAAGTRVVDEIFDLVDYISFDYKTPSTGVKTPLKNIQKMNAQYGAKFQLKSVIADRVDFESTLDAFKSLATTESSLSFPWVLTPCYNLGEKFPMERFQNVLSWNEENGGFFRVIGQQHKWVFGPDQKLV

SEQ ID NO: 28175 - protein, 251 aa, unidentified
  source 1..251: note = Unknown
  REGION 1..251: note = tr|A0A2E5IRV1|A0A2E5IRV1_9BACT 7-carboxy-7-deazaguanine synthase OS=bacterium OX=1869227; GN = queE PE=3 SV=1
MTKPTLRVSEMFYSIQGEGPFCGQPSVFLRLQGCNLTCGGKTTLKSKQCEEGATWRCDSIEVWTKGKQWGFDEICKEWEDQHWIQKLKNGAHLIITGGEPLLQIQALELFLTYYLERYKQLPFIEIETNGTIEPSSLLRTYINHYNVSFKLTNSGLKKQQYYLKKAIQYFAKLENAIFKFVVSSKEDVKELELLYISPFQLKQSKIILMPSADNRQALKALEPSIIEFCKEKSWRYSTRLHIEVWDKKTGV

SEQ ID NO: 28176 - protein, 214 aa, unidentified
  source 1..214: note = Unknown
  REGION 1..214: note = tr|A0A2E3WK25|A0A2E3WK25_9BACT 7-carboxy-7-deazaguanine synthase OS=bacterium OX=1869227; GN = queE PE=3 SV=1
MKIKINEIFFSLQGEGLQVGVPTIFIRLFGCSLRCSWCDSMYSVEGDDYKELNTNELLNIIEKIECKNICITGGEPLEQKLQLEHLTDILLDRNYKILLETAGHIKPIEIFKNPNVIISMDCKCPSSNMQKKTNLKYLKALESKDQIKFVINDIVDYEYAKDVVTSNNLRAKIVFQPVFGSDLKDLANLVLRDKLLVRVVPQLHKIIWGDIRGV

SEQ ID NO: 28177 - protein, 193 aa, unidentified
  source 1..193: note = Unknown
  REGION 1..193: note = tr|A0A532U229|A0A532U229_9BACT 7-carboxy-7-deazaguanine synthase OS=bacterium (candidate division B38) B3_B38 OX=2012999 GN=queE PE=3 SV=1
MVCTFIRLTGCNLRCSYCDTTYAYYQGEEMTPEEVLRRVEDFAASLVMITGGEPLLSPELNQLVNSLTRHNYQIMVETNGSLDIGKIEGEVVRIVDIKCPGSGMSEHIYWDNLNQLTPNDQVKFVIGDREDYQWAKGVMARHKLAEKLPVLFSPVFGKMAPRLLAGWIVEDNLKVRFQLQLHKYIWGPDRRGV

SEQ ID NO: 28178 - protein, 265 aa, unidentified
  source 1..265: note = Unknown
  REGION 1..265: note = tr|A0A2M7G709|A0A2M7G709_9BACT 7-carboxy-7-deazaguanine synthase OS=bacterium (Candidatus Blackallbacteria) CG17_big_fil_post_rev_8_21_14_2_50_48_46; OX = 2014261 GN=qu eE PE=3 SV=1
MQTLTPAENIARKEHPKQEAYLVEVFSAIQGEGPIVGTRQIFIRFLGCHIQCAYCDTPATHTKQRQCRVERTPGLRDFESIANPVPISDLLQIVESLERFPGLHDSISLTGGEPLQHLRSLKALIPVLKPRFPLYLETDGILWQALEACIQDLEMIGMDMKLPSATGLQAFWEDHARFLTIAARQNVFVKLVFSRNSTLEELDQALEIISGTDRQIPLILQPVTPYGIVRHPPTPEQVLIWQERAKQALKQVRVIPQTHKMIGQI

SEQ ID NO: 28179 - protein, 234 aa, unidentified
  source 1..234: note = Unknown
  REGION 1..234: note = tr|A0A2G9YAZ0|A0A2G9YAZ0_9BACT 7-carboxy-7-deazaguanine synthase OS=bacterium (Candidatus Ratteibacteria) CG23_combo_of_CG06-09_8_20_14_all_48_7; OX = 2014292 GN=queE P E=3 SV=1
MPIAKINQVFVSIQGEGVFIGVPQIFVRFSGCNLTCKYCDVPRELPEKEFTVQELCHVIATLNKKDGPVHSLSLTGGEPLIQADFLRNLLPYLKRKGFKVYLETNGTLPAKLKKVGRWCDFIAMDIKLPSATGGKPLWEVHKNFLKESLTFCPAPKTFVKVVVTGGTIPGDIKYAARFVHGVNSEVTLVIQPVVNRRGKITVSAKKLLEFLRLTQKFLPSVRLIPPVHQFLGLP

SEQ ID NO: 28180 - protein, 220 aa, unidentified
  source 1..220: note = Unknown
  REGION 1..220: note = tr|A0A3A8YE14|A0A3A8YE14_9BACT 7-carboxy-7-deazaguanine synthase OS=bacterium 1xD8-6; OX = 2320116 GN=queE PE=3 SV=1
MKYEIAEIFESINGEGMKAGELAVFIRFSGCNLNCRYCDTKWANDANASYTEMDEEEIIREVKQYHVKNITVTGGEPLFRKGMGKLLKRLLKEGFSVEIETNGSVSIREFTLISPNISYTMDYKLPGSGMEESMCVSNFSLLDKKDTIKFVVSSKEDLEHAYKITEQFSLAERCHVLLSPAFGEIEPKEIVDFMKERHWTEVRMQIQMHKVIWDVNQRGV

SEQ ID NO: 28181 - protein, 212 aa, unidentified
  source 1..212: note = Unknown
  REGION 1..212: note = tr|A0A0S4M426|A0A0S4M426_9BACT 7-carboxy-7-deazaguanine synthase OS=bacterium 2013Arg42i; OX = 1561003 GN=queE PE=3 SV=1
MGYQVKEIFYTLQGEGFHAGRPAVFCRFVGCNLWSGKEKNRKEAICQFCDTDFVLPYGDGGGRFSSGRELALHISSFWPDSDAKRNFFVVLTGGEPLLQVDQELIDSLHEEQAVVAVETNGTIVPECVFDWICVSPKSCAPLNLLRGNELKVVVPQCGQDFFYYETLGFDYFFVQPMYGPDLEENTRLAVSHCKLNPKWRVSLQLHKVLGIA

SEQ ID NO: 28182 - protein, 211 aa, unidentified
  source 1..211: note = Unknown
  REGION 1..211: note = tr|A0A0N0CXI1|A0A0N0CXI1_9BACT 7-carboxy-7-deazaguanine synthase OS=bacterium 336/3; OX = 1664068 GN=queE PE=3 SV=1
MKVLIKDDIRLLTHELPLMEAFYTIQGEGFHQGKAAYFIRLGGCDVGCVWCDVKESWDAEAHPIISVENIIKEALKYKGRLAVITGGEPLIYNLDYLTKKLKEAGFQINIETSGAYPLSGHWDWICFSPKKFKPALDEFTEVAHELKVVLYNKKDFEWAESFAKKMNKSAKLFLQPEWSKQNELMPLIVEYVKENPHWQISLQTHKFMDIP

SEQ ID NO: 28183 - protein, 207 aa, unidentified
  source 1..207: note = Unknown
  REGION 1..207: note = tr|A0A1H8G0V4|A0A1H8G0V4_9BACT 7-carboxy-7-deazaguanine synthase OS=bacterium A37T11; OX = 1855384 GN=queE PE=3 SV=1
MTQQVPDDGSLLPLMEEFYTIQGEGYHTGKAAYFIRLGGCDVGCHWCDVKESWDASIHPLTPADTIIAHAARHPAKTVVVTGGEPLIYNLDYLTRGLQQQGIKTFMETSGAYPLSGYWDWICLSPKKFKAPRPDVIAAAGELKVIVFNKSDFAWAESFAAEVPQTCRLYLQPEWSKAAEMTPFIIDYVMNNPKWEISLQTHKYLNIP

SEQ ID NO: 28184 - protein, 255 aa, unidentified
  source 1..255: note = Unknown
  REGION 1..255: note = tr|A0A1H9P8H2|A0A1H9P8H2_9BACT 7-carboxy-7-deazaguanine synthase OS=bacterium A52C2; OX = 1855383 GN=queE PE=3 SV=1
MNAPSAISARIRGAAEAVVRVSEIFGPTIQGEGALIGLPTVFVRTGGCDYRCSWCDSLHAVDSRYRADWKPMTSGAILDEVRRLSGDRPLTVTISGGNPAIQPLGDLIRQGHERGYRFALETQGSVSQDWFAELDMLVLSPKPPSSGMVTDWQALANCVAEASAGPRTVLKFVVFDEADYAFARDAASRFPALAVYLQPGNPIPEGAEAEHEAVDPDALMRRMEWLIDRVTADRWFEAHVLPQLHVLIWGNRRGV

SEQ ID NO: 28185 - protein, 233 aa, unidentified
  source 1..233: note = Unknown
  REGION 1..233: note = tr|A0A1V5UNG9|A0A1V5UNG9_9BACT 7-carboxy-7-deazaguanine synthase OS=bacterium ADurb.Bin243 OX=1866936 GN=queE_2 PE=3 SV=1
MPNDSSILKFKVNEIFKSVQGESSYAGLACAFVRLSGCNLRCAYCDTVYAYKYGRYLTAGEIISKVDALDPHIIELTGGEPLMQKGAPQLVDLLVEYLNNKKKGRRADAIEPRLLIETSGSISIKGLNDQAVIIMDVKTPSSGSSGMMIFDNFNHLKSVDEIKFVIGDRADYEYCKNIIFEYSLAEKCGVLFSAVYGKIRPEKIIKWMLQDGVKARFQLQMHKYIWPADKKGV

SEQ ID NO: 28186 - protein, 347 aa, unidentified
  source 1..347: note = Unknown
  REGION 1..347: note = tr|A0A1V5UPW2|A0A1V5UPW2_9BACT 7-carboxy-7-deazaguanine synthase OS=bacterium ADurb.Bin243 OX=1866936 GN=queE_1 PE=4 SV=1
MGFNINLNNEFNYREKIKLPELSGGGIVLSYKCTNRCRHCLVAGSPERENKWLGRGEAEEIFKYIKRTGPGAEIHIGGGEPFLNTQCLIDAVELAVAEGIKLSYVETNGFWGNNFNKYEPVLKELYKIGLRSVLISVSPFHAEFIKPQITINAIKSVRNVFGFHGAFVWIPEFLNMLNKNDITKTIDWNTINPDIIKRAGDMYYLIPGGRCGYSKTPVADKKPAADFFITSCERELLSTSHFHIDAYGNYMPGGLCGGIKMCSYKEAGTEINLNDKPLIKLLFNEGIRGLFDYAQKMGYIEKSDGYCGKCHLCVDIRTFLFNKFGAEKYLELAPAEFYETLIKESSL

SEQ ID NO: 28187 - protein, 251 aa, unidentified
  source 1..251: note = Unknown
  REGION 1..251: note = tr|A0A1V5T3B8|A0A1V5T3B8_9BACT 7-carboxy-7-deazaguanine synthase OS=bacterium ADurb.Bin270 OX=1866926 GN=queE PE=3 SV=1
MRESNSHTASLVEIFSSLQGEGAYVGRKMTFVRFGSCNLKCRFCDTPQGMCTRDHCLIEKVPGSAKFDKISNPVSAAQLCEMMSRFDDSILSITGGEPLKQAAFLEQWLPSQRPNRTILLETNGVLHEELKILLPNIDIISMDFKLPSSTGEKEFWEEHSIFLQNSVASGKEIYIKIVVTPETTDHDIEKVIRIITSINKYIPTFIQPASPTLRFHKEIQHGRIKSLQRLCSAYLRDVRVQPQMHKHWGIL

SEQ ID NO: 28188 - protein, 211 aa, unidentified
  source 1..211: note = Unknown
  REGION 1..211: note = tr|A0A1V5PMT6|A0A1V5PMT6_9BACT 7-carboxy-7-deazaguanine synthase OS=bacterium ADurb.Bin363 OX=1866927 GN=queE PE=3 SV=1
MLINEIFKSIQGESSYIGMPCTFIRTAMCNLACSYCDTMYARQKGEEISIPSIILKVKEFNIPLVEITGGEPLLQKDIPLLIENLLERDFKVLVETNGSIDIGLIPTRAVRIMDLKCPGSGMSNKMLWGNIDKLIPSDEVKFVIRDRRDYLWSVEKIKEYSLIEKVQVLFSCVYGMLEAKTLIEWILKDNLNVRFQLQLHKYIWPHDMRGV

SEQ ID NO: 28189 - protein, 249 aa, unidentified
  source 1..249: note = Unknown
  REGION 1..249: note = tr|A0A1V5NTL8|A0A1V5NTL8_9BACT 7-carboxy-7-deazaguanine synthase OS=bacterium ADurb.Bin374 OX=1866937 GN=queE PE=3 SV=1
MVETGAKLIEVFPSIQGEGMQVGLMQLFVRFAGCNLLCRNCDTRRSWDVGPGFTLSPWPGRRSQQIANPVAAADLYDTLSNEYPLGDFHSISLTGGEPLLQAEFIKAFARLCRRDGLKIFLETNGSLAAKAAEVAEFVDFWSVDLKLSKNWGLNGRMGEKHRRFLKTVPPERSYLKLVIDAIDDPDEIIRQLEKIDTHRYVAVVQPFSASASSISDWDSRLILEWLQMLRPHFREVRWIPQVHKLLRIP

SEQ ID NO: 28190 - protein, 229 aa, unidentified
  source 1..229: note = Unknown
  REGION 1..229: note = tr|A0A1V5MBM5|A0A1V5MBM5_9BACT 7-carboxy-7-deazaguanine synthase OS=bacterium ADurb.Bin425 OX=1866929 GN=queE PE=3 SV=1
MFGTNPVRGQEAGDGNSLWVQEIFYTLQGEGPFTGEPSVFIRLGGCNLACYFCDTDFESSTWRPTLAEIFDKVAALQAKAKLVVITGGEPFRQNIAPLVGGLLERDFTVQLETNGTLYQDLPWCSDLFVVCSPKTPLLNEKLALHIDAYKYLIKEGETDERDGLPSFSTRQSGTPGAIARPLPGKSVFVMPLDEQDEERNVLNIKASMNAALKFGYRLTLQTHKYLGLR

SEQ ID NO: 28191 - protein, 264 aa, unidentified
  source 1..264: note = Unknown
  REGION 1..264: note = tr|A0A1V5LWM4|A0A1V5LWM4_9BACT 7-carboxy-7-deazaguanine synthase OS=bacterium ADurb.Bin429 OX=1866930 GN=queE PE=3 SV=1
MIGGASTGRLMVTLHELFSGIQGEGVLVGVRQLFVRFHGCQLICAYCDTPASRRAFPAACLVERAPGARHFDEVPNPLDVEDLLGLIRARYAGYPHHSVAFTGGEPLLHGEALNALLLALHREGIATYLETNGTLTDALRRLDEPPTYLAMDIKLPSATGGLALWDDHATFLDAALACMDPRPCGALQVKLVFAAGCLEEVARAAALIADRRRDLPTVLQPVTAHPGGPVTPSPAETLDAQRLASERLSDVRVIPQTHVMLGQR

SEQ ID NO: 28192 - protein, 223 aa, unidentified
  source 1..223: note = Unknown
  REGION 1..223: note = tr|A0A1V5JH81|A0A1V5JH81_9BACT 7-carboxy-7-deazaguanine synthase OS=bacterium ADurb.BinA028 OX=1866933 GN=queE PE=3 SV=1
MMPLLPVSEIFGPTIQGEGEHIGRRAVFVRLAGCDSRCSWCDTKYAWGTEGATHMSEDEIVDAVSGLGPCRLVVITGGNPAMYDLERLVTLLALRGKTVHVETQGTIRQGWLRLADLVTISPKADLPMNALSDLVCDLLGCTSVQIKVVIHSRADFDRAVEIGRRLPAVPLILQAGYNPASRAGSVEPATLASWFARDGGDLPPSARLLPQLHRVLWGDARGV

SEQ ID NO: 28193 - protein, 212 aa, unidentified
  source 1..212: note = Unknown
  REGION 1..212: note = tr|A0A2H6EC10|A0A2H6EC10_9BACT 7-carboxy-7-deazaguanine synthase OS=bacterium BMS3Abin03; OX = 2005711 GN=queE_1 PE=3 SV=1
MLKVNEIYHSIQGESSKAGLPCVFVRLTYCNLRCTYCDTVYAFYDGKEISEEEIIEKVKNYGCKLVEVTGGEPLVQDETLELMKRLCDEGFDVMLETGGSLPVKDVDKRVKIIMDLKCPSSGMEKKNLYGNINYLKNTDELKFVIGNREDYDWTKLKIEEYDLFNKCEILFSVVFNELEPLTLVNWILEDKLDVRFQIQMHKYIWHPETNGV

SEQ ID NO: 28194 - protein, 345 aa, unidentified
  source 1..345: note = Unknown
  REGION 1..345: note = tr|A0A2H6ED86|A0A2H6ED86_9BACT 7-carboxy-7-deazaguanine synthase OS=bacterium BMS3Abin03; OX = 2005711 GN=queE_2 PE=4 SV=1
MEILKKRNDLVEAKWWEPADKEKLLCTLCPRYCKIGKGQPGFCFIRQNIDGKLYTLGYARPTGFAVDPIEKKPLNHFLPGTTVLSFGTAGCNLGCKFCQNWTMSKAKLDELNSLKASPEDVVALAKKYGTPSIAYTYNDPTIFGEYVIDISKIAREAGIRSVMVTAGYIDKQARKDVYKYIDAANVDLKGFTENFYWKNTYSHLNDVLDTLVWLKNETDVWIEITTLLIPGENDNIEEIKEEVDWILNNLGDSVPLHFTAFHPDFKMRDKPPTPAQTLTSARTVAMEMGIKYCYVGNVHNVEGQTTFCPGCGSVLIKRDWHTVISDKLKDGKCRNCGIKIDGVFS

SEQ ID NO: 28195 - protein, 212 aa, unidentified
  source 1..212: note = Unknown
  REGION 1..212: note = tr|A0A2H6EQS3|A0A2H6EQS3_9BACT 7-carboxy-7-deazaguanine synthase OS=bacterium BMS3Abin04; OX = 2005712 GN=queE PE=3 SV=1
MLKVNEIFFSIQGESSYAGLSCVFVRLTYCNLRCSYCDTEYAFYEGEDKSIDEIISEVKKYGCKLIEVTGGEPLVQNESLELMKKLCDEGFEVMLETSGSLPIKDVDKRVKIIMDLKCPSSKMEKKNLYENINFLKPNDEVKFVIGDREDYNWSKEIIKKYKLNDKFEILFSVVFDKLEPVTLVNWILNDKLNVRYQLQMHKYIWKPETKGV

SEQ ID NO: 28196 - protein, 214 aa, unidentified
  source 1..214: note = Unknown
  REGION 1..214: note = tr|A0A2H6F7Y1|A0A2H6F7Y1_9BACT 7-carboxy-7-deazaguanine synthase OS=bacterium BMS3Abin06; OX = 2005714 GN=queE PE=3 SV=1
MLKINEIFKSIQGESTYAGLPCTFVRLAGCNLRCTYCDTNYAYYDGKELSDDEIVSKIEEYDVRCVEFTGGEPLLQEETPKLLKILLDKGYDVLVETNGSICIGCLDKRLNIIMDYKTPKSGMSERMRPKNLDFLKPTDQIKFVLMDESDYKWAKDVISTNNLLDRFENILMSPAYGELPPKSLVSWVLQDNLRVRVQLQIHKYIWAPDEREGV

SEQ ID NO: 28197 - protein, 211 aa, unidentified
  source 1..211: note = Unknown
  REGION 1..211: note = tr|A0A2H6FFE5|A0A2H6FFE5_9BACT 7-carboxy-7-deazaguanine synthase OS=bacterium BMS3Abin07; OX = 2005715 GN=queE PE=3 SV=1
MKVCEIFASIQGESSFAGYPCVFVRLTGCNLRCSYCDTAYAYNEGTDIELSEILEKVKPYGIKLIEVTGGEPLLQKESYGLIERLLEEGFQVLLETNGSISVENVDQRVSVILDIKTPSSSMSNRMFMKNLDLVSKKDDVKFVLGSREDYEWVKDVMEKHGFSERTNILLSPVFGSLDPAMLARWMVKDGIQARLNLQLHRYIFGSNRRGV

SEQ ID NO: 28198 - protein, 215 aa, unidentified
  source 1..215: note = Unknown
  REGION 1..215: note = tr|A0A2H6FID4|A0A2H6FID4_9BACT 7-carboxy-7-deazaguanine synthase OS=bacterium BMS3Abin08; OX = 2005716 GN=queE PE=3 SV=1
MKNNGRLLVCETFRSIQGESSYAGYPCFFIRLTGCNLRCTYCDTVYAYEGGQETEIEALIDDATGSGLGLVEVTGGEPLLQENAFILISGLADEGFKVLVETNGSRDISKLDKRCVAIIDIKTPGSGMAGRMDFSILKRLRKQDEIKFVITSPDDYEWSKGVMKEYGLEEERVLFSPSTGAVKPEDLAGWMLDDGLSVRLNLQIHKYIFSDRRGV

SEQ ID NO: 28199 - protein, 214 aa, unidentified
  source 1..214: note = Unknown
  REGION 1..214: note = tr|A0A2H6FTF3|A0A2H6FTF3_9BACT 7-carboxy-7-deazaguanine synthase OS=bacterium BMS3Abin10; OX = 2005718 GN=queE PE=3 SV=1
MFKVNEIFKSIQGESTYAGLPCTFIRLAGCNLRCAYCDTNYAYYHGKELADEEIMAKIEEYGVNCVEFTGGEPLLQEETPPLLKTLLDRGYNVLVETNGSICIGCLDKRLTIIMDIKTPRSGMSERMNLKNLTLIKNNDQLKFVILDESDYVWAKNMINEHMLFDKTKNILMSPAYGILPPKDLASWILKDNLPVRIQLQIHKYIWGPDEREGA

SEQ ID NO: 28200 - protein, 163 aa, unidentified
  source 1..163: note = Unknown
  REGION 1..163: note = tr|A0A2H6G161|A0A2H6G161_9BACT 7-carboxy-7-deazaguanine synthase OS=bacterium BMS3Abin11; OX = 2005719 GN=queE PE=4 SV=1
MSLSGILQQVKSYSTRYVTVTGGEPLAQRDCWLLLKMLCDAGYTTSLETSGAIDISQVDKRVSTIMDIKTPGSGESDRNRFQNIELLKSSDQVKFVITDRVDYDWSRQFIEENELTGKCEILFSPVHGELDPVDMAEWILNDNLLVRMQIQLHKYLWGDERGR

SEQ ID NO: 28201 - protein, 215 aa, unidentified
  source 1..215: note = Unknown
  REGION 1..215: note = tr|A0A2H6IFU3|A0A2H6IFU3_9BACT 7-carboxy-7-deazaguanine synthase OS=bacterium BMS3Bbin07; OX = 2005730 GN=queE PE=3 SV=1
MTDGVRLKICETFVSIQGESSYAGQPCFFVRLTGCNLRCHCCDTTYAYSDGKEMAMGEILSGARDSGVGLVEVTGGEPLLQKGTPALIESLCDEGFSVLVETNGSMKIDIIDSRAVVILDIKTPGSGMAAEMFYGNLEILRPHDEIKFVIADRADYVWTKGVIEKFGLAGRNILLSPSFGLLSPEVLVGWIIEDRLNVRLNLQIHKYVFGDRRGV

SEQ ID NO: 28202 - protein, 214 aa, unidentified
  source 1..214: note = Unknown
  REGION 1..214: note = tr|A0A2H6IQ40|A0A2H6IQ40_9BACT 7-carboxy-7-deazaguanine synthase OS=bacterium BMS3Bbin09; OX = 2005732 GN=queE PE=3 SV=1
MLKINEIFKSIQGESTYAGLPCTFVRLAGCNLRCTYCDTNYAYYDGKEITDEDIVAKIDEYGVKCVEFTGGEPMLQEETPKLIKTLLDKGYNVLIETNGSICIGCLDKRLNIIMDYKTPGSNMSERMRPKNFEFLKPTDQIKFVLMNESDYIWAKNIIIENKLTDKFENILMSPAYGELSPKSLVEWILKDGLQVRVQLQIHKYIWAPDEREGV

SEQ ID NO: 28203 - protein, 210 aa, unidentified
  source 1..210: note = Unknown
  REGION 1..210: note = tr|A0A2H6IXH2|A0A2H6IXH2_9BACT 7-carboxy-7-deazaguanine synthase OS=bacterium BMS3Bbin10; OX = 2005733 GN=queE PE=3 SV=1
MYTIKEIYLTLQGEGVQTGRRAVFCRFTGCNLWSGLERDRAAAICRFCDTDFLGADGPGGGKFRAGEDVARACMDQWRGANGEQPLVVLTGGEPMLQVDEALIAALHASGFEIAIETNGTLPVPRSIDWICVSPKAGAELVQKSGDELKLVYPQDGIAPGDVAGLDFGNFLLQPMDGGAARENTQAALAHCVKNPQWRLSLQTHKLMGIA

SEQ ID NO: 28204 - protein, 226 aa, unidentified
  source 1..226: note = Unknown
  REGION 1..226: note = tr|A0A2H6J8V5|A0A2H6J8V5_9BACT 7-carboxy-7-deazaguanine synthase OS=bacterium BMS3Bbin12; OX = 2005735 GN=queE PE=3 SV=1
MDTAPPPRGTARVMPGLRITEIFLSLQGETRTAGWPSVFVRLTGCPLRCRYCDTAYAFRGGRWMAIDQILDEVAAYRPRHVTVTGGEPLSQRDCLALLGRLCDAGYEVSLETGGALAVEAVDPRVVRVLDLKTPGSGECRRNRYENLAVLGPQDQVKFVCCDRRDYEWAREQIERYGLPDRCEVLFSPGHGMLAPGLLADWILEDRLDVRLQIQLHKYLWGDVPGR

SEQ ID NO: 28205 - protein, 229 aa, unidentified
  source 1..229: note = Unknown
  REGION 1..229: note = tr|A0A2H6JP25|A0A2H6JP25_9BACT 7-carboxy-7-deazaguanine synthase OS=bacterium BMS3Bbin14; OX = 2005737 GN=queE PE=3 SV=1
MNEKHVTKTHLSISELFYSLQGESTRAGLPCAFIRLAGCNLRCRYCDSKYTWENQGEPRTLTEIGNWLDRYPGVMVELTGGEPLLQEGIYPLLDALLDRGRTVLLETNGSLGIERVPAGVSVILDIKCPDSGMHERTDWQNIALLAARKRKGSGDEIKFVLSSVRDFEWAKAVIDRYQLDRLAVPLLFSPVPELLAATTLAGLILQHRLPVRLQLQLHRLLWPDRDRGV

SEQ ID NO: 28206 - protein, 212 aa, unidentified
  source 1..212: note = Unknown
  REGION 1..212: note = tr|A0A124IKT2|A0A124IKT2_9BACT 7-carboxy-7-deazaguanine synthase OS=bacterium BRH_c32; OX = 1734400 GN=queE PE=3 SV=1
MLKINEIYYSLQGESTKAGLPCVFIRLTYCNLRCTYCDTEYAFYEGSDKSIEGIIEEVAKFNCRLVEVTGGEPLVQSEVHTLMEKLCNLGYEVLIETGGSLSIEKIDKRVKVIMDLKCPSSKMMKKNRYENIEFLKPNDEVKFVIGSREDYDWSKSIIEKYNLIGKCELLFSIVFGELIPLTMADWIIEDNLQVRFQLQMHKYIWKPDERGV

SEQ ID NO: 28207 - protein, 218 aa, unidentified
  source 1..218: note = Unknown
  REGION 1..218: note = tr|A0A2M7YWA5|A0A2M7YWA5_9BACT 7-carboxy-7-deazaguanine synthase OS=bacterium CG_4_9_14_3_um_filter_65_15 OX=1975567 GN=queE PE=3 SV=1
MLMINEIYAAICGESRFSGFPCTLVRLSGCHLRCAWCDSPHSFNGGEPMSAEAILDRVRANGFRTVLVTGGEPLLQKNVVEFLRLLVEDGRTVVLETSGADPSKLVPLAEVPQGVHRIVDVKAPGSGIDPDLIDWEGIALLGAGDEVKIVVAGREDFAWVKQLLQSGRLPATVRVSLSPAAALVDPARLAEWILADGLDVALQIQLHKALWPDRERGV

SEQ ID NO: 28208 - protein, 245 aa, unidentified
  source 1..245: note = Unknown
  REGION 1..245: note = tr|A0A3A9B6J1|A0A3A9B6J1_9BACT 7-carboxy-7-deazaguanine synthase OS=bacterium D16-34; OX = 2320120 GN=queE PE=3 SV=1
MNLAVAERFVSINGEGLQAGRLATFIRFCGCNLHCAYCDTRWACEPCFKGEHIDIDCLVDYVVDAGCVCVTLTGGEPLLQPALPQFVKRLLGMKTTDNRAFEIEIETNGALSLETLAHLRQSVPKPCQTPDDQTSNDARGYVSFTMDWKCPSSGMTDYMLHENLAYLTKRDTIKFVVGTQDDLECARRLVQDNNLTVQTNVLLSPVFGGIEPKEIVEYMKRYDLVDVRFQLQLHKFIWPPTQRGV

SEQ ID NO: 28209 - protein, 220 aa, unidentified
  source 1..220: note = Unknown
  REGION 1..220: note = tr|A0A3A8WDH5|A0A3A8WDH5_9BACT 7-carboxy-7-deazaguanine synthase OS=bacterium D16-59; OX = 2320098 GN=queE PE=3 SV=1
MKYKVVEIFESINGEGMKAGELSLFIRFAGCNLCCSYCDTKWANGQDASYTEMGLDEIIEKVQGCQVKNITVTGGEPLLQNGVGTLLQALSDKGFYVEIETNGSIPLQEFAKELPDVVFTMDYKLPGSGMEQQMDTGNFAVLQKKDTVKFVVSDRADLKRAFAVSQEYSLGCKCNILLSPVFGAIEPEEIVTFMKENHWTDARLQVQMHKVIWDPQKRGV

SEQ ID NO: 28210 - protein, 261 aa, unidentified
  source 1..261: note = Unknown
  REGION 1..261: note = tr|A0A3A9BBF4|A0A3A9BBF4_9BACT 7-carboxy-7-deazaguanine synthase OS=bacterium D16-63; OX = 2320119 GN=queE PE=3 SV=1
MGGARGEDGLLDAERHQARHAIAPRAQLFPVVERFVSVNGEGLAAGRPAAFIRFAGCNLWCTYCDTCWANHPLVEVEGWSVEQLVRWVAETGVSAVTLTGGEPLLQPYLPDLVQALLSVSDPRPLRVEVETNGSRDLGPMAHLREAAAEEGLPGTLAFTVDWKTPTAGEAVSAAMERANYELLDGRDAVKFVVGTEEDLAFAEAMADEAGLWDRCAVLVSPVWGMLEPAAIADYLLRRGLDRARLQVQLHKVIWPDADRGV

SEQ ID NO: 28211 - protein, 187 aa, unidentified
  source 1..187: note = Bathymodiolus sp.
  REGION 1..187: note = tr|A0A482Z5T5|A0A482Z5T5_9BACT 7-carboxy-7-deazaguanine synthase OS=bacterium endosymbiont of Bathymodiolus sp. 5 South OX=1181670; GN = queE PE=3 SV=1
MFVRLTGCPLRCSYCDTEYAFKGNNLLSIDVILTEIKKYNTKFVCVTGGEPLAQINCHILLDRLVKENYQVSLETSGSIDIADINPGVSIVMDVKTPSSNESDKNLYDNIEKLELKDQLKFVIGSKADFDWSVALLSKHPTPAEVLFSPVFEAVKPMQLAQWILDGQLNVRLQVQLHKLLWGDEKGK

SEQ ID NO: 28212 - protein, 218 aa, Escarpia laminata
  REGION 1..218: note = tr|A0A497TKB1|A0A497TKB1_9BACT 7-carboxy-7-deazaguanine synthase OS=bacterium endosymbiont of Escarpia laminata OX=1221601 GN=queE PE=3; SV = 1
MATAAPLRLRITEIFHSLQGESRSSGFPTVFVRLTGCPLRCSYCDTEYAFTGGEWWDLPAILSEVEAYQPHYVCVTGGEPLSQKGTFLLLTALCDAGYRVSLETSGALDISQVDRRVSRIVDLKTPGSAESAKNNYANIDLLTANDQMKFVICDEADYLWSCEQLVKYALTERCEVLFSPVHGRQDAAALAEWILRDRLTVRFQLQLHKILWGKQPGC

SEQ ID NO: 28213 - protein, 191 aa, unidentified
  source 1..191: note = Unknown
  REGION 1..191: note = tr|A0A132HTJ8|A0A132HTJ8_9BACT 7-carboxy-7-deazaguanine synthase OS=bacterium F083; OX = 1768114 GN=queE PE=3 SV=1
MRRYRINEIFYSLQGEGAHTGRPAAFVRFSGCNLHCPFCDTDFRLRATLTADEILRQLQPHPARFVVLTGGEPALQADGALVDALHRAGYTIAIETNGTRPLPDGIDWVTLSPKEEGEVVLTRADELKVVYVGQDVERYADAIHAPVYYLQPCAREENGLAVDNREAVVDYCLHHPRWRLSLQTHKILHIR

SEQ ID NO: 28214 - protein, 231 aa, unidentified
  source 1..231: note = Unknown
  REGION 1..231: note = tr|A0A202DQL9|A0A202DQL9_9BACT 7-carboxy-7-deazaguanine synthase OS=bacterium F11; OX = 1932698 GN=queE PE=3 SV=1
MNTAYISEIYPTHQGEGPFTGERQLFVRLAGCPLRCRYCDTPGSLVAKAHEAVDGQKACERILQICCDEMIRTVSLTGGEPLAQVDFLKRLFPFLKRNQLRIYLETAGIHYEALSKVIEYCDVVAMDIKLPSATGQIFWNEHREFLKIGKEKIFVKIVIEKHSPELELKQALSLLKTLDSPPLLVLQQVTPQSSGIEPPSEDQMEEFVRFARALIPRVHVMSQQQKIWAIR

SEQ ID NO: 28215 - protein, 216 aa, unidentified
  source 1..216: note = Unknown
  REGION 1..216: note = tr|A0A2H5VQB7|A0A2H5VQB7_9BACT 7-carboxy-7-deazaguanine synthase OS=bacterium HR08; OX = 2035403 GN=queE PE=3 SV=1
MWVTEIFHSIQGESSYAGLPCTFVRLTGCHLRCVYCDTTYAFFGGERMSVEEVLARVGAFWEEVEGMRLVEVTGGEPLLQKDVYPLTERLCDLGYTVLIETSGSLPIWHLDPRVIRIMDLKTPGSGHAHANLWENIEHLRPRDEVKFVLMDRRDFEWACDIIHRYDLTRRAHVLLSPAHGVLDPKTLAEWILHSRLPVRLQIQLHKYIWGANARGV

SEQ ID NO: 28216 - protein, 210 aa, unidentified
  source 1..210: note = Unknown
  REGION 1..210: note = tr|A0A2H5VTW6|A0A2H5VTW6_9BACT 7-carboxy-7-deazaguanine synthase OS=bacterium HR09; OX = 2035404 GN=queE PE=3 SV=1
MLAGTPSFFIRTSGCNLRCRWCDTPYTSWQPEGRRVSVAELVAAARASGLRHVVITGGEPLLQRELPALCAALKAQGHHITVETAGTLAPEFACDLLSVSPKTANSDPEGVWRERHRRLRENLAPLRLLLQQHPNFQLKFVVQGEQDMPEIVALVERLGVSGERVLLMPEGKTAQEVAQVAPAVARLCLRFGFRFSPRLHLELFGAGRGV

SEQ ID NO: 28217 - protein, 216 aa, unidentified
  source 1..216: note = Unknown
  REGION 1..216: note = tr|A0A2H5W2S7|A0A2H5W2S7_9BACT 7-carboxy-7-deazaguanine synthase OS=bacterium HR10; OX = 2035405 GN=queE PE=3 SV=1
MWVTEIFHSIQGESSYAGLPCTFVRLTGCHLRCVYCDTTYAFFGGERMSVEEVLARVGAFWEEAEGMRLVEVTGGEPLLQKDVYPLTKRLCDLGYTVLIETSGSLPIWHLDPRVIRIMDLKTPGSGHAHANLWENIEHLRPRDEVKFVLMDRRDFEWACDIIRRYDLTRRAHVLMSPAHGVLDPKTLAEWILRSRLPVRLQIQLHKYIWGPDARGV

SEQ ID NO: 28218 - protein, 244 aa, unidentified
  source 1..244: note = Unknown
  REGION 1..244: note = tr|A0A2H5W7C4|A0A2H5W7C4_9BACT 7-carboxy-7-deazaguanine synthase OS=bacterium HR11; OX = 2035406 GN=queE_2 PE=3 SV=1
MRLGYLQVTEIFYSIQGESTWMGLPCIFIRLTGCHLRCVYCDSEHAFYGGVPMSYDEILEAIRRYPCRTVEITGGEPLLQKNVIPLMELLLRQGYRVLLETSGALSIEDVPPPVIKVVDVKCPDSGAFPTFYFPNFRWLAPWDQLKFVIRSWRDFAWAVDFVREMDLIGRWEVLFSPAHEEFPAKALARAILATGLPIRLQVQLHKYIHLAEDERMDPAVWDVLRSRGVVREPISDTRDPVPGT

SEQ ID NO: 28219 - protein, 411 aa, unidentified
  source 1..411: note = Unknown
  REGION 1..411: note = tr|A0A2H5W6K0|A0A2H5W6K0_9BACT 7-carboxy-7-deazaguanine synthase OS=bacterium HR11; OX = 2035406 GN=queE_1 PE=4 SV=1
MTSVTLDHRRLYRLPWTLPDNGISWLEPTSACNIVCVGCYRENLPSSHKPLEVVREEIDTFQRLRKSDCISIAGGEPLLHPQIVEIVREIAARGFKPIINTNGVALTPELLRELKKAGVRGFTFHIDSQQFRAKWRGKNEIELNELRLHYAQMLAEVGGLSCAFNATVYEDNLPYVPDIVEWAARHIDIVHVVVFIAYRQIVPRLMENFEFYAGGRKVDLNPLPYVADGEQNVGIRSTDILAVIRQRFPDFMPCAYLNGTERPDSFKWLLTVRVGARGGKVLGYVGPKFMEFVQTQHHLWRDRYLAYAHPRMLRFGRSGCLLLSPLDRGARSVVTRYLAWALRNPLRLFRPLHFQSVMIIQPVDILEDGRQDMCDGCPDVTVWKGNLVWSCRLEEPKQYGAFVRTVPKCML

SEQ ID NO: 28220 - protein, 218 aa, unidentified
  source 1..218: note = Unknown
  REGION 1..218: note = tr|A0A2H5WJH1|A0A2H5WJH1_9BACT 7-carboxy-7-deazaguanine synthase OS=bacterium HR13; OX = 2035408 GN=queE PE=3 SV=1
MLRSEVRTSTALSINQVYPSVQGEGLLMGKPCLFVRFQGCNLRCPWCDEPSALSFKRANTNLKELLQELQKYPQKHVVLTGGEPFAQPNLHLLVQELLLRGYSVQIETNGTLWNENLREVVSQVHITCSPKGVADWYVHPAVLENAKELKFVVDHEFSYNVIKRREFMPFLEKTLVVLQPEGNKTKFLQKALELQALLLEEGYTVRVIPQMHKLIGLK

SEQ ID NO: 28221 - protein, 235 aa, unidentified
  source 1..235: note = Unknown
  REGION 1..235: note = tr|A0A2H5WWW8|A0A2H5WWW8_9BACT 7-carboxy-7-deazaguanine synthase OS=bacterium HR15; OX = 2035410 GN=queE PE=3 SV=1
MRERRLPIAEIFGPTVQGEGLLAGSLSLFIRFGGCDYRCDWCDTLYAVLPEHRHEWRWLNESEIVHEVQQLAPPPILITLTGGNPAIHRLEQLIERLKIEGYRLACETQGSIACKWFRQLDILVLSPKPPSAGGSTSVAEVQACLQYAPTDTTLKIVVFNREDYLYARALFEAFPQLPAVLQIGTPPTLQTPQELVAHYREQTVCLLRWLHEDRLYRVRLLPQLHRILFEATRGV

SEQ ID NO: 28222 - protein, 272 aa, unidentified
  source 1..272: note = Unknown
  REGION 1..272: note = tr|A0A2H5XG40|A0A2H5XG40_9BACT 7-carboxy-7-deazaguanine synthase OS=bacterium HR17; OX = 2035412 GN=queE PE=3 SV=1
MKTITARLSASTTERQKGNLSELYLSLQGEGLWVGIPMVFVRTTGCHRRCKYCDTEYALVAERTARIWLGWRSGAPHLVVDNPVLVSQVVAWVPQAAGGVTDWVTFTGGEPLLQAEFLAASAAVLKAQGFRILLETEGGLPDRLAKVLPHLDAVAADIKLPSTTGEPLDWDATEHFFRLIAAAPVTACAKIVVTPDIDESEFRCAVDLLTRLHAAADRERLPIALILQPVTPARFVTEPPSRALLLRLAAIARSRLPDIRIVPQVHKLIHLA

SEQ ID NO: 28223 - protein, 233 aa, unidentified
  source 1..233: note = Unknown
  REGION 1..233: note = tr|A0A2H5XGK6|A0A2H5XGK6_9BACT 7-carboxy-7-deazaguanine synthase OS=bacterium HR18; OX = 2035413 GN=queE PE=3 SV=1
MRSYRVKEIWKTLQGEGFFAGRPAVFVRFVGCNLWSGYEQDRERDARRTGADCPRWCDTDFRKEGSRAYTADELVAAMQEVGGPIRFCVLTGGEPLLQLDAALMRALKATGYFVAIETNGTISLRQACTDPKSDQVVPPDWIVCSPKLPEDRLALEYFDELKLVVPDYQPEQYARFARRARPHRVGGHRIPLLWLQPEDGPRLAEARRCAVELALAHPDWRVSVQTHKILGVP

SEQ ID NO: 28224 - protein, 238 aa, unidentified
  source 1..238: note = Unknown
  REGION 1..238: note = tr|A0A2H5XWB2|A0A2H5XWB2_9BACT 7-carboxy-7-deazaguanine synthase OS=bacterium HR20; OX = 2035415 GN=queE PE=3 SV=1
MAKFTQPTSEALEALPRDPSALSLRLSEIFHSIQGEGTRAGMPCTFIRLQGCSLRCAWCDTPYALDHRTPELVLTAAEVLERVEQIGTSFVELTGGEPLEQLGSFRLVQWLCDRGYTVAIETGGHISIEHVDHRAICIVDFKCPDSRMAPLNYVPNFSLLRPQDEVKFVIASRRDYEWARALIEEYKLTEKVVAVLFSPAFGLLEPRVLAEWILADRAQVRLQLQLHKFIWEPSMRGV

SEQ ID NO: 28225 - protein, 234 aa, unidentified
  source 1..234: note = Unknown
  REGION 1..234: note = tr|A0A2H5Y0H1|A0A2H5Y0H1_9BACT 7-carboxy-7-deazaguanine synthase OS=bacterium HR21; OX = 2035416 GN=queE PE=3 SV=1
MVVQPTQEALAAIDPLAERFHVSEIFYSIQGEGSRAGMPCVFVRLQGCKLRCSWCDTPYALDRRRGGQWLCGAEIVQRVRSYGCSFVEFTGGEPLEQWGSFGLMRLLCNEGYTVAVETGGHVSIELLDERVVCIVDVKCPSSRMTPLMYWRNLELVRQHDEVKFVIADRRDYEFACRVVEQYRLAERVAVVLFSPAFGLLAPQQLAEWILHDRLPVRLQLQLHKYIWDPDRRGV

SEQ ID NO: 28226 - protein, 374 aa, unidentified
  source 1..374: note = Unknown
  REGION 1..374: note = tr|A0A2H5Y6K6|A0A2H5Y6K6_9BACT 7-carboxy-7-deazaguanine synthase OS=bacterium HR22; OX = 2035417 GN=queE PE=4 SV=1
MNMVQKRFSKIQRDPQKLACSLCGSSALPVSEVIGVCLRCIRERPQEALPRAREAHSRARQAFGLPADAPHTPGGIRCGLCAWDCTLGEGERGYCGLRMVQNGRLVHLAGTPEKGLLHWYRDPLPTNCVADWVCEGHHRRGDHNLAVFYGSCTFNCLFCQNWHYRELSPQRNPLISAQALADAANQRTFCVCFFGGDPSSQMPHALAAGRLLARKGVRICWETNGTMHPKLLDQAVQLSLETGGCIKFDLKAFDENLHIALTGMSNRRTLENFQRAAGRISERPHPPLVVASTLLIPGYVDAEEVSRIARFIAAIDPEIPYTLLAFAPHFLMSDLPCTSSAQAREAVEAARAAGLTRIRVGNAFLLDMPALWIV

SEQ ID NO: 28227 - protein, 376 aa, unidentified
  source 1..376: note = Unknown
  REGION 1..376: note = tr|A0A2H5YDZ6|A0A2H5YDZ6_9BACT 7-carboxy-7-deazaguanine synthase OS=bacterium HR23; OX = 2035418 GN=queE PE=4 SV=1
MTITVRPAPAKPTPKVNTAEEALRLFRPARPVRPKRPAELGTRLFAYIITQRLKGRRRFPLVTMLEPLEACNLTCEGCGRIREYEPVLHRMLSLEECLQAVEASGAPIVSIAGGEPTMYPHLPELLGELVRRKYFVFCCTNGLLLEKVMQKVPPSKYLCWVLHLDGMEEQHDRSVARRGVWRIAMRAAKTALERGYRVCSNTTLFKGSNAEDLYELFETVTQMGFEGIMLSAGYDFQMVPNQEVFLKRQESIEVFKRILAPDKVRRFRFYNNPLYLSFLRGERWYQCTAWSNPTYTILGWRKPCYPLADSHTQDVNELFSDALWEKYGVGKDPRCANCMMHCGFESATIFGALRNPRDMAAMLYGMLVNRSGIGAS

SEQ ID NO: 28228 - protein, 337 aa, unidentified
  source 1..337: note = Unknown
  REGION 1..337: note = tr|A0A2H5YJW1|A0A2H5YJW1_9BACT 7-carboxy-7-deazaguanine synthase OS=bacterium HR24; OX = 2035419 GN=queE PE=4 SV=1
MPGQPLGLTIKLALYLVKQKLRGRKYFPLTMILEPLEACNLTCTGCGRIREYEPVLDKFMTVEEALRAVEECDPPVVSIAGGEPLMHPQIGEIINALVKQKRYVYLCTNTLLYKRAFKVIPPSKYFAFVVHLDGLRETHDIAVERKGVYDVAIRMIYEARKRGYRVCTNTTLYNGTPPEEYKHLFEMLTDMGVEGMMISPGFAYKEVAHHPIFMQRQEAQNFFRRVFEQCRRGLRFYNNPLYRDFLQGKRHYQCSQWTTPTYTVMGWRKPCYLIADGHAATYQELMTTVQWDRYGWGKDPRCDTCMMHCGFEGSAILQAMERPKEMLELALRSMRGD

SEQ ID NO: 28229 - protein, 246 aa, unidentified
  source 1..246: note = Unknown
  REGION 1..246: note = tr|A0A2H5ZN68|A0A2H5ZN68_9BACT 7-carboxy-7-deazaguanine synthase OS=bacterium HR30; OX = 2035425 GN=queE PE=3 SV=1
MDGYLSEIFVSFQGEGARVGERHLFVRLAGCNLRCRYCDTPDSLERRPLWYYHDPATGQTSVRPNPVSAGELLRLVADLCEQDPSLQMIALTGGEPLLQAKFLREFLVGTKLSLPVLLETNGVLPQQLALVLPSVHVISMDIKLPSNAGERAFWDEHRAFLELAKSRECYVKVLIDWNTSVADVEQAARIVSQVAPQVPLFLQPIVDGEGRFCADSGTLSALFGIARRHHESVRVLPQVHKVLGIP

SEQ ID NO: 28230 - protein, 213 aa, unidentified
  source 1..213: note = Unknown
  REGION 1..213: note = tr|A0A2H6A4L9|A0A2H6A4L9_9BACT 7-carboxy-7-deazaguanine synthase OS=bacterium HR33; OX = 2035428 GN=queE PE=3 SV=1
MSYAVKEIYYTLQGEGAQTGRPAVFLRFAGCNLWSGREEDRESAACRFCDTDFVGTDGPGGGRFATAAELARAVARLWPRAERSPGRPFVVVTGGEPLLQLDGALLDALHGEGFEVAVETNGTLPPPAGIDWLCVSPKAGAPLVVTRGDELKLVYPQEGMDPAQFEGLDFRHFFLQPMDGPDRQRNTELAVRYCLEHPRWRLSLQTHKLLGIP

SEQ ID NO: 28231 - protein, 230 aa, unidentified
  source 1..230: note = Unknown
  REGION 1..230: note = tr|A0A2H6AGJ8|A0A2H6AGJ8_9BACT 7-carboxy-7-deazaguanine synthase OS=bacterium HR36; OX = 2035431 GN=queE PE=3 SV=1
MIRIAEIFHSIQGEGILAGTPSVFVRVSGCNLRCRWCDTEYASWQPEGESRSVAELLREVLGYNCPYVVITGGEPFLFAELTELCQSLHQAGRHITIETAGTIYREVVCDLLSLSPKLSNSTPWYREAGRFAQQHEQRRIQPEVLRRLLARYTEVQLKFVIEEPRDLQEVQELLAQLPPVPRERILLMPQGVTSEELRERGSWLVEACKQHGYRYCPRLHIELFGNRRGV

SEQ ID NO: 28232 - protein, 213 aa, unidentified
  source 1..213: note = Unknown
  REGION 1..213: note = tr|A0A2H6ALR2|A0A2H6ALR2_9BACT 7-carboxy-7-deazaguanine synthase OS=bacterium HR37; OX = 2035432 GN=queE PE=3 SV=1
MKVSEIFFSIQGEGVEIGLPTVFLRLFACDLRCSWCDSMYAVEGRDFKEMTLSDVKRELERFGCKRVCITGGEPLIQKKELEVLVRDLLGEGYSIVLETGGHKEPPPVFWHESCIISMDCKCPSSGMEKKMRFDLFERLRPKDQLKFVIKDEVDYAYAKEVLNRYSIKANIVFQPVYGTSLRWLAEKVINDRLVGVRVLPQLHKVIWGDVRGV

SEQ ID NO: 28233 - protein, 421 aa, unidentified
  source 1..421: note = Unknown
  REGION 1..421: note = tr|A0A2H6ASS8|A0A2H6ASS8_9BACT 7-carboxy-7-deazaguanine synthase OS=bacterium HR39; OX = 2035434 GN=queE PE=4 SV=1
MSPHAAFDRLWIWQEPRIARALAWYRAVATDRLPAKFVIAASVPVDLDPAGADAEALRAALLAGTAALERLRAELRSGRRDDLPPPARPSLLDVAAALAERLASPCLLCRWHCGVERARPDAKPGACRLRWPARVSVAFHHLGEELPIRGVAGSGTVFFASCNMRCAFCQNGDISADCEAGREVGARELATLAFRLRREGCHNVNWVGGEPTLHLHHIAGALRLLGHGFVPDARDLTGVRDLDGDRWSYWEVQPEVGFWRGRFNVPVLWNSNMYLDRRVLDLLRVLVDIWLPDFKFGPGRCAVELARTPRYWETVTGALGTLAEWGEDVLVRHLVMPEHVECCTFPVLDWLAEHMPEVPVNVMDQYHPDMFALPGSPHFLERHRPIARRPWESEIAAAFDHARARGLCWAEVSLEKRRLYA

SEQ ID NO: 28234 - protein, 193 aa, unidentified
  source 1..193: note = Unknown
  REGION 1..193: note = tr|A0A3L8A157|A0A3L8A157_9BACT 7-carboxy-7-deazaguanine synthase OS=bacterium J10(2018); OX = 2320122 GN=queE PE=3 SV=1
MYKINEIFYSIQGEGINAGVPAVFIRFSGCNLSCPFCDTEHGEGNMMTADDIVAEVKKYPARLAVVTGGEPSLFIDDRLVDALHAIGCIIAIETNGTCRLPSGIDHVTLSPKDAFCDGAQPVIDSCDELKVVYCGSNDPSRYDGIKARVRVLQPCDTGDAIRNAELTAAALDYCLKYPMWRLSLQLHKLLDVR

SEQ ID NO: 28235 - protein, 215 aa, unidentified
  source 1..215: note = Unknown
  REGION 1..215: note = tr|A0A202DZD0|A0A202DZD0_9BACT 7-carboxy-7-deazaguanine synthase OS=bacterium K02(2017); OX = 1932696 GN=queE PE=3 SV=1
MTKEQLKINEIFYSIQGESYLSGLPCIFIRLTGCDLRCTYCDTKYAYYDGQFMEFSEIIIKIKEYPCYNVLLTGGEPLLQKNTSKLAQKLIDLGYKVAIETSGNHDISVLPNEVVKIMDLKTPGSGEDKKNDYKNISKLTSKDEIKFVVVNNEDTHWAIKQIKENNLDQRCHVSISPTDHKLHPSIADEVLNSGRKIRHQFQMHKVIWPNREKGY

SEQ ID NO: 28236 - protein, 233 aa, unidentified
  source 1..233: note = Unknown
  REGION 1..233: note = tr|A0A4S1I0V1|A0A4S1I0V1_9BACT 7-carboxy-7-deazaguanine synthase OS=bacterium M00.F.Ca.ET.141.01.1.1 OX=2563898 GN=queE PE=3 SV=1
MTAVTPSNAVATPSDIVQSPLPRLKITEIFTSLQGEADTAGWPTVFVRLTGCPLRCQYCDTAYAFHGGTWWDIDDIVAEVLAQGVRHVCVTGGEPLAQKRCLVLLQKLCDAGMDVSLETSGALDVSAVDPRVSRVVDIKTPGSAEVARNRWENLPLLTARDQIKFVICSREDYDWAKALLAEHDLVKRCTVFFSPSKSEITARQLADWIVEDRLPVRFQMQLHKILWNDEPGR

SEQ ID NO: 28237 - protein, 244 aa, unidentified
  source 1..244: note = Unknown
  REGION 1..244: note = tr|A0A4S1HSN7|A0A4S1HSN7_9BACT 7-carboxy-7-deazaguanine synthase OS=bacterium M00.F.Ca.ET.141.01.1.1 OX=2563898 GN=queE PE=3 SV=1
MTDMHPAIRVSEIFGPTIQGEGVLIGLPTVFIRTGGCDYRCSWCDSLHAVDNQYRHEWLPMPIDAVWQTVHALSGGRPVMVSLSGGNPAIQPFGPLIERGHREGYRFALETQGSVVREWFADLDVLTLSPKPPSSEMTTRWAAFDACLEAAQEKPQIVLKLVVFDESDYAYAKEVAARYPHLPIYLQPGNHTPPRPGSEDASVDLDGIMMRMEWLVERVTSDRWFEARVLPQLHVLLWGNKRAV

SEQ ID NO: 28238 - protein, 244 aa, unidentified
  source 1..244: note = Unknown
  REGION 1..244: note = tr|A0A4S1AP97|A0A4S1AP97_9BACT 7-carboxy-7-deazaguanine synthase OS=bacterium M00.F.Ca.ET.146.01.1.1 OX=2563899 GN=queE PE=3 SV=1
MTDMHPAIRVSEIFGPTIQGEGVLIGLPTVFIRTGGCDYRCSWCDSLHAVDNQYRHEWLPMPIDAVWQTVHALSGGRPVMVSLSGGNPAIQPFGPLIERGHREGYRFALETQGSVVREWFADLDVLTLSPKPPSSEMTTRWTAFDACLEAAQEKPQIVLKLVVFDESDYAYAKEVAARYPHLPIYLQPGNHTPPRPGSEDASVDLDGIMMRMEWLVERVTSDRWFEARVLPQLHVLLWGNKRAV

SEQ ID NO: 28239 - protein, 244 aa, unidentified; identical to SEQ ID NO: 28237
  source 1..244: note = Unknown
  REGION 1..244: note = tr|A0A4S1AYB6|A0A4S1AYB6_9BACT 7-carboxy-7-deazaguanine synthase OS=bacterium M00.F.Ca.ET.152.01.1.1 OX=2563900 GN=queE PE=3 SV=1

SEQ ID NO: 28240 - protein, 210 aa, unidentified
  source 1..210: note = Unknown
  REGION 1..210: note = tr|A0A4S0YPW0|A0A4S0YPW0_9BACT 7-carboxy-7-deazaguanine synthase OS=bacterium M00.F.Ca.ET.155.01.1.1 OX=2563901 GN=queE PE=3 SV=1
MTYAVKEIFYTLQGEGANAGRPAVFCRFAGCNLWSGREEDRAEAVCRFCDTDFVGTDGENGGKYRSAEELVQMIASQWPQGEGQRFVVCTGGEPMLQIDQPLVDALHAAGFEIAIETNGSLPVLETIDWICVSPKADAPLVVTKGNELKVVIPQDNQRLSDYAKLDFQYFLVQPMDGPSRDINTRLATDWCKRHPQWRLSMQTHKYLNIP

SEQ ID NO: 28241 - protein, 244 aa, unidentified; identical to SEQ ID NO: 28237
  source 1..244: note = Unknown
  REGION 1..244: note = tr|A0A4V3NNJ7|A0A4V3NNJ7_9BACT 7-carboxy-7-deazaguanine synthase OS=bacterium M00.F.Ca.ET.156.01.1.1 OX=2563902 GN=queE PE=3 SV=1

SEQ ID NO: 28242 - protein, 244 aa, unidentified
  source 1..244: note = Unknown
  REGION 1..244: note = tr|A0A4S0WN93|A0A4S0WN93_9BACT 7-carboxy-7-deazaguanine synthase OS=bacterium M00.F.Ca.ET.157.01.1.1 OX=2563903 GN=queE PE=3 SV=1
MTDMHPAIRVSEIFGPTIQGECVLIGLPTVFIRTGGCDYRCSWCDSLHAVDNQYRHEWLPMPIDAVWQTVHALSGGRPVMVSLSGGNPAIQPFGPLIERGHREGYRFALETQGSVVREWFADLDVLTLSPKPPSSEMTTRWAAFDACLEAAQEKPQIVLKLVVFDESDYAYAKEVAARYPHLPIYLQPGNHTPPRPGSEDASVDLDGIMMRMEWLVERVTSDRWFEARVLPQLHVLLWGNKRAV

SEQ ID NO: 28243 - protein, 244 aa, unidentified; identical to SEQ ID NO: 28242
  source 1..244: note = Unknown
  REGION 1..244: note = tr|A0A4S0VLM4|A0A4S0VLM4_9BACT 7-carboxy-7-deazaguanine synthase OS=bacterium M00.F.Ca.ET.159.01.1.1 OX=2563904 GN=queE PE=3 SV=1

SEQ ID NO: 28244 - protein, 244 aa, unidentified; identical to SEQ ID NO: 28237
  source 1..244: note = Unknown
  REGION 1..244: note = tr|A0A4S2JRA6|A0A4S2JRA6_9BACT 7-carboxy-7-deazaguanine synthase OS=bacterium M00.F.Ca.ET.162.01.1.1 OX=2563905 GN=queE PE=3 SV=1

SEQ ID NO: 28245 - protein, 233 aa, unidentified; identical to SEQ ID NO: 28236
  source 1..233: note = Unknown
  REGION 1..233: note = tr|A0A4S0ZD08|A0A4S0ZD08_9BACT 7-carboxy-7-deazaguanine synthase OS=bacterium M00.F.Ca.ET.163.01.1.1 OX=2563906 GN=queE PE=3 SV=1

SEQ ID NO: 28246 - protein, 244 aa, unidentified; identical to SEQ ID NO: 28238
  source 1..244: note = Unknown
  REGION 1..244: note = tr|A0A4S0YHG2|A0A4S0YHG2_9BACT 7-carboxy-7-deazaguanine synthase OS=bacterium M00.F.Ca.ET.163.01.1.1 OX=2563906 GN=queE PE=3 SV=1

SEQ ID NO: 28247 - protein, 210 aa, unidentified
  source 1..210: note = Unknown
  REGION 1..210: note = tr|A0A4S1HCU6|A0A4S1HCU6_9BACT 7-carboxy-7-deazaguanine synthase OS=bacterium M00.F.Ca.ET.168.01.1.1 OX=2563907 GN=queE PE=3 SV=1
MGYAVKEMFKTLQGEGAQAGRAAVFCRFAGCNLWSGREEDRDQAVCQFCDTDFVGTDGLGGAKFKDAETLAIAIASTWGDTTHRRYVVFTGGEPLLQFDDELVAAVHEQGFEIAIETNGTLEPPAGIDWICVSPKAGAPLKLREGSELKLVYPQPDLLPEALPDLHFQHYFLQPMDGPKRAENTIAVTEYCLEHPKWRLSLQTHKMIGIP

SEQ ID NO: 28248 - protein, 251 aa, unidentified
  source 1..251: note = Unknown
  REGION 1..251: note = tr|A0A4S1HC08|A0A4S1HC08_9BACT 7-carboxy-7-deazaguanine synthase OS=bacterium M00.F.Ca.ET.168.01.1.1 OX=2563907 GN=queE PE=3 SV=1
MTAARQKSAAKDTTIRISEIFGPTIQGEGLLIGLPTVFVRTGGCDYRCSWCDTLHAVDSDYRDTWKPMPVDAIWQEVRRLSGGVPLTVSLSGGNPAIQPLGSLIAKGHGEGYRFALETQGSIAKDWFADLDHLVLSPKPPSSGMGTDWHAFEDCLAAAGEGPQVALKIVVFDDADYAYAKAASARFPYLPVYLQPGNHTPPPPDDDDARVDIDGVMERMLWLVDKVSEDRWFSARVLPQLHVLLWGNKRGV

SEQ ID NO: 28249 - protein, 244 aa, unidentified; identical to SEQ ID NO: 28237
  source 1..244: note = Unknown
  REGION 1..244: note = tr|A0A4V3MRR8|A0A4V3MRR8_9BACT 7-carboxy-7-deazaguanine synthase OS=bacterium M00.F.Ca.ET.177.01.1.1 OX=2563908 GN=queE PE=3 SV=1

SEQ ID NO: 28250 - protein, 233 aa, unidentified; identical to SEQ ID NO: 28236
  source 1..233: note = Unknown
  REGION 1..233: note = tr|A0A4S0R9N6|A0A4S0R9N6_9BACT 7-carboxy-7-deazaguanine synthase OS=bacterium M00.F.Ca.ET.177.01.1.1 OX=2563908 GN=queE PE=3 SV=1

SEQ ID NO: 28251 - protein, 251 aa, unidentified; identical to SEQ ID NO: 28248
  source 1..251: note = Unknown
  REGION 1..251: note = tr|A0A4V3MIK5|A0A4V3MIK5_9BACT 7-carboxy-7-deazaguanine synthase OS=bacterium M00.F.Ca.ET.179.01.1.1 OX=2563909 GN=queE PE=3 SV=1

SEQ ID NO: 28252 - protein, 210 aa, unidentified; identical to SEQ ID NO: 28247
  source 1..210: note = Unknown
  REGION 1..210: note = tr|A0A4V3MJD1|A0A4V3MJD1_9BACT 7-carboxy-7-deazaguanine synthase OS=bacterium M00.F.Ca.ET.179.01.1.1 OX=2563909 GN=queE PE=3 SV=1

SEQ ID NO: 28253 - protein, 117 aa, unidentified
  source 1..117: note = Unknown
  REGION 1..117: note = tr|A0A4V3ME80|A0A4V3ME80_9BACT 7-carboxy-7-deazaguanine synthase QueE (Fragment); OS = bacterium M00.F.Ca.ET.180.01.1.1 OX=2563910; GN = EN823_14165 PE=4 SV=1
WCDSLHAVDNQYRHEWLPMPIDAVWQTVHALSGGRPVMVSLSGGNPAIQPFGPLIERGHREGYRFALETQGSVVREWFADLDVLTLSPKPPSSEMTTRWAAFDACLEAAQEKPQIVL

SEQ ID NO: 28254 - protein, 238 aa, unidentified
  source 1..238: note = Unknown
  REGION 1..238: note = tr|A0A4S0LPW2|A0A4S0LPW2_9BACT 7-carboxy-7-deazaguanine synthase OS=bacterium M00.F.Ca.ET.180.01.1.1 OX=2563910 GN=queE PE=3 SV=1
MSKIPVLEIFGPTIQGEGRVIGRKTMFVRTAGCDYRCSWCDSSFTWDGSAKEDIRMMDATEIYEKLYDIAGESFNHVTISGGNPALIKGIQGLVDLFEEKGIQSALETQGSKFQPWMTQIDDLTISPKPPSSMMKPNLPILDDVIAKCKPETLNLKVVIFDDDDFEFAKMIHHRYPNVPFYLQVGNPYLDGEYVESHTEKLLSLYEALVNRVMDSSDMNNVYVLPQLHTLLWSNKKGV

SEQ ID NO: 28255 - protein, 100 aa, unidentified
  source 1..100: note = Unknown
  REGION 1..100: note = tr|A0A4V3M3D4|A0A4V3M3D4_9BACT 7-carboxy-7-deazaguanine synthase QueE (Fragment); OS = bacterium M00.F.Ca.ET.191.01.1.1 OX=2563911; GN = EN834_33395 PE=4 SV=1
MTDMHPAIRVSEIFGPTIQGEGVLIGLTTVFIRTGGCDYRCSWCDSLHAVDNQYRHEWLPMPIDAVWQTVHALSGGRPVMVSLSGGNPAIQPFGPLIERG

SEQ ID NO: 28256 - protein, 210 aa, unidentified; identical to SEQ ID NO: 28240
  source 1..210: note = Unknown
  REGION 1..210: note = tr|A0A4V3M5E2|A0A4V3M5E2_9BACT 7-carboxy-7-deazaguanine synthase OS=bacterium M00.F.Ca.ET.191.01.1.1 OX=2563911 GN=queE PE=3 SV=1

SEQ ID NO: 28257 - protein, 210 aa, unidentified; identical to SEQ ID NO: 28247
  source 1..210: note = Unknown
  REGION 1..210: note = tr|A0A4S0GTS9|A0A4S0GTS9_9BACT 7-carboxy-7-deazaguanine synthase OS=bacterium M00.F.Ca.ET.194.01.1.1 OX=2563912 GN=queE PE=3 SV=1

SEQ ID NO: 28258 - protein, 251 aa, unidentified; identical to SEQ ID NO: 28248
  source 1..251: note = Unknown
  REGION 1..251: note = tr|A0A4S0GJM4|A0A4S0GJM4_9BACT 7-carboxy-7-deazaguanine synthase OS=bacterium M00.F.Ca.ET.194.01.1.1 OX=2563912 GN=queE PE=3 SV=1

SEQ ID NO: 28259 - protein, 244 aa, unidentified; identical to SEQ ID NO: 28237
  source 1..244: note = Unknown
  REGION 1..244: note = tr|A0A4S0E8N6|A0A4S0E8N6_9BACT 7-carboxy-7-deazaguanine synthase OS=bacterium M00.F.Ca.ET.199.01.1.1 OX=2563913 GN=queE PE=3 SV=1

SEQ ID NO: 28260 - protein, 233 aa, unidentified; identical to SEQ ID NO: 28236
  source 1..233: note = Unknown
  REGION 1..233: note = tr|A0A4S0FI04|A0A4S0FI04_9BACT 7-carboxy-7-deazaguanine synthase OS=bacterium M00.F.Ca.ET.199.01.1.1 OX=2563913 GN=queE PE=3 SV=1

SEQ ID NO: 28261 - protein, 244 aa, unidentified; identical to SEQ ID NO: 28237
  source 1..244: note = Unknown
  REGION 1..244: note = tr|A0A4R9YVF1|A0A4R9YVF1_9BACT 7-carboxy-7-deazaguanine synthase OS=bacterium M00.F.Ca.ET.205.01.1.1 OX=2563914 GN=queE PE=3 SV=1

SEQ ID NO: 28262 - protein, 244 aa, unidentified; identical to SEQ ID NO: 28242
  source 1..244: note = Unknown
  REGION 1..244: note = tr|A0A4R9TZ36|A0A4R9TZ36_9BACT 7-carboxy-7-deazaguanine synthase OS=bacterium M00.F.Ca.ET.221.01.1.1 OX=2563915 GN=queE PE=3 SV=1

SEQ ID NO: 28263 - protein, 244 aa, unidentified; identical to SEQ ID NO: 28242
  source 1..244: note = Unknown
  REGION 1..244: note = tr|A0A4R9U392|A0A4R9U392_9BACT 7-carboxy-7-deazaguanine synthase OS=bacterium M00.F.Ca.ET.222.01.1.1 OX=2563916 GN=queE PE=3 SV=1

SEQ ID NO: 28264 - protein, 244 aa, unidentified; identical to SEQ ID NO: 28238
  source 1..244: note = Unknown
  REGION 1..244: note = tr|A0A4V3KJH0|A0A4V3KJH0_9BACT 7-carboxy-7-deazaguanine synthase OS=bacterium M00.F.Ca.ET.227.01.1.1 OX=2563917 GN=queE PE=3 SV=1

SEQ ID NO: 28265 - protein, 210 aa, unidentified; identical to SEQ ID NO: 28240
  source 1..210: note = Unknown
  REGION 1..210: note = tr|A0A4R9RI26|A0A4R9RI26_9BACT 7-carboxy-7-deazaguanine synthase OS=bacterium M00.F.Ca.ET.228.01.1.1 OX=2563918 GN=queE PE=3 SV=1

SEQ ID NO: 28266 - protein, 238 aa, unidentified; identical to SEQ ID NO: 28254
  source 1..238: note = Unknown
  REGION 1..238: note = tr|A0A4R9SCT9|A0A4R9SCT9_9BACT 7-carboxy-7-deazaguanine synthase OS=bacterium M00.F.Ca.ET.229.01.1.1 OX=2563919 GN=queE PE=3 SV=1

SEQ ID NO: 28267 - protein, 240 aa, unidentified
  source 1..240: note = Unknown
  REGION 1..240: note = tr|A0A4V3KEL9|A0A4V3KEL9_9BACT 7-carboxy-7-deazaguanine synthase OS=bacterium M00.F.Ca.ET.230.01.1.1 OX=2563920 GN=queE PE=3 SV=1
MPNSTLPIRNTAIPTTDPEAGLKVTEIFYSLQGEALTAGLPTIFIRLTGCPLRCVYCDTEYAFVGGERMSLAGILAVCQSFPCQRICLTGGEPLAQPNAIALMNLLLAHGYEISLETSGALSVAEVPTAVSKVMDIKTPSSQEADKNLWQNLPYLTAHDQIKFVIMNRDDYDWSKQILADYQLDKKVATVWFSPMFNVEERQTNIPTLATDLAEWILADALPVRFQLQLHKIIWADAKGK

SEQ ID NO: 28268 - protein, 244 aa, unidentified; identical to SEQ ID NO: 28242
  source 1..244: note = Unknown
  REGION 1..244: note = tr|A0A4R9RN72|A0A4R9RN72_9BACT 7-carboxy-7-deazaguanine synthase OS=bacterium M00.F.Ca.ET.230.01.1.1 OX=2563920 GN=queE PE=3 SV=1

SEQ ID NO: 28269 - protein, 208 aa, unidentified
  source 1..208: note = Unknown
  REGION 1..208: note = tr|A0A5J4E217|A0A5J4E217_9BACT 7-carboxy-7-deazaguanine synthase OS=bacterium MnTg02; OX = 2080452 GN=queE PE=4 SV=1
MYFVKEIYRTLQGEGANTGRAAVFCRFAGCNLWSGVEADREKAVCQFCDTDFVGTDGPGGGRFESAEALAEACTKVWGANDNPFIVLTGGEPMLQVDLSLIDALHNQDFEIAIESNGTLPVPRTIDWICVSPKAGAQLVQTSGDELKLVYPQAGAEPDRFRDLDFRHFFLQPMDCAERDRNTKSVIAYCQTHPQWRLSLQTHKLIGIP

SEQ ID NO: 28270 - protein, 224 aa, unidentified
  source 1..224: note = Unknown
  REGION 1..224: note = tr|A0A5J4EB78|A0A5J4EB78_9BACT 7-carboxy-7-deazaguanine synthase OS=bacterium MnTg04; OX = 2080454 GN=queE PE=4 SV=1
MADPARDDLAPDSRLRITEIFYSLQGEADTTGAPTVFIRLTGCPLRCQYCDTAYAFHGGRWMDFAAVSEKVREYRCRHVCVTGGEPLAQKNCAGLLRDLCDSGYRVSLETSGAADLSVVDPRVVKVMDLKTPGSGEVDRNLWQNLDLLSTDDQIKFVICSRADFEWAGEQVRQRQLDGICTVWFSPSYEQIKPVDIADWILQDKLPVRLQLQLHKYLWGTGPGH

SEQ ID NO: 28271 - protein, 196 aa, unidentified
  source 1..196: note = Unknown
  REGION 1..196: note = tr|A0A132GU66|A0A132GU66_9BACT 7-carboxy-7-deazaguanine synthase OS=bacterium P201; OX = 1768112 GN=queE PE=3 SV=1
MYKINEIFYSLQGEGFYTGTPAVFVRFSGCNLHCAFCDTQHQEGEMMSLQEIVDKVNKYPIAPLIVLTGGEPSLFIDEAFVAELKQKTKKKITIETNGTRPLPTNLDWVTLSPKTAFEGGDLEPCVLKQCDELKVVYLGQDLAQYDDIEAKHRFLQPCFCEDEMLCKANMKACVEAVMQNPGWRLSLQIHRILNIR

SEQ ID NO: 28272 - protein, 210 aa, unidentified
  source 1..210: note = Unknown
  REGION 1..210: note = tr|A0A4V1RJA7|A0A4V1RJA7_9BACT 7-carboxy-7-deazaguanine synthase OS=bacterium RmlP001; OX = 2316527 GN=queE PE=3 SV=1
MSYAVKEIFYTLQGEGRQAGRAAVFCRFAGCNLWSGREADRATAACSFCDTDFVGLDGPGGGRFASAAALADAVAAAWTGAPEKRLTVLTGGEPLLQVDEALVAALQARGFEVAVETNGTLAPPPGLDWICVSPKGAAPLTLDAGDELKLVYPQPAAMPERFEDLPFANFILQPMDGPDQAANTAAAVRYCMAHPRWRLGLQTHKVLGIA

SEQ ID NO: 28273 - protein, 210 aa, unidentified
  source 1..210: note = Unknown
  REGION 1..210: note = tr|A0A4Q2U435|A0A4Q2U435_9BACT 7-carboxy-7-deazaguanine synthase OS=bacterium RmlP026; OX = 2316528 GN=queE PE=3 SV=1
MSYAVKEIFYTLQGEGRQAGRAAVFCRFAGCNLWSGREADRASAACTFCDTDFVGLDGPGGGRFADADALASAVAAAWTGAPDNRLTVLTGGEPLLQVDEALTAALHARGFEIAVETNGTIAPPPGLDWLCVSPKGDAPLAVERGDELKLVFPQPRALPERFAHLGFGHFILQPMDGPEAAANTEAAVRYCMANPRWRLGLQTHKFLGIA

SEQ ID NO: 28274 - protein, 236 aa, unidentified
  source 1..236: note = Unknown
  REGION 1..236: note = tr|A0A177Q227|A0A177Q227_9BACT 7-carboxy-7-deazaguanine synthase OS=bacterium SCGC AG-212-C10 OX=1799370 GN=queE PE=3 SV=1
MNTLLLSRMADGEPEIFASVQGEGLSAGLPSTFVRTAICNLRCSWCDTAYTWDWSRYDRAEQVLAIDPDEVLRRVRALPPRNVVITGGEPLIQRRQLAALVSALKDDGYRVEFETNGTIAPGELTPLADQWNVSAKLAHSGNEGLQRRRPGALAAFAALSHANFKFVVRAMGDLEELEALAVEYQIQADRIVLMPEGRTAAELREKSTWLAETCTQRGYRFSSRLHILIWGDKRGV

SEQ ID NO: 28275 - protein, 210 aa, unidentified
  source 1..210: note = Unknown
  REGION 1..210: note = tr|A0A3R7WMW9|A0A3R7WMW9_9BACT 7-carboxy-7-deazaguanine synthase OS=bacterium TMED144; OX = 1986778 GN=queE PE=3 SV=1
  VARIANT 56: note = Xaa can be any naturally occurring amino acid
  VARIANT 65: note = Xaa can be any naturally occurring amino acid
  VARIANT 71: note = Xaa can be any naturally occurring amino acid
  VARIANT 175: note = Xaa can be any naturally occurring amino acid
MYLVKEIYYTIQGEGYHVGRPAVFLRFSGCNLWSGHEKDRKNAICKFCDTDFIGTXGDGGGKFEXPKKLAXSIKKFWPKNSKTRPFVVCTGGEPLLQLNNELIMEIRKVGFEIAIETNGTISLPNNLDWVCVSPKANTKLIVTEGDELKLVYPQIGSTPEDYKQLKFDHFYLQPXDNVNKVENIKKTLRYCFKNPHWKISIQTHKFLNIP

SEQ ID NO: 28276 - protein, 226 aa, unidentified
  source 1..226: note = Unknown
  REGION 1..226: note = tr|A0A1Z8MJM1|A0A1Z8MJM1_9BACT 7-carboxy-7-deazaguanine synthase OS=bacterium TMED15; OX = 1986651 GN=queE PE=3 SV=1
  VARIANT 8: note = Xaa can be any naturally occurring amino acid
  VARIANT 16: note = Xaa can be any naturally occurring amino acid
  VARIANT 137: note = Xaa can be any naturally occurring amino acid
  VARIANT 195: note = Xaa can be any naturally occurring amino acid
  VARIANT 207: note = Xaa can be any naturally occurring amino acid
MKYSEIFXSIQGEGQXIGYPSVFFRTSYCNLRCIWCDTPYTSWEPEDKDISVEDAVDAILAHNCKQVVITGGEPFMQPKDLTILCHRLRQNGKHITIETNGTLFERVEADLLSISPKLENSNPSEFNHHFKQHQRNXINQEVLRQFLDYYNCQLKFVVETERDLFEIHQLETEMQIPTSIIVLMPQGITNDQIQXRQNWVVETCKKXGYRYSPRLHVDIWGDTRGT

SEQ ID NO: 28277 - protein, 212 aa, unidentified
  source 1..212: note = Unknown
  REGION 1..212: note = tr|A0A1Z9IPV7|A0A1Z9IPV7_9BACT 7-carboxy-7-deazaguanine synthase OS=bacterium TMED161; OX = 1986652 GN=queE PE=3 SV=1
MLRINEIFKSIQGESTAMGMPCAFVRLTYCNLRCSYCDTEYSFHEGNDMKIIDIIEEVKSMNTNLVEITGGEPMLQKNVIPLMKEFLNNDFEVMLETCGAISLKDVPKKVKKIVDFKCPSSNMKDKNLWSIIDELSPHDEIKFVIGDRADYKWTLNKINQYNLDSKWTILFSPVFDKLKLDQLANWILEDNLNVRLQLQMHKYIWDPEMRAV

SEQ ID NO: 28278 - protein, 209 aa, unidentified
  source 1..209: note = Unknown
  REGION 1..209: note = tr|A0A1Z9KS43|A0A1Z9KS43_9BACT 7-carboxy-7-deazaguanine synthase OS=bacterium TMED181; OX = 1986654 GN=queE PE=3 SV=1
MRVVEIYPSIQGESTRAGIPCVFIRLAGCPLRCRWCDTVYSFKGGDEMSLEEICNAAAAPGIGLVELTGGEPLAHAEAPELLKMLCDRFEEVLLETSGAYPVEDLDPRIGVIMDMKAPGSGEESRNLLKNIDHLKAGDELKLVLADREDYLWAKKLIESHPIEVPILFSPVHGELDAALLSEWILEDRLQVRLHLQQHKFIWDPQERGR

SEQ ID NO: 28279 - protein, 213 aa, unidentified
  source 1..213: note = Unknown
  REGION 1..213: note = tr|A0A1Z9LY58|A0A1Z9LY58_9BACT 7-carboxy-7-deazaguanine synthase OS=bacterium TMED198; OX = 1986779 GN=queE PE=3 SV=1
MSLKVNEIFYSIQGESTYSGMPCVFVRLTYCNLRCSYCDTEYAFYEGSNFTVEQILEKVSKYGCDLVEVTGGEPLLQNESIDLMNELLSNGYKVLLETGGSLPLNKVPKQVIKIVDFKTPGSLMSKKNLWSIIDDLQPWDEIKFVITNKDDYLWAKMKIKDLNLTNSWTVLLSPTHGTLELEKLSKWVLEDQLKVKVQVQLHKYIWHPDKKGV

SEQ ID NO: 28280 - protein, 210 aa, unidentified
  source 1..210: note = Unknown
  REGION 1..210: note = tr|A0A1Z9RV78|A0A1Z9RV78_9BACT 7-carboxy-7-deazaguanine synthase OS=bacterium TMED250; OX = 1986657 GN=queE PE=3 SV=1
MYTIKEIYYTIQGEGFHTGRSAVFVRFTGCNLWTGHEKDRENAICNFCDTDFIGTDGPGGGRFQTPDDLVENILSKWPSRSIEQRFVVFTGGEPLLQMNEELINVLHFNKFEIAIETNGTVNAPKNIDWVCVSPKAGSDLIITKGNELKLVYPQHGIDPSQYENLNFDHFSLQPMDNESLNENIQKTIKYCHEHPLWRLSLQTHKFVGIP

SEQ ID NO: 28281 - protein, 210 aa, unidentified
  source 1..210: note = Unknown
  REGION 1..210: note = tr|A0A424SHH1|A0A424SHH1_9BACT 7-carboxy-7-deazaguanine synthase OS=bacterium TMED46; OX = 1986782 GN=queE PE=3 SV=1
MNYSVKEIYYTLQGEGYHTGRPAVFIRFSGCNLWTGHEKDRSGAICNWCDTDFVGTNGINGGKFSAEEITNIINSLWKGNVQTEPYVICTGGEPLLQMDESLIKAIHKAGFEIGLETNGTMIPPDGIDWICVSPKANADLVLKNGNELKVVYPQCGMNPRMHEKLKFDHFYIQPMDGVDQKINIKRSEKFVLDHPKWKLSLQTHKILGIP

SEQ ID NO: 28282 - protein, 210 aa, unidentified
  source 1..210: note = Unknown
  REGION 1..210: note = tr|A0A1Z8KNS0|A0A1Z8KNS0_9BACT 7-carboxy-7-deazaguanine synthase OS=bacterium TMED6; OX = 1986783 GN=queE PE=3 SV=1
MKINEIFYSIQGESSMSGMPCIFIRLTYCNLRCSYCDTEYSFHEGKDMSIDDILKKIKNYNCKLVEVTGGEPLLQKESIDLMTILLNDNYKVMLETGGSLPIKNVPKDVIKIVDFKCPSSNMHKKNDWNILKDLQKHDEIKFVIGNYEDYEWTKNKINSYNLNTKRILLSPVHDVLKSKDLSEWILKDGINARLQLQLHKYIWSPDTKGV

SEQ ID NO: 28283 - protein, 211 aa, unidentified
  source 1..211: note = Unknown
  REGION 1..211: note = tr|A0A1Z8YZK2|A0A1Z8YZK2_9BACT 7-carboxy-7-deazaguanine synthase OS=bacterium TMED80; OX = 1986784 GN=queE PE=3 SV=1
MTRYSIKEIYLTKQGEGHHTGRPAIFIRFSGCNLWSGLEKDRKKAICNWCDTDFVGTNGINGGHYDIEKIINIILKLWEPTIKEEPYIVCTGGEPLLQLDQDFVDKVHLAGFKIGIETNGTKIPPRNIDWICVSPKKNSKIILIKGDELKFVYPQSGFDPLQFENLNFNFFFIQPMDNNNYDENKMMSENFVKNNPFWKLSLQTHKILGFP

SEQ ID NO: 28284 - protein, 257 aa, unidentified
  source 1..257: note = Unknown
  REGION 1..257: note = tr|A0A1Z9BBI4|A0A1Z9BBI4_9BACT 7-carboxy-7-deazaguanine synthase OS=bacterium TMED88; OX = 1986661 GN=queE PE=3 SV=1
MSVPAGNVVEVFWSAQGEGPFVGSPTVFVRFGGCDLRCRWCDTPHTWTPADQCRFQDPTGGPDQVEQNPVSFERVLTAISDLSPQAGDFVSLTGGEPLLQVDWVSALARAVRGDGLRAHLETHGLAVDGLKRLGSRLDVISMDWKSPADVRSAVPDRYPHFAQAHRDFLRSAKDVADSVYVKWVISDRTSVSDLEQVCEMIDEVDPETPLILQPVTPAGGVRAGLEAPVVLNWLRSARERLCDVRLIPQTHPLIGVR

SEQ ID NO: 28285 - protein, 207 aa, unidentified
  source 1..207: note = Bacteroidales bacterium
  REGION 1..207: note = tr|U5Q5K4|U5Q5K4_9BACT 7-carboxy-7-deazaguanine synthase OS=Bacteroidales bacterium CF OX=1400053 GN=queE; PE = 3 SV=1
MKFPELKEGELLPLAEAFYTIQGEGYHSGKPAYFIRLGGCDVGCSWCDAKETWNPRLYPPTPVSEIVNEALKYPAKAIVITGGEPLTYPLDRLCILLKNEGFEIFLETSGSKSISGRFDWICLSPKKKKPPVNGMHQLASELKVIIETEDDLLWAEQNRLLVRNNCFLYLQPEWSKSKLILPVIIDYVKRNPIWNISLQTHKYMNIP

SEQ ID NO: 28286 - protein, 199 aa, unidentified
  source 1..199: note = Bacteroidales bacterium
  REGION 1..199: note = tr|A0A4S4H5U8|A0A4S4H5U8_9BACT 7-carboxy-7-deazaguanine synthase OS=Bacteroidales bacterium OX=2030927 GN=queE PE=3 SV=1
MRKINEIFYSLQGEGAHTGKAAVFVRFSGCNLRCSFCDTEHQSGVEMTDEAIAEEVACYPGEWIILTGGEPSLWIDSEFVSMLKRVTGKRVAIETNGSREVPDEIDWVTVSPKTGMSGAGEYEMRVSRADELKVVDVGQDLEPYFSLPFVTPATEMYLQPCYVGDEEKSLRLREATVRRVMHDPRWTLSLQTHRFLGIR

SEQ ID NO: 28287 - protein, 181 aa, Bacteroides acidifaciens
  REGION 1..181: note = tr|A0A3L7Z0I2|A0A3L7Z0I2_9BACE 7-carboxy-7-deazaguanine synthase OS=Bacteroides acidifaciens OX=85831 GN=queE PE=3 SV=1
MRKINEIFYSLQGEGYHTGTPAIFVRFSGCNLKCDFCDTQHEEGKMMTDDEIIAEVKKYPAVTVVLTGGEPSLWIDDELIDRLHRAGKYVTIETNGTRPLPAAIDWVTCSPKQGAKLAIDRMDEVKVVYEGQDISIFEQLPAEHFFLQPCSCNNTASTVDCVMRHPKWRLSLQTHKLIDIR

SEQ ID NO: 28288 - protein, 181 aa, Bacteroides acidifaciens
  REGION 1..181: note = tr|A0A4Y9GVF7|A0A4Y9GVF7_9BACE 7-carboxy-7-deazaguanine synthase OS=Bacteroides acidifaciens OX=85831 GN=queE PE=3 SV=1
MRKINEIFYSLQGEGYHTGTPAIFVRFSGCNLKCDFCDTQHEEGKMMTDDEIIAEVKKYPAVTVVLTGGEPSLWIDDELIDRLHQAGKYVTIETNGTRPLPAAIDWVTCSPKQGAKLAIDRMDEVKVVYEGQDISIFEQLPAEHFFLQPCSCNNTASTVDCVMRHPKWRLSLQTHKLIDIR

SEQ ID NO: 28289 - protein, 181 aa, Bacteroides caccae
  REGION 1..181: note = tr|R5U2G2|R5U2G2_9BACE 7-carboxy-7-deazaguanine synthase OS=Bacteroides caccae CAG:21 OX=1263037 GN=queE; PE = 3 SV=1
MRKINEIFYSLQGEGYYTGTPAIFIRFSGCNLKCSFCDTQHEEGTMMTDDEIIAEVKKYPAVTVVLTGGEPSLWIDDTLIDRLHEAGKYVTVETNGTNPLPESVDWVTCSPKQGVELKINRIDEVKVVYEGQDISIFELLPAEHFFLQPCSCINTADTVDCVMRHPKWRLSLQTHKLIDIR

SEQ ID NO: 28290 - protein, 181 aa, Bacteroides caccae; identical to SEQ ID NO: 28289
  REGION 1..181: note = tr|A0A174RB10|A0A174RB10_9BACE 7-carboxy-7-deazaguanine synthase OS=Bacteroides caccae; OX = 47678 GN=queE PE=3 SV=1

SEQ ID NO: 28291 - protein, 181 aa, unidentified
  source 1..181: note = Bacteroides caecimuri
  REGION 1..181: note = tr|A0A4S2D4N6|A0A4S2D4N6_9BACE 7-carboxy-7-deazaguanine synthase OS=Bacteroides caecimuri; OX = 2516958 GN=queE PE=3 SV=1
MRKINEIFYSLQGEGYHTGTPAIFVRFSGCNLKCDFCDTQHEEGKMMTDDEIIAEVKKYPAVTVVLTGGEPSLWIDDELIDRLHQAGKYVAIETNGTRPLPAAIDWVTCSPKQGAKLAIDRMDEVKVVYEGQDISIFEQLPAEHFFLQPCSCNNTASTVDCVMRHPKWRLSLQTHKLIDIR

SEQ ID NO: 28292 - protein, 245 aa, unidentified; identical to SEQ ID NO: 28208
  source 1..245: note = Bacteroides caecimuris
  REGION 1..245: note = tr|A0A3A9BJ06|A0A3A9BJ06_9BACE 7-carboxy-7-deazaguanine synthase OS=Bacteroides caecimuris OX=1796613 GN=queE PE=3 SV=1

SEQ ID NO: 28293 - protein, 181 aa, unidentified; identical to SEQ ID NO: 28288
  source 1..181: note = Bacteroides caecimuris
  REGION 1..181: note = tr|A0A1C7GWW0|A0A1C7GWW0_9BACE 7-carboxy-7-deazaguanine synthase OS=Bacteroides caecimuris OX=1796613 GN=queE PE=3 SV=1

SEQ ID NO: 28294 - protein, 181 aa, Bacteroides cellulosilyticus
  REGION 1..181: note = tr|E2NHD0|E2NHD0_9BACE 7-carboxy-7-deazaguanine synthase OS=Bacteroides cellulosilyticus DSM 14838; OX = 537012 GN=queE PE=3 SV=1
MRKINEIFYSLQGEGYHTGTPAVFIRFSGCNLKCSFCDTRHEEGVLMSDDEIIAEVGKYPAVTVILTGGEPSLWIDEVFIDRLHQAGKYVCIETNGTNPLPQNIDWVTCSPKQGVKLGITRMDEVKVVYEGQDIEVYELLPAEYFFLQPCSCSNTAETVACVMQHPKWRLSLQTHKLIDIR

SEQ ID NO: 28295 - protein, 181 aa, Bacteroides cellulosilyticus
  REGION 1..181: note = tr|A0A4Q5JFH1|A0A4Q5JFH1_9BACE 7-carboxy-7-deazaguanine synthase OS=Bacteroides cellulosilyticus OX=246787 GN=queE PE=3 SV=1
MRKINEIFYSLQGEGYYTGTPAVFIRFSGCNLKCSFCDTRHEEGVLMSDDEIIAEVGKYPAVTVILTGGEPSLWVDEAFIDRLHQAGKYVCIETNGTNPLPQNIDWVTCSPKQGVKLGITRMDEVKVVYEGQDIEVYELLPAEYFFLQPCSCSNTAETVACVMQHPKWRLSLQTHKLIDIR

SEQ ID NO: 28296 - protein, 181 aa, Bacteroides clarus
  REGION 1..181: note = tr|R6L9Z6|R6L9Z6_9BACE 7-carboxy-7-deazaguanine synthase OS=Bacteroides clarus CAG:160 OX=1263039 GN=queE; PE = 3 SV=1
MRKINEIFYSLQGEGFHTGTPAVFIRLSGCNLKCPFCDTQHEEGVLMTDEEIMAEVGKYPAMMVILTGGEPSLWIDREFVDRLHRMGKYVCIETNGTHELPDNIDWVTCSPKRGAKLSISRMDEVKVVYESQDITVYEQLPAKHFFLQPCSCSNTVETVARVMQHPKWRLSLQTHKLINIS

SEQ ID NO: 28297 - protein, 181 aa, Bacteroides clarus
  REGION 1..181: note = tr|A0A1Y4JTH1|A0A1Y4JTH1_9BACE 7-carboxy-7-deazaguanine synthase OS=Bacteroides clarus; OX = 626929 GN=queE PE=3 SV=1
MRKINEIFYSLQGEGFHTGTPAVFIRLSGCNLKCPFCDTQHEEGVLMTDEEVMAEVGKYPAMMVILTGGEPSLWIDREFVDRLHRMGKYVCIETNGTHELPDNIDWVTCSPKRGAKLSISRMDEVKVVYESQDITVYEQLPAKHFFLQPCSCSNTVETVACVMQHPKWRLSLQTHKLINIS

SEQ ID NO: 28298 - protein, 181 aa, Bacteroides coprocola
  REGION 1..181: note = tr|A0A412GAL8|A0A412GAL8_9BACE 7-carboxy-7-deazaguanine synthase OS=Bacteroides coprocola; OX = 310298 GN=queE PE=3 SV=1
MRKINEIFYSLQGEGFHTGTPAVFVRFSGCNLKCSFCDTQHEEFRMMTDDEIIAEVCTYPCQMVILTGGEPGLSIDSQLTKALHAAGKYIAIETNGTCVLPEDIDWVTCSPKEGTTLKLHHIDEVKVVYVGQDVSPYLKLPAKHHFLQPCSGQNTNDVIAYIKEHPQWRLSLQTHKLIDIP

SEQ ID NO: 28299 - protein, 181 aa, Bacteroides coprocola; identical to SEQ ID NO: 28298
  REGION 1..181: note = tr|B3JGJ7|B3JGJ7_9BACE 7-carboxy-7-deazaguanine synthase OS=Bacteroides coprocola DSM 17136 OX=470145; GN = queE PE=3 SV=1

SEQ ID NO: 28300 - protein, 181 aa, Bacteroides coprophilus
  REGION 1..181: note = tr|A0A413T243|A0A413T243_9BACE 7-carboxy-7-deazaguanine synthase OS=Bacteroides coprophilus OX=387090 GN=queE PE=3 SV=1
MKKINEIFYSLQGEGYHAGTPAVFVRFSGCNLKCDFCDTRHEEGTEMENGDIVKAVEQYPCRMVILTGGEPGLWIDSALVDALHASGRYVCIETNGTCLLPENIDWVTCSPKQGTSLKVAHVDEVKVVYLGQDVSACLDIPARHYFLQPCSCQNTDEVIAYIKQHPVWRLSLQTHKLINIP

SEQ ID NO: 28301 - protein, 181 aa, Bacteroides coprophilus
  REGION 1..181: note = tr|R6T5S4|R6T5S4_9BACE 7-carboxy-7-deazaguanine synthase OS=Bacteroides coprophilus CAG:333 OX=1263041; GN = queE PE=3 SV=1
MKKINEIFYSLQGEGYHAGTPAVFVRFSGCNLKCDFCDTRHEEGTEMENGEIVKAVEQYPCRMVILTGGEPGLWIDSALVDALHASGRYVCIETNGTCRLPENIDWVTCSPKQGTSLKVAHVDEVKVVYLGQDVSACLDIPARHYFLQPCSCQNTDEVIAYIKQHPVWRLSLQTHKLINIP

SEQ ID NO: 28302 - protein, 181 aa, Bacteroides dorei
  REGION 1..181: note = tr|A0A4R4GR33|A0A4R4GR33_9BACE 7-carboxy-7-deazaguanine synthase OS=Bacteroides dorei; OX = 357276 GN=queE PE=3 SV=1
MRRINEIFYSLQGEGYHTGIPAVFVRFSGCNLRCPFCDTQHEEGTLMSDEDIAMEVAKYSTQVVILTGGEPGLWIDEKLVDALHHEGKYVCIETNGTCLLPENIDWVTCSPKEGAKINLDRIDEVKVVYVGQDVSAYLDLSASHYFLQPCSCANTEEVIAYILQHPEWRLSLQTHKLLQIP

SEQ ID NO: 28303 - protein, 181 aa, Bacteroides dorei
  REGION 1..181: note = tr|A0A5C6KEM7|A0A5C6KEM7_9BACE 7-carboxy-7-deazaguanine synthase OS=Bacteroides dorei; OX = 357276 GN=queE PE=3 SV=1
MRRINEIFYSLQGEGYHTGIPAVFVRFSGCNLRCPFCDTQHEEGTLMSDEDIVMEVAKYSTQVVILTGGEPGLWIDEKLVDALHHEGKYVCIETNGTCLLPENIDWVTCSPKEGAKINLDRIDEVKVVYVGQDVSAYLDLSASHYFLQPCSCANTEEVIAYILQHPEWRLSLQTHKLLQIP

SEQ ID NO: 28304 - protein, 181 aa, Bacteroides eggerthii
  REGION 1..181: note = tr|R5JWJ2|R5JWJ2_9BACE 7-carboxy-7-deazaguanine synthase OS=Bacteroides eggerthii CAG:109 OX=1263043; GN = queE PE=3 SV=1
MRKINEIFYSLQGEGFHTGTPAVFIRFSGCNLKCSFCDTQHEEGVLMSDEEILDAVGEYPATTVILTGGEPSLWIDREFVDRLHRIGKYVCIETNGTRSLPDNIDWVTCSPKQGAKPVISRMDEVKVVYEGQDITVYELLPAGHFFLQPCSCSNVAETVACVMQHPKWRLSLQTHKLIDIR

SEQ ID NO: 28305 - protein, 181 aa, Bacteroides eggerthii
  REGION 1..181: note = tr|A0A380YKC5|A0A380YKC5_9BACE 7-carboxy-7-deazaguanine synthase OS=Bacteroides eggerthii; OX = 28111 GN=queE PE=3 SV=1
MRKINEIFYSLQGEGFHTGTPAVFIRFSGCNLKCSFCDTQHEEGVLMSDEEILDAVGEYPATTVILTGGEPSLWIDREFVDRLHRIGKYVCIETNGTRALPDNIDWVTCSPKQGAKPVISRMDEVKVVYEGQDITVYELLPAGHFFLQPCSCSNVAETVACVMQHPKWRLSLQTHKLIDIR

SEQ ID NO: 28306 - protein, 181 aa, Bacteroides faecichinchillae
  REGION 1..181: note = tr|A0A1M4VJ64|A0A1M4VJ64_9BACE 7-carboxy-7-deazaguanine synthase OS=Bacteroides faecichinchillae OX=871325 GN=queE PE=3 SV=1
MRKINEIFYSLQGEGYHTGTPAIFVRFSGCNLNCDFCDTQHEEGIMMTDEEIIAEVRKYPAVTVVLTGGEPSLWIDNDFIDRLHEAGKYICIETNGTHPLPESIDWITCSPKQGAKLEITRMDEVKVVYEGQDISIYESLFAEHFYLQPCSCSNTAETVDCVMRHPKWRLSLQTHKLIDIR

SEQ ID NO: 28307 - protein, 181 aa, Bacteroides faecis
  REGION 1..181: note = tr|A0A1H3EUP3|A0A1H3EUP3_9BACE 7-carboxy-7-deazaguanine synthase OS=Bacteroides faecis MAJ27 OX=1077285 GN=queE PE=3 SV=1
MRKINEIFYSLQGEGYHTGTPAVFVRFSGCNLKCSFCDTQHEEGTLMTDDEIIAEVSKYPAATVILTGGEPSLWIDDALVDRLHEAGKYVCIETNGTRPLPASIDWVTCSPKQGARLAITRMDEVKVVYEGQDISIYERLSAEHFFLQPCSCYNTALTVDCVMRHPKWRLSLQTHKLIDIR

SEQ ID NO: 28308 - protein, 181 aa, Bacteroides faecis; identical to SEQ ID NO: 28307
  REGION 1..181: note = tr|R6UUC8|R6UUC8_9BACE 7-carboxy-7-deazaguanine synthase OS=Bacteroides faecis CAG:32 OX=1263044 GN=queE; PE = 3 SV=1

SEQ ID NO: 28309 - protein, 181 aa, Bacteroides fluxus
  REGION 1..181: note = tr|F3PS44|F3PS44_9BACE 7-carboxy-7-deazaguanine synthase OS=Bacteroides fluxus YIT 12057 OX=763034 GN=queE; PE = 3 SV=1
MRKINEIFYSLQGEGFHTGTPAVFIRFSGCNLKCSFCDTQHEEGCLMSDDEIMEEVGKYPAATVILTGGEPSLWIDGEFVDRLHRAGKYVCIETNGTRLLPGNIDWVTCSPKQGTRLGIARMDEVKVVYEGQDITGYEQLPAAHFFLQPCSCNNIGETVDCVMRHPKWRLSLQTHKLIDIR

SEQ ID NO: 28310 - protein, 181 aa, Bacteroides fragilis
  REGION 1..181: note = tr|I9B834|I9B834_BACFG 7-carboxy-7-deazaguanine synthase OS=Bacteroides fragilis CL05T12C13 OX=997881; GN = queE PE=3 SV=1
MRKINEIFYSLQGEGYHTGTPAVFIRFSGCNLKCDFCDTRHEEGEMMTDEDIVNEIGKYPAVMVILTGGEPSLWIDDAFIDLLHRAGKYVCIETNGTKPLPVAIDWVTCSPKQGVNLALNRMDEVKVVYEGQNIDVYEQLPAEHFFLQPCSCNNTAETVDCVMRHPKWRLSLQTHKLINIL

SEQ ID NO: 28311 - protein, 181 aa, Bacteroides fragilis
  REGION 1..181: note = tr|A0A4V3UJF5|A0A4V3UJF5_BACFG 7-carboxy-7-deazaguanine synthase OS=Bacteroides fragilis; OX = 817 GN=queE PE=3 SV=1
MRKINEIFYSLQGEGYHTGTPAVFIRFSGCNLKCDFCDTRHEEGEMMTDEDIVNEIGKYPAVMVILTGGEPSLWIDDAFIDLLHRAGKYVCIETNGTKPLPVAIDWVTCSPKQGVNLALNRMDEVKVVYEGQNIDVYEQLPAEHFFLQPCSCNNTAETVDCVMRHPKWRLSLQTHKLIHIL

SEQ ID NO: 28312 - protein, 181 aa, Bacteroides helcogenes
  REGION 1..181: note = tr|E6SWA8|E6SWA8_BACT6 7-carboxy-7-deazaguanine synthase OS=Bacteroides helcogenes (strain ATCC 35417 / DSM 20613 / JCM 6297 / P 36-108) OX=693979 GN=queE PE=3; SV = 1
MRKINEIFYSLQGEGYHTGIPAVFIRFSGCNLKCSFCDTHHEEGRLMSDDEIMEEVRKYPAATVILTGGEPSLWIDSEFVDRLHRAGKYVCIETNGTHPLPDNIDWVTCSPKLGGNLRITGMDEVKVVYEGQDITVYEQLPAGHFFLQPCSCNNIGETVDCVMHHPKWRLSLQTHKLIDIR

SEQ ID NO: 28313 - protein, 181 aa, Bacteroides intestinalis
  REGION 1..181: note = tr|A0A412YID7|A0A412YID7_9BACE 7-carboxy-7-deazaguanine synthase OS=Bacteroides intestinalis OX=329854 GN=queE PE=3 SV=1
MRKINEIFYSLQGEGYHTGTPAVFIRFSGCNLKCSFCDTRHEEGVLMSDDEIIAEVGKYPAVTVILTGGEPSLWIDEVFIDRLHQAGKYVCIETNGTNPLPQNIDWVTCSPKQGVKLGITRMDEVKVVYEGQDIGVYELLPAEYFFLQPCSCSNTAETVACVMQHPKWRLSLQTHKLIDIR

SEQ ID NO: 28314 - protein, 181 aa, Bacteroides intestinalis
  REGION 1..181: note = tr|A0A139KXV4|A0A139KXV4_9BACE 7-carboxy-7-deazaguanine synthase OS=Bacteroides intestinalis OX=329854 GN=queE PE=3 SV=1
MRKINEIFYSLQGEGYHTGTPAVFIRFSGCNLKCSFCDTRHEEGVLMSDDEIIAEVGKYPAVTVILTGGEPSLWIDEAFIDRLHQAGKYVCIETNGTNPLPKNIDWVTCSPKQGVKLGITRMDEVKVVYEGQDIEVYELLPAEYFFLQPCSCSNTAETVACVMQHPKWRLSLQTHKLIDIR

SEQ ID NO: 28315 - protein, 181 aa, Bacteroides massiliensis
  REGION 1..181: note = tr|U6RP86|U6RP86_9BACE 7-carboxy-7-deazaguanine synthase OS=Bacteroides massiliensis B84634 = Timone 84634 = DSM 17679 = JCM 13223 OX=1121098 GN=queE PE=3 SV=1
MKKINEIFYSLQGEGYHTGIPAIFVRFSGCNMKCSFCDTLHEDGIMMSDEEIISEVVKYPASMVVLTGGEPGLWIDESLVDALHNEGKYVCVETNGTCVLPGNVDWVTCSPKEGGEVRLNHIDEVKIVYVGQDVSVYLDLPARYYFIQPCSCSNTEAVIAYILKYPKWRLSLQTHKLLQIP

SEQ ID NO: 28316 - protein, 181 aa, Bacteroides nordii
  REGION 1..181: note = tr|A0A413VQP0|A0A413VQP0_9BACE 7-carboxy-7-deazaguanine synthase OS=Bacteroides nordii; OX = 291645 GN=queE PE=3 SV=1
MRKINEIFYSLQGEGYHTGTPAVFVRFSGCNLKCSFCDTRHEEGTMMTDEEIIAEVKKYPAVMVILTGGEPSLWIDDNFIDLLHQAGKYVCIETNGTRPLPASIDWITCSPKQGVKLSLNKIDEVKVVYEGQNIDVYELLPAEHFFLQPCSCSNTALTVDCVMRHPKWRLSLQTHKLIDIQ

SEQ ID NO: 28317 - protein, 181 aa, Bacteroides nordii; identical to SEQ ID NO: 28316
  REGION 1..181: note = tr|I9GXT0|I9GXT0_9BACE 7-carboxy-7-deazaguanine synthase OS=Bacteroides nordii CL02T12C05 OX=997884; GN = queE PE=3 SV=1

SEQ ID NO: 28318 - protein, 181 aa, Bacteroides oleiciplenus
  REGION 1..181: note = tr|A0A3E5BKF3|A0A3E5BKF3_9BACE 7-carboxy-7-deazaguanine synthase OS=Bacteroides oleiciplenus OX=626931 GN=queE PE=3 SV=1
MRKINEIFYSLQGEGYHTGTPAVFIRFSGCNLKCSFCDTQHEEGTLMTDEDIIAEVQKYPAATVILTGGEPSIWIDEEFIDRLHQAGKYVCIETNGTRPLPENIDWVTCSPKQGVKLGITRMDEVKVVYEGQDIEVYELLPAEHFFLQPCSCANIAEAVACVMQHPKWRLSLQTHKLIDIR

SEQ ID NO: 28319 - protein, 181 aa, Bacteroides oleiciplenus; identical to SEQ ID NO: 28318
  REGION 1..181: note = tr|K9E6R3|K9E6R3_9BACE 7-carboxy-7-deazaguanine synthase OS=Bacteroides oleiciplenus YIT 12058 OX=742727; GN = queE PE=3 SV=1

SEQ ID NO: 28320 - protein, 183 aa, Bacteroides ovatus
  REGION 1..183: note = tr|A7M567|A7M567_BACO1 7-carboxy-7-deazaguanine synthase OS=Bacteroides ovatus (strain ATCC 8483 / DSM 1896 / JCM 5824 / NCTC 11153) OX=411476 GN=queE PE=3 SV=1
MTMRKINEIFYSLQGEGYHTGTPAIFVRFSGCNLKCDFCDTQHEEGTMMTDEEIITKVKKYPAVTVVLTGGEPSLWIDDQLIDLLHQAGKYVTIETNGTHPLPASIDWVTCSPKQGAKLAIDRMNEVKVVYEGQDISIFELLPAEHFFLQPCSCNNTALTVDCVMRHPKWRLSLQTHKLIDIR

SEQ ID NO: 28321 - protein, 181 aa, Bacteroides ovatus
  REGION 1..181: note = tr|A0A515IZV1|A0A515IZV1_BACOV 7-carboxy-7-deazaguanine synthase OS=Bacteroides ovatus; OX = 28116 GN=queE PE=3 SV=1
MRKINEIFYSLQGEGYHTGTPAIFVRFSGCNLKCDFCDTQHEEGKMMTDDEIIAEVKKYPAVTVVLTGGEPSLWIDDELIDRLHEAGKYVTIETNGTRPLPAAIDWVTCSPKQGAKLAIDRMDEVKVVYEGQDISIFELLPAEHFFLQPCSCNNTASTVDCVMRHPKWRLSLQTHKLIDIR

SEQ ID NO: 28322 - protein, 181 aa, Bacteroides plebeius
  REGION 1..181: note = tr|A0A3E4N4X0|A0A3E4N4X0_9BACE 7-carboxy-7-deazaguanine synthase OS=Bacteroides plebeius; OX = 310297 GN=queE PE=3 SV=1
MKKINEIFYSLQGEGFHVGTPAVFVRFSGCNLKCEFCDTRHKEGVMMSDEEILEQVCQYPCKTVILTGGEPGLWVDEDLVAALHKAGKYVCIETNGTCVLPESIDWVTCSPKLGASLRVRRMDEVKVVFLGQDVSPYLQLKASSYFLQPCSCRNTAEVIEYIKSHPQWRLSLQIHKLIDIP

SEQ ID NO: 28323 - protein, 181 aa, Bacteroides plebeius
  REGION 1..181: note = tr|A0A414FQ56|A0A414FQ56_9BACE 7-carboxy-7-deazaguanine synthase OS=Bacteroides plebeius; OX = 310297 GN=queE PE=3 SV=1
MKKINEIFYSLQGEGFHVGTPAVFVRFSGCNLKCEFCDTRHEEGVMMSDEEIVEKVCQYPCKTVILTGGEPGLWVDEDLIAALHKAGKFICIETNGTCVLPESIDWVTCSPKLGAPLRVNRIDEVKVVFLGQDVSPYLELKASFYFLQPCSCRNTAEVVEYIKSHPQWRLSLQTHKLIDIP

SEQ ID NO: 28324 - protein, 181 aa, Bacteroides salanitronis
  REGION 1..181: note = tr|F0R8U1|F0R8U1_BACSH 7-carboxy-7-deazaguanine synthase OS=Bacteroides salanitronis (strain DSM 18170 / JCM 13567 / BL78) OX=667015 GN=queE PE=3 SV=1
MRKINEIFYSLQGEGAHAGTPAVFVRFSGCNLKCIFCDTSHESGTEMGDEEIIEEVCKYPCRMVIMTGGEPGLWIDDALVDLLHKAGKYVAVETNGTQVLPEAVDWVTCSPKEGTVLRVRHIDEVKVVYIGQDVSPYLLIEAKEHFLQPCSCQNTEEVIEYIKKHPQWRLSLQTHKLINIP

SEQ ID NO: 28325 - protein, 181 aa, Bacteroides salyersiae
  REGION 1..181: note = tr|I9TNA3|I9TNA3_9BACE 7-carboxy-7-deazaguanine synthase OS=Bacteroides salyersiae CL02T12C01 OX=997887; GN = queE PE=3 SV=1
MRKINEIFYSLQGEGYHTGTPAVFVRFSGCNLKCGFCDTRHEEGVMMTDEEIIAEVKKYPAVMVILTGGEPSLWIDDHLIGLLHQAGKYVCIETNGTRPLPAAIDWITCSPKQGVKLGLNRMDEVKVVYEGQNIDVYELLPAEHFFLQPCSCNNTAATVDCVMRHPKWRLSLQTHKLINIL

SEQ ID NO: 28326 - protein, 181 aa, Bacteroides salyersiae
  REGION 1..181: note = tr|A0A4Q5FHN0|A0A4Q5FHN0_9BACE 7-carboxy-7-deazaguanine synthase OS=Bacteroides salyersiae OX=291644 GN=queE PE=3 SV=1
MRKINEIFYSLQGEGYHTGTPAVFVRFSGCNLKCGFCDTRHEEGVMMTDEEIIAEVKKYPAVMVILTGGEPSLWIDDHLIGLLHQAGKYVCIETNGTRPLPAAIDWITCSPKQGVKLGLDRMDEVKVVYEGQNIDVYELLPAEHFFLQPCSCNNTAATVDCVMRHPKWRLSLQTHKLINIL

SEQ ID NO: 28327 - protein, 181 aa, Bacteroides sartorii
  REGION 1..181: note = tr|R9HXW8|R9HXW8_9BACE 7-carboxy-7-deazaguanine synthase OS=Bacteroides sartorii OX=671267 GN=queE PE=3; SV = 1
MRKINEIFYSLQGEGYHTGMPAVFVRFSGCNLKCSFCDTRHEEGTWMSDEDIVREVIKYPARVVILTGGEPGLWIDERLVDALHQEGKYVCIETNGTCLLPENIDWVTCSPKEGAELKLDRMDEVKVVYVGQDVSPYLDLPAGHYFLQPCSCSNTGEVIAYILQHPEWRLSLQTHKLLQIP

SEQ ID NO: 28328 - protein, 181 aa, Bacteroides sp.
  REGION 1..181: note = tr|A0A285T9S2|A0A285T9S2_9BACE 7-carboxy-7-deazaguanine synthase OS=Bacteroides sp. AR29; OX = 93975 GN=queE PE=3 SV=1
MRKINEIFYSLQGEGYHTGTPAVFIRFSGCNLKCPFCDTQHEDGILMSDEDIVTEVSRYPAATVILTGGEPSLWIDREFVDCLHQAGKYVCIETNGTRPLPDNIDWVTCSPKQGVKLEITRMNEVKVVYEGQDITVYEQLPAGHFFLQPCSCSNTAETVDCVMKHPKWRLSLQTHKLIDIR

SEQ ID NO: 28329 - protein, 183 aa, Bacteroides sp.
  REGION 1..183: note = tr|D7K6Y0|D7K6Y0_9BACE 7-carboxy-7-deazaguanine synthase OS=Bacteroides sp. 3_1_23 OX=457390 GN=queE PE=3; SV = 1
MMMRKINEIFYSLQGEGYHTGTPAIFVRFSGCNLKCDFCDTQHEEGKMMTDDEIIAEVKKYPAVTVVLTGGEPSLWVDDELIDRLHQAGKYVTIETNGTRPLPVAIDWVTCSPKQGVKLAIDRMDEVKVVYEGQDISIFELLPAEHFFLQPCSCNNTASTVDCVMRHPKWRLSLQTHKLIDIR

SEQ ID NO: 28330 - protein, 181 aa, Bacteroides stercorirosoris
  REGION 1..181: note = tr|A0A1M6IVS7|A0A1M6IVS7_9BACE 7-carboxy-7-deazaguanine synthase OS=Bacteroides stercorirosoris OX=871324 GN=queE PE=3 SV=1
MRKINEIFYSLQGEGYHTGTPAVFVRFSGCNLKCSFCDTQHEEGTFMSDEEIVAEIRKYPAVTVILTGGEPSLWIDEAFIDCLHQAGKYVCIETNGTRSLPENIDWVTCSPKQGVKLGITRIDEVKVVYEGQDIGVYELLPAEHFFLQPCSCANTAETVACVMQHPKWRLSLQTHKLIDIR

SEQ ID NO: 28331 - protein, 181 aa, Bacteroides stercoris
  REGION 1..181: note = tr|A0A413E5W8|A0A413E5W8_BACSE 7-carboxy-7-deazaguanine synthase OS=Bacteroides stercoris; OX = 46506 GN=queE PE=3 SV=1
MRKINEIFYSLQGEGFHTGTPAVFVRFSGCNLKCSFCDTQHEEGVLMSDEEILAEVGKYPAVTVILTGGEPSLWIDREFVDCLHRMGKYVCIETNGTHPLPDNIDWVTCSPKQGAKLCISRMDEVKVVYEGQDIAVYESLPAGHFFLQPCSCSNTAETVACVMQHPKWRLSLQTHKLIEIK

SEQ ID NO: 28332 - protein, 181 aa, Bacteroides stercoris
  REGION 1..181: note = tr|A0A413UXE7|A0A413UXE7_BACSE 7-carboxy-7-deazaguanine synthase OS=Bacteroides stercoris; OX = 46506 GN=queE PE=3 SV=1
MRKINEIFYSLQGEGFHTGTPAVFVRFSGCNLKCSFCDTQHEEGVLMSDEEILAEVGKYPAVTVILTGGEPSLWIDREFVDCLHRMGKYVCIETNGTHFLPDNIDWVTCSPKQGAKLCISRMDEVKVVYEGQDIAVYESLPAGHFFLQPCSCSNTAETVACVMQHPKWRLSLQTHKLIEIK

SEQ ID NO: 28333 - protein, 182 aa, Bacteroides thetaiotaomicron
  REGION 1..182: note = sp|Q89ZC3|QUEE_BACTN 7-carboxy-7-deazaguanine synthase OS=Bacteroides thetaiotaomicron (strain ATCC 29148 / DSM 2079 / NCTC 10582 / E50 / VPI-5482) OX=226186; GN = queEPE=3 SV=1
MMRKINEIFYSLQGEGYHTGTPAVFIRFSGCNLKCSFCDTQHEAGTLMTDDEIIAEVSKYPAVTVILTGGEPSLWIDDALIDRLHEAGKYVCIETNGTRPLPESIDWVTCSPKQGVKLGITRMDEVKVVYEGQDISIYELLPAEHFFLQPCSCNNTALTVDCVMRHPKWRLSLQTHKLIDIR

SEQ ID NO: 28334 - protein, 182 aa, Bacteroides thetaiotaomicron
  REGION 1..182: note = tr|R9HGS5|R9HGS5_BACT4 7-carboxy-7-deazaguanine synthase OS=Bacteroides thetaiotaomicron dnLKV9 OX=1235785; GN = queE PE=3 SV=1
MMRKINEIFYSLQGEGYHTGTPAVFIRFSGCNLKCSFCDTQHEAGTLMTDDEIIAEVSKYPAVTVILTGGEPSLWIDDALIDRLHEAGKYVCIETNGTRPLPESVDWVTCSPKQGVKLGITRMDEVKVVYEGQDISIYELLPAEHFFLQPCSCNNTALTVDCVMRHPKWRLSLQTHKLIDIR

SEQ ID NO: 28335 - protein, 181 aa, Bacteroides uniformis
  REGION 1..181: note = tr|A0A174SRK5|A0A174SRK5_BACUN 7-carboxy-7-deazaguanine synthase OS=Bacteroides uniformis; OX = 820 GN=queE_2 PE=3 SV=1
MRKINEIFYSLQGEGYHTGTPAVFIRFSGCNLKCPFCDTQHEDGILMSDEDIVTEVSKYPAATVILTGGEPSLWIDREFVDCLHQAGKYVCIETNGTRPLPDNIDWVTCSPKQGVKLEITRMNEVKVVYEGQDITVYEQLPAGHFFLQPCSCSNTAETVDCVMKHPKWRLSLQTHKLIDIR

SEQ ID NO: 28336 - protein, 181 aa, Bacteroides uniformis
  REGION 1..181: note = tr|A0A174KEX1|A0A174KEX1_BACUN 7-carboxy-7-deazaguanine synthase OS=Bacteroides uniformis; OX = 820 GN=queE PE=3 SV=1
MRKINEIFYSLQGEGYHTGTPAVFIRFSGCNLKCPFCDTQHEDGILMSDEDIVTEVSKYPAATVILTGGEPSLWIDREFVDCLHQAGKYVCIETNGTRLLPDNIDWVTCSPKQGVKLEITRMNEVKVVYEGQDITVYEQLPAGHFFLQPCSCSNTAETVDCVMKHPKWRLSLQTHKLIDIR

SEQ ID NO: 28337 - protein, 193 aa, Bacteroides vulgatus
  REGION 1..193: note = tr|D4V3T8|D4V3T8_BACVU 7-carboxy-7-deazaguanine synthase OS=Bacteroides vulgatus PC510 OX=702446 GN=queE; PE = 3 SV=1
MKFASQKEIPLSMRRINEIFYSLQGEGYHTGIPAVFVRFSGCNLRCPFCDTQHEEGTLMSDEDIVMEVAKYSTQVVILTGGEPGLWIDEKLVDALHHEGKYVCIETNGTCLLPENIDWVTCSPKEGAKINLDRIDEVKVVYVGQDVSAYLDLSASHYFLQPCSCANTEEVIAYILQHPEWRLSLQTHKLLQIP

SEQ ID NO: 28338 - protein, 181 aa, Bacteroides vulgatus
  REGION 1..181: note = tr|A0A174TG35|A0A174TG35_BACVU 7-carboxy-7-deazaguanine synthase OS=Bacteroides vulgatus; OX = 821 GN=queE PE=3 SV=1
MRRINEIFYSLQGEGYHTGIPAVFVRFSGCNLRCPFCDTQHEEGTLMSDEDIVMEVAKYSTQIVILTGGEPGLWIDEKLVDALHHEGKYVCIETNGTCLLPENIDWVTCSPKEGAKINLDRIDEVKVVYVGQDVSAYLDLSASHYFLQPCSCANTEEVIAYILQHPEWRLSLQTHKLLQIP

SEQ ID NO: 28339 - protein, 182 aa, Bacteroides xylanisolvens
  REGION 1..182: note = tr|D4VIV1|D4VIV1_9BACE 7-carboxy-7-deazaguanine synthase OS=Bacteroides xylanisolvens SD CC 1b OX=702447; GN = queE PE=3 SV=1
MMRKINEIFYSLQGEGYHTGTPAIFVRFSGCNLKCDFCDTQHEEGKMMTDDEIIAEVKKYPAVTVVLTGGEPSLWIDDELIDRLHQAGKYVTIETNGTRPLPAAIDWVTCSPKQGVKLAIDRMDEVKVVYEGQDISIFELLPAEHFFLQPCSCNNTASTVDCVMRHPKWRLSLQTHKLIDIR

SEQ ID NO: 28340 - protein, 181 aa, Bacteroides xylanisolvens
  REGION 1..181: note = tr|I9AL90|I9AL90_9BACE 7-carboxy-7-deazaguanine synthase OS=Bacteroides xylanisolvens CL03T12C04 OX=997892; GN = queE PE=3 SV=1
MRKINEIFYSLQGEGYHTGTPAIFVRFSGCNLKCDFCDTQHEEGKMMTDDEIIAEVKKYPAVTVVLTGGEPSLWIDDELIDRLHQAGKYVTIETNGTRPLPAAIDWVTCSPKQGAKLAIDRMDEVKVVYEGQDISIFELLPAEHFFLQPCSCNNTASTVDCVMRHPKWRLSLQTHKLIDIR

SEQ ID NO: 28341 - protein, 222 aa, Bacteroides xylanolyticus
  REGION 1..222: note = tr|A0A2S6HNC9|A0A2S6HNC9_9BACE 7-carboxy-7-deazaguanine synthase OS=Bacteroides xylanolyticus OX=384636 GN=queE PE=3 SV=1
MADYNVAETFVSINGEGAYAGQLAVFIRFYGCNLSCSYCDTAWAKEAMTPGKIMSELDIYEYIKETGIKNVTLTGGEPLIQPGIGDLLSLLLLDEKLRVEVETNGSTDLSTCQRETNALTFTMDYKLPGSEMETAMKLSNFNYLKQKDTVKFVAGSITDLRRAVEVIDRYQLSGRCHLYFSTVFGSLSLTDVVEFMKQNRLNDVTLQLQMHKIIWGSDAVGV

SEQ ID NO: 28342 - protein, 225 aa, unidentified
  source 1..225: note = Bacteroidetes bacterium
  REGION 1..225: note = tr|A0A351ZVS6|A0A351ZVS6_9BACT 7-carboxy-7-deazaguanine synthase OS=Bacteroidetes bacterium OX=1898104 GN=queE PE=3 SV=1
MSSSPLNSDHLNVNEIFTSVQGEGTRAGMPCLFIRLQGCRLRCVWCDTPYALDHRQQERLMTPEDVYAEVEKAGIRFVEFTGGEPLEQPAVLPVMQQLCDRGYTVAVETGGHVDVSSVDPRVICIVDVKCPDSKMSSLNRLENLDALRPHDEVKFVIASRADYEYAREVVQRYDLERRVAAVLMSCVFDALAFVTLVEWILEDKLDVRFQLQMHKFIWSPQTRGV

SEQ ID NO: 28343 - protein, 207 aa, unidentified
  source 1..207: note = Bacteroidetes bacterium
  REGION 1..207: note = tr|A0A2N2W881|A0A2N2W881_9BACT 7-carboxy-7-deazaguanine synthase OS=Bacteroidetes bacterium HGW-Bacteroidetes-8 OX=2013698 GN=queE PE=3 SV=1
MRIPELNNGDLLPLAESFYTIQGEGYNTGKAAFFIRLGGCDVGCSWCDAKETWNPALYPPTPIENIVNEAVKYKAKSIVITGGEPLTYPLDKLCKLLKKERMQIFLETSGSYPLSGIFDWICLSPKKRKPPVGDIHQIASELKVIIEKEEDLIWAEENRAKAAKSTLLYLQPEWSRRAEMVPLIVEYVKNNPAWSISLQTHKYMNIP

SEQ ID NO: 28344 - protein, 226 aa, unidentified
  source 1..226: note = Bacteroidetes sp.
  REGION 1..226: note = tr|A0A3N0ZJU5|A0A3N0ZJU5_9BACT 7-carboxy-7-deazaguanine synthase; OS = Bacteroidetes/Chlorobi group bacterium MS-B_bin-24; OX = 2382228 GN=queE PE=3 SV=1
MGAYETLMKLKFNVSEVFTSIQGEGSRAGFPSVFIRLQGCELRCKWCDTPYALDLKERATMLSGEDLLNKIYSSGIKFVTITGGEPLNQKAILPFMSFLCDKDYTVVLETNGHLDIAEVDRRVVKVMDLKCPGSGMEKFNNYRNLEALEQKDEIKFVILDRNDYEWAKAKIKEYDLNKKVGTILFSPVWGKLEPKYLSEWILKDALPVRLNLQIHKYIWGPETRGV

SEQ ID NO: 28345 - protein, 226 aa, unidentified
  source 1..226: note = Bacteroidetes sp.
  REGION 1..226: note = tr|A0A3N0ZBG6|A0A3N0ZBG6_9BACT 7-carboxy-7-deazaguanine synthase; OS = Bacteroidetes/Chlorobi group bacterium Naka2016; OX = 2382229 GN=queE PE=3 SV=1
MGIFETILKFKYNVSEVFASVQGEGTRAGKPCFFIRLQGCELRCKWCDTPYALDLKERATILSGEDLLNKLYSSGIKFVTITGGEPLNQKAIIPLMTFLCDKEYEVLLETNGHLDISEVDKRVIKVMDLKCPGSGMEKFNNYKNIEYLDQKDEIKFVIKDKKDYEWAKEKIREYELGKRVGAILFSPVWGDLEPKYLAEWILQDNLKVRLNLQIHKYIWGPNVRGV

SEQ ID NO: 28346 - protein, 193 aa, unidentified
  source 1..193: note = Bacteroidia bacterium
  REGION 1..193: note = tr|A0A1M3FF70|A0A1M3FF70_9BACT 7-carboxy-7-deazaguanine synthase OS=Bacteroidia bacterium 44-10 OX=1895721 GN=queE PE=3 SV=1
MNLNVNEIFYSLQGEGGRSGQPSIFIRLAKCNLTCSFCDTDFERGVKMTTDEVLREIEPYRCKWIIWTGGEPTLQLNDAIVSLFKGKGYLQAIETNGTRRVPRGIDYITCSPKQHFEKVRELIPEVDELRFPIQKGDPVPDATILPKAKHYFLSPIFDNQQIIPENINYCVSLVKENPMWALSLQIHKLIGIR

SEQ ID NO: 28347 - protein, 193 aa, unidentified
  source 1..193: note = Bacteroidia bacterium
  REGION 1..193: note = tr|A0A1Q3QCL9|A0A1Q3QCL9_9BACT 7-carboxy-7-deazaguanine synthase OS=Bacteroidia bacterium 43-41 OX=1895720 GN=queE PE=3 SV=1
MSLTVNEIFYSLQGEGGRTGEASIFIRLSKCNLACSFCDTDFEFGKKMTLDEIFGEISQYPCRWIIWTGGEPTLQLKDEDVAFFKEKGYRQAIETNGTRRVPAGIDYITCSPKQQFGKIRTLIPEVDELRFPIATGDPLPDISILPKTKRYLLSPVFDNMNVVQDNVDYCVELIKKNPQWVLSLQVHKLIGIR

SEQ ID NO: 28348 - protein, 233 aa, unidentified
  source 1..233: note = Baia soyae
  REGION 1..233: note = tr|A0A4R2RTE4|A0A4R2RTE4_9BACL 7-carboxy-7-deazaguanine synthase OS=Baia soyae OX=1544746; GN = queE PE=3 SV=1
MDRDEIRLPMVEIFSTVEGEGAAAGFPTTFIRLFHCNLRCVWCDTPYSYAPAKPVFEATIAEIVQEVRKYPNEYICLTGGEPLIHGEKSRQLISALAEIDYIKDIHIETNGAIDLQPFQDLRETNPFVKAKTRFVLDFKLPTSGELDKMIHSNFALLEKQDEIKFVIGNDVDFEVAKEMVEKKVDQGTPLFSPVFETMQPAQLVEKMLEHKLSSVKLSLQTHKFIWHPEKRGV

SEQ ID NO: 28349 - protein, 234 aa, unidentified
  source 1..234: note = Baia soyae
  REGION 1..234: note = tr|A0A4R2SBG4|A0A4R2SBG4_9BACL 7-carboxy-7-deazaguanine synthase OS=Baia soyae OX=1544746; GN = queE PE=3 SV=1
MQAVYESTKLPMVEVFQTVEGEGMRAGFPTVFVRVFNCNLRCTWCDTPYSYAPSTPEYLATISEILTQVKQYPAKHICLTGGEPLMHGQKSLLLLQALAELDHIVDVHIETNGAIDLTPFQEWRQIHPQGHKVRFVMDYKLPASGESEKMNLLNFDLLQADDEIKFVIGNEVDFHSALIIAKQYVKQGIPMFSPVWESMPPHRLVELMLEHQLTDIKLNLQIHKVIWDPNQRGV

SEQ ID NO: 28350 - protein, 219 aa, Balnearium lithotrophicum
  REGION 1..219: note = tr|A0A521BYP3|A0A521BYP3_9BACT 7-carboxy-7-deazaguanine synthase OS=Balnearium lithotrophicum OX=223788 GN=queE PE=3 SV=1
MIRVCEIFESIQGEGLTLGAPSIFIRTGKCSVGCKFCDTKYSWDSGRDYTLNEISKIVQESRIPEVVITGGEPLEEEDLPELLKELSSFSQVRRITLETCGHMFRELPKEKLHLVVSPKPPTMGVKFPLSELQMFLKFYTDLELKFTLFSEEDFSVIKDFLNKSKKVPEPIVLQPLNVPTENYSETCKRVISLIFSNRDFINRYRIRIIPQVHKFIGVK

SEQ ID NO: 28351 - protein, 60 aa, Balneola sp.
  REGION 1..60: note = tr|A0A350PLI9|A0A350PLI9_9BACT 7-carboxy-7-deazaguanine synthase QueE (Fragment); OS = Balneola sp. OX=2024824 GN=DCX27_22100 PE=4 SV=1
MIKQPVALMNDEKEILDVEYPIVEHFYTIQGEGAHSGRASYFIRTAGCDVNCWWCDVKES

SEQ ID NO: 28352 - protein, 192 aa, Balneola sp.
  REGION 1..192: note = tr|A0A3M8G7D7|A0A3M8G7D7_9BACT 7-carboxy-7-deazaguanine synthase OS=Balneola sp.; OX = 2024824 GN=queE PE=3 SV=1
MEHFYTIQGEGIHTGKAAYFIRTGGCDVECWWCDVKDSWDESIHPRVSVKELVGHVKESGAPMVVITGGEPLLHKLGALTSAIKELGVATHIETSGSSPISGYFDWITLSPKRFKKPLDDIFPYVDELKVVVLTKKDLAWAEENAAKCPENTKLLLQPEWDTPASIPLIVEYVKEHPKWGISLQTHKFLQVP

SEQ ID NO: 28353 - protein, 37 aa, unidentified
  source 1..37: note = Balneolaceae bacterium
  REGION 1..37: note = tr|A0A356X4T4|A0A356X4T4_9BACT 7-carboxy-7-deazaguanine synthase QueE (Fragment); OS = Balneolaceae bacterium OX=2053516 GN=DD671_15405 PE=4; SV = 1
MEHFYTIQGEGAHTGRSSYFIRTAGCDVNCWWCDVKD

SEQ ID NO: 28354 - protein, 193 aa, Barnesiella intestinihominis
  REGION 1..193: note = tr|K0WWZ8|K0WWZ8_9BACT 7-carboxy-7-deazaguanine synthase OS=Barnesiella intestinihominis YIT 11860; OX = 742726 GN=queE PE=3 SV=1
MKVNEIFYSLQGEGVFTGTAAIFVRLAGCNLHCDFCDTKHEDYTIFTEEEIVKAISDYPAKHVVITGGEPTLQLTHSLVDRLHEVGKFVQIETNGSIALDTDLERSINWITCSPKTIPVKIQRMNEIKVVYQGQDMEPYEKIATAYECFCSLQPCDVNDEIKNENNLTAAIGYIKSHPRWRLSLQTHKIINIR

SEQ ID NO: 28355 - protein, 196 aa, Barnesiella sp.
  REGION 1..196: note = tr|A0A4Y9J2C9|A0A4Y9J2C9_9BACT 7-carboxy-7-deazaguanine synthase OS=Barnesiella sp. WM24; OX = 2558278 GN=queE PE=3 SV=1
MAETYRINEIFYSIQGEGIHAGVPAVFVRFSGCNLKCPFCDTDHSSFLEMSRDEIVSEVKRHKGVIVVLTGGEPGLFIDARLVSELKDTGKKVCIETNGTCALPDNIDFVTMSPKDAFCSNAMPVLRRCDELKIVYSGDNNPADYDYIEATFRVLQPCDTGDSLKNEKLTAAAFEYCLDHPQWRLGLQMHKLLNVR

SEQ ID NO: 28356 - protein, 193 aa, Barnesiella sp.
  REGION 1..193: note = tr|A0A1Y4GZT5|A0A1Y4GZT5_9BACT 7-carboxy-7-deazaguanine synthase OS=Barnesiella sp. An22; OX = 1965590 GN=queE PE=3 SV=1
MRVNEIFYSLQGEGRFTGTAAIFIRLSGCNLRCSFCDTRHDDYTLYTENDIVAAIASYPARHVVITGGEPTLQLTRLLVDKLHEAGKFVQIETNGSIALEPDVVAAIDWITCSPKALPVKIGRVDELKVVYEGQDMAPYEAMACSYGACRSLQPCDTGDADRNASLLDGAVAYIKEHPEWRLSLQTHKLIHIP

SEQ ID NO: 28357 - protein, 193 aa, Barnesiella viscericola
  REGION 1..193: note = tr|W0ELD4|W0ELD4_9BACT 7-carboxy-7-deazaguanine synthase OS=Barnesiella viscericola DSM 18177 OX=880074; GN = queE PE=3 SV=1
MRVNEIFYTLQGEGRFTGTAAIFVRLSGCNLRCSFCDTRHDTYTEMSEAEIVRAIAAYPARHVVITGGEPTLQLTRSLVDALHEAGKFVQIETNGSMELEAQLVQAIDWITCSPKSLPVKIGRVDELKVVYEGQDLVPYEAMARSYGAVLELQPCDTGDPVKNTRLLGAAIDYIKAHPEWHLSLQTHKLIHIP

SEQ ID NO: 28358 - protein, 215 aa, unidentified
  source 1..215: note = Basilea psittacipulmonis
  REGION 1..215: note = tr|A0A077DJQ1|A0A077DJQ1_9BURK 7-carboxy-7-deazaguanine synthase OS=Basilea psittacipulmonis DSM 24701 OX=1072685 GN=queE PE=3 SV=1
MVINVHAESAVSHQYRIVEIFESLQGEGYFTGTSCIFLRFGKCNLRCSWCDTNYEAFQIYCTEDILQRISIYQSRTIIITGGEPTIQPYISDLLQILKARGYRLHIETNGLKPVPKEIDYIAVSPKALYAKRYQKSCITQADEVRIVVDQVDILPFCKWVEHRIKAEHYYLSPCEVNGQMNIYETIRQIGLLNARGSDYPHWQLSIQTHKLAGIE

SEQ ID NO: 28359 - protein, 212 aa, unidentified
  source 1..212: note = Bathymodiolus azoricus
  REGION 1..212: note = tr|A0A1H6JMS4|A0A1H6JMS4_9GAMM 7-carboxy-7-deazaguanine synthase OS=Bathymodiolus azoricus thioautotrophic gill symbiont OX=235205 GN=queE; PE = 3 SV=1
MNTELNINEIFYSLQGEAREVGLPTVFVRLTGCPLRCSYCDTEYAFKGNNPLSIDTILTEVKKYNTKFVCVTGGEPLAQINCYVLLDRLVKENYQVSLETSGSIDIADINPDVSIVMDIKTPSSNESDKNLYDNIEKLETKDQLKLVIGSKADFDWSVKLLSKYPTQAEVLFSSVFDAIEPAQLAQWILDGQLNVRLQVQLHKLLWGDEKGK

SEQ ID NO: 28360 - protein, 213 aa, unidentified
  source 1..213: note = Bathymodiolus brooksi
  REGION 1..213: note = tr|A0A482YV12|A0A482YV12_9BACT 7-carboxy-7-deazaguanine synthase OS=Bathymodiolus brooksi thiotrophic gill symbiont OX=1052209 GN=queE PE=3 SV=1
MENTKLNINEIFYSLQGEAREVGLPTVFIRLTGCPLRCVYCDTEYAFKGNNLLSIDDIITKIKPYQTKLICVTGGEPLAQINCHILLDRLVKENYQISLETSGSIDITQVNPSVSIVMDVKTPDSGEADKNRYENIEKLQTKDQLKFVISSKSDFDWSVNILNKYPSLAGVLFSPTFDLITPTQLANWILEQQLNVRLQLQLHKILWGDQQGK

SEQ ID NO: 28361 - protein, 209 aa, unidentified
  source 1..209: note = Bathymodiolus heckerae
  REGION 1..209: note = tr|A0A483A982|A0A483A982_9BACT 7-carboxy-7-deazaguanine synthase OS=Bathymodiolus heckerae thiotrophic gill symbiont OX=1052212 GN=queE PE=3; SV = 1
MLNINEIFYSLQGEAREVGLPTVFIRLTGCPLRCSYCDTEYAFKGNNLLSIESILNEIKKYNTQYVCVTGGEPLAQIDCHILLDRLIKDKYQVSLETSGSIDIMGVNPGVSIVMDIKTPDSGEADKNRYANIEKLQTKDQLKFVIGSKSDFDWSVGILNKYPTQASVLLSPVFDKIEPVQLADWILDKQLNVRLQVQLHKLLWGDQQGK

SEQ ID NO: 28362 - protein, 212 aa, unidentified
  source 1..212: note = Bathymodiolus heckerae
  REGION 1..212: note = tr|A0A482YUD1|A0A482YUD1_9BACT 7-carboxy-7-deazaguanine synthase OS=Bathymodiolus heckerae thiotrophic gill symbiont OX=1052212 GN=queE PE=3; SV = 1
MTTDLNIIEIFYSLQGEAREVGLPTTFIRLTGCPLRCSYCDTEYAFKGNNLVSINEIIGEIKQYNTRYICVTGGEPLAQINCHILLDTLVKNNYLVSLETSGSIDISEINPGVSIVMDVKTPSSNESSQNLYSNIEKLQEKDQLKFVIGSRTDFDWSVDILGEYSTDAGVLFSPVFDQITPTQLADWIIEAQLNVRMQVQMHKLLWGDEKGR

SEQ ID NO: 28363 - protein, 215 aa, unidentified
  source 1..215: note = Bathymodiolus platifrons
  REGION 1..215: note = tr|A0A1Z5H8A1|A0A1Z5H8A1_9GAMM 7-carboxy-7-deazaguanine synthase OS=Bathymodiolus platifrons methanotrophic gill symbiont OX=113268 GN=queE; PE = 3 SV=1
MKSDNLRISEIFYSLQGESRTVGLPTIFIRLTGCPLRCQYCDTSYAFSGGETRSIADILEQLSQYKTHYITVTGGEPLAQPACLELLRQLADKDYCVSLETSGAIDISSVDARVVKVMDLKTPASAEEQRNLYSNLQYLTVTDQLKFVICNAEDYAWSKAKIAEYQLERQCEILFSPSMGEQDPAELAEWILRDQLAVRFQLQLHKILWGNIAGK

SEQ ID NO: 28364 - protein, 213 aa, unidentified
  source 1..213: note = Bathymodiolus thermophilus
  REGION 1..213: note = tr|A0A3G3IME9|A0A3G3IME9_9GAMM 7-carboxy-7-deazaguanine synthase OS=Bathymodiolus thermophilus thioautotrophic gill symbiont OX=2360 GN=queE; PE = 3 SV=1
MNNSELNINEIFYSLQGEAREVGLPTVFVRLTGCPLRCTYCDTEYAFKGNNLLRIDDIIAKIKSYQTKLVCVTGGEPLAQINCHILLDRLVKENYQISLETSGSIDITEVNPRVSIVMDVKTPDSGEADKNRYKNIEKLQAKDQLKFVIGSKSDFDWSVNILNKYPTPAGVLFSPTFGIVTPTQLADWILERQLNVRLQLQLHKILWGDQQGK

SEQ ID NO: 28365 - protein, 213 aa, unidentified
  source 1..213: note = Bathymodiolus thermophilus
  REGION 1..213: note = tr|A0A1J5TWR0|A0A1J5TWR0_9GAMM 7-carboxy-7-deazaguanine synthase OS=Bathymodiolus thermophilus thioautotrophic gill symbiont OX=2360 GN=queE; PE = 3 SV=1
MNNSELNINEIFYSLQGEAREVGLPTVFVRLTGCPLRCTYCDTEYAFKGNNLLRIDDIIAKIKSYQTKLVCVTGGEPLAQINCHILLDRLVKENYQISLETSGSIDIKEVNPRVSIVMDVKTPDSGEADKNRYKNIEKLQAKDQLKFVIGSKSDFDWSVNILNKYPTPAGVLFSPTFGIVAPTQLADWILERQLNVRLQLQLHKILWGDQQGK

SEQ ID NO: 28366 - protein, 223 aa, unidentified
  source 1..223: note = Baumannia cicadellinicola
  REGION 1..223: note = tr|Q1LTN9|Q1LTN9_BAUCH 7-carboxy-7-deazaguanine synthase OS=Baumannia cicadellinicola subsp. Homalodisca coagulata OX=374463 GN=queE PE=3 SV=1
MQYPINSICQTLQGEGYFSGIPAIFIRLQGCMVGCNWCDTKYTWHKNKIEQGIAKDIMLKKANSSVWSNLSEEDILALIVQQSWIAKHVVITGGEPCMYDLLPLTYLLEQYKFSCQIETSGTQSIKCTSNTWVTVSPKINKHYDVQILAQALSRSNEIKHVVSRQRDIKYLDELLLTLKDSKQRVICLQPLSQKKLATKLCIDTCIMRNWRLSMQIHKYLNIA

SEQ ID NO: 28367 - protein, 212 aa, Bdellovibrio bacteriovorus
  REGION 1..212: note = tr|Q6MRN5|Q6MRN5_BDEBA 7-carboxy-7-deazaguanine synthase OS=Bdellovibrio bacteriovorus (strain ATCC 15356 / DSM 50701 / NCIB 9529 / HD100) OX=264462 GN=queE PE=3; SV = 1
MLKINEIFYSIQGETTYVGCPTVFVRLTACNLRCTYCDTKYSYYEGEMQTLEAIIAEIDSHKAPNVCITGGEPLLQKEVHTLMKTLCDKGYLVSLETSGSKSVEMVDPRVKIILDVKTPDSGAADSFVMENIGFSTPSTEYKFVICSEKDFEWSEEFCRQHNLFEKFVVLYSPSYGQVSERWLAEKILQKNSSARLQLQLHKYIWNPETRGV

SEQ ID NO: 28368 - protein, 212 aa, Bdellovibrio bacteriovorus
  REGION 1..212: note = tr|A0A150WCV4|A0A150WCV4_BDEBC 7-carboxy-7-deazaguanine synthase OS=Bdellovibrio bacteriovorus OX=959 GN=queE PE=3 SV=1
MLKINEIFYSVQGETTYVGLPTVFVRLTACNLRCTYCDTKYSYYEGELQSLETILKEIESHKTPYVCITGGEPLLQKEVHTLMNTLCERGYKVSLETSGSKSIEQVDPRVKIILDVKTPDSGAADSFLMNNISFSTPSTEYKFVICSEKDFEWSEEFCRQHNLFEKFVVLYSPSYGQVSERWLAEKILHQNSSARLQLQLHKYIWSPETRGV

SEQ ID NO: 28369 - protein, 216 aa, unidentified
  source 1..216: note = Bdellovibrio exovorus
  REGION 1..216: note = tr|M4V8E1|M4V8E1_9PROT 7-carboxy-7-deazaguanine synthase OS=Bdellovibrio exovorus JSS OX=1184267 GN=queE; PE = 3 SV=1
MIKINEIFYSIQGESTYAGNRTVFIRTTGCNLRCTYCDTKYSYHEGEFLSLEKILDVVKSHDAEYICITGGEPLLQPEIHKLINILCDQGHKVSLETSGSKSVKHVDPRVKIILDVKTPDSGAADSFLLENIDFSSEKHRIPTEYKFVISSEKDLEWSEQFCRQYDLFKNFTVLFSPSHGQVSEKWLAERILQKKLKVMLHLQQHKYIWLPTQRGV

SEQ ID NO: 28370 - protein, 212 aa, Bdellovibrio sp.
  REGION 1..212: note = tr|A0A514XNF0|A0A514XNF0_9PROT 7-carboxy-7-deazaguanine synthase OS=Bdellovibrio sp. ZAP7; OX = 2231053 GN=queE PE=3 SV=1
MLKINEIFYSIQGETTYVGNPTVFVRTTACNLRCTYCDTKYSYYEGEMQSLDAIIKEIDSHQAPYVCITGGEPLLQKEVHTLMKELCDKGYKVSLETSGSKNIAAVDPRVKIILDVKTPDSGAADSFLMENIAHSTPSTEYKFVICSEEDFSWSENFCRQHNLFEKFVVLYSPSYTQVSERWLAEKILQQKSSARLQLQLHKYIWSPETRGV

SEQ ID NO: 28371 - protein, 59 aa, Bdellovibrio sp.
  REGION 1..59: note = tr|A0A3M1C811|A0A3M1C811_9PROT 7-carboxy-7-deazaguanine synthase QueE (Fragment); OS = Bdellovibrio sp. OX=28201 GN=D6797_04370 PE=4 SV=1
MNKIKINEIFFSIQGESSLTGYPTIFIRTSGCPLRCHYCDTQYAYFEGSPMSFSEILSS

SEQ ID NO: 28372 - protein, 243 aa, unidentified
  source 1..243: note = Bdellovibrionaceae bacterium
  REGION 1..243: note = tr|A0A2D6JLW6|A0A2D6JLW6_9PROT 7-carboxy-7-deazaguanine synthase OS=Bdellovibrionaceae bacterium OX=2026715 GN=queE PE=3 SV=1
MQKLNFTKDYHFFTVQGEGLHTGRPAIFLRLSGCNLRCEWVNSDGTTSLCDTPYSSHQPEKLLKSIDEVVEDIKSYPCKYVVITGGEPYLQKAIAPFISELKNLGYYVCIETNASIYFETEADFISMSPKLSTSCVDKSENYESHQKRRKNIEALASFTKQHDYQFKFVINTKDDLLEAKELIAEIEAKTSAIAKDKILLMPQAVTKKQLEEKSEQVIEWAMEFGYSFCDRMHIRIWNDKRGV

SEQ ID NO: 28373 - protein, 219 aa, unidentified
  source 1..219: note = Bdellovibrionaceae bacterium
  REGION 1..219: note = tr|A0A2E1Q3N8|A0A2E1Q3N8_9PROT 7-carboxy-7-deazaguanine synthase OS=Bdellovibrionaceae bacterium OX=2026715 GN=queE PE=3 SV=1
MEKANPQTLKINEIFHSIQGESSLAGYPTTFVRTSGCHLRCTYCDTTYAYNEGRMMDFQEILATVKKNGAPYVCVTGGEPLLQKNILPFLSLLSNEGFQVSLETSGDLDCTQVDERVLKVIDVKTPDSGEPNKFNFKNIDLAGPKTEFKFVICSEGDFEWAENFSKENKLYEKSIVLYSPSFNKIDEKWLAKKILSEKSSARLQLQLHKYIWSFHARGV

SEQ ID NO: 28374 - protein, 232 aa, unidentified
  source 1..232: note = Bdellovibrionales bacterium
  REGION 1..232: note = tr|A0A1F3VEF0|A0A1F3VEF0_9PROT 7-carboxy-7-deazaguanine synthase OS=Bdellovibrionales bacterium RIFOXYC1_FULL_37_79 OX=1797395 GN=queE PE=3 SV=1
MRINSIYLATEGEGVWIGTVQIFVRFNGCGIGCDNCDSSYTWSFNGGLEMSLLEVLAEIDKVGHNGLIRRVSITGGDPLNCKNIDAALALAQSLKEKNYYLNIEASGDRVAHDLFTLADFISIDYKTPSSGVTTPLNVLTQMIDQFSGKFQVKSVIENIQDFNYVKNAYAEIKKDQGGSHFAWVLTPSYNTNETFPKERFKNILNWNESHGGFFRVVGQQHKWVYGPKKTNV

SEQ ID NO: 28375 - protein, 212 aa, unidentified
  source 1..212: note = Bdellovibrionales bacterium
  REGION 1..212: note = tr|A0A1F3SHL4|A0A1F3SHL4_9PROT 7-carboxy-7-deazaguanine synthase OS=Bdellovibrionales bacterium RBG_16_40_8 OX=1797388 GN=queE PE=3 SV=1
MLKINEIFFSIQGESTLAGLPTVFVRTSGCHLRCNYCDTKYAYVEGKNLSIAEIITEVKKYLSKHVCITGGEPLLQKNSLLLMKDLCTLGYNVSLETSGDISCKDVDPRVRKIIDVKTPDSGEQNKFFLENLNLPEVNCEFKFVICSENDFFWAEDFSKKYLLNEKYAVLYSPSFEKIEARWLAEKILKNNSSARLQLQQHKYIWSCNTRGV

SEQ ID NO: 28376 - protein, 213 aa, Beggiatoa alba
  REGION 1..213: note = tr|I3CGI8|I3CGI8_9GAMM 7-carboxy-7-deazaguanine synthase OS=Beggiatoa alba B18LD OX=395493 GN=queE PE=3; SV = 1
MTYHIKEIFYTLQGEGAQTGRASVFCRFTGCNLWSGQEIDRATATCQFCDTDFNGITGEGGGKFKTANELAAAIAQTWSAQQDARAQPYVVCTGGEPLLQLDSALVSALHRAGFSVAIETNGTLPAPAGIDWICVSPKANTQLVLTSGQELKLVYPQYHAMPERFAHLNFQHFFLQPLDNENHQLNTQQAIQYCLTHPQWRLSLQTHKLLGIP

SEQ ID NO: 28377 - protein, 213 aa, unidentified
  source 1..213: note = Beggiatoa leptomitoformis
  REGION 1..213: note = tr|A0A2N9YGU8|A0A2N9YGU8_9GAMM 7-carboxy-7-deazaguanine synthase OS=Beggiatoa leptomitoformis OX=288004 GN=queE PE=3 SV=1
MTYHVKEIFYTLQGEGAQTGRAAVFCRFAGCNLWSGNEADRATALCQFCDTDFNGTTGTGGGKFTTAEDLVTAITQTWQAKNNIHAQPYVVCTGGEPLLQIDNALITALHQANFNIAIETNGTQTAPTGIDWICVSPKARAPLILTAGHELKLVYPQEDALPEQFIDLDFQHFFLQPMDGNAHHHNTQLAIQYCLDHPQWRLCLQTHKLIGIP

SEQ ID NO: 28378 - protein, 209 aa, Beggiatoa sp.
  REGION 1..209: note = tr|A7C438|A7C438_9GAMM 7-carboxy-7-deazaguanine synthase OS=Beggiatoa sp. PS OX=422289 GN=queE PE=3 SV=1
MSYSVKEIFYSLQGEGHQTGRAAIFCRFAGCNLWSGREEDRSIASCQFCDTNFIGTNGQNGGKFTSAQALAEKVATIGMMKHFPLIICTGGEPLLQLDEPLIKAFHHIGFEIAIETNGTLPAPPNIDWICVSPKGNAPLKLQTGNELKLVFPQPNAPPELFEQFDFQYFFLQPMDGPELKKNTQLALRYCLEHPQWRLSLQTHKLLGIP

SEQ ID NO: 28379 - protein, 211 aa, Beggiatoa sp.
  REGION 1..211: note = tr|A0A1W9L6V2|A0A1W9L6V2_9GAMM 7-carboxy-7-deazaguanine synthase OS=Beggiatoa sp. IS2; OX = 1934247 GN=queE PE=3 SV=1
MTLMYTVKEIFYSLQGEGLHTGRATVFCRFAGCNLWSGREIDRNQAVCSFCDTDFVGTDGVGGGKFTSAHTLAAAIATTWSAGEHPYVVCTGGEPLLQLDESLCDALHQRGFTIGVETNGTLPAPKEIDWLCVSPKAHAPLRLSRGDELKLVFPQPAISPEHFGHLEFTYFFLQPLANRQWERNTQLALRYCLTHPQWRLSLQTHKLLGIR

SEQ ID NO: 28380 - protein, 211 aa, Beijerinckia indica
  REGION 1..211: note = tr|B2IGN6|B2IGN6_BEII9 7-carboxy-7-deazaguanine synthase OS=Beijerinckia indica subsp. indica (strain ATCC 9039 / DSM 1715 / NCIB 8712) OX=395963 GN=queE PE=3 SV=1
MSHYAVKEIFLTLQGEGAQAGRPAVFCRFTGCNLWSGREADRAQAICRFCDTDFVGMDGLGGGRFESASSLADAIETAWTAGPAHRYVVFTGGEPLLQLDETLIKEIHARGFTIAVETNGTIAPPPGLDWICVSPKAGAPLKITQGSELKLVFPQEALDPEEFRALSFQHFWLQPMDNANLARNTTEATAYCLAHPQWRLSLQTHKLIGIP

SEQ ID NO: 28381 - protein, 211 aa, unidentified
  source 1..211: note = Beijerinckiaceae bacterium
  REGION 1..211: note = tr|A0A2N8MDH5|A0A2N8MDH5_9RHIZ 7-carboxy-7-deazaguanine synthase OS=Beijerinckiaceae bacterium OX=1978229 GN=queE PE=3 SV=1
MSKYAVKEIFLTLQGEGANAGRAAVFCRFSGCNLWSGQEKDRDNANCGFCDTDFVGTDGPGGGSFASAETLATAIESVWTSGKENRFVVFTGGEPLLQLDEALIGAVHARGFDAAVETNGTLPPPQGLDWICVSPKAGAPLVATSGSELKLVFPQQGLGPEGLCGLAFSHFWLQPMDGCARAANTAAAIAYCLDHPRWRLSLQTHKFIGMP

SEQ ID NO: 28382 - protein, 212 aa, unidentified
  source 1..212: note = Beijerinckiaceae bacterium
  REGION 1..212: note = tr|A0A522GH30|A0A522GH30_9RHIZ 7-carboxy-7-deazaguanine synthase OS=Beijerinckiaceae bacterium OX=1978229 GN=queE PE=3 SV=1
MSVYQVKEIFRTLQGEGAQAGRAAVFCRFAGCNLWSGRDEDRERSPCWFCDTDFVGTDGTDGGKFRTPQELTAAIAKAWGDAPRDHAYVVFTGGEPLLQLDEALLETVHEAGFACGLETNGTLPIPQGVDWVCVSPKASTKLQARSGDELKLVFPQEDLPPETLEELAFTHFFLQPMDGPQLAEYTAAAVAYCQEHPRWRLSLQTHKWIGLR

SEQ ID NO: 28383 - protein, 208 aa, Belliella baltica
  REGION 1..208: note = tr|I3Z0Z2|I3Z0Z2_BELBD 7-carboxy-7-deazaguanine synthase OS=Belliella baltica (strain DSM 15883 / CIP 108006 / LMG 21964 / BA134) OX=866536 GN=queE PE=3 SV=1
MEKKKEVEAGTMLPVMEAFYTIQGEGTFSGHPAYFIRLGGCDVGCVWCDVKDSWEAAKWPVLTIEDIVAEARQYPGRKVVITGGEPLMYNLNPLTTLLKKEGFTTHIETSGAHPFSGEFDWVCFSPKKFKAPHPSIYEVANELKVVIFHKSDFDFAEKHASQVNKACKLLLQPEWSKAKIFTNEIITYAKSHPNWNISLQTHKFMDIP

SEQ ID NO: 28384 - protein, 208 aa, unidentified
  source 1..208: note = Belliella buryatensis
  REGION 1..208: note = tr|A0A239DTP8|A0A239DTP8_9BACT 7-carboxy-7-deazaguanine synthase OS=Belliella buryatensis; OX = 1500549 GN=queE PE=3 SV=1
MEKRDVVAAGLMLPVMEAFYTIQGEGTFSGHPAYFIRLGGCDVGCVWCDVKDSWEAAKWPVLSIEDIVAEAKQYTGRKVVITGGEPLMYNLGPLTALLKSEGFSTHMETSGAHPFSGDFDWVCFSPKKFKAPHPSIYEHANELKVVIYHVSDFDFAEKHAALVQNDCQLLLQPEWSKAATFTSKIIDYVKFHPNWKISLQTHKFMDIP

SEQ ID NO: 28385 - protein, 208 aa, Belliella pelovolcani
  REGION 1..208: note = tr|A0A1N7MZ48|A0A1N7MZ48_9BACT 7-carboxy-7-deazaguanine synthase OS=Belliella pelovolcani; OX = 529505 GN=queE PE=3 SV=1
MEKRDAVAAGLMLPVMEAFYTIQGEGTFSGHPAYFIRLGGCDVGCVWCDVKDSWDAAKWPVLSIDEIVAGAKQYLGRKVVITGGEPLMYDLGPLTTLLKSEGFSTHIETSGAHPFSGDFDWVCFSPKKFKAPHPSIYEHANELKVVIYHQSDFDFAEKHAALVQNDCQLLLQPEWSKAATFTSKIIDYVKFHPNWKISLQTHKFMDIP

SEQ ID NO: 28386 - protein, 204 aa, Belnapia rosea
  REGION 1..204: note = tr|A0A1G6UF55|A0A1G6UF55_9PROT 7-carboxy-7-deazaguanine synthase OS=Belnapia rosea; OX = 938405 GN=queE PE=3 SV=1
MSYTVHEIFLTAQGEGANLGRTAVFIRFAGCNLWTGREEDRADAVCRFCDTEFRGGERYDAAGLVAAAAALWPAGAPGRFCVLTGGEPLLQVDAPLLAALRAAGFTIAVETNGTQPLPGPIDWVCVSPKANAPLALTAADELKLVFPQAGMDPTAFRDFPARERWLSPMDGPALTENTAAAAEYCLRHPEWRLNIQAHKSWGVR

SEQ ID NO: 28387 - protein, 210 aa, Bergeriella denitrificans
  REGION 1..210: note = tr|A0A378UJY5|A0A378UJY5_BERDE 7-carboxy-7-deazaguanine synthase OS=Bergeriella denitrificans OX=494 GN=queE PE=3 SV=1
MTEIRPADPQYRIVEIFESLQGEGYNTGMPAVFIRLGKCNLACSWCDTDYLTFKMLSLSEILGRLKNHTARNIIITGGEPTIQPHLDSLLDALKAQGYYLCIETNGLNPAPPQIDFISASPKACYAEKYAKQCIKTADEVRIVADGDVTAFAEEMERKIRARHYYLSPCEQNGEMNIYDTIRQIGLLNSRPDAPVHWQLSVQTHKWAGIE

SEQ ID NO: 28388 - protein, 210 aa, Bergeyella zoohelcum
  REGION 1..210: note = tr|A0A376BYZ8|A0A376BYZ8_9FLAO 7-carboxy-7-deazaguanine synthase OS=Bergeyella zoohelcum; OX = 1015 GN=queE PE=3 SV=1
MTKTQNNTALESGEMLPVMEHFYTIQGEGAYTGTPAYFIRLGGCDVGCHWCDVKESWDPNIHPLHNAREIADIAASYSKTIVLTGGEPLMWNLAPLTSRLKEKGCKIHIETSGAYPMSGHLDWITLSPKKTGLPLEEIYQKASELKVIIFNQHDFKFAEEQAAKVNENCMLYMQSEWSKRDKMYPEITDYILKNPQWRASVQTHKYLNIP

SEQ ID NO: 28389 - protein, 210 aa, Bergeyella zoohelcum; identical to SEQ ID NO: 28388
  REGION 1..210: note = tr|K1M543|K1M543_9FLAO 7-carboxy-7-deazaguanine synthase OS=Bergeyella zoohelcum ATCC 43767 OX=883096; GN = queE PE=3 SV=1

SEQ ID NO: 28390 - protein, 223 aa, Bermanella marisrubri
  REGION 1..223: note = tr|Q1N1N5|Q1N1N5_9GAMM 7-carboxy-7-deazaguanine synthase OS=Bermanella marisrubri OX=207949 GN=queE PE=3; SV = 1
MAKSGFNVKEAFYTLQGEGARAGRASVFIRFSKCNLWNGKESGRGAAVCQFCDTDIVGTDGQNGGTYNQQALVELALSLWPQLTDDTKSKPYVVFTGGEPALQLTESLVSDFQQAGFECAVESNGTLPLPTNLDWVCISPKGTSEIVVKQCDELKLVYPQVDLSPDAVSGISASYFYLSPMADYGEQNSGMIIRENMQAATQYCLDHPQWRMSLQTHKLLGID

SEQ ID NO: 28391 - protein, 220 aa, Bermanella sp.
  REGION 1..220: note = tr|A0A1Y5D3U4|A0A1Y5D3U4_9GAMM 7-carboxy-7-deazaguanine synthase OS=Bermanella sp. 47_1433_sub80_T6 OX=1856278 GN=queE PE=3 SV=1
MASDLRIKEAFYTLQGEGARSGRASVFIRFSKCNLWNGRESGRAAALCQFCDTDITGIDGENGGVYSPSALLELALKLWPAGSDGMPYVVFTGGEPALQLTDSLVAAFKEAGFETAVESNGTLPLPKNLDWVCISPKGKSDVIIKQCDELKLVFPQDDLQPEQVNHISASHYFISPMAYYGENESSGMIVRENMQAATQYCLKHPKWRMSLQTHKLLGID

SEQ ID NO: 28392 - protein, 216 aa, Bermanella sp.
  REGION 1..216: note = tr|A0A2D4S1C4|A0A2D4S1C4_9GAMM 7-carboxy-7-deazaguanine synthase OS=Bermanella sp.; OX = 2024825 GN=queE PE=3 SV=1
MFKVKEAFYTLQGEGARAGRASVFIRFSKCNLWNGKESGRKAAVCQFCDTDITGTDGENGGVYSQAELLNLALRLWPNTQHGSPYVVFTGGEPALQLTESLVDDFQQHRFECAVESNGTLPLPKNLDWVCISPKGKSDVIIKQCHELKLVYPQVDLSPDDINDIQADYYYLSPMADYGVENSGMIIRENMQSATQYCLDHPQWRMSLQTHKLLGIN

SEQ ID NO: 28393 - protein, 249 aa, unidentified
  source 1..249: note = Bernardetia litoralis
  REGION 1..249: note = tr|I4AI47|I4AI47_BERLS 7-carboxy-7-deazaguanine synthase OS=Bernardetia litoralis (strain ATCC 23117 / DSM 6794 / NBRC 15988 / NCIMB 1366 / Sio-4) OX=880071; GN = queEPE=3 SV=1
MHSFCAVEFAHLHRIIHFLTLNYETKMQTLSSSKIDESSISMKKTLGVSSDTTLPVMEAFYTLQGEGVFAGHAAYFIRLGGCDVGCFWCDVKESWDKEAHPQLSISQIVKEASSFPARLAIITGGEPLMHNLNELTEELKKEGFRIHIETSGAHPLSGTLDWITLSPKRFKKPLKDIYQKSHELKMVIYALSDLEWAQTEAKKVSDSCVLLIQPEWSKSEKNLPILIEFVKENPRWKLSLQTHKFMNIP

SEQ ID NO: 28394 - protein, 212 aa, unidentified
  source 1..212: note = Unknown
  REGION 1..212: note = tr|B6BW81|B6BW81_9PROT 7-carboxy-7-deazaguanine synthase OS=beta proteobacterium KB13 OX=314607 GN=queE; PE = 3 SV=1
MSTLRINEIFYSIQGESSRIGKPTVFVRLTGCPMRCTYCDTAYAFHEGQQQEIEEIIQEIKQFDTNYVTVTGGEPLAQKNCIDLMNQLCELGYQVSLETGGALDIKDVHAKVKIILDVKTPKSNEDKNNFWPNLENIRTNDEIKFVIQDYEDFSWSMDIIKKYQLNQGQILFSPVYKVLANEQLAGWILKHQLNVRLQVQLHKILWGDKKGV

SEQ ID NO: 28395 - protein, 211 aa, unidentified
  source 1..211: note = Unknown
  REGION 1..211: note = tr|A0A2T0XB34|A0A2T0XB34_9PROT 7-carboxy-7-deazaguanine synthase OS=beta proteobacterium MWH-P2sevCIIIb OX=323426 GN=queE PE=3 SV=1
MTYSVKEIFYTLQGEGAQAGMPAVFLRFAGCNLWTGRESERSTAVCQFCDTDFIGTDGINGNKFLNAASLAAKVASLWPQQSPDHRLVVCTGGEPLLQLDADAIHALHALGFRIAVETNGTIKAPEGIDWLCVSPKSDAPLNQISGQELKLVFPQIKARPELFEALDFEHFLLQPMDSNEQAANTRAAIQYCLDHPKWRLSLQTHKIIGIA

SEQ ID NO: 28396 - protein, 210 aa, unidentified
  source 1..210: note = Betaproteobacteria bacterium
  REGION 1..210: note = tr|A0A1Z8NWA4|A0A1Z8NWA4_9PROT 7-carboxy-7-deazaguanine synthase OS=Betaproteobacteria bacterium TMED22 OX=1986845 GN=queE PE=3 SV=1
MYSVKEIVYTLQGEGAQSGRAAVFCRFSGCNLWSGREEDRLSADCSFCDTDFVGVNGVNGGKYRSSTVLADEVERQWLSGARARRYVVCTGGEPLLQLDRELIVEFHNRGFEVAIETNGTLPVPEGVDWVCVSPKGTVPVLAKSGDELKLVYPQIDVDPSLFLSWDFNHFFIQPKDGLDVELNTQLSIQFCKEHPQWRLGLQTHKIIGVE

SEQ ID NO: 28397 - protein, 215 aa, unidentified
  source 1..215: note = Betaproteobacteria bacterium
  REGION 1..215: note = tr|A0A3D0LSU2|A0A3D0LSU2_9PROT 7-carboxy-7-deazaguanine synthase OS=Betaproteobacteria bacterium OX=1891241 GN=queE PE=3 SV=1
MPLQPLRVNEIFFSLQGETSRAGLPTVFIRLTGCPLRCGYCDTRYAFTEGAPLSIDDILAQTDRYRCRTVTVTGGEPLAQKNCLPLLQSLCDAGYSVSLETSGALDVSGVDPRVSKILDIKTPGSGEAAKHRWENLSSMTRHDEFKLVLCDEADYRWAKQLLAEKQLTALAPVLFSAAQDQLSPTRLADWLLRDRLPVRLQIQLHKVLWGERRGR

SEQ ID NO: 28398 - protein, 204 aa, Bibersteinia trehalosi
  REGION 1..204: note = tr|A0A3R8NG82|A0A3R8NG82_BIBTR 7-carboxy-7-deazaguanine synthase OS=Bibersteinia trehalosi OX=47735 GN=queE PE=3 SV=1
MNTPQYRIVEIFETLQGEGFNTGMPSIFIRFGKCNLACPWCDTNYNQFEMKSLDEIMQIVRNFTAKNIIITGGEPTIQPDLEILLNQLKAEGYFIAIETNGLKPVPLQIDYIATSPKRLYQKNYLKHHIPYANEVRIVVDGDVQDFCEQIENTIKAERYYLSPCEKDGVMNMLETITQLGLLNQRPNKPKWQLSIQTHKIAGIE

SEQ ID NO: 28399 - protein, 204 aa, Bibersteinia trehalosi
  REGION 1..204: note = tr|A0A4V7IB02|A0A4V7IB02_BIBTR 7-carboxy-7-deazaguanine synthase OS=Bibersteinia trehalosi USDA-ARS-USMARC-188 OX=1263829 GN=queE PE=3 SV=1
MNTPQYRIVEIFETLQGEGFNTGMPSIFIRFGKCNLACPWCDTNYNQFEMKSLNEIMQTVRNFTAKNIIITGGEPTIQPDLEILLNQLKAEGYFIAIETNGLKPVPLQIDYIATSPKRLYQKNYLKHHIPYANEVRIVVDDDVLDFCEQIENTIKAERYYLSPCEKDGVMNMLETITQLGLLNQRLNKPKWQLSIQTHKIAGIE

SEQ ID NO: 28400 - protein, 213 aa, Bilophila sp.
  REGION 1..213: note = tr|G1V346|G1V346_9DELT 7-carboxy-7-deazaguanine synthase OS=Bilophila sp. 4_1_30 OX=693988 GN=queE PE=3; SV = 1
MAYRVKEIFYTLQGEGAQAGRPAVFCRFSGCNLWSGRPEDRATAKCRFCDTDFVGADAGVFATAEELAQTVAATFPVLDPQAYGGRKPYIVFTGGEPALQLTRELIDRLHALGFELGVESNGTLPLPEGLDWITVSPKGSNPLATTSGHELKLVWPQQGCSPEDFEDLDFRHFLLQPCDDPRNKANTRECIAYCLLHPRWSLGLQTHKWVGVR

SEQ ID NO: 28401 - protein, 213 aa, Bilophila wadsworthia
  REGION 1..213: note = tr|E5Y8H4|E5Y8H4_BILWA 7-carboxy-7-deazaguanine synthase OS=Bilophila wadsworthia 3_1_6 OX=563192 GN=queE; PE = 3 SV=2
MAYRVKEIFYTLQGEGAQAGRPAVFCRFSGCNLWSGRPEDRATAKCRFCDTDFVGADAGVFATAEELAQTIAATFPVLAPQAYGGRKPYIVFTGGEPALQLTRELIDRLHALGFELGVESNGTLPLPEGLDWITVSPKGSNPLATTSGHELKLVWPQQGCSPEDFEDLDFRHFLLQPCDDPRNKANTRECIAYCLLHPRWSLGLQTHKWVGVR

SEQ ID NO: 28402 - protein, 223 aa, Biostraticola sp.
  REGION 1..223: note = tr|A0A4U2UPU1|A0A4U2UPU1_9ENTR 7-carboxy-7-deazaguanine synthase OS=Biostraticola sp. BGMRC 2031 OX=2575567 GN=queE PE=3 SV=1
MQYPLNELFQTLQGEGYFTGVPAIFIRLQGCPVGCSWCDTKHTWRVDPRREIPPGEIPLKTGDSDSWAAISAEAMLDLIARQGYTARHVVITGGEPCIHDLLPLTQILERRGFHCQIETSGTHPIRCSPRTWVTVSPKVGMRGALTVLPEALRRADEIKHPVARLRDIERLDALLAVLDDEKPRVIALQPVSRKDDATRLCIDTCIARNWRLSLQTHKYLNIA

SEQ ID NO: 28403 - protein, 277 aa, Biostraticola tofi
  REGION 1..277: note = tr|A0A4R3Z2G7|A0A4R3Z2G7_9ENTR 7-carboxy-7-deazaguanine synthase OS=Biostraticola tofi; OX = 466109 GN=queE PE=3 SV=1
MPGFPRDAAGNNPTDVNPLRRVFIFPPGLKTARWLFAGSGYNHVTNQTRESVNPMQYPLNEIFQTLQGEGYFTGVPAVFIRLQGCPVGCSWCDTKHTWEQDAEKEVPLGDIPLKTVDSEQWANVTPEAILEIIAEQGYTAQHVVITGGEPCIHDLTSLTHILEQHGFSCQIETSGTHEIRCTTQTWVTVSPKVNMRGGMEVQKHALQRADEIKHPVARERDIEHLDELLAMLTDDKQRVIALQPISQQDAATRLCIKTCIARNWRLSMQTHKYLHIA

SEQ ID NO: 28404 - protein, 206 aa, Bisgaardia hudsonensis
  REGION 1..206: note = tr|A0A4R2N0A8|A0A4R2N0A8_9PAST 7-carboxy-7-deazaguanine synthase OS=Bisgaardia hudsonensis OX=109472 GN=queE PE=3 SV=1
MNKKPITYNIVEIFESLQGEGFNTGMPCVFIRFGKCNLACPWCDTPYNQFHTMSLEEIYAKVRSFSAKNIIITGGEPTIQPQLETLLDKLKENGYFLAIETNGLKNVPPQIDYIATSPKRIYQKQYIKRHIDTAHEVRIVVDGNVIEFCQFIEKTIQATHYYLSPCEENGKMNMLDTITQLGILNQRKNKPHWQLSIQTHKMAKID

SEQ ID NO: 28405 - protein, 210 aa, Bizionia algoritergicola
  REGION 1..210: note = tr|A0A5D0QSM5|A0A5D0QSM5_9FLAO 7-carboxy-7-deazaguanine synthase OS=Bizionia algoritergicola OX=291187 GN=queE PE=3 SV=1
MTRSERQELLDKGLLLPLMEEFYTIQGEGFHKGTAAYFIRIGGCDVGCHWCDVKESWLAELHPPTETEKIVANAEKYSKTIVVTGGEPLMWDMTVLTNQLKAKGMQTHIETSGAYELTGAWDWICLSPKKLKLPTQRVYDNANELKVIVYNKDDFKFAEEQAAKVNKDCILYLQPEWSKRDKMVPEIVDYVMANPKWKVSLQTHKYLNIP

SEQ ID NO: 28406 - protein, 210 aa, Bizionia argentinensis
  REGION 1..210: note = tr|G2EAB7|G2EAB7_9FLAO 7-carboxy-7-deazaguanine synthase OS=Bizionia argentinensis JUB59 OX=1046627; GN = queE PE=3 SV=1
MTKSERQELLDNGLLLPLMEEFYTIQGEGFHKGTAAYFIRIGGCDVGCHWCDVKESWLAELHPPTDVGKIVDNAEKHSKTIVVTGGEPLMWDMNPLTSQLKAKGLQTHIETSGAYELTGEWDWICLSPKKLKLPTQRAYEKAHELKVIVFNKDDFRFAEEQAAKVNKECILYLQPEWSNRDKMVPEIVDYVMRNPQWKVSLQTHKYLNIP

SEQ ID NO: 28407 - protein, 210 aa, Bizionia echini
  REGION 1..210: note = tr|A0A1I5CNV8|A0A1I5CNV8_9FLAO 7-carboxy-7-deazaguanine synthase OS=Bizionia echini; OX = 649333 GN=queE PE=3 SV=1
MTRSERQELLDKGLLLPLMEEFYTIQGEGYHKGTAAYFIRIGGCDVGCHWCDVKESWLAELHPPTETDKIVANAEKYSKTIVVTGGEPLMWDMTQLTNQLKARGMQTHIETSGAYKLTGTWDWICLSPKKLKLPTEEVFKKAHELKCIIFNKDDFRFAEEQAAQVNKDCILYLQPEWSKREKMVPEIVDYVMANPKWKVSLQTHKYLNIP

SEQ ID NO: 28408 - protein, 210 aa, Bizionia myxarmorum
  REGION 1..210: note = tr|A0A5D0RHH8|A0A5D0RHH8_9FLAO 7-carboxy-7-deazaguanine synthase OS=Bizionia myxarmorum; OX = 291186 GN=queE PE=3 SV=1
MTKSERQELLDKGLLLPLMEEFYTIQGEGFHKGTAAYFIRIGGCDVGCHWCDVKESWLAELHPPTEIEKIVDNAEKYSKTIVVTGGEPLMWDMNPLTSQLKAKGLQTHIETSGAYELTGTWDWICLSPKKLKLPTQLVYDKAHELKVIIFNKDDFRFAEEQAAKVNKDCILYLQPEWSKRDKMVPDIVEYVMNNPQWKVSLQTHKYLNIP

SEQ ID NO: 28409 - protein, 209 aa, Bizionia paragorgiae
  REGION 1..209: note = tr|A0A1H3ZQ74|A0A1H3ZQ74_9FLAO 7-carboxy-7-deazaguanine synthase OS=Bizionia paragorgiae; OX = 283786 GN=queE PE=3 SV=1
MTEEVKDLVNKGEMLPLMEEFYTIQGEGFHKGTAAYFIRLGGCDVGCHWCDVKESWNAELHPPTLTKDIVAQAKKYSDTIVVTGGEPLMWDMTALTTQLKAEGMQVHIETSGAYELSGTWDWVCLSPKKLKLPTQGVYDVANELKTIIYNKDDFKFAEEQAARVGKDCILYMQPEWSKSDKMIPEIVDYVMKNPKWKVSLQTHKYLNIP

SEQ ID NO: 28410 - protein, 209 aa, Bizionia saleffrena
  REGION 1..209: note = tr|A0A5D0QXQ0|A0A5D0QXQ0_9FLAO 7-carboxy-7-deazaguanine synthase OS=Bizionia saleffrena; OX = 291189 GN=queE PE=3 SV=1
MTEAVKDLVNKGEMLPLMEEFYTIQGEGFHKGTAAYFIRLGGCDVGCHWCDVKESWNAELHPPTATKDIVANAKKYSDTIVVTGGEPLMWDMTALTTQLKAQGMQVHIETSGAYQLTGEWDWVCLSPKKMKLPTQGVYDVANELKTIIYNKDDFKFAEEQAAKVGKDCILYMQPEWSKSDKMIPEIVNYVMKYPKWKVSLQTHKYLNIP

SEQ ID NO: 28411 - protein, 214 aa, unidentified
  source 1..214: note = Blastocatellia bacterium
  REGION 1..214: note = tr|A0A352F4C6|A0A352F4C6_9BACT 7-carboxy-7-deazaguanine synthase OS=Blastocatellia bacterium OX=2052146 GN=queE PE=3 SV=1
MLRITEIFRSIQGESTHAGRPCTFIRLTGCPMRCVWCDSEYTFSGGEHISLAQVMDQVKLFGCRLVEVTGGEPLAQQSCRELIAALCASDYEVLVETGGYLSTENLDPRASIILDVKCPASGEAERNHWPNLERLRADKDEVKFVIADSGDWAYAKKIIDEYDLIQRTNAVLISPAWGLIDLQELAESVAASGLEVRMQLQLHKYIWGPEARGV

SEQ ID NO: 28412 - protein, 214 aa, unidentified
  source 1..214: note = Blastocatellia bacterium
  REGION 1..214: note = tr|A0A3B9MP92|A0A3B9MP92_9BACT 7-carboxy-7-deazaguanine synthase OS=Blastocatellia bacterium OX=2052146 GN=queE PE=3 SV=1
MLRVTEIFCSIQGESTHAGRPCAFVRLTGCPMRCVWCDSEYTFTGGEHVGLDEVMDQVRAFGCKLVEVTGGDPLAQPEAFTLIERLCSEGYEVLVETGGFFSTAGVDARAKIILDVKCPSSGEEPRNHWPNLERLRPDKDEVKFVIVNIADWNYTKKIIERYDLSKRAKAVLISPAWGQIDLKDLAHWVSTSGLDVRMQLQLHKYVWGPEARGV

SEQ ID NO: 28413 - protein, 211 aa, Blastochloris viridis
  REGION 1..211: note = tr|A0A0H5BQJ2|A0A0H5BQJ2_BLAVI 7-carboxy-7-deazaguanine synthase OS=Blastochloris viridis; OX = 1079 GN=queE PE=3 SV=1
MAYAVKEMFYTLQGEGRNAGRAAVFCRFSGCNLWNGRQADRGRAVCTFCDTEFVGVDGAGGGGFGSAGELAAAVAATWPAGGSGTPLVVLTGGEPLLQVDAALIAALHEQGFEIAVETNGTIAPPPGLDWICVSPKAGAQLAVTAGDELKLVFPQHGAGPSRYETLAFTHFLLQPMDGPERERNTEAAVAYCLAHPRWQLSLQIHKILCIP

SEQ ID NO: 28414 - protein, 246 aa, unidentified
  source 1..246: note = Blastomonas fulva
  REGION 1..246: note = tr|A0A222WZC0|A0A222WZC0_9SPHN 7-carboxy-7-deazaguanine synthase OS=Blastomonas fulva; OX = 1550728 GN=queE PE=3 SV=1
MTSLRLATVHPGEPEIFHSLQGEGISLGRPSVFVRLSGCNLACLWCDTPYTWYFTGHNARHRGCETFVRRENSLTLDIAEVARRIAEFGCRHIVFTGGEPLLQQPALAALCALLGPDYHIEIESNGTVALTAAFDAHVDQLNLSPKLAHSGNAADLRVNETSLAGYARDPRAWFKFVVASPEDADEIDALASQYAIAAERILLMPEGTSPAVLQQRAHWLAPLCLDRGWRFTDRLHIHLYGDTRGT

SEQ ID NO: 28415 - protein, 246 aa, Blastomonas natatoria
  REGION 1..246: note = tr|A0A2V3V8G9|A0A2V3V8G9_9SPHN 7-carboxy-7-deazaguanine synthase OS=Blastomonas natatoria; OX = 34015 GN=queE PE=3 SV=1
MQRLRLATIVAEEPEIFHSLQGEGISLGRPSVFVRLSGCNLACHWCDTPYTWFFDGHPGAHRGDRQYERRSNSVTLDVGDIAARIRAFDCHHIVFTGGEPLLQQPALAGLCALLGPDYHIEIESNGTVALTPGFASHVDQLNLSPKLGHSGNTDTARLNRDALAIHARDPRAWFKFVIADPDDAEEVAALAERFAIAAERIILMPEGTTPADLRARSAWLAPLCLDRGWRFTDRLHIHLYGDTRGT

SEQ ID NO: 28416 - protein, 246 aa, Blastomonas sp.
  REGION 1..246: note = tr|W9BS44|W9BS44_9SPHN 7-carboxy-7-deazaguanine synthase OS=Blastomonas sp. CACIA14H2 OX=1419876 GN=queE; PE = 3 SV=1
MTRLRLATVRPQEPEIFHSLQGEGVSIGRPSVFVRLSGCNLACHWCDTPYTWFFEGHAGPHRGDRQYDRRANSVTLDIAEVVDRIRGFDCSHIVFTGGEPLLQQPALAALCERLGPDYHVEIESNGTVALTPGFAPCVHQLNLSPKLGHSGNAESARCNDAALAGYARDPRAWFKFVIAEPADAEEVSALADRHAIAPQRIILMPEGTDSATLHARSAWLAPLCLDRGWRFTDRLHIHLYGDTRGT

SEQ ID NO: 28417 - protein, 246 aa, Blastomonas sp.
  REGION 1..246: note = tr|A0A2D6H2B3|A0A2D6H2B3_9SPHN 7-carboxy-7-deazaguanine synthase OS=Blastomonas sp.; OX = 1909299 GN=queE PE=3 SV=1
MTRLRLATVRPGEPEIFHSLQGEGISMGRPSVFVRLSGCNLACHWCDTPYTWFFEGHAGPHRGEQRYDRRANSVTLDIAAVAAAVRQYDCPHIVFTGGEPLLQQPALAALCAMLGPAYHIEIESNGTVALTAGFAPHVHQINLSPKLGHSGNAESTRRKEDALAAYASDPRAWFKFVIADPADADEVAALAERFAIPAERIILMPEGTDSATLRSRTAWLAPLCLDRGWRFTDRLHIHLYGDTRGT

SEQ ID NO: 28418 - protein, 228 aa, unidentified
  source 1..228: note = Blastopirellula cremea
  REGION 1..228: note = tr|A0A368KU97|A0A368KU97_9PLAN 7-carboxy-7-deazaguanine synthase OS=Blastopirellula cremea OX=1031537 GN=queE PE=3 SV=1
MRIAEIYPSIQGEGLLTGEPSTFVRASGCNLRCWFCDTPHASWNPEGEDLSVAEILGRIELLDVSNVVLTGGEPMLFAELIPLCEGIRKSGRHITVETAGTLYLPLVCDLMSLSPKLSNSTPDAETYPRWSRRHEQTRQQMDVVQRLLDEFPYQLKFVIDRQTDCDEVLQYLSLLPGVERERVFVMPQGIEVSQLEAIGTWLEPWAKTHGLTVCHRRQIEWFGNVRGT

SEQ ID NO: 28419 - protein, 228 aa, Blastopirellula marina
  REGION 1..228: note = tr|A3ZZE4|A3ZZE4_9PLAN 7-carboxy-7-deazaguanine synthase OS=Blastopirellula marina DSM 3645 OX=314230; GN = queE PE=3 SV=1
MRIAEIYRSIQGEGALTGVTSTFVRASGCNLRCWFCDTPHASWKPEGEDLSVAEILGRIALLDCDHVVLTGGEPMLFAEMIPLCEGIHVAGRHITIETAGTLYLPLTCDVMSISPKMSNSAPPLDDHPRWRRRHEQTRKAPEVIRQLIDEHAYQFKFVIDRPADAEEVLRYLDLYPQINRQTVFMMPQGTEAGELEAIRTWLEPWCDQHQLQFGPRRQIEWFGALRGT

SEQ ID NO: 28420 - protein, 228 aa, Blastopirellula marina
  REGION 1..228: note = tr|A0A2S8FDT8|A0A2S8FDT8_9PLAN 7-carboxy-7-deazaguanine synthase OS=Blastopirellula marina OX=124 GN=queE PE=3 SV=1
MRIAEIYRSVQGEGALTGVTSTFVRASGCNLRCWFCDTPHASWRPEGEDLSVAEILGRIALLDCDHVVLTGGEPMLFSEMIPLCEGIRDAGRHITIETAGTLYLPLPCDLMSISPKMSNSAPPLDDFPRWHRRHEQTRNAPDVILHLIAEHAYQFKFVIDRPADADEVLRYLDRFPQIDRSCVFMMPQGTELSELEATGKWLQPWCDEHQLQFGPRRQIEWYGAVRGT

SEQ ID NO: 28421 - protein, 228 aa, Blastopirellula sp.
  REGION 1..228: note = tr|A0A2G2JNY9|A0A2G2JNY9_9PLAN 7-carboxy-7-deazaguanine synthase OS=Blastopirellula sp.; OX = 2024826 GN=queE PE=3 SV=1
MRVAEIYKSIQGEGRLTGTESVLVRASGCNLRCWFCDTPFASWHPEGEDLSVAEVLGRIELLNCQHVILTGGEPMLFAELIPLCEGIRQRGRHITIETAGTLYLPVVSDLMSISPKMKNSAPDPKEHARWHQRHEQSRKSPEVIRRLIDEYECQFKFVIDHLDDCGEVLAYLDEFLEINRDDVYLMPQGTTLEEITIKGEWLEPWCAENDLHYCPRRQIEWFGFVRGT

SEQ ID NO: 28422 - protein, 228 aa, Blastopirellula sp.
  REGION 1..228: note = tr|A0A2E0B0E5|A0A2E0B0E5_9PLAN 7-carboxy-7-deazaguanine synthase OS=Blastopirellula sp.; OX = 2024826 GN=queE PE=3 SV=1
MKIAEIYESVQGEGFLTGTDSIFVRTSGCNLRCRFCDTPFTSWAPVGDELTIDQILAQIAPFAARHVVITGGEPLLHSDLVPLCSELAALDKHITIETAGTLSLDLKCDLMSISPKLSNSTPSMQLAESWREKHESNRFAPEVIRSLTNGYPYQFKFVVESPQDCLEIEEYLASFPNIDRQRVLLMPEGTDVDSLNATKQWLQPYCEQHNLHFCPRMQITWFGYERAT

SEQ ID NO: 28423 - protein, 206 aa, Blattabacterium cuenoti
  REGION 1..206: note = tr|M5AD37|M5AD37_9FLAO 7-carboxy-7-deazaguanine synthase OS=Blattabacterium cuenoti BPAA OX=1229512; GN = queE PE=3 SV=1
MNEKISYPIKESFYSIQGEGHYYGIAAYFIRFGGCNIKCDWCDTKESWNIKQKDFLPIHKIIANVVNNNHQIKTVVITGGEPTMWNLSPLIKKLKKKGYRIHIETSGSYPIKEKYVDWITISPKKIKLPIRENYKKINELKIVISDENDFSFAEEQAAYIETTNCFLFLQPEWNNTFNILPKIISYIKKNPKWRISLQIHKMLNIP

SEQ ID NO: 28424 - protein, 206 aa, Blattabacterium cuenoti
  REGION 1..206: note = tr|A0A224AJZ2|A0A224AJZ2_9FLAO 7-carboxy-7-deazaguanine synthase OS=Blattabacterium cuenoti STAT OX=1457030 GN=queE PE=3 SV=1
MKKDISYPIKESFYSIQGEGFYYGIAAYFIRFGGCNIKCDWCDTKESWNIEKKDFISIHKIISNVVNNNHKIKTVIITGGEPTMWNLFPLIEKLKKKKYRIHIETSGSYPIKEKYVDWITISPKKIKLPIQENYKKINELKIIISDENDFLFAEEQASYIKSTNCFLFLQPEWNNISWILPKIVSYIKKNPKWRISLQIHKILNIP

SEQ ID NO: 28425 - protein, 203 aa, Blattabacterium sp.
  REGION 1..203: note = tr|I3QGB1|I3QGB1_9FLAO 7-carboxy-7-deazaguanine synthase OS=Blattabacterium sp. (Blaberus giganteus); OX = 1186051 GN=queE PE=3 SV=1
MKEISYPIKESFYSIQGEGHFYGIAAYFIRFEGCNIKCDWCDTKESWNIKKKDFVPIHKIIANINNYKVKTVIITGGEPMMWDLYPLIKKLKKKEYRIHIETSGFYPIKEKYVDWITISPKKIKRPIQENYKKINELKIIISDENDFFFAEEQANYVKSKNCFLFLQPEWTNIFRIIPKIISYIKENPKWRISLQIHKMLNIP

SEQ ID NO: 28426 - protein, 203 aa, Blattabacterium sp.
  REGION 1..203: note = tr|G7SR62|G7SR62_9FLAO 7-carboxy-7-deazaguanine synthase OS=Blattabacterium sp. (Mastotermes darwiniensis) str. MADAR OX=1074889 GN=queE PE=3 SV=1
MKSISFPIKETFYSLQGEGHYFGIAAYFIRFGGCNIQCDWCDTKYSWKIKKKDFLTISQIINNINNEKVKTIVITGGEPTMWDLSPLTRILKKKGYRIHVETSGSYPIDEKNIDWITLSPKKKKRPLEENYKKMNELKIIIDDESDFFFAEEQALYAKKNNCIFILQPEWKKTIKIIPKIISYIKNHPKWKISLQIHKILNIP

SEQ ID NO: 28427 - protein, 222 aa, Blautia luti
  REGION 1..222: note = tr|A0A564VXI1|A0A564VXI1_9FIRM 7-carboxy-7-deazaguanine synthase OS=Blautia luti OX=89014; GN = queE PE=3 SV=1
MSTYQVVEKFVSINGEGRRAGELAAFIRFKGCNLQCSYCDTSWANEPGCESERLTEEEILSWIRETGVKNVTLTGGEPLLRKGMEELIEAILEDPSRRVEIETNGSVDLKPYHILKKRPFFTMDYKAPDSGMEKEMLLSNLELLGSEDTLKFVVSSRRDMEKALEILEKYRLVGKTAVYFSPVFGRIQPVEIVDFLMEKKLNDVKLQIQLHKVIWDPQKRGV

SEQ ID NO: 28428 - protein, 222 aa, unidentified
  source 1..222: note = Blautia obeum
  REGION 1..222: note = tr|A0A367FV02|A0A367FV02_9FIRM 7-carboxy-7-deazaguanine synthase OS=Blautia obeum; OX = 40520 GN=queE PE=3 SV=1
MSTYQVVEKFVSINGEGRRAGELAAFIRFKGCNLQCSHCDTSWANEPGCESERLTEEEILSWIRETGVKNVTLTGGEPLLRKGMEELIEAILEDPSQRVEIETNGSVDLKPYHILKKRPSFTMDYKAPDSGMEKEMLLSNLELLGSEDTLKFVVSSRRDMEKALEILEKYRLVGKTAVYFSPVFGRIQPVEIVDFLMEKKLNDVKLQIQLHKVIWDPQKRGV

SEQ ID NO: 28429 - protein, 222 aa, unidentified
  source 1..222: note = Blautia obeum
  REGION 1..222: note = tr|A0A411ZLJ8|A0A411ZLJ8_9FIRM 7-carboxy-7-deazaguanine synthase OS=Blautia obeum; OX = 40520 GN=queE PE=3 SV=1
MSKYEVVEKFVSINGEGTKAGQLAVFIRFKGCNLKCKYCDTKWANEQDTLYQPMTEEEILDYVLSTGVKNVTLTGGEPLLRDDIEKVITALAENNLNVEIETNGSIFLDKIRKLHKENVTFTMDYKLSCSGMEQSMNLGNFDILNSNDTVKFVVGSREDLIKTKQIMEKYNLYGKCNLYISPVFGMIEPEEIVDFMKENVMNDVNMQIQLHKIIWSPDKKGV

SEQ ID NO: 28430 - protein, 267 aa, Blautia producta
  REGION 1..267: note = tr|A0A4P6M2J6|A0A4P6M2J6_9FIRM 7-carboxy-7-deazaguanine synthase OS=Blautia producta; OX = 33035 GN=queE_2 PE=4 SV=1
MHHCRLEEGQTGRCRVRKNVEGRIESVNYGRCTALALDPIEKKPLRRFYPGKKVLSVGSFGCNLSCPFCQNHEISMAGENGTDYIYLSPKELASQAEALRERGNIGAAFTYNEPLVGYEYVRDAAMEVRKRGMKNILVTNGAFTEETEEAVLPYIDAMNIDLKGFTEDYYEKLGGNLETVKAFIKKAVRACHVELTTLVVPGENNSVDEMRKLAEWVATLDCEIPLHVTRFFPRWKMRDREAADVGNVYQLAEEAGKYLKYVYTGNC

SEQ ID NO: 28431 - protein, 231 aa, Blautia producta
  REGION 1..231: note = tr|A0A4P6LRL7|A0A4P6LRL7_9FIRM 7-carboxy-7-deazaguanine synthase OS=Blautia producta; OX = 33035 GN=queE_1 PE=4 SV=1
MPINGFNKTTLLDYPGKIAATIFLGSCNFRCPFCHNSGLVLSPGEQPVIPMEDVLKVLKKRRGILEGVCITGGEPTLDKDIFCLVDKIKELGYPVKLDTNGSHPWILKKLINNKMIDMVAMDIKSSKESYSRVAGSKNLDLKPICESVDFLMSGSIPYEFRTTVVRELHTQEDFRSIGNWLAGCSAYYLQAYKDSPEVIRPGFSSYSKRDLDYFCLILSRTIPAVYIRGID

SEQ ID NO: 28432 - protein, 216 aa, Blautia sp.
  REGION 1..216: note = tr|A0A416NSX2|A0A416NSX2_9FIRM 7-carboxy-7-deazaguanine synthase OS=Blautia sp. AF22-5LB; OX = 2292964 GN=queE PE=3 SV=1
MKVVEKFTSINGEGTRAGELAVFIRFKGCNLRCSYCDTMWANEPECPYKEETPEEILNYVLGTGIHNVTLTGGEPLLQKDIRDLIHLLLQAGLQVEIETNGAVDLAAFCEERPVFTMDYKLPSSGCEDHMITENMELLEKNDTVKFVSGSQEDLLKALELIRTYDLTNRCHVYLSPVFGSIEPVQIVEFMLKHRLNGVRLQIQMHKVIWDPDERGV

SEQ ID NO: 28433 - protein, 216 aa, Blautia sp.
  REGION 1..216: note = tr|A0A373IQM8|A0A373IQM8_9FIRM 7-carboxy-7-deazaguanine synthase OS=Blautia sp. AM16-16B; OX = 2292969 GN=queE PE=3 SV=1
MKVVEKFTSINGEGTRAGELAVFIRFKGCNLRCSYCDTMWANEPECPYKEETPEEILNYVLGTGIHNVTLTGGEPLLQKDIRDLIHLLLQAGLQVEIETNGAVDLAAFCEERPVFTMDYKLPSSGCEDHMITENMELLEKNDTVKFVSGSQEDLLKALELIRTYDLTNRCHVYLSPVFGSIEPVQIVEFMLKHRLNGVRLQIQIHKVIWDPDKRGV

SEQ ID NO: 28434 - protein, 212 aa, unidentified
  source 1..212: note = Unknown
  REGION 1..212: note = tr|A0A1U9VD68|A0A1U9VD68_9RALS 7-carboxy-7-deazaguanine synthase OS=blood disease bacterium A2-HR MARDI OX=1944648 GN=queE PE=3 SV=1
MTYAVKEIFYTLQGEGANTGRAAVFCRFAGCNLWSGREADRATAICQFCDTDFVGTDGTQGGKYPTADALADTVAAQWPADATGGQPLVVCTGGEPLLQLDRPLIDALHARGFEIAIETNGTLAVPDGIDWVCVSPKMGAELVVTRGDELKVVIPQQDQDLDAYERLDFRHFFLQPMDGPLARQNTALAVDLCQRRPRWHLSLQTHKMLGIR

SEQ ID NO: 28435 - protein, 212 aa, unidentified; identical to SEQ ID NO: 28434
  source 1..212: note = Unknown
  REGION 1..212: note = tr|G2ZJ30|G2ZJ30_9RALS 7-carboxy-7-deazaguanine synthase OS=blood disease bacterium R229 OX=741978 GN=queE; PE = 3 SV=1

SEQ ID NO: 28436 - protein, 213 aa, unidentified
  source 1..213: note = Bombella intestini
  REGION 1..213: note = tr|A0A1S8GNE9|A0A1S8GNE9_9PROT 7-carboxy-7-deazaguanine synthase OS=Bombella intestini; OX = 1539051 GN=queE PE=3 SV=1
MPYIVKELFATLQGEGAHSGRAAIFCRFTGCNLWSGREEDRYKAQCTFCDTDFIGTDGPGGGRFATAEALAAALDDCWQAHTADGTHRYVVFTGGEPLLQLDAALIAAVKARGFTIAVETNGSLLAPEGIDWVCVSPKPGQPLKQTHGHELKLVYPQQTLSPEQFAALDFQHFWLQPMDGPERLANTEKAVRYCQSHPQWRLSLQTHKLIGIP

SEQ ID NO: 28437 - protein, 210 aa, unidentified
  source 1..210: note = Bordetella ansorpii
  REGION 1..210: note = tr|A0A157RAM5|A0A157RAM5_9BORD 7-carboxy-7-deazaguanine synthase OS=Bordetella ansorpii; OX = 288768 GN=queE PE=3 SV=1
MTYAVKELFKTLQGEGAHAGRAAVFCRFAGCNLWSGRESDRATAACTFCDTDFIGTDGEGGGKFAQADLLADTLAATWGEGTDKRYVVFTGGEPLLQLDAELLAAVHARGFTVAIETNGTIQPPEGIDWICVSPKGKSPVVIERGNELKLVYPQLDARPEAFAHLDFQHFFLQPMDGPARAAHTERAVQYCMQHPQWRLSLQTHKYIGIP

SEQ ID NO: 28438 - protein, 210 aa, unidentified
  source 1..210: note = Bordetella ansorpii
  REGION 1..210: note = tr|A0A157SW01|A0A157SW01_9BORD 7-carboxy-7-deazaguanine synthase OS=Bordetella ansorpii; OX = 288768 GN=queE PE=3 SV=1
MTYAVKELFKTLQGEGAHAGRAAVFCRFAGCNLWSGRESDRATAACTFCDTDFIGTDGDGGGKFARADQLADTLAATWGEGMDQRYVVFTGGEPLLQLDAELLAAVHARGFTVAIETNGTIPPPEGIDWICVSPKGKSPVVIERGNELKLVYPQLDAQPEAFAHLDFQHFFLQPMDGPARAAHTERAVQYCMRHPQWRLSLQTHKYIGIP

SEQ ID NO: 28439 - protein, 210 aa, Bordetella avium
  REGION 1..210: note = tr|Q2KZU6|Q2KZU6_BORA1 7-carboxy-7-deazaguanine synthase OS=Bordetella avium (strain 197N) OX=360910; GN = queE PE=3 SV=1
MTYSAKEIFKTLQGEGAQAGRAAVFCRFSGCNLWSGRESDRAAAACTFCDTDFVGSDGEGGGKFRDAQALADTIARTWGPDRAGRYVVFTGGEPLLQLDEALIDAVHAQGFTIAIETNGTLPVPAGVDWICVSPKGRAPVVQTRGQELKLVFPQVEAPPEAFAGLDFEHFFLQPLDSPLRRAHTEAAVQYCMAHPQWRLSVQTHKYIGIP

SEQ ID NO: 28440 - protein, 210 aa, unidentified
  source 1..210: note = Bordetella bronchialis
  REGION 1..210: note = tr|A0A193FZE1|A0A193FZE1_9BORD 7-carboxy-7-deazaguanine synthase OS=Bordetella bronchialis OX=463025 GN=queE PE=3 SV=1
MTYAVKEIFKTLQGEGAQAGRAAVFCRFAGCNLWSGRESDRATAACTFCDTDFVGTDGPGGGKFATADLLADALAAEWGSDTENRYVVFTGGEPLLQLDRALVDAVHARGFTIAIETNGTMQPPPGIDWICVSPKGTAPVVLRTGNELKLVYPQADARPEAFADLEFDHFFLQPMDGPARVANTQAIVEYCMRHPQWRLSLQTHKYIGIP

SEQ ID NO: 28441 - protein, 210 aa, Bordetella bronchiseptica
  REGION 1..210: note = tr|A0A0H3LUJ3|A0A0H3LUJ3_BORBR 7-carboxy-7-deazaguanine synthase OS=Bordetella bronchiseptica (strain ATCC BAA-588 / NCTC 13252 / RB50); OX = 257310 GN=queE PE=3 SV=1
MAYSVKELFKTLQGEGAQAGRAAVFCRFAGCNLWTGRESDRAGAACTFCDTDFVGTDGQGGGKFADAAGLADAIAACWGEHPADRYVVFTGGEPLLQLDEALLQAVHAQGFTVAIETNGTLPPPPGIDWICVSPKGRAPVVVERGHELKLVFPQADARPEAFAHLAFEHFFLQPMDGPARAAHTAQAVQYCLDHPQWRLSLQTHKYIGIP

SEQ ID NO: 28442 - protein, 210 aa, Bordetella bronchiseptica; identical to SEQ ID NO: 28441
  REGION 1..210: note = tr|A0A4U9QRF7|A0A4U9QRF7_BORBO 7-carboxy-7-deazaguanine synthase OS=Bordetella bronchiseptica OX=518 GN=queE PE=3 SV=1

SEQ ID NO: 28443 - protein, 210 aa, unidentified
  source 1..210: note = Bordetella flabilis
  REGION 1..210: note = tr|A0A193GDB0|A0A193GDB0_9BORD 7-carboxy-7-deazaguanine synthase OS=Bordetella flabilis; OX = 463014 GN=queE PE=3 SV=1
MTYAAKEIFKTLQGEGAQAGRAAVFCRFAGCNLWSGRESDRATAACTFCDTDFVGTDGPGGGKFATADELADALVAEWGPGTNGRYVVFTGGEPLLQLDGALLDAVHARGFTVAIETNGTMEPPAGIDWICVSPKGKAPVLLRHGNELKLVYPQADARPEAFAGLEFDHFFLQPMDGPDRLANTTRAVEYCMQHPQWRLSLQTHKYIGIP

SEQ ID NO: 28444 - protein, 210 aa, unidentified
  source 1..210: note = Bordetella genomosp.
  REGION 1..210: note = tr|A0A261SAG8|A0A261SAG8_9BORD 7-carboxy-7-deazaguanine synthase OS=Bordetella genomosp. 10 OX=1416804 GN=queE PE=3 SV=1
MTYAAKEIFKTLQGEGAQAGRAAVFCRFAGCNLWSGRESDRAGAACTFCDTDFVGTDGPGGGKFSTPQALARTLAATWGPERDRRYVVFTGGEPLLQLDAALLDAVHAEGFEVAIETNGTLLPPPGIDWICVSPKGTAPVALRAGNELKLVYPQLDAPPESFAGLDFEHFFLQPMDGPQRVANTERAVRYCTQHPQWRLSLQTHKYIGIP

SEQ ID NO: 28445 - protein, 210 aa, unidentified
  source 1..210: note = Bordetella genomosp.
  REGION 1..210: note = tr|A0A261U3A6|A0A261U3A6_9BORD 7-carboxy-7-deazaguanine synthase OS=Bordetella genomosp. 4 OX=463044 GN=queE PE=3 SV=1
MTYSAKEIFKTLQGEGAQAGRAAVFCRFAGCNLWSGREADRASAACTFCDTDFVGTNGEGGGKFATAALLADTIAATWGPDTKDRYVVFTGGEPLLQLDEALLEAVHAHGFTVAIETNGTLPPPPGIDWICVSPKGTAPVVIERGHELKLVYPQANALPETYAHLDFEHFFLQPMDGPARAANTEQAVQYCLQHPQWRLSLQTHKYIGIP

SEQ ID NO: 28446 - protein, 210 aa, Bordetella hinzii
  REGION 1..210: note = tr|A0A0H4WD04|A0A0H4WD04_9BORD 7-carboxy-7-deazaguanine synthase OS=Bordetella hinzii; OX = 103855 GN=queE PE=3 SV=1
MTYSAKEIFKTLQGEGAQAGRAAVFCRFSGCNLWSGRESDRATAACTFCDTDFVGTDGQGGGKFRDAQALAETIARTWGPQTRDRYVVFTGGEPLLQLDEALIAAVHAQGFAIAIETNGTLPVPPGVDWICVSPKGRAPVVQTRGQELKLVFPQPDTPPEAFAGLDFEHFFLQPMDGPLRLANTEAAVSYCMAHPQWRLSVQTHKYIGIP

SEQ ID NO: 28447 - protein, 210 aa, Bordetella holmesii
  REGION 1..210: note = tr|A0A158M4Y2|A0A158M4Y2_9BORD 7-carboxy-7-deazaguanine synthase OS=Bordetella holmesii CDC-H585-BH OX=1331206 GN=queE PE=3 SV=1
MTYSAKEIFKTLQGEGAQAGRAAVFCRFSGCNLWSGRERDRATAACTFCDTDFVGTDGEGGGKFRDAAALAATLADTWGPETAGRYVVFTGGEPLLQLDAALIAAVHAQGFTIAIETNGTLPVPAGVDWICVSPKGKAPVVQTRGQELKLVFPQADTPPEAFANLDFEHFFLQPMDGPQRLANTEAAVTYCMAHPQWRLSVQTHKYIGIP

SEQ ID NO: 28448 - protein, 210 aa, Bordetella parapertussis
  REGION 1..210: note = tr|K0M9F0|K0M9F0_BORPB 7-carboxy-7-deazaguanine synthase OS=Bordetella parapertussis (strain Bpp5); OX = 1208660 GN=queE PE=3 SV=1
MAYSVKELFKTLQGEGAQAGRAAVFCRFAGCNLWTGRESDRAGAACTFCDTDFVGTDGQGGGKFADAAGLADAIAACWGEHPADRYVVFTGGEPLLQLDEALLQAVHAQGFTVAIETNGTLPPPPGIDWICVSPKGRAPVVVERGHELKLVFPQADARPEAFAHLAFEHFFLQPMDGPARAAHTTQAVQYCLDHPQWRLSLQTHKYIGIP

SEQ ID NO: 28449 - protein, 210 aa, Bordetella parapertussis; identical to SEQ ID NO: 28441
  REGION 1..210: note = tr|Q7W9U9|Q7W9U9_BORPA 7-carboxy-7-deazaguanine synthase OS=Bordetella parapertussis (strain 12822 / ATCC BAA-587 / NCTC 13253) OX=257311 GN=queE PE=3 SV=1

SEQ ID NO: 28450 - protein, 210 aa, Bordetella pertussis; identical to SEQ ID NO: 28448
  REGION 1..210: note = sp|Q7VVJ8|QUEE_BORPE 7-carboxy-7-deazaguanine synthase OS=Bordetella pertussis (strain Tohama I / ATCC BAA-589 / NCTC 13251) OX=257313 GN=queE PE=3 SV=1

SEQ ID NO: 28451 - protein, 210 aa, Bordetella pertussis; identical to SEQ ID NO: 28448
  REGION 1..210: note = tr|A0A171JVR7|A0A171JVR7_BORPT 7-carboxy-7-deazaguanine synthase OS=Bordetella pertussis 2356847 OX=1331248 GN=queE PE=3 SV=1

SEQ ID NO: 28452 - protein, 391 aa, Bordetella petrii
  REGION 1..391: note = tr|A9IPG0|A9IPG0_BORPD 7-carboxy-7-deazaguanine synthase OS=Bordetella petrii (strain ATCC BAA-461 / DSM 12804 / CCUG 43448) OX=340100 GN=queE PE=3 SV=1
MARGGFFHGSVVGDLAAQPLDFAVQHLALHAAALRGAGGTRGPARPGRTRHGAHHLGEPLERLAAVLFLAAEGLRLDHDDAVLGHAAVGQRAQRLFDVRGQAGSTHVETQVNGAGHLVDVLAAGALGADHPELDIPLVQVQVFLDVIHRPPVYASRPAAATRAVPVKWRFGQGRPPGRGHRMTYSTKEIFKTLQGEGAQAGRAAVFCRFAGCNLWSGREADRAGAVCTFCDTDFVGTDGPGGGKFASAAQLADAIAAAWGPGTQDRYVVFTGGEPLLQLDAALLQAVHGHGFTVAIETNGTLPAPAGIDWICVSPKGSARVVIERGHELKLVYPQAEARPEAYAHLDFQHFFLQPMDGPARAANTQQAVQYCMQHPQWRLSLQTHKYIGIP

SEQ ID NO: 28453 - protein, 210 aa, unidentified
  source 1..210: note = Bordetella pseudohinzii
  REGION 1..210: note = tr|A0A0J6C913|A0A0J6C913_9BORD 7-carboxy-7-deazaguanine synthase OS=Bordetella pseudohinzii OX=1331258 GN=queE PE=3 SV=1
MTYSAKEIFKTLQGEGAQAGRAAVFCRFSGCNLWSGRESDRATAACTFCDTDFVGTDGEGGGKFRDAQALAEAIARAWGPQTHGRYVVFTGGEPLLQLDEALIAAVHAQGFTIAIETNGTLPVPPGVDWICVSPKGRAPVVQTRGQELKLVFPQADTPPEAFAGLDFEHFFLQPMDGPQRLANTEAAVSYCMAHPQWRLSVQTHKYIGIP

SEQ ID NO: 28454 - protein, 210 aa, Bordetella sp.
  REGION 1..210: note = tr|A0A0S1XXU2|A0A0S1XXU2_9BORD 7-carboxy-7-deazaguanine synthase OS=Bordetella sp. N; OX = 1746199 GN=queE PE=3 SV=1
MTYAAKEIFKTLQGEGAQAGRAAVFCRFAGCNLWSGRESDRASAACRFCDTDFVGTDGPGGGKFTTAQALAATLASTWGPDRAHRYVVFTGGEPLLQIDAALLDAVHAEGFEIAIETNGTLLPPPGIDWICVSPKGTAPVALRAGNELKLVYPQLDAPPASFAGLDFEHFFLQPMDGPDRVANTERAVQYCTQHPQWRLSLQTHKYIGIP

SEQ ID NO: 28455 - protein, 211 aa, Bordetella sp.
  REGION 1..211: note = tr|A0A2V1K725|A0A2V1K725_9BORD 7-carboxy-7-deazaguanine synthase OS=Bordetella sp. 3d-2-2; OX = 2175229 GN=queE PE=3 SV=1
MTYAVKEIFYTLQGEGINAGRPAVFCRFAGCNLWSGREQDRADAVCRFCDTDFVGTDGENGGKYPHAADLVARIASLWPADDHAHRFVVCTGGEPMLQMDAALVDALHEAGFFVAIETNGTLPVLETIDWVCVSPKADAALVVERGNELKVVFPQENQPLAAYARLDFDYFLMQPMDGPSQALNTRLAIEWCKRHPQWRLSMQTHKYLNIP

SEQ ID NO: 28456 - protein, 223 aa, Bordetella trematum
  REGION 1..223: note = tr|A0A157SRS0|A0A157SRS0_9BORD 7-carboxy-7-deazaguanine synthase OS=Bordetella trematum; OX = 123899 GN=queE PE=3 SV=1
MPGLHLSAVLRPAMTYSAKEIFKTLQGEGAQAGRAAVFCRFSGCNLWSGRESDRAQAACTFCDTDFIGTDGPGGGKFRDAQALADTLARTWGDERAGRYVVFTGGEPLLQLDDALIAAVRAQGFTIALETNGTLPVPAGVDWICVSPKGSARIVQTHGQELKLVYPQAEAPPQAFAGLDFEHFFLQPMDNAQRLANTEAAVNYCMAHPQWRLSLQTHKYIGIP

SEQ ID NO: 28457 - protein, 243 aa, Bosea sp.
  REGION 1..243: note = tr|A0A085F0G7|A0A085F0G7_9BRAD 7-carboxy-7-deazaguanine synthase OS=Bosea sp. LC85; OX = 1502851 GN=queE PE=3 SV=1
MKGRIRISEIFGPTIQGEGPLIGRPTVFVRTGGCDYRCRWCDTLHAVLREYRDEWTLMTPTEILAQVEDLAGSVPVLVSLSGGNPALQPLASLIALGHQKGYTFALETQGSVPQPWFAALEWLMLSPKPPSSGMATDWQALDECITAGARGPRCVLKLAVFDDDDYAYARLVAKRYPALPIYLQVGNPAPSMTHAGPGSEEADIPDLMQRFRWLVDKVAADRWFTATVLPQLHVLAWGHRRGI

SEQ ID NO: 28458 - protein, 224 aa, Bowmanella sp.
  REGION 1..224: note = tr|A0A4Q9XJ12|A0A4Q9XJ12_9ALTE 7-carboxy-7-deazaguanine synthase OS=Bowmanella sp. JS7-9; OX = 1605368 GN=queE PE=3 SV=1
MQTYKINEVFQSIQGEGAFTGVPSVFIRIQGCPVGCSWCDTKHTWTVDPELKTSSAAVLAKSEPDECWFEATALDLISLMETEGYKARHIIITGGEPCMYDLTSLTSALLDQGFSVQIETSGTFEVIADPRTWVTVSPKVGMQGGYAVLDQPLNVASEIKHPVAMQKHVDDLKALLARPACNSNALVYLQPISQQTRATELAVAQCIDNNWRLSLQTHKFIGIE

SEQ ID NO: 28459 - protein, 225 aa, Brachyspira sp.
  REGION 1..225: note = tr|R5H995|R5H995_9SPIR 7-carboxy-7-deazaguanine synthase OS=Brachyspira sp. CAG:484 OX=1262759 GN=queE; PE = 3 SV=1
MTNKAKIREIFTSIQGEGPYVGTKQLFIRFCGCNLNCAYCDTDFEAAKSKDYTVEELINKINEYGEIFTISLTGGEPLCSAAFLKDFLPEIRKYGHKIYLETNATLPEALEKIVDSVDVVSADIKLKSSTGMNIDSAVYEKFYSLASKKECFAKVVFNEAISDEEINFCVSIAQKYGLLLILQPEMKGNDFSVTSEFSEIIFEKFYTKYSNIRLIPQVHKFINLR

SEQ ID NO: 28460 - protein, 233 aa, unidentified
  source 1..233: note = Bradymonadaceae bacterium
  REGION 1..233: note = tr|A0A3D8MT90|A0A3D8MT90_9DELT 7-carboxy-7-deazaguanine synthase OS=Bradymonadaceae bacterium TMQ3 OX=2283320 GN=queE PE=3 SV=1
MSLTTPAQRAADIAQERGTPEREERSWLRLTEIFFSIQGESSFAGMPCTFVRLSRCNLRCTWCDTTYSFNGGDRTEIDDIIDRLDAIGCKIVEITGGEPLLQRPVHTLMSRLCDLGYTVLIETSGSLDIAPIDERVHIIMDLKAPGSGEVDKNLFSNIAHLKPTDEVKFVLLNREDFDWAIATIEEHHLLEHAQIIFSPVHGELSGHELANWILESGKTIRLGLQIHKFLDVE

SEQ ID NO: 28461 - protein, 216 aa, unidentified
  source 1..216: note = Bradymonadales bacterium
  REGION 1..216: note = tr|A0A5B8XYT8|A0A5B8XYT8_9DELT 7-carboxy-7-deazaguanine synthase OS=Bradymonadales bacterium V1718 OX=2600177 GN=queE PE=3 SV=1
MSASQETQSLVRLTEIFYSIQGEGRASGRPCVFVRLSRCNLRCTWCDTTYSFKGGEKFTFDDVMAEVGKYPTKLVEITGGEPLLQPTVHPLMTAFADAGYEVMIETSGSLDISKIDPRVHIIMDLKAPGSSEEKRNLWANLEHLKPTDEVKIVILDQADYEWARDKVREHKLEERCHVIFSPVHGQMDGNALANWILEDGLNVRLGLQIHKFLSVE

SEQ ID NO: 28462 - protein, 212 aa, unidentified
  source 1..212: note = Bradymonadales bacterium
  REGION 1..212: note = tr|A0A5B8YAG0|A0A5B8YAG0_9DELT 7-carboxy-7-deazaguanine synthase OS=Bradymonadales bacterium YN101 OX=2292766 GN=queE PE=3 SV=1
MKDDQLRLTEIFYSIQGESTRAGLPCVFVRLSRCNLRCSWCDTPYSFKGGDKKSLDDIVAQVESYGCNLVEITGGEPLLQPDVHPLMTRLCDEGYEVLIETSGSLDIAPIDDRVRVIMDLKAPGSGEVEKNLWENIAELKPTDEVKIVVLDRQDFDWAVEACREHELFERVDEVHFSPVHGELDSNTLANWILEERLPVRLNLQIHKFMGVE

SEQ ID NO: 28463 - protein, 213 aa, unidentified
  source 1..213: note = Bradymonas sediminis
  REGION 1..213: note = tr|A0A2Z4FP66|A0A2Z4FP66_9DELT 7-carboxy-7-deazaguanine synthase OS=Bradymonas sediminis; OX = 1548548 GN=queE PE=3 SV=1
MTETTQLRLTEIFYSIQGESAAAGRPCVFVRLSRCNLRCTWCDTTYSFKGGDQSSFDAVLEEIAGYGCNLVEITGGEPLLQEAVLPFMTRLCDEGYEVLIETSGSLDISPIDDRVCVIMDFKAPGSGMVDKNLWSNVDALQSKDELKFVLLDRADFDWAVETCRERELFGRVKDVHFSPVHGVLDPSLLAEWILEEKLPVRLNLQVHKFLGVE

SEQ ID NO: 28464 - protein, 212 aa, unidentified; identical to SEQ ID NO: 28462
  source 1..212: note = Bradymonas sp.
  REGION 1..212: note = tr|A0A4Y6PVU3|A0A4Y6PVU3_9DELT 7-carboxy-7-deazaguanine synthase OS=Bradymonas sp. YN101; OX = 2589075 GN=queE PE=3 SV=1

SEQ ID NO: 28465 - protein, 210 aa, unidentified
  source 1..210: note = Bradyrhizobiaceae bacterium
  REGION 1..210: note = tr|A0A257KRL2|A0A257KRL2_9BRAD 7-carboxy-7-deazaguanine synthase OS=Bradyrhizobiaceae bacterium PARB1 OX=2015576 GN=queE PE=3 SV=1
MSYAVKEIFLTLQGEGAHAGRASVFCRFAGCNLWTGREQDRATAVCQFCDTDFVGMDGTLGGRYASAEALADTIAAQWVGPGDNRYVVLTGGEPLLQVNDELVAALHERGFEIGVETNGTVAPPAGIDWICVSPKAGADLVIRAGHELKLVYPQPAAMPEQFEALAFERFSLQPMDGADAISNTAQAVDYCLKHPQWRLSVQTHKTLGIR

SEQ ID NO: 28466 - protein, 210 aa, unidentified
  source 1..210: note = Bradyrhizobiaceae bacterium
  REGION 1..210: note = tr|A0A431QPE8|A0A431QPE8_9BRAD 7-carboxy-7-deazaguanine synthase OS=Bradyrhizobiaceae bacterium OX=2072420 GN=queE PE=3 SV=1
MSYAVKEIFMTLQGEGAQAGRAAVFCRFAGCNLWSGREADRATATCRFCDTDFVGTDGTFGGRYEDAAALAAAIAGQWTGGAADRYTILTGGEPLLQVDADLIAALHARDFAVGIETNGTLIPPDGIDWICVSPKAGAELKLQQGHELKLVYPQDGAEPERFADLAFQRFSLQPMDGPEAAANTARAIQYCQHHPQWRLSLQTHKMIGIR

SEQ ID NO: 28467 - protein, 210 aa, unidentified
  source 1..210: note = Bradyrhizobium arachidis
  REGION 1..210: note = tr|A0A1I7M196|A0A1I7M196_9BRAD 7-carboxy-7-deazaguanine synthase OS=Bradyrhizobium arachidis OX=858423 GN=queE PE=3 SV=1
MSYAVKEIFLTLQGEGAHAGRASVFCRFAGCNLWSGREADRTDAVCKFCDTDFVGTDGTLGGRYASAADLADTIAAQWTASNDNRYVVLTGGEPLLQVDADLIDALHARGFEIGVETNGTIAAPDGLDWICVSPKGGSELVQTRGHELKLVYPQALAAPETFEGLAFERFSLQPMDGPEVTENTARAIDYCLRHPQWRLSVQTHKSLGIR

SEQ ID NO: 28468 - protein, 210 aa, Bradyrhizobium betae
  REGION 1..210: note = tr|A0A4Q1VRR1|A0A4Q1VRR1_9BRAD 7-carboxy-7-deazaguanine synthase OS=Bradyrhizobium betae; OX = 244734 GN=queE PE=3 SV=1
MSYAVKEIFLTLQGEGAHAGRASVFCRFAGCNLWSGREADRQDATCKFCDTDFVGTDGTLGGRYATAAELADTIAAQWTAASDNRYAVLTGGEPLLQVDGALIDALHARGFEIGVETNGTIEAPAGLDWICVSPKGGSELVQRRGHELKLVYPQALAAPETFEGLAFKRFSLQPMDGPDVIKNTAQAIDYCLRHPQWRLSVQTHKSLGIR

SEQ ID NO: 28469 - protein, 210 aa, Bradyrhizobium canariense
  REGION 1..210: note = tr|A0A1H2B1W4|A0A1H2B1W4_9BRAD 7-carboxy-7-deazaguanine synthase OS=Bradyrhizobium canariense OX=255045 GN=queE PE=3 SV=1
MSYAVKEIFLTLQGEGAHAGRAAVFCRFSGCNLWSGREQDRATATCRFCDTDFVGTDGTLGGRYGSAAELADTIAGQWMGAEANRYVVLTGGEPLLQVDTALIDALHGHRFSIGIETNGTIEPPDGMDWICVSPKAGAELVVRRGHELKLIYPQADAAPEAFVDLAFERFSLQPMDGPDVIENTARAVDYCLRHPQWRLSLQTHKTLGIR

SEQ ID NO: 28470 - protein, 210 aa, Bradyrhizobium canariense
  REGION 1..210: note = tr|A0A1X3GCI4|A0A1X3GCI4_9BRAD 7-carboxy-7-deazaguanine synthase OS=Bradyrhizobium canariense OX=255045 GN=queE PE=3 SV=1
MSYAVKEIFLTLQGEGAHAGRASVFCRFAGCNLWSGREADRQEATCKFCDTDFVGTNGTLGGRYGSAAELADTIAAQWTASTDNRYVVLTGGEPLLQVDTALVDALHARGFEIGVETNGTIAPPEGLDWICVSPKGGSDLVIRRGHELKLVYPQPLAMPEAFADLAFERFSLQPMDGPEVAQNTAGAIDYCLNHPQWRLSVQTHKSLGIR

SEQ ID NO: 28471 - protein, 210 aa, unidentified
  source 1..210: note = Bradyrhizobium centrolobii
  REGION 1..210: note = tr|A0A176YAG9|A0A176YAG9_9BRAD 7-carboxy-7-deazaguanine synthase OS=Bradyrhizobium centrolobii OX=1505087 GN=queE PE=3 SV=1
MSYAVKEIFLTLQGEGAHAGRASVFCRFAGCNLWSGREADRADAVCKFCDTDFVGTDGTLGGRYASATELADTIAAQWTGSADNRYVVLTGGEPLLQVDAALIEALHARGFEIGVETNGTVLPPEGLDWICVSPKGGSELVLRHGHELKLVYPQPLAAPEAFEGLAFERFSLQPMDGPEVAENTARAIDYCLRHPRWRLSVQTHKSLGIR

SEQ ID NO: 28472 - protein, 210 aa, unidentified
  source 1..210: note = Bradyrhizobium daqingense
  REGION 1..210: note = tr|A0A562L9C3|A0A562L9C3_9BRAD 7-carboxy-7-deazaguanine synthase OS=Bradyrhizobium daqingense OX=993502 GN=queE PE=3 SV=1
MSYAVKEIFLTLQGEGAHAGRASVFCRFAGCNLWSGREADRAEATCKFCDTDFVGTDGTLGGRYASAAELADTIASQWTGTAANRYVVLTGGEPLLQVDAALIEALHARGFEIGVETNGTIAAPDGLDWICVSPKGGSELVQRRGHELKLVYPQALAAPEAFEDLAFERFSLQPMDGPEVIQNTARAIDYCLRHPQWRLSVQTHKSLGIR

SEQ ID NO: 28473 - protein, 210 aa, unidentified
  source 1..210: note = Bradyrhizobium diazoefficiens
  REGION 1..210: note = sp|Q89SC0|QUEE_BRADU 7-carboxy-7-deazaguanine synthase OS=Bradyrhizobium diazoefficiens (strain JCM 10833 / IAM 13628 / NBRC 14792 / USDA 110) OX=224911; GN = queE PE=3SV=1
MSYAVKEIFLTLQGEGAHAGRASVFCRFAGCNLWSGREADRQDATCKFCDTDFVGTDGTLGGRYASAVELADTIAAQWTASNDNRYVVLTGGEPLLQVDDALIDALHARGFEIGVETNGTIAAPDGLDWICVSPKGGSELVLRRGHELKLVYPQALAAPETFEGLAFERFSLQPMDGPEVAENTARAIDYCLRHPQWRLSVQTHKSLGIR

SEQ ID NO: 28474 - protein, 210 aa, unidentified; identical to SEQ ID NO: 28473
  source 1..210: note = Bradyrhizobium diazoefficiens
  REGION 1..210: note = tr|A0A0E4BT26|A0A0E4BT26_9BRAD 7-carboxy-7-deazaguanine synthase OS=Bradyrhizobium diazoefficiens OX=1355477 GN=queE PE=3 SV=1

SEQ ID NO: 28475 - protein, 210 aa, Bradyrhizobium elkanii
  REGION 1..210: note = tr|A0A0D1M7F8|A0A0D1M7F8_BRAEL 7-carboxy-7-deazaguanine synthase OS=Bradyrhizobium elkanii OX=29448 GN=queE PE=3 SV=1
MSYAVKEIFLTLQGEGAHAGRASVFCRFAGCNLWSGREQDRAGAVCRFCDTDFVGTDGTLGGRYADAAELAGTIAAQWTGGDADRYVVLTGGEPLLQVDTDLIEALHGHGFAIAIETNGTIAPPDGLDWICVSPKAASELVVRRGHELKLVYPQPENRPEDFAGLSFERFSLQPMDGPDVIENTERAIEYCLKHPQWRLSVQTHKTLGIR

SEQ ID NO: 28476 - protein, 210 aa, Bradyrhizobium elkanii
  REGION 1..210: note = tr|A0A4Q4JY03|A0A4Q4JY03_BRAEL 7-carboxy-7-deazaguanine synthase OS=Bradyrhizobium elkanii OX=29448 GN=queE PE=3 SV=1
MSYAVKEIFLTLQGEGAHAGRASVFCRFAGCNLWSGREQDRAGAVCKFCDTDFVGTDGTLGGRYATAEELAGAIAAQWTGGEADRYVVLTGGEPLLQVDAALIEALHGHGFAIAIETNGTIAPPDGLDWICVSPKATAELVVRKGHELKLVYPQMENTPEDFAGLAFERFSLQPMDGPDVMENTERAIAYCLKHPQWHLSVQTHKTLGIR

SEQ ID NO: 28477 - protein, 210 aa, unidentified
  source 1..210: note = Bradyrhizobium erythrophlei
  REGION 1..210: note = tr|A0A1M5JL09|A0A1M5JL09_9BRAD 7-carboxy-7-deazaguanine synthase OS=Bradyrhizobium erythrophlei OX=1437360 GN=queE PE=3 SV=1
MSYAVKEIFLTLQGEGAHAGRAAVFCRFAGCNLWSGREQDRANATCKFCDTDFVGTNGTLGGRYASAEALADTIAAQWTGTAGHRYTVLTGGEPLLQVDIALVDALHARGFAIGVETNGTIAPPDGVDWICVSPKAGSDLVIRRGHELKLIYPQEDAAPEAFVDLAFERFSLQPMDGPDVIENTARAVDYCLSHPQWRLSLQTHKTLGIR

SEQ ID NO: 28478 - protein, 210 aa, unidentified
  source 1..210: note = Bradyrhizobium erythrophlei
  REGION 1..210: note = tr|A0A1M5GQ81|A0A1M5GQ81_9BRAD 7-carboxy-7-deazaguanine synthase OS=Bradyrhizobium erythrophlei OX=1437360 GN=queE PE=3 SV=1
MSYAVKEIFLTLQGEGAHAGRAAVFCRFSGCNLWSGREQDRAGATCKFCDTDFVGTDGTLGGRYATSDDLADAVASQWAGERRYRYVVLTGGEPLLQVDAELIDALRARGFAIGLETNGTIELPDGVDWVCVSPKAGAELRVRRGDELKLVYPQAGAMPPAFADLAFERFSLQPMDGPDVAANTERAVNYCMRHPQWRLSVQTHKTLGIR

SEQ ID NO: 28479 - protein, 210 aa, unidentified
  source 1..210: note = Bradyrhizobium genosp.
  REGION 1..210: note = tr|A0A4V2E7E9|A0A4V2E7E9_9BRAD 7-carboxy-7-deazaguanine synthase OS=Bradyrhizobium genosp. SA-3 OX=508868 GN=queE PE=3 SV=1
MSYAVKEIFLTLQGEGAHAGRASVFCRFAGCNLWSGREADRSEATCKFCDTDFVGTDGTLGGRYASAAELADTIAAQWAASTANRYVVLTGGEPLLQVDAALIDALHARGFEIGVETNGTIAAPDGLDWICVSPKGGSELVLRRGHELKLVYPQALAAPEAFEGLAFERFSLQPMDGPEIAQNTARAIDYCLRHPQWRLSVQTHKSLGIR

SEQ ID NO: 28480 - protein, 210 aa, unidentified
  source 1..210: note = Bradyrhizobium guangdongense
  REGION 1..210: note = tr|A0A410VC57|A0A410VC57_9BRAD 7-carboxy-7-deazaguanine synthase OS=Bradyrhizobium guangdongense OX=1325090 GN=queE PE=3 SV=1
MSYAVKEIFLTLQGEGAHVGRASVFCRFAGCNLWSGREVDRAGATCQFCDTDFVGTDGTLGGRYASAVELADTIAAQWTAKANNRYVVLTGGEPLLQVDAALVEALRARGFEIGVETNGTMAAPDGLDWICVSPKGGSELVLRQGHELKLVYPQALAAPEAFEGLAFERFSLQPMDGPDVIENTARAIDYCLRHPQWRLSVQTHKSLGIR

SEQ ID NO: 28481 - protein, 210 aa, unidentified
  source 1..210: note = Bradyrhizobium guangzhouense
  REGION 1..210: note = tr|A0A4Q0RBE6|A0A4Q0RBE6_9BRAD 7-carboxy-7-deazaguanine synthase OS=Bradyrhizobium guangzhouense OX=1325095 GN=queE PE=3 SV=1
MSYAVKEIFLTLQGEGAHAGRASVFCRFAGCNLWSGREADRAGATCQFCDTDFVGTDGTLGGRYATAVELADTIAAQWTGPASNCYVVLTGGEPLLQVDDALVAALHAKGFEIGVETNGTVEAPEGLDWICVSPKGGSALVLRQGHELKLVYPQALAAPETFEGLAFERFSLQPMDGPEVIENTARAIDYCLRHPQWRLSVQTHKSLGIR

SEQ ID NO: 28482 - protein, 210 aa, unidentified
  source 1..210: note = Bradyrhizobium huanghuaihaiense
  REGION 1..210: note = tr|A0A562R0K2|A0A562R0K2_9BRAD 7-carboxy-7-deazaguanine synthase OS=Bradyrhizobium huanghuaihaiense OX=990078 GN=queE PE=3 SV=1
MSYAVKEIFLTLQGEGAHAGRASVFCRFAGCNLWSGREADRGDATCKFCDTDFVGTDGTLGGRYASAADLADTIAAQWTATAANRYVVLTGGEPLLQVDTALIEALHARGFEIGVETNGTIEAPEGLDWICVSPKGGSELVLRRGHELKLVYPQALAAPETFEGLAFERFSLQPMDGPEVAENTARAIDYCLHHPQWRLSVQTHKSLGIR

SEQ ID NO: 28483 - protein, 210 aa, unidentified
  source 1..210: note = Bradyrhizobium icense
  REGION 1..210: note = tr|A0A533J6T3|A0A533J6T3_9BRAD 7-carboxy-7-deazaguanine synthase OS=Bradyrhizobium icense; OX = 1274631 GN=queE PE=3 SV=1
MSYAVKEIFLTLQGEGAHAGRAAVFCRFSGCNLWSGREQDRTTATCQFCDTDFVGTDGTLGGRFATADELAGTISEQWTGEEANRYVVLTGGEPLLQVDQALIDALHRYGFAVAVETNGTIIPPDGMDWICVSPKAGATLVLKRGHELKLVYPQAGAQPEEFCGLDFERFSLQPMDGPDVAKNTADAIDYCLRHPLWRLSVQTHKTLGIR

SEQ ID NO: 28484 - protein, 210 aa, unidentified
  source 1..210: note = Bradyrhizobium icense
  REGION 1..210: note = tr|A0A1B1URB7|A0A1B1URB7_9BRAD 7-carboxy-7-deazaguanine synthase OS=Bradyrhizobium icense; OX = 1274631 GN=queE PE=3 SV=1
MSYAVKEIFLTLQGEGAHAGRAAVFCRFSGCNLWSGREQDRVSATCQFCDTDFVGTDGTLGGRYATADDLADTIAGQWTGENTNRYVVLTGGEPLLQVDPPFIDALHARGFAIGIETNGTIEPPEGMDWVCVSPKAGAELVVRRGHELKLVYPQAGAAPEDFAGLDFERFSLQPMDGPDVLENTARAVDYCLRHPQWRLSLQTHKTLGIR

SEQ ID NO: 28485 - protein, 211 aa, Bradyrhizobium japonicum
  REGION 1..211: note = tr|A0A1L3FLQ6|A0A1L3FLQ6_BRAJP 7-carboxy-7-deazaguanine synthase OS=Bradyrhizobium japonicum OX=375 GN=queE PE=3 SV=1
MSYAVKEIFLTLQGEGAHAGRASVFCRFAGCNLWSGREADREAATCKFCDTDFVGTDGTLGGRYASAAELADTIAAQWTATADSNRYVVLTGGEPLLQVDAALIDALHARGFEIGVETNGTIAAPDGLDWICVSPKGGSELVQRRGHELKLVYPQALAAPETFEDLAFERFSLQPMDGPEVAQNTVRAIDYCLRHPQWRLSVQTHKSLGIR

SEQ ID NO: 28486 - protein, 217 aa, Bradyrhizobium japonicum
  REGION 1..217: note = tr|A0A1Y2JLZ9|A0A1Y2JLZ9_BRAJP 7-carboxy-7-deazaguanine synthase OS=Bradyrhizobium japonicum OX=375 GN=queE PE=3 SV=1
MLPVNELFETVQGEATFTGMPSTFVRLQGCDVGCPWCDTKYTWELNHAPPDPLAIILGKIEPSPSFAAVSIDELVQTLSQSQSRHLVLTGGEPCMYDLTELSGRMIADGWTVQVETSGTEPIRIDPRAWVTVSPKLNMPGGMTFQAEAWQRANEIKMPIGKPADVEELLALVRLHGPALVWLQPLSMSKKATELCMEAARQNRWRISVQTHKFLGVR

SEQ ID NO: 28487 - protein, 210 aa, Bradyrhizobium jicamae
  REGION 1..210: note = tr|A0A0R3L2V2|A0A0R3L2V2_9BRAD 7-carboxy-7-deazaguanine synthase OS=Bradyrhizobium jicamae OX=280332 GN=queE PE=3 SV=1
MSYAVKEIFLTLQGEGAHAGRAAVFCRFAGCNLWTGREQDRATATCQFCDTDFVGTDGTLGGRYATADDLADTIAGQWTGDNTNRYVVLTGGEPLLQVDSAFIDALHARGFSIGIETNGTIEPPAGMDWVCVSPKAGAGLVVRRGHELKLVYPQAGAVPEDFAGLDFERFSLQPMDGPDVLDNTARAVDYCLRHPQWRLSLQTHKTLGIR

SEQ ID NO: 28488 - protein, 210 aa, Bradyrhizobium lablabi
  REGION 1..210: note = tr|A0A1M7DCF9|A0A1M7DCF9_9BRAD 7-carboxy-7-deazaguanine synthase OS=Bradyrhizobium lablabi OX=722472 GN=queE PE=3 SV=1
MSYAVKEIFLTLQGEGAHAGRAAVFCRFSGCNLWSGREQDRATATCQFCDTDFVGTDGTLGGRYASADQLADTIAAQWTGENTNRYVVLTGGEPLLQVDTAFIDALHARGFAIGIETNGTIEPPDGMDWVCVSPKAGAGLVVRSGHELKLVYPQAGARPEDFADLAFERFSLQPMDGPDAIENTARTVDYCLRHPQWRLSLQTHKTLGIR

SEQ ID NO: 28489 - protein, 210 aa, Bradyrhizobium lablabi
  REGION 1..210: note = tr|A0A0R3MBJ9|A0A0R3MBJ9_9BRAD 7-carboxy-7-deazaguanine synthase OS=Bradyrhizobium lablabi OX=722472 GN=queE PE=3 SV=1
MSYAVKEIFLTLQGEGAHAGRAAVFCRFAGCNLWTGREQDRASATCQFCDTDFVGTDGTLGGRYATADELADTIAGQWTGDNTNRYVVLTGGEPLLQVDSAFIDALHARGFSIGIETNGTIEPPAGMDWVCVSPKAGAGLVVRRGHELKLVYPQSGAAPEDFAGLDFERFSLQPMDGPDVIDNTARAVDYCLRHPQWRLSLQTHKTLGIR

SEQ ID NO: 28490 - protein, 210 aa, Bradyrhizobium liaoningense
  REGION 1..210: note = tr|A0A151FV34|A0A151FV34_9BRAD 7-carboxy-7-deazaguanine synthase OS=Bradyrhizobium liaoningense OX=43992 GN=queE PE=3 SV=1
MSYAVKEIFLTLQGEGAHAGRASVFCRFAGCNLWSGREADRADATCKFCDTDFVGTDGTLGGRYGSAVELADTIAAQWTASGGNRYVVLTGGEPLLQVDAELIEALHARGFEIGVETNGTIAAPDGLDWICVSPKGGSELVLRQGHELKLVYPQALAAPETFEDLAFERFSLQPMDGPEVIENTARAIEYCLRHPQWRLSVQTHKSLGIR

SEQ ID NO: 28491 - protein, 251 aa, unidentified
  source 1..251: note = Bradyrhizobium lupini
  REGION 1..251: note = tr|K5CQJ2|K5CQJ2_RHILU 7-carboxy-7-deazaguanine synthase OS=Bradyrhizobium lupini HPC(L) OX=1229491; GN = queE PE=3 SV=1
MTAARQKSAAKDTTIRISEIFGPTIQGEGLLIGLPTVFVRTGGCDYRCSWCDTLHAVDSDYRDTWKPMPVDAIWQEVRRLSGGVPLTVSLSGGNPAIQPLGSLIAKGHGEGYRFALETQGSIAKNWFADLDHLVLSPKPPSSGMGTDWQAFEDCLAAAGEGPQVALKIVVFDDADYAYAKAASARFPYLPVYLQPGNHTPPPPDDDDARVDIDGVMERMLWLVDKVSEDRWFSARVLPQLHVLLWGNKRGV

SEQ ID NO: 28492 - protein, 210 aa, unidentified
  source 1..210: note = Bradyrhizobium macuxiense
  REGION 1..210: note = tr|A0A560LRQ6|A0A560LRQ6_9BRAD 7-carboxy-7-deazaguanine synthase OS=Bradyrhizobium macuxiense OX=1755647 GN=queE PE=3 SV=1
MSYAVKEIFLTLQGEGAHAGRASVFCRFAGCNLWSGREQDRAGAVCRFCDTDFVGTDGTLGGRYADAAELAGIIAAQWTGGEADRYVVLTGGEPLLQVDTALIEALHRHGFAIAIETNGTIAPPDGLDWICVSPKAASELVVRSGHELKLVYPQPENAPEDFAGLAFERFSLQPMDGPDVIENTERAIDYCLKHPQWRLSVQTHKTLGIR

SEQ ID NO: 28493 - protein, 211 aa, unidentified
  source 1..211: note = Bradyrhizobium macuxiense
  REGION 1..211: note = tr|A0A125Q9S2|A0A125Q9S2_9BRAD 7-carboxy-7-deazaguanine synthase OS=Bradyrhizobium macuxiense OX=1755647 GN=queE PE=3 SV=1
MGSYAVKEIFLTLQGEGIQAGRPAVFCRFAGCNLWSGREQDRHEAVCRFCDTDFVGTDGTKGGRYRDAQSLAEAIVSEWTAGEAHRLCVLTGGEPLLQVDDELVRALHGFGFRIAIETNGTLPAPAGIDWICVSPKSNARLTITRGHELKLVYPQTLAPPERFESMGFDNFLLQPMDGPDVVDHTRQAVAYCLNNPKWRLSIQTHKHLGIR

SEQ ID NO: 28494 - protein, 218 aa, unidentified
  source 1..218: note = Bradyrhizobium manausense
  REGION 1..218: note = tr|A0A0R3D215|A0A0R3D215_9BRAD 7-carboxy-7-deazaguanine synthase OS=Bradyrhizobium manausense OX=989370 GN=queE PE=3 SV=1
MLPVNEIFETIQGEACKSGTPSVFLRLQACPVRCPWCDSKHTWVADPANQVSIAEITAKVEDTNTWAMMSPREILLAVQGFRARHVVITGGEPAAYDLQPLTTLLIKSGFSVQVETSGTHAIQVHPCTWVTISPKIGMPGGLVVLDEALRRGNEIKHCVGKPADIEKLLALNIPREFMPMIWLQPLSQSRKATKLCIQEATARDWRVSIQTHKFLGVR

SEQ ID NO: 28495 - protein, 210 aa, unidentified
  source 1..210: note = Bradyrhizobium nanningense
  REGION 1..210: note = tr|A0A4Q0SGG1|A0A4Q0SGG1_9BRAD 7-carboxy-7-deazaguanine synthase OS=Bradyrhizobium nanningense OX=1325118 GN=queE PE=3 SV=1
MSYAVKEIFLTLQGEGAHAGRASVFCRFAGCNLWSGREADRLEATCKFCDTDFVGTDGTLGGRYGSAAELADTIAAQWRGTEANRYVVLTGGEPLLQVDTALIDALHARGFEIGVETNGTIAAPDGLDWICVSPKGGSELVLRQGHELKLVYPQALAAPETFENLAFERFSLQPMDGPEVIENTARAIDYCLRHPQWRLSVQTHKSLGIR

SEQ ID NO: 28496 - protein, 210 aa, unidentified
  source 1..210: note = Bradyrhizobium neotropicale
  REGION 1..210: note = tr|A0A176Z9Z1|A0A176Z9Z1_9BRAD 7-carboxy-7-deazaguanine synthase OS=Bradyrhizobium neotropicale OX=1497615 GN=queE PE=3 SV=1
MSYAVKEIFLTLQGEGAHAGRASVFCRFAGCNLWSGREADRADAVCKFCDTDFVGTDGTLGGRYATSAELADTIAAQWTGTGHNRYVVLTGGEPLLQLDDALIEALHARGFEIGVETNGTIAPPEGLDWICVSPKGGSELVLRQGHELKLVYPQPLAAPEAFEGLAFERFSLQPMDGPEVAENTARAIDYCLRHPQWRLSVQTHKSLGIR

SEQ ID NO: 28497 - protein, 210 aa, unidentified
  source 1..210: note = Bradyrhizobium oligotrophicum
  REGION 1..210: note = tr|M4ZDJ2|M4ZDJ2_9BRAD 7-carboxy-7-deazaguanine synthase OS=Bradyrhizobium oligotrophicum S58 OX=1245469; GN = queE PE=3 SV=1
MSYAVKEIFMTLQGEGAQAGRAAVFCRFAGCNLWSGREADRATATCRFCDTDFVGTDGTLGGRYDSAAALADTIAGQWTGGAADRYTILTGGEPLLQVDADLIAALHAEGFAVGIETNGTLLPPEGIDWICVSPKAGAELKLRHGHELKLVYPQDGAAPEQFEALAFRRFSLQPMDGPDAAANTARAIDYCQHHPQWRLSLQTHKMIGIR

SEQ ID NO: 28498 - protein, 210 aa, unidentified
  source 1..210: note = Bradyrhizobium ottawaense
  REGION 1..210: note = tr|A0A2U8NZQ3|A0A2U8NZQ3_9BRAD 7-carboxy-7-deazaguanine synthase OS=Bradyrhizobium ottawaense OX=931866 GN=queE PE=3 SV=1
MSYAVKEIFLTLQGEGAHAGRASVFCRFAGCNLWSGREADRLEATCKFCDTDFVGTDGTFGGRYGSAAELADTIAAQWTAAAANRYVVLTGGEPLLQVDAALIEALHARGFEIGVETNGTIAAPEGLDWICVSPKGGSELVLRQGHELKLVYPQALAAPETFEGLAFERFSLQPMDGPEVIENTARAIDYCLHHPQWRLSVQTHKSLGIR

SEQ ID NO: 28499 - protein, 210 aa, Bradyrhizobium pachyrhizi
  REGION 1..210: note = tr|A0A0R3DBR6|A0A0R3DBR6_9BRAD 7-carboxy-7-deazaguanine synthase OS=Bradyrhizobium pachyrhizi OX=280333 GN=queE PE=3 SV=1
MSYAVKEIFLTLQGEGAHAGRASVFCRFAGCNLWSGREQDRAGAVCKFCDTDFVGTDGTLGGRYATAEELAGTIAAQWTGGEADRYVVLTGGEPLLQVDAALIDALHGHGFAIAIETNGTIVPPDGLDWICVSPKAAAELVIRKGHELKLVYPQMENAPEDFAGLVFERFSLQPMDGPDVIENTERAIAYCLKHPQWRLSVQTHKSLGIR

SEQ ID NO: 28500 - protein, 210 aa, unidentified
  source 1..210: note = Bradyrhizobium retamae
  REGION 1..210: note = tr|A0A0R3NCV4|A0A0R3NCV4_9BRAD 7-carboxy-7-deazaguanine synthase OS=Bradyrhizobium retamae OX=1300035 GN=queE PE=3 SV=1
MSYAVKEIFLTLQGEGAHAGRAAVFCRFSGCNLWSGREQDRVSATCQFCDTDFVGTDGTLGGRYATADELADTIAGQWTGENINRYVVLTGGEPLLQVDPPFIDALHARGFVIGIETNGTIEPPEGMDWVCVSPKAGADLVVRRGHELKLVYPQAGAAPEDFARLDFERFSLQPMDGPDVLENTARAVDYCLRHPQWRLSLQTHKTLGIR

SEQ ID NO: 28501 - protein, 210 aa, unidentified
  source 1..210: note = Bradyrhizobium rifense
  REGION 1..210: note = tr|A0A5D3KM86|A0A5D3KM86_9BRAD 7-carboxy-7-deazaguanine synthase OS=Bradyrhizobium rifense OX=515499 GN=queE PE=3 SV=1
MGYAVKEIFLTLQGEGAHAGRASVFCRFAGCNLWSGREADRAGATCQFCDTDFVGTDGTLGGRYATAVELADTITAQWTASTDNRYVVLTGGEPLLQVDDALVDALHARGFEIGVETNGTVAPPKGLDWICVSPKGGSELVLRQGHELKLVYPQALAAPETFESLAFERFSLQPMDGPEVAQNTARAIDYCLRHPQWRLSVQTHKSLGIR

SEQ ID NO: 28502 - protein, 210 aa, unidentified
  source 1..210: note = Bradyrhizobium sacchari
  REGION 1..210: note = tr|A0A560JG35|A0A560JG35_9BRAD 7-carboxy-7-deazaguanine synthase OS=Bradyrhizobium sacchari OX=1399419 GN=queE PE=3 SV=1
MSYAVKEIFLTLQGEGAHAGRASVFCRFAGCNLWSGREADRQSATCKFCDTDFVGTDGTLGGRYASAADLADTIAAQWTASKHNRYVVLTGGEPLLQVDDALIAALHARGFEIGVETNGTIAAPDGLDWICVSPKGGSELVLRRGHELKLVYPQALAAPETFEGFAFERFSLQPMDGPEVIQNTARAIDYCLQHPQWRLSVQTHKSLGIR

SEQ ID NO: 28503 - protein, 210 aa, unidentified
  source 1..210: note = Bradyrhizobium shewense
  REGION 1..210: note = tr|A0A1C3VD63|A0A1C3VD63_9BRAD 7-carboxy-7-deazaguanine synthase OS=Bradyrhizobium shewense OX=1761772 GN=queE PE=3 SV=1
MSYAVKEIFLTLQGEGAHAGRASVFCRFAGCNLWSGREADRLEATCKFCDTDFVGTDGTLGGRYGSAAELADTIAAQWTAAAANRYVVLTGGEPLLQVDAALIEALHARGFEIGVETNGTIAAPEGLDWICVSPKGGSELVLRQGHELKLVYPQALAAPETFEDLAFERFSLQPMDGPEVIENTARAIDYCLHHPQWRLSVQTHKSLGIR

SEQ ID NO: 28504 - protein, 210 aa, Bradyrhizobium sp.
  REGION 1..210: note = tr|A0A2U8Q771|A0A2U8Q771_9BRAD 7-carboxy-7-deazaguanine synthase OS=Bradyrhizobium sp. 3 85S1MB OX=1404367 GN=queE PE=3 SV=1
MSYAVKEIFLTLQGEGAHAGRASVFCRFAGCNLWSGREADRLEATCKFCDTDFVGTDGTLGGRYGSAAELADTIAAQWRATAANRYVVLTGGEPLLQVDAALIEALHARGFEIGVETNGTIAAPEGLDWICVSPKGGSELVLRQGHELKLVYPQALAAPEAFEDLAFERFSLQPMDGAEVIENTARAIDYCLRHPQWRLSVQTHKSLGIR

SEQ ID NO: 28505 - protein, 210 aa, Bradyrhizobium sp.
  REGION 1..210: note = tr|A0A1Q5QY46|A0A1Q5QY46_9BRAD 7-carboxy-7-deazaguanine synthase OS=Bradyrhizobium sp. NAS96.2 OX=1680160 GN=queE PE=3 SV=1
MSYAVKEIFLTLQGEGAHAGRASVFCRFAGCNLWSGREQDRAGAVCRFCDTDFVGTDGTLGGRYADAAELAGTIAAQWTGGEADRYVVLTGGEPLLQVDTALIEALHGHGFAIAIETNGTIAPPDGLDWICVSPKAASELVVRSGHELKLVYPQPENAPEDFAGLAFERFSLQPMDGPDVIENTERAIAYCLKHPQWRLSVQTHKTLGIR

SEQ ID NO: 28506 - protein, 210 aa, unidentified
  source 1..210: note = Bradyrhizobium stylosanthis
  REGION 1..210: note = tr|A0A560DBL0|A0A560DBL0_9BRAD 7-carboxy-7-deazaguanine synthase OS=Bradyrhizobium stylosanthis OX=1803665 GN=queE PE=3 SV=1
MSYAVKEIFLTLQGEGAHAGRASVFCRFAGCNLWSGREADRAEATCKFCDTDFVGTDGTLGGRYASAAELADTIAAQWTASTANRYVVLTGGEPLLQVDAALIEALHARGFEIGVETNGTIAAPEGLDWICVSPKGGSELVLRRGHELKLVYPQALAAPETFEGLAFERFSLQPMDGPEVAENTARAIDYCLQHPQWRLSVQTHKSLGIR

SEQ ID NO: 28507 - protein, 210 aa, unidentified
  source 1..210: note = Bradyrhizobium valentinum
  REGION 1..210: note = tr|A0A0R3LLB6|A0A0R3LLB6_9BRAD 7-carboxy-7-deazaguanine synthase OS=Bradyrhizobium valentinum OX=1518501 GN=queE PE=3 SV=1
MSYAVKEIFLTLQGEGAHAGRAAVFCRFSGCNLWSGREQDRASATCKFCDTDFVGTDGTLGGRYASAGELADTIAGQWTGENTNRYVVLTGGEPLLQVDSPFIDALHARGFSIGIETNGTIEPPDGMDWVCVSPKAGADLVVRRGHELKLVYPQAGAAPEDFAGLDFERFSLQPMDGPDVIENTARAVDYCLRHPQWRLSLQTHKTLGIR

SEQ ID NO: 28508 - protein, 210 aa, unidentified
  source 1..210: note = Bradyrhizobium vignae
  REGION 1..210: note = tr|A0A4Q0QPP2|A0A4Q0QPP2_9BRAD 7-carboxy-7-deazaguanine synthase OS=Bradyrhizobium vignae; OX = 1549949 GN=queE PE=3 SV=1
MSYAVKEIFLTLQGEGAHAGRASVFCRFAGCNLWSGREADRGEATCKFCDTDFVGTDGTLGGRYGSAAELADTIAAQWTASAANRYVVLTGGEPLLQVDAALVDALHARGFEIGVETNGTIAAPEGLDWICVSPKGGSELVLRRGHELKLVYPQALAMPEAFEDLAFERFSLQPMDGPEVVENTARAIDYCLRHPQWRLSVQTHKSLGIR

SEQ ID NO: 28509 - protein, 210 aa, Bradyrhizobium yuanmingense
  REGION 1..210: note = tr|A0A4E0QRC2|A0A4E0QRC2_9BRAD 7-carboxy-7-deazaguanine synthase OS=Bradyrhizobium yuanmingense OX=108015 GN=queE PE=3 SV=1
MSYAVKEIFLTLQGEGAHAGRASVFCRFAGCNLWSGREADRADATCKFCDTDFVGTDGTLGGRYGSAAELADTIAAQWTAAAANRYVVLTGGEPLLQVDAALIEALHERGFEIGVETNGTIAAPDGLDWICVSPKGGSELVLRQGHELKLVYPQALAMPEAFEDLAFERFSLQPMDGPEVIENTARAIDYCLHHPRWRLSVQTHKSLGIR

SEQ ID NO: 28510 - protein, 210 aa, Bradyrhizobium yuanmingense
  REGION 1..210: note = tr|A0A1C3WV24|A0A1C3WV24_9BRAD 7-carboxy-7-deazaguanine synthase OS=Bradyrhizobium yuanmingense OX=108015 GN=queE PE=3 SV=1
MSYAVKEIFLTLQGEGAHAGRASVFCRFAGCNLWSGRQADRADATCKFCDTDFVGTDGTLGGRYGSAAELADTIAAQWTAAAANRYVVLTGGEPLLQVDAALIEALHERGFEIGVETNGTIAAPDGLDWICVSPKGGSELVLRQGHELKLVYPQALAMPEAFEDLAFERFSLQPMDGPEIIENTARAIDYCLHHPQWRLSVQTHKSLGIR

SEQ ID NO: 28511 - protein, 210 aa, unidentified
  source 1..210: note = Bradyrhizobium zhanjiangense
  REGION 1..210: note = tr|A0A4Q0R1D7|A0A4Q0R1D7_9BRAD 7-carboxy-7-deazaguanine synthase OS=Bradyrhizobium zhanjiangense OX=1325107 GN=queE PE=3 SV=1
MSYAVKEIFLTLQGEGAHAGRASVFCRFAGCNLWSGREADRSEATCKFCDTDFVGTDGTLGGRYASAAELADTIAAQWAASTANRYVVLTGGEPLLQVDTALIDALHARVFEIGVETNGTIAAPAGLDWICVSPKGGSELVLRRGHELKLVYPQALAAPETYEGLAFERFSLQPMDGPEVAQNTARAIDYCLRHPQWRLSVQTHKSLGIR

SEQ ID NO: 28512 - protein, 210 aa, unidentified
  source 1..210: note = Bradyrhizobium zhanjiangense
  REGION 1..210: note = tr|A0A4Q0SQ11|A0A4Q0SQ11_9BRAD 7-carboxy-7-deazaguanine synthase OS=Bradyrhizobium zhanjiangense OX=1325107 GN=queE PE=3 SV=1
MNYAVKEIFLTLQGEGAHAGRASVFCRFAGCNLWSGREADRSEATCKFCDTDFVGTDGTLGGRYASAAELADTIAAQWAASTANRYVVLTGGEPLLQVDTALIDALHARGFEIGVETNGTIAAPAGLDWICVSPKGGSELVLRRGHELKLVYPQALAAPETYEGLAFERFSLQPMDGPEVAQNTARAIDYCLRHPQWRLSVQTHKSLGIR

SEQ ID NO: 28513 - protein, 223 aa, Brenneria alni
  REGION 1..223: note = tr|A0A421DP11|A0A421DP11_9GAMM 7-carboxy-7-deazaguanine synthase OS=Brenneria alni; OX = 71656 GN=queE PE=3 SV=1
MQYPINEVFQTLQGEGYFTGVPAVFVRLQGCPVGCSWCDTKHTWDKLAEREIPLDQVLIKTQESDGWGAARAEDILALMAGEGYTARHIVITGGEPCIHDLSALTLLLEKQGFSCQIETSGTHEIRCSPKTWVTVSPKVNMRGGMAVIDQALQRADEIKHPVARERDIDALDALLARLEDDKPRIVALQPISQKEEATKLCIATCIARNWRLSMQTHKYLNIA

SEQ ID NO: 28514 - protein, 223 aa, unidentified
  source 1..223: note = Brenneria goodwinii
  REGION 1..223: note = tr|A0A0G4JW73|A0A0G4JW73_9GAMM 7-carboxy-7-deazaguanine synthase OS=Brenneria goodwinii; OX = 1109412 GN=queE PE=3 SV=1
MQYPINEMFQTLQGEGYFTGVPAVFVRLQGCPVGCSWCDTKHTWDKLAEREIPLDQVLVKTRESDGWGAASAEDVLALIDREGYTARHIVITGGEPCIHDLAPLTLLLEQQGFSCQIETSGTHEVRCSPKTWVTVSPKVNMRGGMAVIDQALHRADEIKHPVARERDIEDLDALLARLKDDKPRIVALQPISQKESATKLCIATCIARNWRLSMQTHKYLNIA

SEQ ID NO: 28515 - protein, 223 aa, unidentified
  source 1..223: note = Brenneria goodwinii
  REGION 1..223: note = tr|A0A250B932|A0A250B932_9GAMM 7-carboxy-7-deazaguanine synthase OS=Brenneria goodwinii; OX = 1109412 GN=queE PE=3 SV=1
MQYPINEMFQTLQGEGYFTGVPAVFVRLQGCPVGCSWCDTKHTWDKLAEREIPLDQVLVKTRESDGWGAASAEDVLALIDREGYTARHIVITGGEPCIHDLAPLTLLLEQQGFSCQIETSGTHEVRCSPKTWVTVSPKVNMRGGMAVIDQALHRADEIKHPVARERDIEDLDALLARLKDDKPRIVALQPISQKESATKLCIGTCIARNWRLSMQTHKYLNIA

SEQ ID NO: 28516 - protein, 223 aa, Brenneria nigrifluens
  REGION 1..223: note = tr|A0A2U1UVE6|A0A2U1UVE6_9GAMM 7-carboxy-7-deazaguanine synthase OS=Brenneria nigrifluens DSM 30175 = ATCC 13028 OX=1121120 GN=queE PE=3 SV=1
MQYPINEMFQTLQGEGYFTGVPAVFVRLQGCPVGCSWCDTKHTWDKLAQREIPLDQVLVKTQENDGWGAASAEDVLALIASEGYTARHIVITGGEPCIHDLAPLTLLLEKQGFSCQIETSGTHEVRCSPKTWVTVSPKVNMRGGMKVIDQALQRADEIKHPVARERDIEALDALLARLEDDKPRIVALQPISQKAEATKLCIATCIARNWRLSMQTHKYLHIA

SEQ ID NO: 28517 - protein, 223 aa, unidentified
  source 1..223: note = Brenneria roseae
  REGION 1..223: note = tr|A0A2U1U2K1|A0A2U1U2K1_9GAMM 7-carboxy-7-deazaguanine synthase OS=Brenneria roseae subsp. americana OX=1508507 GN=queE PE=3 SV=1
MQYPINEVFQTLQGEGYFTGVPAVFVRLQGCPVGCSWCDTKHTWDKLADRETSLDEIIVKTQESDAWGAATSEDILALIAREGYTARHIVITGGEPCIHDLAPLTLLLEKHGFSCQIETSGTHDVRCSPKTWVTVSPKVNMRGGMKVIDQALQRADEIKHPVGRERDIEALDELLARLDDDKSRIVALQPISQKDEATKLCIATCIARNWRLSMQTHKYLNIA

SEQ ID NO: 28518 - protein, 223 aa, Brenneria rubrifaciens
  REGION 1..223: note = tr|A0A4P8QVC9|A0A4P8QVC9_9GAMM 7-carboxy-7-deazaguanine synthase OS=Brenneria rubrifaciens OX=55213 GN=queE PE=3 SV=1
MQYPINEVFQTLQGEGYFTGVPAVFVRLQGCPVGCSWCDTKHTWDKLADRETSLNEIVVKTQESDAWGAATAEDILALMSREGYTARHIVITGGEPCIHDLAPLTLLLEKYGFNCQIETSGTHEVRCSLNTWVTVSPKVNMRGGMQVRDQALQRADEIKHPVGRARDIEALDTLLARLNDDKPRVVALQPISQKDEATKLCIATCIARNWRLSMQTHKYLNIA

SEQ ID NO: 28519 - protein, 223 aa, Brenneria salicis
  REGION 1..223: note = tr|A0A366I2E4|A0A366I2E4_9GAMM 7-carboxy-7-deazaguanine synthase OS=Brenneria salicis ATCC 15712 = DSM 30166 OX=714314 GN=queE PE=3 SV=1
MQYPINEVFQTLQGEGYFTGVPAVFVRLQGCPVGCSWCDTKHTWDKLADRETSLDEIIVKTQESEAWGAASAEDILALMTRAGYTARHIVITGGEPCIHDLAPLTLLLEKHGFSCQIETSGTHEVRCSAKTWVTVSPKVNMRGGMKVLDQALQRADEIKHPVGRARDIVALDELLARLHDDKPRIVALQPISQKDEATRLCIETCIARNWRLSMQTHKYLNIA

SEQ ID NO: 28520 - protein, 223 aa, Brenneria sp.; identical to SEQ ID NO: 28516
  REGION 1..223: note = tr|G7LMK3|G7LMK3_9GAMM 7-carboxy-7-deazaguanine synthase OS=Brenneria sp. EniD312 OX=598467 GN=queE PE=3; SV = 1

SEQ ID NO: 28521 - protein, 223 aa, Brenneria sp.
  REGION 1..223: note = tr|A0A5J5FV45|A0A5J5FV45_9GAMM 7-carboxy-7-deazaguanine synthase QueE OS=Brenneria sp. L3-3HA OX=2590031 GN=queE PE=4 SV=1
MQYPINEMFQTLQGEGYFTGVPAIFVRLQGCPVGCSWCDTKHTWEKLQDRQIALEQVLVKTQESDRWGAARAQDILAALIEQGYTARHVVITGGEPCIHDLAPLTLLLEQQGFSCQIETSGTHEVRCSPRSWVTVSPKVNMRGGMVVLDQALARADEIKHPVARQRDIEALDALLARLKDDKPRVVALQPISQKEEATRLCIETCIARNWRLSMQTHKYLNIA

SEQ ID NO: 28522 - protein, 210 aa, Breoghania sp.
  REGION 1..210: note = tr|A0A346R009|A0A346R009_9RHIZ 7-carboxy-7-deazaguanine synthase OS=Breoghania sp. L-A4; OX = 2304600 GN=queE PE=3 SV=1
MSYAVKEIFKTLQGEGAQAGRAAVFCRFAGCNLWSGREQDRATAVCRFCDTDFIGTDGEGGGKFRDAAALVAAIAEAWGDDPNNRFIVFTGGEPLLQIDDALLAAAHACGFECAVETNGTIAPPEALDWVCVSPKDGADLVATRGHELKLVFPQPGLMPEAVAHLDFKTFWLQPMDGPDVAQNTAAAVAYCMAHPRWRLSLQTHKLIGIP

SEQ ID NO: 28523 - protein, 240 aa, Brevibacillus agri
  REGION 1..240: note = tr|A0A3M8AHG3|A0A3M8AHG3_9BACL 7-carboxy-7-deazaguanine synthase OS=Brevibacillus agri; OX = 51101 GN=queE PE=3 SV=1
MSIPVLEIFGPTIQGEGMVIGQKTMFVRTAGCDYRCSWCDSAFTWDGSAQDEIRQMTPEQIWAELERLGKNRFSHVTISGGNPALLAGMGELVSFLKERGIRTALETQGSRWQEWLPLIDDITLSPKPPSSGMNTDYAVLDRIVHALLEQKHPGLNLKVVVFDDADFAYARDIHRRYPAVPFFLQPGNSDLVSADTQELREKLLESFEWLIDQAMAAPDLNDAKVLPQLHALVWGNKRGV

SEQ ID NO: 28524 - protein, 239 aa, Brevibacillus brevis
  REGION 1..239: note = tr|C0ZJI7|C0ZJI7_BREBN 7-carboxy-7-deazaguanine synthase OS=Brevibacillus brevis (strain 47 / JCM 6285 / NBRC 100599) OX=358681 GN=queE PE=3 SV=1
MIPVLEIFGPTIQGEGMVIGQKTMFVRTAGCDYRCNWCDSAFTWDGSARDEIRQMSPEAVWEELTRLGGDRFSHVTISGGNPALLAGIGDLISLLKEHGIRTAVETQGSKWQAWLPLIDDITLSPKPPSSGMQTDFQALDRIVHELLDQKHPGLSLKVVVFDDADFAYARTIHQRFPGVPFYLQPGNSDLTDADTPSLRDKLLESFEWLIDQAMETADMNDAKVLPQLHALVWGNKRGV

SEQ ID NO: 28525 - protein, 239 aa, Brevibacillus brevis
  REGION 1..239: note = tr|A0A291BQE1|A0A291BQE1_BREBE 7-carboxy-7-deazaguanine synthase OS=Brevibacillus brevis X23 OX=1200792 GN=queE PE=3 SV=1
MIPVLEIFGPTIQGEGMVIGQKTMFVRTAGCDYRCSWCDSAFTWDGSARDEIQQMSPEAIWEELTRLGGDRFSHVTISGGNPALLTGIGDLLTLLKEHGIRTAIETQGSKWQAWLPLIDDITISPKPPSSGMETDFQALDRIVHELLEQKHPGLSLKVVVFDDADFAYARTIHQRFPEVPFYLQPGNSDLTDADTPRLRDKLLESFEWLVDHAMATPDMNDAKVLPQLHALVWGNKRGV

SEQ ID NO: 28526 - protein, 241 aa, Brevibacillus choshinensis
  REGION 1..241: note = tr|A0A0Q3WJF5|A0A0Q3WJF5_BRECH 7-carboxy-7-deazaguanine synthase OS=Brevibacillus choshinensis OX=54911 GN=queE PE=3 SV=1
MSRIPVLEIFGPTIQGEGMVIGQKTMFVRTAGCDYRCSWCDSAFTWDGSARNEIKQMTAEEIWEELSLLGGDCFSHVTISGGNPALLESIGGLIELLKAHGIRSAVETQGSKWQDWLTQIDDVTISPKPPSSGMQTDFDVLDRIVANMLKANHPGVSLKVVVFDETDFEYARSIHRRYPSIPFYLQPGNADLVEANTAELRVKLLETFEWLINMAMAAPDLNDVKVLPQLHALVWGNKRGV

SEQ ID NO: 28527 - protein, 242 aa, Brevibacillus fluminis
  REGION 1..242: note = tr|A0A3M8DFP7|A0A3M8DFP7_9BACL 7-carboxy-7-deazaguanine synthase OS=Brevibacillus fluminis OX=511487 GN=queE PE=3 SV=1
MSNIPVLEIFGPTIQGEGMVIGQKTMFVRTAGCDYRCSWCDSAFTWDGTAQDQIRQLSPEDILAELRELAQDRFSHVTISGGNPALIKSIGGLVELLHANGIRTAIETQGTKWQDWLLEIDEVTISPKPPSSGMTTDFSLLDDMIEKLAANPRKNPFSLKVVVFDEQDFEHARTIHHRYPQVPFFLQVGNDDVHLADDEALRNQLLAKFEWLIDRTMVQSDMNDVKVLPQLHALMWGNKRGV

SEQ ID NO: 28528 - protein, 239 aa, Brevibacillus formosus
  REGION 1..239: note = tr|A0A4Y4I3R8|A0A4Y4I3R8_9BACL 7-carboxy-7-deazaguanine synthase OS=Brevibacillus formosus OX=54913 GN=queE PE=3 SV=1
MIPVLEIFGPTIQGEGMVIGQKTMFVRTAGCDYRCNWCDSAFTWDGSARDEIRQMSPEAVWEELTRLGGDRFSHVTISGGNPALLAGIGDLIALLKEHGIRTAVETQGSKWQPWLPQIDDITISPKPPSSGMDTDFQALDRIVHELLEQKHPGLSLKVVVFDDADFAYARAIHQRFPEVPFYLQPGNSDLTDADTPRLRDKLLESFEWLIDQAMSAPDMNDAKVLPQLHALVWGNKRGV

SEQ ID NO: 28529 - protein, 239 aa, Brevibacillus formosus
  REGION 1..239: note = tr|A0A220MK41|A0A220MK41_9BACL 7-carboxy-7-deazaguanine synthase OS=Brevibacillus formosus OX=54913 GN=queE PE=3 SV=1
MIPVLEIFGPTIQGEGMVIGQKTMFVRTAGCDYRCNWCDSAFTWDGSARDEIRQMSPEAVWEELTRLGGDRFSHVTISGGNPALLAGIGDLIALLKEHGIRTAVETQGSKWQPWLPLIDDITISPKPPSSGMETDFQALDRIVHELLEQKHPGLSLKVVVFDDADFAYARTIHQRFPEVPFYLQPGNSDLTDADTPRLRDKLLESFEWLIDQAMATPDMNDAKVLPQLHALVWGNKRGV

SEQ ID NO: 28530 - protein, 240 aa, unidentified
  source 1..240: note = Brevibacillus gelatini
  REGION 1..240: note = tr|A0A3M8BCG7|A0A3M8BCG7_9BACL 7-carboxy-7-deazaguanine synthase OS=Brevibacillus gelatini OX=1655277 GN=queE PE=3 SV=1
MSIPVLEIFGPTIQGEGMVIGQKTMFVRTAGCDYRCSWCDSAFTWDGSARDEIRQMTPEQIWSELERLAKGRFSHVTISGGNPALLPGMGELVSFLKERGIRTALETQGSRWQEWLPLIDDITISPKPPSSGMSTDYAMLDRIVHTLLEQKHAGLSLKVVVFDDADFAYARDIHRRYPTIPFFLQPGNSDLVSTDTRELREKLLESFEWLIDQSMAAPDLNDAKVLPQLHALVWGNKRGV

SEQ ID NO: 28531 - protein, 245 aa, Brevibacillus invocatus
  REGION 1..245: note = tr|A0A3M8C3M4|A0A3M8C3M4_9BACL 7-carboxy-7-deazaguanine synthase OS=Brevibacillus invocatus OX=173959 GN=queE PE=3 SV=1
MDDGVNPIPVLEIFGPTIQGEGMVIGQKTMFVRTAGCDYRCSWCDSAFTWDGSARDEIQLLSAEAIWQELYRLGEDRFSHVTISGGNPALIEGIGALVSLLQEKGIRTAVETQGSRWQDWLMQIDDVTISPKPPSSGMKTDLDMLDQIVHRLVDGGHDGVSLKVVVFNDEDFAYARRIHSRYPAVPFYLQPGNGDLTDANTDLLREKLLKSFEWLIDQAMSAADMNDAKVLPQLHALVWGNKRGV

SEQ ID NO: 28532 - protein, 247 aa, Brevibacillus laterosporus
  REGION 1..247: note = tr|A0A075R193|A0A075R193_BRELA 7-carboxy-7-deazaguanine synthase OS=Brevibacillus laterosporus LMG 15441 OX=1042163 GN=queE PE=3 SV=1
MSSIPVLEIFGPTIQGEGMVIGQKTMFVRTAGCDYRCSWCDSAFTWDGSAKEQISMMTAEEIWNQLQELGKDCFSHVTISGGNPLLLAPLGELVQLLHSHNIRIGVETQGSRWQEWLAEVDDITLSPKPPSSGMTTNIDRLDEIVAKLTDNPLLSTDQQVSMKVVVFDNEDFQYAKELHQRYPQVPFYLQVGNPELADIEGEREDLRDQLLQSLEWLVDKVAMTKEFNNAKVLPQLHTLLWGNKRGV

SEQ ID NO: 28533 - protein, 229 aa, Brevibacillus laterosporus
  REGION 1..229: note = tr|H0UFU3|H0UFU3_BRELA 7-carboxy-7-deazaguanine synthase OS=Brevibacillus laterosporus GI-9 OX=1118154; GN = queE PE=3 SV=1
MVIGQKTMFVRTAGCDYRCSWCDSAFTWDGSAKEQISMMTAEEIWNQLQELGKDCFSHVTISGGNPLLLAPLGELVQLLHSHNIRIGVETQGSRWQEWLAEVDDITLSPKPPSSGMTTNIDRLDEIVAKLTDNPLPSTDQHVSMKVVVFDDEDFQYAKELHQRYPQVPFYLQVGNPELADIEGEREDLRDRLLQSLEWLVDKVAMSKEFNNAKVLPQLHTLLWGNKRGV

SEQ ID NO: 28534 - protein, 239 aa, unidentified
  source 1..239: note = Brevibacillus nitrificans
  REGION 1..239: note = tr|A0A3M8CTQ5|A0A3M8CTQ5_9BACL 7-carboxy-7-deazaguanine synthase OS=Brevibacillus nitrificans OX=651560 GN=queE PE=3 SV=1
MIPVLEIFGPTIQGEGMVIGQKTMFVRTAGCDYRCSWCDSAFTWDGSAKDEIKQMTAEEIWEELFRLGKDCFSHVTISGGNPALLASIGGLVELLQSRGIRSAVETQGSKWQDWLAQIDDVTLSPKPPSSGMETDFDVLDQVVANLLEKGHSGVSLKVVIFDERDFEYARGIHRRYPGIPFYLQPGNADLVEANTEELRTKLLETFEWLINLAMAAPDLNDVKVLPQLHALVWGNKRGV

SEQ ID NO: 28535 - protein, 241 aa, Brevibacillus panacihumi
  REGION 1..241: note = tr|V6M3Y6|V6M3Y6_9BACL 7-carboxy-7-deazaguanine synthase OS=Brevibacillus panacihumi W25 OX=1408254; GN = queE PE=3 SV=1
MSQIPVLEIFGPTIQGEGMVIGQKTMFVRTAGCDYRCSWCDSAFTWDGTARDEIRQMSPEAIWEELYRLGADRFSHVTISGGNPALIEGIGSLVSLLQEKGIRTAVETQGSRWQDWLMQIDDVTISPKPPSSGMQTDFDMLDQIVHRLVNGEHQGVSLKVVVFDDEDFAYARMIHRRYPQVPFYLQPGNSDLTDADTETLRDKLLHSFEWLIDQAMAAPDMNDAKVLPQLHALVWGNKRGV

SEQ ID NO: 28536 - protein, 241 aa, Brevibacillus panacihumi
  REGION 1..241: note = tr|A0A3M8CS85|A0A3M8CS85_9BACL 7-carboxy-7-deazaguanine synthase OS=Brevibacillus panacihumi OX=497735 GN=queE PE=3 SV=1
MSLIPILEIFGPTIQGEGMVIGQKTMFVRTAGCDYRCSWCDSAFTWDGTARDEIRQMSPEAVWEELYRLGADRFSHVTISGGNPALIEGIGSLISLLQEKGIRTAVETQGSRWQDWLAQIDDVTISPKPPSSGMQTDLDKLDQIVHRLIDGGHQGVSLKVVVFDDEDFSYARMIHRRYPQVPFFLQPGNGDLTDADTEQLRSKLLQSFEWLIDQAMAAPDMNDAKVLPQLHALVWGNKRGV

SEQ ID NO: 28537 - protein, 240 aa, Brevibacillus parabrevis
  REGION 1..240: note = tr|A0A4Y3PL85|A0A4Y3PL85_BREPA 7-carboxy-7-deazaguanine synthase OS=Brevibacillus parabrevis OX=54914 GN=queE PE=3 SV=1
MSIPVLEIFGPTIQGEGMVIGQKTMFVRTAGCDYRCSWCDSAFTWDGSARDEIKQLSVEEVWAELTRLGQDRFSHVTISGGNPALLAGMGELVSFLKERGIRTALETQGSRWQEWLPLIDDITISPKPPSSGMNTDYAVLDRIVGALTEQKHPGLSLKVVVFDDADFAYSRDIHRRYPAVPFFLQPGNSDLVSADTHELREKLLESFEWLIDQAMAAPDLNDAKVLPQLHALVWGNKRGV

SEQ ID NO: 28538 - protein, 241 aa, Brevibacillus reuszeri
  REGION 1..241: note = tr|A0A0K9YKH6|A0A0K9YKH6_9BACL 7-carboxy-7-deazaguanine synthase OS=Brevibacillus reuszeri OX=54915 GN=queE PE=3 SV=1
MSTIPVLEIFGPTIQGEGMVIGQKTMFVRTAGCDYRCSWCDSAFTWDGSARDEIQQMTAEDVYQELNRLGHDRFSHVTISGGNPALLASIGELVQLLKANDIRTAVETQGSRWQSWLHDIDDVTISPKPPSSGMSTDLDALDQIIHALVTRNHQGLSLKVVVFNEDDFAYAQSIHGRYPSIPFYLQPGNDDLTAANTSKLRDKLLESFEWLIERAMEAPDMNDVKVLPQLHALVWGNKRGV

SEQ ID NO: 28539 - protein, 246 aa, Brevibacillus sp.
  REGION 1..246: note = tr|A0A553KQI2|A0A553KQI2_9BACL 7-carboxy-7-deazaguanine synthase OS=Brevibacillus sp. LEMMJ03 OX=2595056 GN=queE PE=3 SV=1
MDVRVNTIPVLEIFGPTIQGEGMVIGQKTMFVRTAGCDYRCRWCDSAFTWDGSAAGEIRQMTPEEIWQELRRIGQDRFAHVTISGGNPALIANVGQLVRLLREQNIRTAVETQGSRWQDWLLLVDDVTISPKPPSSGMTTDFAALDAMVHALSGRTGDVHTSLKVVVFDEADFDYARQVHQRYPRVPFFLQAGNDDVAQADLAGLRDRLLAAYEWLIERTMTAADMNDVKVLPQLHALVWGNKRGV

SEQ ID NO: 28540 - protein, 241 aa, Brevibacillus sp.
  REGION 1..241: note = tr|A0A1I4CNY2|A0A1I4CNY2_9BACL 7-carboxy-7-deazaguanine synthase OS=Brevibacillus sp. OK042 OX=1884381 GN=queE PE=3 SV=1
MSRIPVLEIFGPTIQGEGMVIGQKTMFVRTAGCDYRCSWCDSAFTWDGSAKDEIKQMTAEEIWEELYRLGGDCFSHVTISGGNPALLASIGGLVELLQSRGIRSAVETQGSKWQDWLAQIDDVTLSPKPPSSGMQTDFDVLDQIVANLLCAKHNGVSLKVVIFDEADFEYARGIHRRYPSIPFYLQPGNADLVEANTEELRTKLLETFEWLINLAMAAPDLNDVKVLPQLHALVWGNKRGV

SEQ ID NO: 28541 - protein, 242 aa, unidentified
  source 1..242: note = [Brevibacterium] frigoritolerans
  REGION 1..242: note = tr|A0A4R6ABM9|A0A4R6ABM9_9BACI 7-carboxy-7-deazaguanine synthase OS=[Brevibacterium] frigoritolerans OX=450367 GN=queE PE=3 SV=1
MKKFPVLEIFGPTIQGEGMVIGQKTMFVRTAGCDYSCSWCDSAFTWDGSAKDDIRQLTAEEIWTELFALGGSHFSHVTISGGNPALLGNLNELIDLLHEKNVKVAIETQGSRLQPWFDQIDDLTISPKPPSSGMKTDFTKLDEIILYLRGKNRLYHASLKVVVFDEQDLEFAKMVHLKYPEIPFYLQVGNDLVHEPDDGKLISHLLTRYEWLIDRAVSEEGLNNARVLPQLHTLVWGNKRGV

SEQ ID NO: 28542 - protein, 242 aa, unidentified
  source 1..242: note = [Brevibacterium] frigoritolerans
  REGION 1..242: note = tr|A0A3Q9SE88|A0A3Q9SE88_9BACI 7-carboxy-7-deazaguanine synthase OS=[Brevibacterium] frigoritolerans OX=450367 GN=queE PE=3 SV=1
MSKLPVMEIFGPTIQGEGMVIGQKTMFVRTAGCDYSCSWCDSAFTWDGTGKEDTVQMTADEIWDELKRIGGSGFSFVTISGGNPALLKNLNGLITILHENKMKIGVETQGSRWQDWFLDIDELTISPKPPSSGMDTDFTVLDQIISNLANRNPENHVSLKIVVFNEEDYQYAKHVHGRYPDIPFYLQVGNDDSRTADDRQLISGLLKKYEELIDKVIADDELNDVKVLPQLHTYIWGNKRGV

SEQ ID NO: 28543 - protein, 232 aa, unidentified
  source 1..232: note = Brevifollis gellanilyticus
  REGION 1..232: note = tr|A0A512MEL7|A0A512MEL7_9BACT 7-carboxy-7-deazaguanine synthase OS=Brevifollis gellanilyticus OX=748831 GN=queE PE=3 SV=1
MRISEIFYSVQGEGVLTGVPSVFVRTSGCNLRCRWCDTPYASWQPEGPEMSPDEILAEIEKNPTRYVVVTGGEPMIAKGMREFIARLRELGKHVTVETAGTIMPEGCVVDLASLSPKLANSTPSEEKAGAAWVQRHEQTRLQPEVLKAWINESVDYQLKFVISTEADLHEAHDIVKSLGVPVPPEKVLLMPEGTTLEAMRTRYDLLINACKTFGHRLSPRLHIELFGNKRGT

SEQ ID NO: 28544 - protein, 249 aa, unidentified
  source 1..249: note = Brevirhabdus pacifica
  REGION 1..249: note = tr|A0A1U7DLW5|A0A1U7DLW5_9RHOB 7-carboxy-7-deazaguanine synthase OS=Brevirhabdus pacifica; OX = 1267768 GN=queE PE=3 SV=1
MPVRPAPTPQAERLRIAEIFGPTIQGEGALIGQPTVFVRAGGCDYRCVWCDSLHAVDSAYRHEWAAMDTGQVWDRVRQLSGDRPLTVTLSGGNPAIQDFGPLIETGRAAGYGFALETQGSVARDWFARLALLILSPKPPSSGETPDWAQFDACIAAGAGTRIVLKIVIFDEADYLWSREVAARYPDLPVYLQPGNHTPPPPEAEDAPIDMEGINDRMEWLVERALADGWFDAHILPQLHVLIWGNKRGV

SEQ ID NO: 28545 - protein, 256 aa, unidentified
  source 1..256: note = Brevirhabdus pacifica
  REGION 1..256: note = tr|A0A2M9DDR1|A0A2M9DDR1_9RHOB 7-carboxy-7-deazaguanine synthase OS=Brevirhabdus pacifica; OX = 1267768 GN=queE PE=3 SV=1
MTAQADPMPVRPAPTPQAERLRIAEIFGPTIQGEGALIGQPTVFVRAGGCDYRCVWCDSLHAVDSAYRHEWAAMDTGQVWDRVRQLSGDRPLTVTLSGGNPAIQDFGPLIETGRAAGYGFALETQGSVARDWFARLALLILSPKPPSSGETPDWAQFDACIAAGAGTRIVLKIVIFDEADYLWSREVAARYPDLPVYLQPGNHTPPPPEAEDAPIDMEGINDRMEWLVERALADGWFDAHILPQLHVLIWGNKRGV

SEQ ID NO: 28546 - protein, 210 aa, unidentified
  source 1..210: note = Brevundimonas abyssalis
  REGION 1..210: note = tr|U3AZ27|U3AZ27_9CAUL 7-carboxy-7-deazaguanine synthase OS=Brevundimonas abyssalis TAR-001 OX=1391729; GN = queE PE=3 SV=1
MTYTVKEIFLTVQGEGGQAGRPAVFLRFSGCNLWSGREQDRATAVCSFCDTDFVGVGPDGGKFAAPEALADRVASLWRGGAGGPRLVVCTGGEPLLQLDPPLIAALHARGFEIAVETNGTVVAPDGLDWICVSPKADAPVLQTTGQELKLVYPQALARPEQFADMDFERFWLQPMDGPDTEANTAAAMDYCLQHPKWRLSVQTHKYIGVR

SEQ ID NO: 28547 - protein, 219 aa, Brevundimonas diminuta
  REGION 1..219: note = tr|A0A410P1M0|A0A410P1M0_BREDI 7-carboxy-7-deazaguanine synthase OS=Brevundimonas diminuta OX=293 GN=queE PE=3 SV=1
MLESVSVVRTYSAKEVFLTVQGEGGQAGRPAVFLRFAGCNLWSGLERDRAAAICTFCDTDFVGTNGDGGGKFRTPEAMADHVAAMWRGRDRDPKLVVCTGGEPLMQLDRPLIEALHARGFEIAVETNGTMSAPDGIDWICVSPKADAPVIQTSGQELKLVYPQAKAMPDRFENLDFERFWLQPMDGPDQAANTAAAIEYCLTHPKWRLSVQTHKYIGVR

SEQ ID NO: 28548 - protein, 211 aa, Brevundimonas diminuta
  REGION 1..211: note = tr|A0A1Z3M2F1|A0A1Z3M2F1_BREDI 7-carboxy-7-deazaguanine synthase OS=Brevundimonas diminuta OX=293 GN=queE PE=3 SV=1
MTYSAKEVFLTVQGEGGQAGRPAVFLRFAGCNLWSGLERDRATAICSFCDTDFVGVNGDGGGKFKTADLMANYVAGMWRGREGDPKLVVCTGGEPLMQLDTPLIDALHARGFEIAIESNGTLTAPDGIDWICISPKADAPVVQTSGQELKLVYPQPLAMPDRFESLDFQHFWLQPMDGPDQAANTAAAIEYCLTHPQWRLSVQTHKYIGVR

SEQ ID NO: 28549 - protein, 211 aa, Brevundimonas intermedia
  REGION 1..211: note = tr|A0A4Y9RUV2|A0A4Y9RUV2_9CAUL 7-carboxy-7-deazaguanine synthase OS=Brevundimonas intermedia OX=74315 GN=queE PE=3 SV=1
MTYSAKEVFLTVQGEGGQAGRPAVFLRFAGCNLWSGREQDRAAAVCSFCDTDFVGVDGDGGGKFATADLLADHVAAMWRGREGDPKLVVCTGGEPLLQLDPPLIQALHARGFEIAIESNGTLAAPDGIDWVCISPKADADVIQVTGQELKLVYPQAKAMPDRFERLDFERFWLQPMDGPDQAANTAAAIEYCLTHPQWRLSVQTHKYIGVR

SEQ ID NO: 28550 - protein, 211 aa, Brevundimonas naejangsanensis
  REGION 1..211: note = tr|A0A172YA37|A0A172YA37_9CAUL 7-carboxy-7-deazaguanine synthase OS=Brevundimonas naejangsanensis OX=588932 GN=queE PE=3 SV=1
MTYSAKEVFLTVQGEGGQAGRPAVFLRFAGCNLWSGLERDRAAAVCTFCDTDFVGVDGDGGGKFKTADLMADHVAGMWRGRHGDPKLVVCTGGEPLMQLDAPLIDALHARGFQIAIESNGTMAAPVGIDWICISPKADAPVVQTSGQELKLVFPQPLAMPDRFEHLDFEHFWLQPMDGPDQAANTAAAIEYCLTHPKWRLSVQTHKYIGVR

SEQ ID NO: 28551 - protein, 211 aa, Brevundimonas naejangsanensis
  REGION 1..211: note = tr|A0A494RNB0|A0A494RNB0_9CAUL 7-carboxy-7-deazaguanine synthase OS=Brevundimonas naejangsanensis OX=588932 GN=queE PE=3 SV=1
MTYSAKEVFLTVQGEGGQAGRPAVFLRFAGCNLWSGLERDRASAVCTFCDTDFVGTNGDGGGKFKTADLMADHVAGMWRGREGDPKLVVCTGGEPLMQLDAPLIEALHARGFEIAIESNGTLAAPKGIDWICISPKADAPVVQTSGQELKLVFPQALAMPDRFEHLDFERFWLQPMDGPDQAANTAAAIEYCLTHPQWRLSVQTHKYIGVR

SEQ ID NO: 28552 - protein, 211 aa, Brevundimonas nasdae
  REGION 1..211: note = tr|A0A0B4CYT8|A0A0B4CYT8_9CAUL 7-carboxy-7-deazaguanine synthase OS=Brevundimonas nasdae; OX = 172043 GN=queE PE=3 SV=1
MTYSAKEVFLTVQGEGGQAGRPAVFLRFAGCNLWSGREQDRASAVCTFCDTDFVGVDGDGGGKFATPDLLADHVAAMWRGRDGDPKLVVCTGGEPLLQLDGPLIDALHARGFEIAIESNGTIAAPAGVDWICISPKADADVVQTRGAELKLVFPQLKAMPDRFEHLDFERFWLQPMDGPDQVENTAAAIEYCLTHPKWRLSVQTHKYIGVR

SEQ ID NO: 28553 - protein, 211 aa, Brevundimonas sp.
  REGION 1..211: note = tr|A0A1S6EU58|A0A1S6EU58_9CAUL 7-carboxy-7-deazaguanine synthase OS=Brevundimonas sp. LM2; OX = 1938605 GN=queE PE=3 SV=1
MTYAVKETFLTVQGEGGQAGRPAVFLRFAGCNLWSGREQDRATAVCSFCDTLFVGTDGDGGGKFADAGALAGHVASFWIGRDGDPKLVVCTGGEPLLQLDTALIAALHDRGFDIAVETNGTLDVPTGVDWICVSPKAAAPVVQTSGQELKLVYPQPLAMPERFEDLVFERFWLQPMDGPDQVANTAAALDYCLRHPQWRLSVQTHKYIGVR

SEQ ID NO: 28554 - protein, 211 aa, Brevundimonas sp.
  REGION 1..211: note = tr|A0A0Q7T844|A0A0Q7T844_9CAUL 7-carboxy-7-deazaguanine synthase OS=Brevundimonas sp. Root1423 OX=1736462 GN=queE PE=3 SV=1
MTYSAKEVFLTVQGEGGQAGRPAVFLRFAGCNLWNGLERDRATAVCTFCDTDFVGVDGDGGGKFASAGALADHIDARWRGRAGDPKLVVCTGGEPLLQLDTPLIHALHARGFEIAIETNGTLAAPAGIDWICVSPKADAPVEQTSGQELKLVFPQAKAMPDRFEHLAFERFWLQPMDGPDQAANTAAAIDYCLTHPKWRLSVQTHKYIGVR

SEQ ID NO: 28555 - protein, 211 aa, Brevundimonas subvibrioides
  REGION 1..211: note = tr|D9QK64|D9QK64_BRESC 7-carboxy-7-deazaguanine synthase OS=Brevundimonas subvibrioides (strain ATCC 15264 / DSM 4735 / LMG 14903 / NBRC 16000 / CB 81) OX=633149 GN= queE PE=3 SV=1
MTYSVKETFLTVQGEGGQAGRPAVFLRFAGCNLWSGREQDRAKAVCSFCDTEFVGTDGDGGGKFADAGVLSDHVASMWIGRDGDPKLVVCTGGEPLLQLDAPLIEALHARGFDIAVETNGTLAAPTGIDWVCVSPKAAAPVVQTSGQELKLVFPQALAMPHRFEALDFERFWLQPMDGPDQAANTAAALDYCLKNPKWRLSVQTHKYIGVR

SEQ ID NO: 28556 - protein, 211 aa, Brevundimonas subvibrioides
  REGION 1..211: note = tr|A0A258FIT7|A0A258FIT7_9CAUL 7-carboxy-7-deazaguanine synthase OS=Brevundimonas subvibrioides OX=74313 GN=queE PE=3 SV=1
MTYSVKETFLTIQGEGGQAGRPAVFLRFAGCNLWTGREQDRATAVCAFCDTDFVGTDGDGGGKFADADALADHVASFWIGRIGDPRLVVCTGGEPLLQLDAALIAALKTRSFEIAVETNGTLPAPDGIDWVCVSPKAAAPVVQTRGQELKLVYPQALAMPDRFEDLSFDRFWLQPMDGPDQTANTAAAIAYCLAHPKWRLSVQTHKYIGVR

SEQ ID NO: 28557 - protein, 215 aa, Brevundimonas vancanneytii
  REGION 1..215: note = tr|A0A4P1K6D8|A0A4P1K6D8_9CAUL 7-carboxy-7-deazaguanine synthase OS=Brevundimonas vancanneytii OX=1325724 GN=queE PE=3 SV=1
MGGRMTYSAKEVFLTVQGEGGQAGRPAVFLRFAGCNLWSGLERDRATAICTFCDTDFVGVNGDGGGKFKTADLMADHVAGMWRGREGDPKLVVCTGGEPLMQLDTSLIDALHARGFEIAIESNGTLVAPEGIDWICISPKADAPVVQTSGQELKLVYPQPLAMPERFESLDFQHFWLQPMDGPDQAANTAAAIEYCLTRPQWRLSVQTHKYIGVR

SEQ ID NO: 28558 - protein, 211 aa, Brevundimonas vesicularis
  REGION 1..211: note = tr|A0A1Z3UB60|A0A1Z3UB60_BREVE 7-carboxy-7-deazaguanine synthase OS=Brevundimonas vesicularis OX=41276 GN=queE PE=3 SV=1
MTYSAKEVFLTVQGEGGQAGRPAVFLRFAGCNLWSGREQDRASAVCTFCDTDFVGVDGDGGGKFASPDLLADHVAAMWRGRDGDPKLVVCTGGEPLLQLDAPLIDALHARGFEIAIESNGTLLAPEGVDWICISPKADADVVQTRGAELKLVFPQPKAMPDRFEHLDFERFWLQPMDGPDQVENTAAAIEYCLTHPQWRLSVQTHKYIGVR

SEQ ID NO: 28559 - protein, 211 aa, Brevundimonas vesicularis
  REGION 1..211: note = tr|A0A2X1B833|A0A2X1B833_BREVE 7-carboxy-7-deazaguanine synthase OS=Brevundimonas vesicularis OX=41276 GN=queE PE=3 SV=1
MTYSAKEVFLTVQGEGGQAGRPAVFLRFAGCNLWSGREQDRASAVCTFCDTDFVGVDGDGGGKFATPDLLANHVAAMWRGREGDPKLVVCTGGEPLLQLDAPLIDALHARGFEIAIESNGTIAAPDGVDWICISPKADADVVQTRGAELKLVFPQPKAMPDRFEHLDFERFWLQPMDGPDQVENTAAAIEYCLTHPQWRLSVQTHKYIGVR

SEQ ID NO: 28560 - protein, 211 aa, unidentified
  source 1..211: note = Brevundimonas viscosa
  REGION 1..211: note = tr|A0A1I6S1S1|A0A1I6S1S1_9CAUL 7-carboxy-7-deazaguanine synthase OS=Brevundimonas viscosa; OX = 871741 GN=queE PE=3 SV=1
MSYAAKEVFLTVQGEGGQAGRPAVFLRFAGCNLWNGLERDRAAAVCSFCDTDFVGTDGDGGGKFQTADALAEHVASMWRGREGDPKLVVCTGGEPLLQLDGPLIEALHARGFEIAVESNGTIVAPPGIDWICVSPKADAPVAQTSGQELKLVFPQPLAMPDRFEYLAFERFWLQPMDGPEREANTAAALDYCLAHPKWRLSVQTHKYIGVR

SEQ ID NO: 28561 - protein, 251 aa, unidentified
  source 1..251: note = Brucella abortus
  REGION 1..251: note = tr|D7H081|D7H081_BRUAO 7-carboxy-7-deazaguanine synthase OS=Brucella abortus bv. 5 str. B3196 OX=520453; GN = queE PE=3 SV=1
MKPAMKPVMKPGPEIRISEIFGPTIQGEGVLIGEPTVFVRTGGCDYRCAWCDSLHAVESRFRHEWKPMSVEAIWHEVTALSQKRPLTVSLSGGNPAIQPLGALIKHGKFEGYRFALETQGSVAKDWFSRLDTLVLSPKPPSSAMETDWDMLAACIEAAGTGPRTVLKFVIFDEADYAYARTVSARHPQLPVYVQPGNHTPPPPDADDAAIDIDGIMRRMEWLVDKVIADGWFEAHVLPQLHVLIWGNRRGV

SEQ ID NO: 28562 - protein, 251 aa, unidentified
  source 1..251: note = Brucella abortus
  REGION 1..251: note = tr|Q57AT0|Q57AT0_BRUAB 7-carboxy-7-deazaguanine synthase OS=Brucella abortus biovar 1 (strain 9-941); OX = 262698 GN=queE PE=3 SV=1
MKPAMKPVMKPGPEIRISEIFGPTIQGEGVLIGEPTVFVRTGGCDYRCAWCDSLHAVESRFRHEWKPMSVEAIWHEVTALSQKRPLTVSLSGGNPAIQPLGALIKHGKAEGYRFALETQGSVAKDWFSRLDTLVLSPKPPSSAMETDWDMLAACIEAAGTGPRTVLKFVIFDEADYAYARTVSARHPQLPVYVQPGNHTPPPPDADDAAIDIDGIMRRMEWLVDKVIADGWFEAHVLPQLHVLIWGNRRGV

SEQ ID NO: 28563 - protein, 251 aa, unidentified; identical to SEQ ID NO: 28562
  source 1..251: note = Brucella canis
  REGION 1..251: note = tr|A9M961|A9M961_BRUC2 7-carboxy-7-deazaguanine synthase OS=Brucella canis (strain ATCC 23365 / NCTC 10854) OX=483179 GN=queE PE=3 SV=1

SEQ ID NO: 28564 - protein, 252 aa, Brucella ceti
  REGION 1..252: note = tr|C0G804|C0G804_9RHIZ 7-carboxy-7-deazaguanine synthase OS=Brucella ceti str. Cudo OX=595497 GN=queE PE=3; SV = 1
MMKPAMKPVMKPGPEIRISEIFGPTIQGEGVLIGEPTVFVRTGGCDYRCAWCDSLHAVESRFRHEWKPMSVEAIWHEVTALSQKRPLTVSLSGGNPAIQPLGALIKHGKAEGYRFALETQGSVAKDWFSRLDTLVLSPKPPSSAMETDWDMLAACIEAAGTGPRTVLKFVIFDEADYAYARTVSARHPQLPVYVQPGNHTPPPPDADDAAIDIDGIMRRMEWLVDKVIADGWFEAHVLPQLHVLIWGNRRGV

SEQ ID NO: 28565 - protein, 252 aa, Brucella melitensis; identical to SEQ ID NO: 28564
  REGION 1..252: note = tr|A0A4V0Z2D5|A0A4V0Z2D5_BRUML 7-carboxy-7-deazaguanine synthase OS=Brucella melitensis; OX = 29459 GN=queE PE=3 SV=1

SEQ ID NO: 28566 - protein, 243 aa, Brucella melitensis
  REGION 1..243: note = tr|Q8YJJ0|Q8YJJ0_BRUME 7-carboxy-7-deazaguanine synthase OS=Brucella melitensis biotype 1 (strain 16M / ATCC 23456 / NCTC 10094) OX=224914 GN=queE PE=3 SV=1
MKPGPEIRISEIFGPTIQGEGVLIGEPTVFVRTGGCDYRWAWCDNLHAVESRFRHEWKPMSVEAIWHEVTALSQKRPLTVSLSGGNPAIQPLGALIKHGKAEGYRFALETQGSVAKDWFSRLDTLVLSPKPPSSAMETDWDMLAACIEAAGTGPRTVLKFVIFDEADYAYARTVSARHPQLPVYVQPGNHTPPPPDADDAAIDIDGIMRRMEWLVDKVIADGWFEAHVLPQLHVLIWGNRRGV

SEQ ID NO: 28567 - protein, 251 aa, Brucella microti; identical to SEQ ID NO: 28562
  REGION 1..251: note = tr|C7LEK3|C7LEK3_BRUMC 7-carboxy-7-deazaguanine synthase OS=Brucella microti (strain CCM 4915) OX=568815; GN = queE PE=3 SV=1

SEQ ID NO: 28568 - protein, 252 aa, unidentified
  source 1..252: note = Brucella neotomae
  REGION 1..252: note = tr|A0A381B9V9|A0A381B9V9_BRUNE 7-carboxy-7-deazaguanine synthase OS=Brucella neotomae; OX = 29460 GN=queE PE=3 SV=1
MMKPAMKPVMKPGPEIRISEIFGPTIQGEGVLIGEPTVFVRTGGCDYRCAWCDSLHAVESRFRHEWKPMSVEAIWHEVTALSQKRPLTVSLSGGNPAIQPLGALIKHGKAEGYRFALETQGSVAKDWFSRLDTLVLSPKPPSSAMETDWDMLAACIEAAGTGPHTVLKFVIFDEADYAYARTVSARHPQLPVYVQPGNHTPPPPDADDAAIDIDGIMRRMEWLVDKVIADGWFEAHVLPQLHVLIWGNRRGV

SEQ ID NO: 28569 - protein, 252 aa, unidentified
  source 1..252: note = Brucella ovis
  REGION 1..252: note = tr|N8LU66|N8LU66_BRUOV 7-carboxy-7-deazaguanine synthase OS=Brucella ovis IntaBari-2002-82-58 OX=1293916; GN = queE PE=3 SV=1
MMKPAMKPVMKPGPEIRISEIFGPTIQGEGVLIGEPTVFVRTGGCDYRCAWCDSLHAVESRFRHEWKPISVEAIWHEVTALSQKRPLTVSLSGGNPAIQPLGALIKHGKAEGYRFALETQGSVAKDWFSRLDTLVLSPKPPSSAMETDWDMLAACIEAAGTGPRTVLKFVIFDEADYAYARTVSARHPQLPVYVQPGNHTPPPPDADDAAIDIDGIMRRMEWLVDKVIADGWFEAHVLPQLHVLIWGNRRGV

SEQ ID NO: 28570 - protein, 247 aa, unidentified
  source 1..247: note = Brucella ovis
  REGION 1..247: note = tr|A0A0H3AQE3|A0A0H3AQE3_BRUO2 7-carboxy-7-deazaguanine synthase OS=Brucella ovis (strain ATCC 25840 / 63/290 / NCTC 10512) OX=444178 GN=queE PE=3; SV = 1
MKPVMKPGPEIRISEIFGPTIQGEGVLIGEPTVFVRTGGCDYRCAWCDSLHAVESRFRHEWKPISVEAIWHEVTALSQKRPLTVSLSGGNPAIQPLGALIKHGKAEGYRFALETQGSVAKDWFSRLDTLVLSPKPPSSAMETDWDMLAACIEAAGTGPRTVLKFVIFDEADYAYARTVSARHPQLPVYVQPGNHTPPPPDADDAAIDIDGIMRRMEWLVDKVIADGWFEAHVLPQLHVLIWGNRRGV

SEQ ID NO: 28571 - protein, 251 aa, Brucella pinnipedialis
  REGION 1..251: note = tr|A0A0E1X170|A0A0E1X170_9RHIZ 7-carboxy-7-deazaguanine synthase OS=Brucella pinnipedialis M292/94/1 OX=520462 GN=queE PE=3 SV=1
MKPAMKPVMKPGPEIRISEIFGPTIQGEGVLIGEPTVFVRTGGCDYRCAWCDSLHAVESRFRHEWKPMSVEAIWHEVTALSQKRPLTVSLSGGNPAIQPLGTLIKHGKAEGYRFALETQGSVAKDWFSRLDTLVLSPKPPSSAMETDWDMLAACIEAAGTGPRTVLKFVIFDEADYAYARTVSARHPQLPVYVQPGNHTPPPPDADDAAIDIDGIMRRMEWLVDKVIADGWFEAHVLPQLHVLIWGNRRGV

SEQ ID NO: 28572 - protein, 280 aa, Brucella sp.
  REGION 1..280: note = tr|D6LQJ1|D6LQJ1_9RHIZ 7-carboxy-7-deazaguanine synthase OS=Brucella sp. NVSL 07-0026 OX=520448 GN=queE; PE = 3 SV=1
MPCAMAGNLRSAGQRNTEDLGGIPARKTMMKPAMKPVMKPGPEIRISEIFGPTIQGEGVLIGEPTVFVRTGGCDYRCAWCDSLHAVESRFRHEWKPMSVEAIWHEVTALSQKRPLTVSLSGGNPAIQPLGALIKHGKAEGYRFALETQGSVAKDWFSRLDTLVLSPKPPSSAMETDWDMLAACIEAAGTGPRTVLKFVIFDEADYAYARTVSARHPQLPVYVQPGNHTPPPPDADDAAIDVDGIMRRTEWLVDKVIADGWFEAHVLPQLHVLIWGNRRGV

SEQ ID NO: 28573 - protein, 247 aa, Brucella sp.
  REGION 1..247: note = tr|A0A1P8S6U0|A0A1P8S6U0_9RHIZ 7-carboxy-7-deazaguanine synthase OS=Brucella sp. 09RB8910; OX = 1844051 GN=queE PE=3 SV=1
MKPVMKPGPEIRISEIFGPTIQGEGVLIGEPTVFVRTGGCDYRCAWCDSLHAVESRFRHEWKPMSVEAIWHEVTALSQKRPLTVSLSGGNPAIQPLGALIEHGKAEGYRFALETQGSVAKDWFSRLDTLVLSPKPPSSAMETDWDMLAACIEAAGTGPRTVLKFVIFDEADYAYARAVSARHPQLPVYLQPGNHTPPPPDADDAAIDIDGIMRRMEWLVDKVIADGWFEAHVLPQLHVLIWGNRRGV

SEQ ID NO: 28574 - protein, 252 aa, unidentified; identical to SEQ ID NO: 28564
  source 1..252: note = Brucella suis
  REGION 1..252: note = tr|A0A4Z0F6N4|A0A4Z0F6N4_BRUSS 7-carboxy-7-deazaguanine synthase OS=Brucella suis; OX = 29461 GN=queE PE=3 SV=1

SEQ ID NO: 28575 - protein, 251 aa, unidentified; identical to SEQ ID NO: 28562
  source 1..251: note = Brucella suis
  REGION 1..251: note = tr|B0CIX7|B0CIX7_BRUSI 7-carboxy-7-deazaguanine synthase OS=Brucella suis (strain ATCC 23445 / NCTC 10510); OX = 470137 GN=queE PE=3 SV=1

SEQ ID NO: 28576 - protein, 243 aa, unidentified
  source 1..243: note = Brucellaceae bacterium
  REGION 1..243: note = tr|A0A3P1V0V1|A0A3P1V0V1_9RHIZ 7-carboxy-7-deazaguanine synthase OS=Brucellaceae bacterium VT-16-1752 OX=2487907 GN=queE PE=3 SV=1
MKPVSEIRISEIFGPTIQGEGVLIGEPTVFVRTGGCDYRCAWCDSLHAVESRFRHEWKSMGVEAIWHEVTALSENRPLTVSLSGGNPAIQPLGPLIAHGKKEAYRFALETQGSVAKDWFSALDTLVLSPKPPSSAMAFDPDALAACVEAAGPKPRTVLKFVIFDDADYAFAKHVSALYPHLPVYLQPGNHTPPPPETDDALIDIDGIMRRMEWLVDKVIADRWFEAHVLPQLHVLIWGNKRGV

SEQ ID NO: 28577 - protein, 193 aa, unidentified
  source 1..193: note = Brumimicrobium aurantiacum
  REGION 1..193: note = tr|A0A3E1EZ47|A0A3E1EZ47_9FLAO 7-carboxy-7-deazaguanine synthase OS=Brumimicrobium aurantiacum OX=1737063 GN=queE PE=3 SV=1
MESFYTIQGEGHYSGRAAYFIRTGGCDVGCVWCDVKESWEAENHPDTSLETLLSEVNTTSTDFVVVTGGEPAMYSIENLVIALQNEGKEVAIETSGCYPLDAKVDWYCFSPKKFKKPVPEAYEKAHELKVVIFNKSDFKWAEEHAEKINSECFLYLQPEWSKEEQMLPLIIEYVKNNPKWKISLQTHKYMNIP

SEQ ID NO: 28578 - protein, 193 aa, Brumimicrobium glaciale
  REGION 1..193: note = tr|A0A4Q4KRF7|A0A4Q4KRF7_9FLAO 7-carboxy-7-deazaguanine synthase OS=Brumimicrobium glaciale OX=200475 GN=queE PE=3 SV=1
MESFYTIQGEGHYSGRAAYFIRTGGCDVGCVWCDVKESWEAKDHPDTSLETLLDGVNSTPTDFVVITGGEPAMYPIETLVSALQDNYKEVAIETSGCYPLDAKVDWYCFSPKKFKKPVDEAYIKANELKIVIFNKNDFSWAEEHAAKVNDDCLLYLQPEWSKEAQMLPLIIDYVKDNPRWRISLQTHKYMNIP

SEQ ID NO: 28579 - protein, 193 aa, unidentified
  source 1..193: note = Brumimicrobium salinarum
  REGION 1..193: note = tr|A0A2I0R3B3|A0A2I0R3B3_9FLAO 7-carboxy-7-deazaguanine synthase OS=Brumimicrobium salinarum OX=2058658 GN=queE PE=3 SV=1
MESFYTIQGEGHYSGRAAYFIRTGGCDVGCVWCDVKESWEAENHPDTTLETLLEEVNTTNTNFVVVTGGEPAMYKIENLVSALQNEGKEVAIETSGCYPLDAKVDWYCFSPKKFKKPVEEAYEKANELKVVIFNKNDFKWAEEHAEKVNDDCLLYLQPEWSKEAQMLPLIIDYVKNHPQWKISLQTHKYMNIP

SEQ ID NO: 28580 - protein, 207 aa, Brumimicrobium sp.
  REGION 1..207: note = tr|A0A2U2XES5|A0A2U2XES5_9FLAO 7-carboxy-7-deazaguanine synthase OS=Brumimicrobium sp. C305 OX=2100725 GN=queE PE=3 SV=1
MENNIESKRTSWPVMESFYTIQGEGHYSGRAAYFIRTGGCDVGCVWCDVKESWEAENHPDTSLETLLEGVNATATDFVVITGGEPAMYPIETLVTALQDDYKEVAIETSGCYPLDAQVDWYCFSPKKFKKPVEEAYHKANELKIVIFNKSDFKWAEEHAAKVNDDCLLYLQPEWSKEAQILPLIIEYVKDNPKWKISLQTHKYMNIP

SEQ ID NO: 28581 - protein, 223 aa, unidentified
  source 1..223: note = Bryobacterales bacterium
  REGION 1..223: note = tr|A0A3D1B190|A0A3D1B190_9BACT 7-carboxy-7-deazaguanine synthase OS=Bryobacterales bacterium OX=2026791 GN=queE PE=3 SV=1
MKIAEIFYSVQGEGSLVGVPSVFIRTSGCNLRCSWCDTPYTSWHPEGEMMEVPAIMTVAQSFGARHAVVTGGEPMIAPGIRELTQALRAAGFHITIETAGTVLADVACDLMSISPKLANSTPEGPFAQQHERLRLQVDVLSQLTSRCSYQLKFVVRDPDDMSEINQLVQALGAGKEHVILMPEGIDRDTLRERGLWLAEICKQTGFRFSPRLHVDLYGNRRGV

SEQ ID NO: 28582 - protein, 215 aa, Bryocella elongata
  REGION 1..215: note = tr|A0A1H6CB88|A0A1H6CB88_9BACT 7-carboxy-7-deazaguanine synthase OS=Bryocella elongata; OX = 863522 GN=queE PE=3 SV=1
MAYSVKEIFYTLQGEGANAGRPSVFCRFAGCNLWTGREEDRASAICKFCDTDFIGTDGDGGGKFATARELAQAVAARWPASTESQRGKSQRFVVCTGGEPLLQLDAALIAALHEEGFVIAVETNGTVAVPDGIDWVCVSPKIGSKFIVERGQELKLVYPQEVDPDDFLKLDFENFYLQPKDGPDAAASLAATIDYCRAHPAWRLSLQTHKIIGIR

SEQ ID NO: 28583 - protein, 219 aa, Buchnera aphidicola
  REGION 1..219: note = sp|Q8K9D9|QUEE_BUCAP 7-carboxy-7-deazaguanine synthase OS=Buchnera aphidicola subsp. Schizaphis graminum (strain Sg) OX=198804 GN=queE PE=3 SV=1
MYYPINEIFQTIQGEGYYTGTPSIFIRLQGCPVHCKWCDTKYTWKCNNEDQISYEKIIMKKKSNRKWSYMNVKEIILIIKIKKWTAKHIVITGGEPCLYNLLEITKELEKEDYKCQIETSGTELIKCSLNTWITLSPKINKKTLKTSILRSNEIKYPVLKKEDLFYLNSILKKIKNKKHNLIFLQPISQNEEALNICIKTCIIKNWRLSVQIHKYLKIR

SEQ ID NO: 28584 - protein, 219 aa, Buchnera aphidicola
  REGION 1..219: note = tr|A0A2U8DGD0|A0A2U8DGD0_9GAMM 7-carboxy-7-deazaguanine synthase OS=Buchnera aphidicola (Melanaphis sacchari) OX=2173854 GN=queE PE=3 SV=1
MKYPVNEIFQTIQGEGYYIGTPAIFIRLQGCKVACEWCDTKYTWKNSYENQILNEEIIKKEKSNKKWSYMTTQNIILIIKQLKWTAKHIVITGGEPCMYNLLDITTLLEEKGYFCQIETSGTELIECSLNTWVTLSPKQKKTTLKSSILRANEIKFPILIEQDFLYLKKILHMIKKRKNNLIFLQPISQNEKALAICIKKCTEKNWRLSIQIHKYLQIR

SEQ ID NO: 28585 - protein, 223 aa, Budvicia aquatica
  REGION 1..223: note = tr|A0A2C6DM13|A0A2C6DM13_9GAMM 7-carboxy-7-deazaguanine synthase OS=Budvicia aquatica; OX = 82979 GN=queE PE=3 SV=1
MLYPVNELFQTLQGEGYFTGVPAIFIRLQGCPVGCSWCDTKHTWEKVAEQQRPIGDILVKTEESDCWSGVTEQQLINILQQQQYTARHVVITGGEPCLYDLTPLTDLLEQHGFNCQIETSGTQQVSCSENTWVTVSPKVDMRGGLAVVAQALVRADEIKHPVARERDIEQLDELLATLTDDKPRVIALQPISQNPRSTELCIQTCIARNWRLSMQTHKYLNIA

SEQ ID NO: 28586 - protein, 210 aa, Burkholderia ambifaria
  REGION 1..210: note = tr|B1YPW8|B1YPW8_BURA4 7-carboxy-7-deazaguanine synthase OS=Burkholderia ambifaria (strain MC40-6); OX = 398577 GN=queE PE=3 SV=1
MTYAVKEIFYTLQGEGANAGRPAVFCRFAGCNLWSGREEDRAEAVCRFCDTDFVGTDGENGGKFKDAEALVATIAGLWPDGEAHRFVVCTGGEPMLQLDQPLVDALHAAGFEIAIETNGSLPVLETIDWICVSPKADAPLVVTKGNELKVVIPQDNQRLADYAKLDFEYFLVQPMDGPSRDLNTKLAIDWCKRHPQWRLSMQTHKYLNIP

SEQ ID NO: 28587 - protein, 210 aa, Burkholderia ambifaria; identical to SEQ ID NO: 28586
  REGION 1..210: note = tr|A0A2S9N4L7|A0A2S9N4L7_9BURK 7-carboxy-7-deazaguanine synthase OS=Burkholderia ambifaria OX=152480 GN=queE PE=3 SV=1

SEQ ID NO: 28588 - protein, 210 aa, Burkholderia anthina
  REGION 1..210: note = tr|A0A107SN49|A0A107SN49_9BURK 7-carboxy-7-deazaguanine synthase OS=Burkholderia anthina; OX = 179879 GN=queE PE=3 SV=1
MTYAVKEIFYTLQGEGANAGRPAVFCRFAGCNLWSGREEDRAEAVCRFCDTDFVGTDGENGGKFKDAAALVATIAGLWPEGEAHRFVVCTGGEPMLQLDQPLVDALHAAGFEIAIETNGSLPVLESIDWICVSPKADAPLVVTKGNELKVVVPQDNQRLADYAKLDFEYFLVQPMDGPSRDLNTKLAIDWCKRHPQWRLSMQTHKYLNIP

SEQ ID NO: 28589 - protein, 210 aa, unidentified
  source 1..210: note = Burkholderia catarinensis
  REGION 1..210: note = tr|A0A1J9PS04|A0A1J9PS04_9BURK 7-carboxy-7-deazaguanine synthase OS=Burkholderia catarinensis OX=1108140 GN=queE PE=3 SV=1
MTYAVKEIFYTLQGEGANAGRPAVFCRFAGCNLWSGREEDRAEAVCRFCDTDFVGTDGENGGKFKDAEALVATIAGLWPDGEAHRFVVCTGGEPMLQLDQPLVDALHAAGFEIAIETNGSMPVLETIDWICVSPKADAPLVVTKGNELKVVIPQDNQRLADYAKLDFEYFLVQPMDGPSRDLNTKLAIDWCKRHPQWRLSMQTHKYLNIP

SEQ ID NO: 28590 - protein, 207 aa, Burkholderia cenocepacia
  REGION 1..207: note = tr|A2VUG8|A2VUG8_9BURK 7-carboxy-7-deazaguanine synthase OS=Burkholderia cenocepacia PC184 OX=350702; GN = queE PE=3 SV=1
MTYAVKEIFYTLQGEGANAGRPAVFCRFAGCNLWSGREEDRAEAVCRFCDTDFVGTDGENGGKFKDAAALVATIAGLWPEGEANRFVVCTGGEPMLQLDQPLVDALHAAGFEIAIETNGSLPVLESIDWICVSPKADAPLVVTKGNELKGRRAAGQPAAGRLREARLRVFSRAADGRPVARPQHEARDRLVQSVIRSGGCRCRPTNI

SEQ ID NO: 28591 - protein, 210 aa, Burkholderia cenocepacia
  REGION 1..210: note = tr|A0A3N9G925|A0A3N9G925_9BURK 7-carboxy-7-deazaguanine synthase OS=Burkholderia cenocepacia OX=95486 GN=queE PE=3 SV=1
MTYAVKEIFYTLQGEGANAGRPAVFCRFAGCNLWSGREEDRAEAVCRFCDTDFVGTDGENGGKFKDAAALVATIAGLWPEGEANRFVVCTGGEPMLQLDQPLVDALHAAGFEIAIETNGSLPVLESIDWICVSPKADAPLVVTKGNELKVVVPQDNQRLADYAKLDFEYFLVQPMDGPSRDLNTKLAIDWCKRHPQWRLSMQTHKYLNIP

SEQ ID NO: 28592 - protein, 210 aa, Burkholderia cepacia
  REGION 1..210: note = tr|A0A0U4BZX9|A0A0U4BZX9_BURCE 7-carboxy-7-deazaguanine synthase OS=Burkholderia cepacia JBK9 OX=1395570 GN=queE PE=3 SV=1
MTYAVKEIFYTLQGEGANAGRPAVFCRFAGCNLWSGREEDRAEAVCRFCDTDFVGTDGENGGKFKDAEALVATIAGLWPEGEAHRFVVCTGGEPMLQLDQPLVDALHAAGFEIAIETNGSLPVLESIDWICVSPKADAPLVVTKGNELKVVIPQDNQRLADYAKLDFEYFLVQPMDGPSRDLNTKLAIDWCKRHPQWRLSMQTHKYLNIP

SEQ ID NO: 28593 - protein, 210 aa, Burkholderia cepacia; identical to SEQ ID NO: 28586
  REGION 1..210: note = tr|J7J346|J7J346_BURCE 7-carboxy-7-deazaguanine synthase OS=Burkholderia cepacia GG4 OX=1009846 GN=queE; PE = 3 SV=1

SEQ ID NO: 28594 - protein, 210 aa, Burkholderia contaminans
  REGION 1..210: note = tr|A0A0G3Z0A4|A0A0G3Z0A4_9BURK 7-carboxy-7-deazaguanine synthase OS=Burkholderia contaminans OX=488447 GN=queE PE=3 SV=1
MTYAVKEIFYTLQGEGANAGRPAVFCRFAGCNLWSGREEDRAEAVCRFCDTDFVGTDGENGGKFKDAEALVATIAGLWPEGEAHRFVVCTGGEPMLQLDQPLVDALHAAGFEIAIETNGSLPVLESIDWICVSPKADAPLVVTKGNELKVVIPQDNQRLADYAKLDFEYYLVQPMDGPSRDLNTKLAIDWCKRHPQWRLSMQTHKYLNIP

SEQ ID NO: 28595 - protein, 210 aa, unidentified
  source 1..210: note = Burkholderia dabaoshanensis
  REGION 1..210: note = tr|A0A2N7VSS2|A0A2N7VSS2_9BURK 7-carboxy-7-deazaguanine synthase OS=Burkholderia dabaoshanensis OX=564714 GN=queE PE=3 SV=1
MTYAVKEIFYTLQGEGANAGRPAVFCRFAGCNLWSGREEDRASAVCRFCDTDFVGTDGENGGKYRDAEALAAKIASLWPEGEANRFVVCTGGEPMLQMDEPFVDALHAAGFEVAIETNGSLPVLESIDWVCVSPKADAPLVVTKGNELKVVVPQENQRLADYAALDFEYFLVQPMDGPAREMNTRLAIDWCKRHPRWRLSMQTHKYLNIP

SEQ ID NO: 28596 - protein, 210 aa, Burkholderia diffusa
  REGION 1..210: note = tr|A0A1B4BVZ2|A0A1B4BVZ2_9BURK 7-carboxy-7-deazaguanine synthase OS=Burkholderia diffusa; OX = 488732 GN=queE PE=3 SV=1
MTYAVKEIFYTLQGEGANAGRPAVFCRFAGCNLWSGREEDRADAVCRFCDTDFVGTEGENGGKFKDAEALVATIAGLWPDGEAHRFVVCTGGEPMLQLDQPLVDALHAAGFEIAIETNGSLPVLETIDWICVSPKADAPLVVTKGNELKVVIPQDNQRLADYAKLDFEYFLVQPMDGPSRDLNTKLAIDWCKRHPQWRLSMQTHKYLNIP

SEQ ID NO: 28597 - protein, 210 aa, Burkholderia dolosa
  REGION 1..210: note = tr|A0A0D5J5L3|A0A0D5J5L3_9BURK 7-carboxy-7-deazaguanine synthase OS=Burkholderia dolosa AU0158 OX=350701 GN=queE PE=3 SV=1
MTYAVKEIFYTLQGEGANAGRPAVFCRFAGCNLWSGREEDRADAVCRFCDTDFVGTDGENGGKFKDAASLAAAIAALWPDGEAHRFVVCTGGEPMLQLDQPLVDALHAAGFEIAIETNGSLPVLDSIDWICVSPKADAPLVVTKGNELKVVIPQDNQRLADYAKLDFEYFLVQPMDGPSRDLNTKLAIDWCKRHPQWRLSMQTHKYLNIP

SEQ ID NO: 28598 - protein, 210 aa, Burkholderia gladioli
  REGION 1..210: note = tr|F2LGW6|F2LGW6_BURGS 7-carboxy-7-deazaguanine synthase OS=Burkholderia gladioli (strain BSR3) OX=999541; GN = queE PE=3 SV=1
MTYTVKEIFYTLQGEGANAGRPAVFCRFAGCNLWTGREADRETAVCRFCDTDFVGTDGENGGKFKTPEQLAAMVASLWPEGEANRFVVCTGGEPMLQLDQPLVDALHAQGFEIAIETNGSLPVLETIDWICVSPKADAPLVVTKGHELKVVVPQDNQRLADYARLDFDYFLVQPMDGPSRDINTKLAIDWCKRHPQWRLSMQTHKYLNIP

SEQ ID NO: 28599 - protein, 210 aa, Burkholderia gladioli; identical to SEQ ID NO: 28598
  REGION 1..210: note = tr|A0A095HVU9|A0A095HVU9_BURGA 7-carboxy-7-deazaguanine synthase OS=Burkholderia gladioli; OX = 28095 GN=queE PE=3 SV=1

SEQ ID NO: 28600 - protein, 210 aa, Burkholderia glumae
  REGION 1..210: note = tr|A0A2J9H6K7|A0A2J9H6K7_BURGL 7-carboxy-7-deazaguanine synthase OS=Burkholderia glumae; OX = 337 GN=queE PE=3 SV=1
MTYTVKEIFYTLQGEGANAGRPAVFCRFAGCNLWTGREADRDSAVCRFCDTDFVGTDGENGGKFRTPELLADQVAALWPAGEAHRFVVCTGGEPMLQLDQPLVDALHARGFEIAIETNGSLPVLDTIDWICVSPKADAPLVVTRGHELKVVIPQDNQRLADYARLDFEHFLVQPMDGPSRELNTRLAIDWCKRHPQWRLSMQTHKYLNIP

SEQ ID NO: 28601 - protein, 210 aa, Burkholderia glumae; identical to SEQ ID NO: 28600
  REGION 1..210: note = tr|C5AF28|C5AF28_BURGB 7-carboxy-7-deazaguanine synthase OS=Burkholderia glumae (strain BGR1) OX=626418; GN = queE PE=3 SV=1

SEQ ID NO: 28602 - protein, 210 aa, unidentified
  source 1..210: note = Burkholderia insecticola
  REGION 1..210: note = tr|R4WSE8|R4WSE8_9BURK 7-carboxy-7-deazaguanine synthase OS=Burkholderia insecticola OX=758793 GN=queE; PE = 3 SV=1
MTYAVKEIFYTLQGEGANAGRPAVFCRFAGCNLWSGREEDRADAVCQFCDTDFVGTDGENGGKFRTPAELVAKIASLWPEGAGHKFVVCTGGEPMLQIDQPFVDALHEAGFEMAIETNGSLPVLESIDWICVSPKADAPLVVTKGNELKVVVPQDNQRLAEYEKLDFDYFLVQPMDGPSRDINTKLAIDWCKRHPKWRLSMQTHKYLNIP

SEQ ID NO: 28603 - protein, 210 aa, Burkholderia lata; identical to SEQ ID NO: 28592
  REGION 1..210: note = tr|A0A3G3H8H4|A0A3G3H8H4_BURL3 7-carboxy-7-deazaguanine synthase OS=Burkholderia lata (strain ATCC 17760 / DSM 23089 / LMG 22485 / NCIMB 9086 / R18194 / 383) OX=4829 57 GN=queE PE=3 SV=1

SEQ ID NO: 28604 - protein, 210 aa, Burkholderia lata; identical to SEQ ID NO: 28594
  REGION 1..210: note = tr|Q39BV3|Q39BV3_BURL3 7-carboxy-7-deazaguanine synthase OS=Burkholderia lata (strain ATCC 17760 / DSM 23089 / LMG 22485 / NCIMB 9086 / R18194 / 383) OX=482957; GN = qu eE PE=3 SV=1

SEQ ID NO: 28605 - protein, 210 aa, Burkholderia latens
  REGION 1..210: note = tr|A0A1B4NVK1|A0A1B4NVK1_9BURK 7-carboxy-7-deazaguanine synthase OS=Burkholderia latens; OX = 488446 GN=queE PE=3 SV=1
MTYAVKEIFYTLQGEGANAGRPAVFCRFAGCNLWSGREEDRADAVCRFCDTDFVGTDGENGGKFKDAEALVATIAALWPDGEAHRFVVCTGGEPMLQLDQPLVDALHAAGFEIAIETNGSLPVLDTIDWICVSPKADAPLVVTKGNELKVVIPQDNQRLADYAKLDFEYFLVQPMDGPSRDINTKLAIDWCKRHPQWRLSMQTHKYLNIP

SEQ ID NO: 28606 - protein, 210 aa, Burkholderia mallei
  REGION 1..210: note = tr|A0A0H2WJA6|A0A0H2WJA6_BURMA 7-carboxy-7-deazaguanine synthase OS=Burkholderia mallei (strain ATCC 23344) OX=243160 GN=queE PE=3 SV=1
MTYTVKEIFYTLQGEGANAGRPAVFCRFAGCNLWTGREADRDGAVCRFCDTDFVGTDGENGGKFKDAASLAARIASLWPAGEAYRFVVCTGGEPMLQLDQPLVDALHAAGFTIAIETNGSLPVLESIDWICVSPKADAPLVVTKGNELKVVVPQDNQRLADYAKLDFEHFLVQPMDGPSRELNTRLAIDWCKRHPRWRLSMQTHKYLNIP

SEQ ID NO: 28607 - protein, 210 aa, Burkholderia mallei; identical to SEQ ID NO: 28606
  REGION 1..210: note = tr|C4ASU0|C4ASU0_BURML 7-carboxy-7-deazaguanine synthase OS=Burkholderia mallei GB8 horse 4 OX=320390; GN = queE PE=3 SV=1

SEQ ID NO: 28608 - protein, 210 aa, Burkholderia metallica
  REGION 1..210: note = tr|A0A1B4HXH3|A0A1B4HXH3_9BURK 7-carboxy-7-deazaguanine synthase OS=Burkholderia metallica OX=488729 GN=queE PE=3 SV=1
MTYAVKEIFYTLQGEGANAGRPAVFCRFAGCNLWSGREEDRAEAVCRFCDTDFVGTDGENGGKFKDAAALVATIAGLWPDGEAHRFVVCTGGEPMLQLDQPLVDALHAAGFEIAIETNGSLPVLESIDWICVSPKADAPLVVTKGNELKVVIPQDNQRLADYAKLDFEYFLVQPMDGPSRDLNTKLAIDWCKRHPQWRLSMQTHKYLNIP

SEQ ID NO: 28609 - protein, 210 aa, Burkholderia multivorans
  REGION 1..210: note = sp|A0A0H3KB22|QUEE_BURM1 7-carboxy-7-deazaguanine synthase OS=Burkholderia multivorans (strain ATCC 17616 / 249) OX=395019 GN=queE PE=1 SV=1
MTYAVKEIFYTLQGEGANAGRPAVFCRFAGCNLWSGREEDRAQAVCRFCDTDFVGTDGENGGKFKDADALVATIAGLWPAGEAHRFVVCTGGEPMLQLDQPLVDALHAAGFGIAIETNGSLPVLESIDWICVSPKADAPLVVTKGNELKVVIPQDNQRLADYAKLDFEYFLVQPMDGPSRDLNTKLAIDWCKRHPQWRLSMQTHKYLNIP

SEQ ID NO: 28610 - protein, 210 aa, Burkholderia multivorans
  REGION 1..210: note = tr|A0A1W0ZJP5|A0A1W0ZJP5_9BURK 7-carboxy-7-deazaguanine synthase OS=Burkholderia multivorans OX=87883 GN=queE PE=3 SV=1
MTYAVKEIFYTLQGEGANAGRPAVFCRFAGCNLWSGREEDRAQAVCRFCDTDFVGTDGENGGKFKDADALVATIAGLWPDGEAHRFVVCTGGEPMLQLDQPLVDALHAAGFEIAIETNGSLPVLESIDWICVSPKADAPLVVTKGNELKVVIPQDNQRLADYAKLDFEYFLVQPMDGPSRDLNTKLAIDWCKRHPQWRLSMQTHKYLNIP

SEQ ID NO: 28611 - protein, 210 aa, unidentified
  source 1..210: note = Burkholderia novacaledonica
  REGION 1..210: note = tr|A0A2U3IBH6|A0A2U3IBH6_9BURK 7-carboxy-7-deazaguanine synthase OS=Burkholderia novacaledonica OX=1544861 GN=queE PE=3 SV=1
MTYAVKEIFYTLQGEGANAGRPAVFCRFAGCNLWSGREEDRADAVCQFCDTDFVGTDGENGGKYKTPAELVAKIASLWPEGAAHRFVVCTGGEPMLQIDQPFVNALHEAGFEMAIETNGSLPVLESIDWICVSPKADAPLVVTKGNELKVVVPQDNQRLAEYEKLDFEYFLVQPMDGPSRDINTKLAIDWCKRHPKWRLSMQTHKYLNIP

SEQ ID NO: 28612 - protein, 210 aa, Burkholderia oklahomensis
  REGION 1..210: note = tr|A0A381BTZ0|A0A381BTZ0_9BURK 7-carboxy-7-deazaguanine synthase OS=Burkholderia oklahomensis OX=342113 GN=queE PE=3 SV=1
MTYTVKEIFYTLQGEGANAGRPAVFCRFAGCNLWSGREEDRDGAVCRFCDTDFVGADGENGGKFKDAESLAAQIASLWPEGEAHRFVVCTGGEPMLQLDQALVDALHAAGFTIAIETNGSLPVLESIDWVCVSPKADAPLVVTKGNELKVVVPQDNQRLADYAKLDFEHFLVQPMDGPSRDFNTKLAIDWCKRHPKWRLSMQTHKYLNIP

SEQ ID NO: 28613 - protein, 210 aa, Burkholderia plantarii
  REGION 1..210: note = tr|A0A0B6RRU0|A0A0B6RRU0_9BURK 7-carboxy-7-deazaguanine synthase OS=Burkholderia plantarii OX=41899 GN=queE PE=3 SV=1
MTYTVKEIFYTLQGEGANAGRPAVFCRFAGCNLWTGREADRDSAVCRFCDTDFVGTDGENGGKFKTPELLADQVAALWPAGEAHRFVVCTGGEPMLQLDQPLVDALHARGFEIAIETNGSLPVLDTIDWICVSPKADAPLVVTRGHELKVVIPQDNQRLAEYAGLDFEYFLVQPMDGPSRDINTKLAIDWCKRHPQWRLSMQTHKYLNIP

SEQ ID NO: 28614 - protein, 210 aa, Burkholderia pseudomallei; identical to SEQ ID NO: 28606
  REGION 1..210: note = tr|A0A0E1S6H9|A0A0E1S6H9_BURPE 7-carboxy-7-deazaguanine synthase OS=Burkholderia pseudomallei 305 OX=425067 GN=queE PE=3 SV=1

SEQ ID NO: 28615 - protein, 210 aa, Burkholderia pseudomallei
  REGION 1..210: note = tr|A8E882|A8E882_BURPE 7-carboxy-7-deazaguanine synthase OS=Burkholderia pseudomallei 406e OX=360118; GN = queE PE=3 SV=1
MTYTVKEIFYTLQGEGANAGRPAVFCRFAGCNLWTGREADRDGAVCRFCDTDFVGTDGENGGKFEDAASLAARIASLWPAGEAYRFVVCTGGEPMLQLDQPLVDALHAAGFTIAIETNGSLPVLESIDWICVSPKADAPLVVTKGNELKVVVPQDNQRLADYAKLDFEHFLVQPMDGPSRELNTRLAIDWCKRHPRWRLSMQTHKYLNIP

SEQ ID NO: 28616 - protein, 210 aa, unidentified
  source 1..210: note = Burkholderia pseudomultivorans
  REGION 1..210: note = tr|A0A132EF43|A0A132EF43_9BURK 7-carboxy-7-deazaguanine synthase OS=Burkholderia pseudomultivorans OX=1207504 GN=queE PE=3 SV=1
MTYAVKEIFYTLQGEGANAGRPAVFCRFAGCNLWSGREEDRAEAVCRFCDTDFVGTDGENGGKFKDADALVATIAGLWPDGEAHRFVVCTGGEPMLQLDQPLVDALHAAGFEIAIETNGSLPVLESIDWICVSPKADAPLVVTKGNELKVVIPQDNQRLADYAKLDFEYFLVQPMDGPSRDLNTKLAIDWCKRHPQWRLSMQTHKYLNIP

SEQ ID NO: 28617 - protein, 210 aa, unidentified
  source 1..210: note = Burkholderia puraquae
  REGION 1..210: note = tr|A0A1X1PAS2|A0A1X1PAS2_9BURK 7-carboxy-7-deazaguanine synthase OS=Burkholderia puraquae; OX = 1904757 GN=queE PE=3 SV=1
MTYAVKEIFYTLQGEGANAGRPAVFCRFAGCNLWSGREEDRADAVCRFCDTDFVGTDGENGGKFKDAEALVATIAGLWPEGEAHRFVVCTGGEPMLQLDQPLVDALHAAGFEIAIETNGSLPVLESIDWICVSPKADAPLVVTKGNELKVVIPQDNQRLADYAKLDFEYFLVQPMDGPSRDLNTKLAIDWCKRHPQWRLSMQTHKYLNIP

SEQ ID NO: 28618 - protein, 210 aa, Burkholderia pyrrocinia
  REGION 1..210: note = tr|A0A2Z5MXH0|A0A2Z5MXH0_BURPY 7-carboxy-7-deazaguanine synthase OS=Burkholderia pyrrocinia OX=60550 GN=queE PE=3 SV=1
MTYAVKEIFYTLQGEGANAGRPAVFCRFAGCNLWSGREEDRAEAVCRFCDTDFVGTDGENGGKFKDADALVATIAGLWPDGEAHRFVVCTGGEPMLQIDQPLVDALHAAGFEIAIETNGSLPVLESIDWICVSPKADAPLVVTKGNELKVVIPQDNQRLADYAKLDFEYFLVQPMDGPSRDLNTKLAIDWCKRHPQWRLSMQTHKYLNIP

SEQ ID NO: 28619 - protein, 210 aa, Burkholderia pyrrocinia
  REGION 1..210: note = tr|A0A318IK98|A0A318IK98_BURPY 7-carboxy-7-deazaguanine synthase OS=Burkholderia pyrrocinia OX=60550 GN=queE PE=3 SV=1
MTYAVKEIFYTLQGEGANAGRPAVFCRFAGCNLWSGREEDREEAVCRFCDTDFVGTDGENGGKFKDAEALVATIAGLWPDGEAHRFVVCTGGEPMLQLDQPLVDALHAAGFEIAIETNGSLPVLESIDWICVSPKADAPLVVTKGNELKVVIPQDNQRLADYAKLDFEYFLVQPMDGPSRDLNTKLAIDWCKRHPQWRLSMQTHKYLNIP

SEQ ID NO: 28620 - protein, 210 aa, unidentified; identical to SEQ ID NO: 28592
  source 1..210: note = Burkholderia reimsis
  REGION 1..210: note = tr|A0A365QSI6|A0A365QSI6_9BURK 7-carboxy-7-deazaguanine synthase OS=Burkholderia reimsis; OX = 2234132 GN=queE PE=3 SV=1

SEQ ID NO: 28621 - protein, 210 aa, Burkholderia seminalis
  REGION 1..210: note = tr|A0A103K2T9|A0A103K2T9_9BURK 7-carboxy-7-deazaguanine synthase OS=Burkholderia seminalis OX=488731 GN=queE PE=3 SV=1
MTYAVKEIFYTLQGEGANAGRPAVFCRFAGCNLWSGREEDRAEAVCRFCDTDFVGTDGENGGKFKDADALVATIAGLWPEGEAHRFVVCTGGEPMLQLDQPLVDALHAAGFEIAIETNGSLPVLESIDWICVSPKADAPLVVTKGNELKVVIPQDNQRLADYAKLDFEYFLVQPMDGPSRDLNTKLAIDWCKRHPQWRLSMQTHKYLNIP

SEQ ID NO: 28622 - protein, 210 aa, unidentified
  source 1..210: note = Burkholderia singularis
  REGION 1..210: note = tr|A0A118DNM1|A0A118DNM1_9BURK 7-carboxy-7-deazaguanine synthase OS=Burkholderia singularis OX=1503053 GN=queE PE=3 SV=1
MTYTVKEIFYTLQGEGANAGRPAVFCRFAGCNLWSGREADRASAVCRFCDTDFVGTDGENGGKFGDAETLAAKVASLWPADGAHRFVVCTGGEPMLQLDQPLVDALHAAGFEIAIETNGSLPVLDSIDWVCVSPKAGAPLVVTKGNELKVVVPQDNQRLADYAQLDFEHFLVQPMDGPARDFNTKLAIDWCKRHPQWRLSMQTHKYLNIP

SEQ ID NO: 28623 - protein, 210 aa, unidentified
  source 1..210: note = Burkholderia singularis
  REGION 1..210: note = tr|A0A238H1I0|A0A238H1I0_9BURK 7-carboxy-7-deazaguanine synthase OS=Burkholderia singularis OX=1503053 GN=queE PE=3 SV=1
MTYTVKEIFYTLQGEGANAGRPAVFCRFAGCNLWSGREADRASAVCRFCDTDFVGTDGENGGKFGDAETLAAKVASLWPTDGAHRFVVCTGGEPMLQLDQPLVDALHAAGFEIAIETNGSLPVLDSIDWVCVSPKAGAPLVVTKGNELKVVVPQDNQRLADYAQLDFEHFLVQPMDGPARDFNTKLAIDWCKRHPQWRLSMQTHKYLNIP

SEQ ID NO: 28624 - protein, 210 aa, Burkholderia sp.
  REGION 1..210: note = tr|A0A1N6KXK2|A0A1N6KXK2_9BURK 7-carboxy-7-deazaguanine synthase OS=Burkholderia sp. GAS332 OX=1882750 GN=queE PE=3 SV=1
MTYAVKEIFYTLQGEGANAGRPAVFCRFAGCNLWSGREEDRAEAVCRFCDTDFVGTDGENGGKYRTAEELVQMIASQWPEGEGERFVVCTGGEPMLQIDQPFVDALHAAGFEIAIETNGSLPVLETIDWICVSPKADAPLVVTKGNELKVVIPQDNQRLSEYAKLDFEYFLVQPMDGPSRDLNTKLAIDWCKRHPQWRLSMQTHKYLNIP

SEQ ID NO: 28625 - protein, 210 aa, Burkholderia sp.
  REGION 1..210: note = tr|A0A3N8IJE5|A0A3N8IJE5_9BURK 7-carboxy-7-deazaguanine synthase OS=Burkholderia sp. Bp8998 OX=2184557 GN=queE PE=3 SV=1
MTYAVKEIFYTLQGEGANAGRPAVFCRFAGCNLWSGREEDRADAVCRFCDTDFVGTDGENGGKFKDAEALVATIAGLWPDGEAHRFVVCTGGEPMLQLDQTLVDALHAAGFEIAIETNGSLPVLETIDWICVSPKADAPLVVTKGNELKVVIPQDNQRLADYAKLDFEYFLVQPMDGPSRDLNTKLAIDWCKRHPQWRLSMQTHKYLNIP

SEQ ID NO: 28626 - protein, 210 aa, Burkholderia stabilis
  REGION 1..210: note = tr|A0A1D7ZEQ6|A0A1D7ZEQ6_9BURK 7-carboxy-7-deazaguanine synthase OS=Burkholderia stabilis; OX = 95485 GN=queE PE=3 SV=1
MTYAVKEIFYTLQGEGANAGRPAVFCRFAGCNLWSGREEDRAEAVCRFCDTDFVGTDGENGGKFKDAEALVATIAGLWPDGEAHRFVVCTGGEPMLQLDQPLVDALHAAGFEIAIETNGSLPVLESIDWICVSPKADAPLVVTKGNELKVVIPQDNQRLADYAKLDFEYFLVQPMDGPSRDLNTKLAIDWCKRHPQWRLSMQTHKYLNIP

SEQ ID NO: 28627 - protein, 210 aa, Burkholderia stabilis; identical to SEQ ID NO: 28592
  REGION 1..210: note = tr|A0A1Y1BGT9|A0A1Y1BGT9_9BURK 7-carboxy-7-deazaguanine synthase OS=Burkholderia stabilis; OX = 95485 GN=queE PE=3 SV=1

SEQ ID NO: 28628 - protein, 210 aa, unidentified
  source 1..210: note = Burkholderia stagnalis
  REGION 1..210: note = tr|A0A3P0EXG7|A0A3P0EXG7_9BURK 7-carboxy-7-deazaguanine synthase OS=Burkholderia stagnalis OX=1503054 GN=queE PE=3 SV=1
MTYAVKEIFYTLQGEGANAGRPAVFCRFAGCNLWSGREEDRAEAVCRFCDTDFVGTDGENGGKFRDAAELAAKIASLWPDGEVHRFVVCTGGEPMLQLDQPLVDALHAQGFEIAIETNGSLPVLESIDWICVSPKADAPLVVTKGNELKVVIPQDNQRLADYAKLDFDYFLVQPMDGPSRDLNTKLAIDWCKRHPQWRLSMQTHKYLNIP

SEQ ID NO: 28629 - protein, 210 aa, unidentified
  source 1..210: note = Burkholderia stagnalis
  REGION 1..210: note = tr|A0A107TGI5|A0A107TGI5_9BURK 7-carboxy-7-deazaguanine synthase OS=Burkholderia stagnalis OX=1503054 GN=queE PE=3 SV=1
MTYAVKEIFYTLQGEGANAGRPAVFCRFAGCNLWSGREEDRAEAVCRFCDTDFVGTDGENGGKFRDAAELAAKIASLWPDGEAHRFVVCTGGEPMLQLDQPLVDALHAQGFEIAIETNGSLPVLESIDWICVSPKADAPLVVTKGNELKVVIPQDNQRLADYAKLDFDYFLVQPMDGPSRDLNTKLAIDWCKRHPQWRLSMQTHKYLNIP

SEQ ID NO: 28630 - protein, 210 aa, unidentified
  source 1..210: note = Burkholderia territorii
  REGION 1..210: note = tr|A0A105EFH4|A0A105EFH4_9BURK 7-carboxy-7-deazaguanine synthase OS=Burkholderia territorii OX=1503055 GN=queE PE=3 SV=1
MTYAVKEIFYTLQGEGANAGRPAVFCRFAGCNLWSGREEDRADAVCRFCDTDFVGTDGENGGKFKDAEALVATIAALWPDGEAHRFVVCTGGEPMLQLDQPLVDALHAAGFEIAIETNGSLPVLETIDWICVSPKADAPLVVTKGNELKVVIPQDNQRLADYAKLDFEYFLVQPMDGPSRDLNTKLAIDWCKRHPQWRLSMQTHKYLNIP

SEQ ID NO: 28631 - protein, 210 aa, Burkholderia thailandensis
  REGION 1..210: note = tr|Q2T2A3|Q2T2A3_BURTA 7-carboxy-7-deazaguanine synthase OS=Burkholderia thailandensis (strain ATCC 700388 / DSM 13276 / CIP 106301 / E264) OX=271848 GN=queE PE=3 SV =1
MTYTVKEIFYTLQGEGANAGRPAVFCRFAGCNLWTGREADRGDAVCRFCDTDFVGTDGENGGKFKDAASLAAKIASLWPPGEAHRFVVCTGGEPMLQLDQPLVDALHAAGFTIAIETNGSLPVLESIDWICVSPKADAPLVVTKGNELKVVVPQDNQRLADYAKLDFEHFLVQPMDGPSRELNTKLAIDWCKRHPQWRLSMQTHKYLNIP

SEQ ID NO: 28632 - protein, 210 aa, Burkholderia thailandensis; identical to SEQ ID NO: 28631
  REGION 1..210: note = tr|A0A1B4JZN7|A0A1B4JZN7_BURTH 7-carboxy-7-deazaguanine synthase OS=Burkholderia thailandensis OX=57975 GN=queE PE=3 SV=1

SEQ ID NO: 28633 - protein, 210 aa, Burkholderia ubonensis
  REGION 1..210: note = tr|A0A124VGB5|A0A124VGB5_9BURK 7-carboxy-7-deazaguanine synthase OS=Burkholderia ubonensis OX=101571 GN=queE PE=3 SV=1
MTYAVKEIFYTLQGEGANAGRPAVFCRFAGCNLWSGREEDRAQALCRFCDTDFVGTDGENGGKFKDAAALAALVASLWPDGEAHRFVVCTGGEPMLQLDQPLVDALHAAGFEIAIETNGSLPVLESIDWICVSPKADAPLVVTKGNELKVVIPQDNQRLADYAKLDFDYFLVQPMDGPSRDLNTKLAIDWCKRHPQWRLSMQTHKYLNIP

SEQ ID NO: 28634 - protein, 210 aa, Burkholderia ubonensis
  REGION 1..210: note = tr|A0A104I624|A0A104I624_9BURK 7-carboxy-7-deazaguanine synthase OS=Burkholderia ubonensis OX=101571 GN=queE PE=3 SV=1
MTYAVKEIFYTLQGEGANAGRPAVFCRFAGCNLWSGREEDRAEAACRFCDTDFVGTDGENGGKFKDAAALAAQVASLWPDGEAHRFVVCTGGEPMLQLDQPLVDALHAAGFEIAIETNGSLPVLESIDWICVSPKADAPLVVTKGNELKVVIPQDNQRLADYAKLDFDYFLVQPMDGPSRDLNTKLAIDWCKRHPQWRLSMQTHKYLNIP

SEQ ID NO: 28635 - protein, 210 aa, Burkholderia vietnamiensis
  REGION 1..210: note = tr|A4JIU0|A4JIU0_BURVG 7-carboxy-7-deazaguanine synthase OS=Burkholderia vietnamiensis (strain G4 / LMG 22486) OX=269482 GN=queE PE=3 SV=1
MTYAVKEIFYTLQGEGANAGRPAVFCRFAGCNLWSGREEDRADAVCRFCDTDFVGTDGENGGKFKDAAALVATIAGLWPHGEAHRFVVCTGGEPMLQIDQPLVDALHAAGFEIAIETNGSLPVLDTIDWICVSPKADAPLVVTKGNELKVVIPQDNQRLADYAKLDFEYFLVQPMDGPSRDINTKLAIDWCKRHPQWRLSMQTHKYLNIP

SEQ ID NO: 28636 - protein, 210 aa, Burkholderia vietnamiensis; identical to SEQ ID NO: 28635
  REGION 1..210: note = tr|A0A118GKM9|A0A118GKM9_BURVI 7-carboxy-7-deazaguanine synthase OS=Burkholderia vietnamiensis OX=60552 GN=queE PE=3 SV=1

SEQ ID NO: 28637 - protein, 212 aa, unidentified
  source 1..212: note = Burkholderiaceae bacterium
  REGION 1..212: note = tr|A0A0F0DEC9|A0A0F0DEC9_9BURK 7-carboxy-7-deazaguanine synthase OS=Burkholderiaceae bacterium 26 OX=1619951 GN=queE PE=3 SV=1
MTYAVKEIFYTLQGEGANTGRAAVFCRFAGCNLWSGREVDRATAVCQFCDTDFVGTDGTQGGKYTTADALADTVAAEWPANATGGKPLVICTGGEPLLQLDKPLIDALHARGFEIAIETNGTIAVPDGIDWVCVSPKMGSELVVTRGDELKVVIPQDGQDLDTYERLDFQHFFLQAMDGPLARQNTALAVELCQRRPRWRLSLQTHKMLGIR

SEQ ID NO: 28638 - protein, 215 aa, unidentified
  source 1..215: note = Burkholderiaceae bacterium
  REGION 1..215: note = tr|A0A4U8VGY7|A0A4U8VGY7_9BURK 7-carboxy-7-deazaguanine synthase OS=Burkholderiaceae bacterium PBA OX=795666 GN=queE PE=3 SV=1
MTYTVKEIFYTLQGEGANAGRAAVFCRFAGCNLWTGRERDRATAVCQFCDTDFVGTDGTLGGKYASAEALAAVVAAQWPAPLPDEAGGRPLVVCTGGEPLLQLDAPLIAALHAQGFEIAIETNGTLPVPEGVDWICVSPKMGAELVVTRGDELKVVIPQAGQDFAAYEALDFRHLLVQPMDGPLQRENTAAAVRFCQDHPRWRLSLQTHKLLGIR

SEQ ID NO: 28639 - protein, 220 aa, unidentified
  source 1..220: note = Burkholderiales bacterium
  REGION 1..220: note = tr|A0A1F4MS88|A0A1F4MS88_9BURK 7-carboxy-7-deazaguanine synthase OS=Burkholderiales bacterium RIFCSPLOWO2_12_FULL_64_99 OX=1797568 GN=queE; PE = 3 SV=1
MTYSVKEIFYTLQGEGTHAGRPAVFCRMAGCNLWTGREADRASAVCQFCDTDFVGTDGLGGGKFDTAQALAARIASFWPDTPAGQQGQRFVVVTGGEPLLQLDAALIDALHAQGFEIAVETNGTIAAPEGLDWVCVSPKAGSKLVQTRGHELKVVVPQAGFTEADLLAFEQLDFQQLRVQAMDSAQPEARRQAMAWAVQWCLDHPRWLLSVQTHKSLGIR

SEQ ID NO: 28640 - protein, 211 aa, unidentified
  source 1..211: note = Burkholderiales bacterium
  REGION 1..211: note = tr|A0A1F4K2K2|A0A1F4K2K2_9BURK 7-carboxy-7-deazaguanine synthase OS=Burkholderiales bacterium RIFCSPLOWO2_12_FULL_61_40 OX=1797566 GN=queE; PE = 3 SV=1
MMYSVKEIFYTLQGEGAHAGRPAVFCRFSGCNLWSGREADRASAVCRFCDTDFVGTDGTGGGKFADSEALAQAIDQQWPQHDTAHKYVVFTGGEPLLQLDAALIDNIHAHGFTIAIETNGTLAVPAGVDWVCVSPKLGSALVVERGNEIKVVIPQAGQNLADYAALDFSHFFVQAMDGPELAANLRLAIDTCKRNPQWRLSLQTHKLLQIP

SEQ ID NO: 28641 - protein, 223 aa, Buttiauxella agrestis
  REGION 1..223: note = tr|A0A085G431|A0A085G431_9ENTR 7-carboxy-7-deazaguanine synthase OS=Buttiauxella agrestis ATCC 33320 OX=1006004 GN=ygcF PE=3 SV=1
MQYPINEMFQTLQGEGYFTGVPAIFIRLQGCPVGCAWCDTKHTWDKLADREVSLFSILAKTKETDKWGSATAEDLLAIFQRQDYTARHVVITGGEPCIHDLTPLTSLFEHHGYSCQIETSGTHEVRCTAGTWVTVSPKVNMRGGYDVLSQALERADEIKHPVGRMRDIEALDELLATLVDDKKRVIALQPISQKEDATRLCIETCIARNWRLSMQTHKYLNIA

SEQ ID NO: 28642 - protein, 223 aa, Buttiauxella agrestis
  REGION 1..223: note = tr|A0A381C3P3|A0A381C3P3_9ENTR 7-carboxy-7-deazaguanine synthase OS=Buttiauxella agrestis; OX = 82977 GN=queE PE=3 SV=1
MQYPINEMFQTLQGEGYFTGVPAIFIRLQGCPVGCAWCDTKHTWDKLADREVSLFSILAKTKESDKWGSATAEDLLAIFQRQDYTARHVVITGGEPCIHDLTPLTSLFEHHGYSCQIETSGTHEVRCTAGTWVTVSPKVNMRGGYDVLSQALERADEIKHPVGRMRDIEALDELLATLVDDKKRVIALQPISQKEDATRLCIETCIARNWRLSMQTHKYLNIA

SEQ ID NO: 28643 - protein, 223 aa, Buttiauxella brennerae
  REGION 1..223: note = tr|A0A1B7ILK8|A0A1B7ILK8_9ENTR 7-carboxy-7-deazaguanine synthase OS=Buttiauxella brennerae ATCC 51605 OX=1354251 GN=queE PE=3 SV=1
MQYPINEMFQTLQGEGYFTGVPAIFIRLQGCPVGCAWCDTKHTWDKLADREVSLFSILAKTKESDKWGSASAEDLLAIFQRQDYTARHVVITGGEPCIHDLTPLTSLFEHHGYSCQIETSGTHEVRCTAGTWVTVSPKVNMRGGYDVLSQALERADEIKHPVGRMRDIEALDELLATLMDDKKRIIALQPISQKEDATRLCIETCIGRNWRLSMQTHKYLNIA

SEQ ID NO: 28644 - protein, 223 aa, Buttiauxella gaviniae
  REGION 1..223: note = tr|A0A1B7I376|A0A1B7I376_9ENTR 7-carboxy-7-deazaguanine synthase OS=Buttiauxella gaviniae ATCC 51604 OX=1354253 GN=queE PE=3 SV=1
MQYPINEMFQTLQGEGYFTGVPAIFIRLQGCPVGCAWCDTKHTWDKLADREVSLFSILAKTKESDKWGNASAEDLLAIFQRQDYTARHVVITGGEPCIHDLTPLTSLFEHHGYSCQIETSGTHEVRCTAGTWVTVSPKVNMRGGYDVLSQALERADEIKHPVGRMRDIEALDELLATLIDDKKRIIALQPISQKEDATRLCIETCIARNWRLSMQTHKYLNIA

SEQ ID NO: 28645 - protein, 223 aa, Buttiauxella izardii
  REGION 1..223: note = tr|A0A3A5JZB9|A0A3A5JZB9_9ENTR 7-carboxy-7-deazaguanine synthase OS=Buttiauxella izardii; OX = 82991 GN=queE PE=3 SV=1
MQYPINEMFQTLQGEGYFTGVPAIFIRLQGCPVGCAWCDTKHTWDKLADREVSLFSILAKTKETDKWGSASAEDLLAIFQRQDYTARHVVITGGEPCIHDLTPLTSLFEHHGYSCQIETSGTHEVRCTADTWVTVSPKVNMRGGYDVLSQALERADEIKHPVGRMRDIEALDELLATLVDDKKRVIALQPISQKEDATRLCIETCIARNWRFSMQTHKYLNIA

SEQ ID NO: 28646 - protein, 223 aa, Buttiauxella noackiae
  REGION 1..223: note = tr|A0A1B7HLX0|A0A1B7HLX0_9ENTR 7-carboxy-7-deazaguanine synthase OS=Buttiauxella noackiae ATCC 51607 OX=1354255 GN=queE PE=3 SV=1
MQYPINEMFQTLQGEGYFTGVPAIFIRLQGCPVGCAWCDTKHTWDKLADREVSLFSILAKTKESDKWGNASAEDLLAIFQRQDYTARHVVITGGEPCIHDLTPLTSLFEHHGYSCQIETSGTHEVRCTAGTWVTVSPKVNMRGGYDVLSQALERADEIKHPVGRMRDVEALDELLATLVDDKKRIIALQPISQKEDATRLCIETCIARNWRLSMQTHKYLNIA

SEQ ID NO: 28647 - protein, 223 aa, Buttiauxella sp.; identical to SEQ ID NO: 28644
  REGION 1..223: note = tr|A0A4R8EYR6|A0A4R8EYR6_9ENTR 7-carboxy-7-deazaguanine synthase OS=Buttiauxella sp. BIGb0552 OX=2485120 GN=queE PE=3 SV=1

SEQ ID NO: 28648 - protein, 223 aa, Buttiauxella sp.
  REGION 1..223: note = tr|A0A4V0WTM7|A0A4V0WTM7_9ENTR 7-carboxy-7-deazaguanine synthase OS=Buttiauxella sp. A111; OX = 2563088 GN=queE PE=3 SV=1
MQYPINEMFQTLQGEGYFTGVPAIFIRLQGCPVGCAWCDTKHTWDKLADREVSLFSILAKTKESDKWGNASAEDLLAIFQRQDYTARHVVITGGEPCIHDLTPLTALFEHHGYSCQIETSGTHEVRCTAGTWVTVSPKVNMRGGYDVLSQALERADEIKHPVGRLRDIEALDELLATLVDDKKRVIALQPISQKEDATRLCIETCIARNWRLSMQTHKYLNIA

SEQ ID NO: 28649 - protein, 223 aa, Buttiauxella warmboldiae; identical to SEQ ID NO: 28642
  REGION 1..223: note = tr|A0A3N5DQ11|A0A3N5DQ11_9ENTR 7-carboxy-7-deazaguanine synthase OS=Buttiauxella warmboldiae OX=82993 GN=queE PE=3 SV=1

SEQ ID NO: 28650 - protein, 222 aa, unidentified
  source 1..222: note = Butyricicoccus porcorum
  REGION 1..222: note = tr|A0A252F6Z2|A0A252F6Z2_9CLOT 7-carboxy-7-deazaguanine synthase OS=Butyricicoccus porcorum OX=1945634 GN=queE PE=3 SV=1
MAEFNVAETFVSINGEGVLAGQLSVFVRFTGCNLRCSFCDTMWANDADAPHTTMTTEEICEAVRKTGVHNVTLTGGEPLLRAGMAELLHRLTENPAQRVEIETNGSIDLTPFTGISSAISFTMDYKLPGSGMESHMRTENFALLTERDTVKFVAGSRADLERALEIIQTYDLTHRCHVYLSPVFGRIQPVEIVEFMQEHVLNDITMQLQMHKIIWDPDQRGV

SEQ ID NO: 28651 - protein, 271 aa, unidentified
  source 1..271: note = Butyricimonas faecalis
  REGION 1..271: note = tr|A0A3S9VQB1|A0A3S9VQB1_9BACT 7-carboxy-7-deazaguanine synthase OS=Butyricimonas faecalis OX=2093856 GN=queE PE=3 SV=1
MLHLAKDGIFPITKDKDGKLLKELPASGLHVPGTIQGEGKLNGIPSLFIRLAGCNLHCTWKTLAGNTCECDTAYAAFKVENSFSLPIREIIQIIGHNRGNIDHLVITGGEPFLQADKVKELCLQLKKEAHFHITVETNATLYVEECAQTIDFFSLSPKLSGSVPPTPYAEHHNNTRINIPAIQSFITHVRKNKKEFQLKFVYSGENDVSEIQALLRQLDGWANEDILLMPMGATPEELNLSIPKTLEHCIRNGWRFCDRLHISLFGNKQGV

SEQ ID NO: 28652 - protein, 271 aa, Butyricimonas sp.
  REGION 1..271: note = tr|A0A1Y3W4Z0|A0A1Y3W4Z0_9BACT 7-carboxy-7-deazaguanine synthase OS=Butyricimonas sp. An62 OX=1965649 GN=queE PE=3 SV=1
MLHLAKDGIFPIMKDKDGKLLKELPASGLHVAGTIQGEGKLNGIPSLFIRLAGCNLHCTWKTLAGNTCECDTAYAAFKVENSFSLPVEEIVRIIGHNRGNIDHIVITGGEPFLQADKVRALCLQLKKESHFHITVETNATLYVEECAEMIDFFSLSPKLSGSVPPAPHADHHDKTRINIPAIQSFITHARKNKKDFQLKFVYSGENDVIEIQALLKQLDGWAKEDILLMPMGASPEELSLSIPKTLEHCIRNGWRFCDRLHISLFGNKQGV

SEQ ID NO: 28653 - protein, 271 aa, Butyricimonas sp.
  REGION 1..271: note = tr|A0A3D2E087|A0A3D2E087_9BACT 7-carboxy-7-deazaguanine synthase OS=Butyricimonas sp.; OX = 1969738 GN=queE PE=3 SV=1
MLHLAKDGIFPITKDKDGKLLKELPASGLHVPGTIQGEGKLNGIPSLFIRLAGCNLHCTWKTLAGNTCECDTAYAAFKVENSFSLPIREIVQIIDHNRGNIDHIVITGGEPFLQADKVRELCMQLKKEPHFHMTVETNATIYVEECAGMIDFFSLSPKLSGSVPPAPYADHHNNTRINIPAIQSFITHARENKKDFQLKFVYSGENDVIEIQALLRQLDGWTNEDILLMPMGATPEELNLSIPKTLEHCIRNGWRFCDRLHISLFGNKQGV

SEQ ID NO: 28654 - protein, 271 aa, Butyricimonas synergistica
  REGION 1..271: note = tr|A0A1U7LAY4|A0A1U7LAY4_9BACT 7-carboxy-7-deazaguanine synthase OS=Butyricimonas synergistica OX=544644 GN=queE PE=3 SV=1
MLHLAKDGIFPITKDKDGKLLKELPASGLHVAGTIQGEGKLNGVPSLFIRLAGCNLHCTWKTLAGNTCECDTAYAAFKVENSFSLPVEEIVRIIGHNRGNIDHIVITGGEPFLQADKVRALCLQLKKESHFHITVETNATLYVEECAEMIDFFSLSPKLSGSVPPAPHMDHHNKTRINIPAIQSFITYARKNKKDFQLKFVYSGENEIIEIQALLKQLDGWGNEDILLMPMGATPEELSLSIPKTLEHCLRNGWRFCDRLHISLFGNKQGV

SEQ ID NO: 28655 - protein, 271 aa, Butyricimonas virosa
  REGION 1..271: note = tr|A0A413IML6|A0A413IML6_9BACT 7-carboxy-7-deazaguanine synthase OS=Butyricimonas virosa; OX = 544645 GN=queE PE=3 SV=1
MLHLAKDGIFPITKDKDGKLLKELPASGLHVAGTIQGEGKLNGIPSLFIRLAGCNLHCTWKTLAGNTCECDTAYAAFKVENSFSLPIKEIVQIIGHNRGNIDHIVITGGEPFLQADKVRELCMQLKKEAHFHMTVETNATIYVEECAGMIDFFSLSPKLSGSVPPAPHADHHNNTRINIPAIQSFITHARENKKDFQLKFVYSGENDVIEIQALLRQLDGWTNEDILLMPMGATPEELNLSIPKTLEHCIRNGWRFCDRLHISLFGNKQGV

SEQ ID NO: 28656 - protein, 271 aa, Butyricimonas virosa; identical to SEQ ID NO: 28653
  REGION 1..271: note = tr|A0A415QRM1|A0A415QRM1_9BACT 7-carboxy-7-deazaguanine synthase OS=Butyricimonas virosa; OX = 544645 GN=queE PE=3 SV=1

SEQ ID NO: 28657 - protein, 222 aa, Butyrivibrio crossotus
  REGION 1..222: note = tr|R5LZU2|R5LZU2_9FIRM 7-carboxy-7-deazaguanine synthase OS=Butyrivibrio crossotus CAG:259 OX=1263062; GN = queE PE=3 SV=1
MAEYKVVETFVSINGEGRKAGELAFFLRLKGCNLDCSYCDTKWANKGDASFEIMDENEIYGLIKKSGIRNVTITGGEPLFRKDMAILLEILDNDKELSVEIETNGSVDLKPYLPVCKNISFTMDYKLPTSRMEEQMCLGNFEILRNIDTVKFVSGSIKDLEKAEKIIQKYDLCKRTKVYISPVFGNIDPADIVEFMKERKMNKVRLQLQLHKFIWDPDKKGV

SEQ ID NO: 28658 - protein, 222 aa, Butyrivibrio crossotus
  REGION 1..222: note = tr|D4RWH5|D4RWH5_9FIRM 7-carboxy-7-deazaguanine synthase OS=Butyrivibrio crossotus DSM 2876 OX=511680; GN = queE PE=3 SV=1
MAEYKVVETFVSINGEGRKAGELAFFLRLKGCNLDCSYCDTKWANKGDASFEIMDENEIYGLIKKSGIRNVTITGGEPLFRKDMAILLELLDNDRELSVEIETNGSVDLKPYLPVCKNISFTMDYKLPTSRMEEQMCLGNFEILRNIDTVKFVSGSIKDLEKAEEIIQKYDLCKRTKVYISPVFGNIDPADIVEFMKERKMNKVRLQLQLHKFIWDPDKKGV

SEQ ID NO: 28659 - protein, 222 aa, Butyrivibrio fibrisolvens
  REGION 1..222: note = tr|D4IW46|D4IW46_BUTFI 7-carboxy-7-deazaguanine synthase OS=Butyrivibrio fibrisolvens 16/4 OX=657324; GN = queE PE=3 SV=1
MSVYYVVEKFVSINGEGQHAGELAVFIRLRGCNLACSYCDTRWACSYEAPAEQMTEVEILDYVKSTGVNRVTLTGGEPLKARDIKDLLRAFAAEPNIKVEIETNGSVNIVPFAAIPNAPAFTLDYKLAGSGMEDEMDLSNFAFLQPKDSVKFVCSDVSELDKVCELVDTYGLAEKCTVLISPVFGRIDPADMVNYLIEHKRNDIRLQLQLHKFIWDPNKRGV

SEQ ID NO: 28660 - protein, 222 aa, Butyrivibrio sp.
  REGION 1..222: note = tr|A0A350RPY2|A0A350RPY2_9FIRM 7-carboxy-7-deazaguanine synthase OS=Butyrivibrio sp.; OX = 28121 GN=queE PE=3 SV=1
MAEYKVVETFVSINGEGRKAGELAFFLRLKGCNLDCSYCDTKWANKGDASFEIMDENEIYGLIKKSGIRNVTITGGEPLFRKDMAILLEILDNDKELSVEIETNGSVDLKPYLPVCKNISFTMDYKLPTSRMEEQMCLGNFEILRNIDTVKFVSGSIKDLEKAEEIIQKYDLCKRTKVYISPVFGNIDPADIVEFMKERKMNKVRLQLQLHKFIWDPDKKGV

SEQ ID NO: 28661 - protein, 222 aa, Butyrivibrio sp.; identical to SEQ ID NO: 28658
  REGION 1..222: note = tr|A0A3C0J6T2|A0A3C0J6T2_9FIRM 7-carboxy-7-deazaguanine synthase OS=Butyrivibrio sp.; OX = 28121 GN=queE PE=3 SV=1

SEQ ID NO: 28662 - protein, 228 aa, unidentified
  source 1..228: note = Bythopirellula goksoyri
  REGION 1..228: note = tr|A0A5B9QG48|A0A5B9QG48_9PLAN 7-carboxy-7-deazaguanine synthase OS=Bythopirellula goksoyri OX=1400387 GN=queE PE=3 SV=1
MKVAEIYKSVQGEGLLTGTPSVFVRASGCNLRCWFCDTPFTSWQPEGTDYAVDEIVAEIEEWDCQHVVLTGGEPMLFAELIPLAESLRASGRHITVETAGTLFLPVECDLMSISPKLSSSGPDAEQFPHWHRRHERQRFQPEVIAQLLEQHDYQLKFVIDHAGEIEEVEEFLSHFSGIQGDRVLLMPQGTTLEELQPRSAWLEPICIEHGWTFCPRKQIEWFGPVRGT

SEQ ID NO: 28663 - protein, 210 aa, unidentified
  source 1..210: note = Caballeronia arationis
  REGION 1..210: note = tr|A0A158CEL1|A0A158CEL1_9BURK 7-carboxy-7-deazaguanine synthase OS=Caballeronia arationis OX=1777142 GN=queE PE=3 SV=1
MTYAVKEIFYTLQGEGANAGRPAVFCRFAGCNLWSGREEDRADAVCQFCDTDFVGTDGENGGKYRTPADLVAVIASLWPEGEAHRFVVCTGGEPMLQIDQPIVDALHEAGFEIAIETNGSLPVLDTIDWICVSPKADAPLVVTKGNELKVVVPQDNQRLADYAKLDFEYFLVQPMDGPSRNINTKLAIDWCKRHPKWRLSMQTHKYLNIP

SEQ ID NO: 28664 - protein, 210 aa, unidentified
  source 1..210: note = Caballeronia arvi
  REGION 1..210: note = tr|A0A158HFE1|A0A158HFE1_9BURK 7-carboxy-7-deazaguanine synthase OS=Caballeronia arvi; OX = 1777135 GN=queE PE=3 SV=1
MTYAVKEIFYTLQGEGANAGRPAVFCRFAGCNLWSGREEDRADAVCQFCDTDFVGTDGENGGKYKTPAELVAKIASLWPEGAAHRFVVCTGGEPMLQIDQPFVDALHEAGFEMAIETNGSLPVLESIDWICVSPKADAPLVVTKGNELKVVVPQDNQRLAEYEKLDFDYFLVQPMDGPSRDINTKLAIDWCKRHPKWRLSMQTHKYLNIP

SEQ ID NO: 28665 - protein, 210 aa, unidentified
  source 1..210: note = Caballeronia calidae
  REGION 1..210: note = tr|A0A157Z756|A0A157Z756_9BURK 7-carboxy-7-deazaguanine synthase OS=Caballeronia calidae; OX = 1777139 GN=queE PE=3 SV=1
MTYAVKEIFYTLQGEGANAGRPAVFCRFAGCNLWSGREEDRADAVCQFCDTDFVGTDGENGGKYKTPAELVAKIAALWPEGAAHRFVVCTGGEPMLQIDQPFVDALHEAGFEMAIETNGSLPVLDSIDWICVSPKADAPLVVMKGNELKVVVPQDNQRLAEYEKLDFDYFLVQPMDGPSRDINTKLAIDWCKRHPKWRLSMQTHKYLNIP

SEQ ID NO: 28666 - protein, 210 aa, unidentified
  source 1..210: note = Caballeronia catudaia
  REGION 1..210: note = tr|A0A157Z668|A0A157Z668_9BURK 7-carboxy-7-deazaguanine synthase OS=Caballeronia catudaia; OX = 1777136 GN=queE PE=3 SV=1
MTYAVKEIFYTLQGEGANAGRPAVFCRFAGCNLWSGREEDRADAVCQFCDTDFVGTDGENGGKYKTPAELVAMIASLWPEGAAHRFVVCTGGEPMLQIDQPFVDALHEAGFEMAIETNGSLPVLESIDWICVSPKADAPLVVTKGNELKVVVPQDNQRLAEYEKLDFDYFLVQPMDGPSRDINTKLAIDWCKRHPKWRLSMQTHKYLNIP

SEQ ID NO: 28667 - protein, 210 aa, unidentified
  source 1..210: note = Caballeronia choica
  REGION 1..210: note = tr|A0A158FGT8|A0A158FGT8_9BURK 7-carboxy-7-deazaguanine synthase OS=Caballeronia choica; OX = 326476 GN=queE PE=3 SV=1
MTYAVKEIFYTLQGEGANAGRPAVFCRFAGCNLWSGREEDRAEAVCQFCDTDFVGTDGENGGKYRTPADLVAMIASLWPEGEAHKFVVCTGGEPMLQIDQPFVDALHDAGFEMAIETNGSLPVLDTIDWICVSPKADAPLVVTKGNELKVVVPQDNQRLADYAKLDFDYFLVQPMDGPSRDINTKLAIDWCKRHPKWRLSMQTHKYLNIP

SEQ ID NO: 28668 - protein, 210 aa, unidentified
  source 1..210: note = Caballeronia cordobensis
  REGION 1..210: note = tr|A0A158F1N2|A0A158F1N2_9BURK 7-carboxy-7-deazaguanine synthase OS=Caballeronia cordobensis OX=1353886 GN=queE PE=3 SV=1
MTYAVKEIFYTLQGEGANAGRPAVFCRFAGCNLWSGREEDRADAVCQFCDTDFVGTDGENGGKYKTPAELVAKIASLWPEGAAHKFVVCTGGEPMLQIDQPFVDALHEAGFEMAIETNGSLPVLESIDWICVSPKADAPLVVTKGNELKVVVPQDNQRLAEYEKLDFEYFLVQPMDGPSRDINTKLAIDWCKRHPKWRLSMQTHKYLNIP

SEQ ID NO: 28669 - protein, 210 aa, unidentified
  source 1..210: note = Caballeronia fortuita
  REGION 1..210: note = tr|A0A157Z6L8|A0A157Z6L8_9BURK 7-carboxy-7-deazaguanine synthase OS=Caballeronia fortuita; OX = 1777138 GN=queE PE=3 SV=1
MTYAVKEIFYTLQGEGANAGRPAVFCRFAGCNLWSGREEDRADAVCQFCDTDFVGTDGENGGKYRTPAELVAKIASLWPQGEAHKFVVCTGGEPMLQIDQPFVDALHEVGFEMAIETNGSLPVLESIDWICVSPKADAPLVVTKGNELKVVVPQDNQRLAEYEKLDFDYFLVQPMDNASRDINTKLAIDWCKRHPKWRLSMQTHKYLNIP

SEQ ID NO: 28670 - protein, 210 aa, unidentified
  source 1..210: note = Caballeronia glathei
  REGION 1..210: note = tr|A0A069PIZ0|A0A069PIZ0_9BURK 7-carboxy-7-deazaguanine synthase OS=Caballeronia glathei; OX = 60547 GN=queE PE=3 SV=1
MTYAVKEIFYTLQGEGANAGRPAVFCRFAGCNLWSGREEDRAEAVCRFCDTDFVGTDGENGGKYRTPADLVAMIASLWPEGEAHRFVVCTGGEPMLQIDQPFVDALHEAGFEIAIETNGSLPVLDTIDWICVSPKADAPLVVTKGNELKVIVPQENQRLADYAKLDFDYFLVQPMDGASRDINTRLAIDWCKRHPQWRLSMQTHKYLNIP

SEQ ID NO: 28671 - protein, 210 aa, unidentified
  source 1..210: note = Caballeronia glebae
  REGION 1..210: note = tr|A0A157ZQK6|A0A157ZQK6_9BURK 7-carboxy-7-deazaguanine synthase OS=Caballeronia glebae; OX = 1777143 GN=queE PE=3 SV=1
MTYAVKEIFYTLQGEGANAGRPAVFCRFAGCNLWSGREEDRADAVCQFCDTDFVGTDGENGGKYKTPADLVAKIASLWPEGAAHKFVVCTGGEPMLQIDQPFVDALHEAGFEMAIETNGSLPVLDSIDWICVSPKADAPLVVTKGNELKVVVPQDNQRLADYEKLDFDYFLVQPMDGPSRDINTKLAIDWCKRHPKWRLSMQTHKYLNIP

SEQ ID NO: 28672 - protein, 210 aa, unidentified
  source 1..210: note = Caballeronia humi
  REGION 1..210: note = tr|A0A158GEE4|A0A158GEE4_9BURK 7-carboxy-7-deazaguanine synthase OS=Caballeronia humi; OX = 326474 GN=queE PE=3 SV=1
MTYAVKEIFYTLQGEGANAGRPAVFCRFAGCNLWSGREEDRADAVCQFCDTDFVGTDGENGGKYRTPADLVAMIASLWPEGEAHRFVVCTGGEPMLQIDQPFVDALHEAGFEIAIETNGSLPVLETIDWICVSPKADAPLVVTKGNELKVVVPQDNQRLADYAQLDFEYFLVQPMDGPSRDINTKLAIDWCKRHPKWRLSMQTHKYLNIP

SEQ ID NO: 28673 - protein, 210 aa, unidentified
  source 1..210: note = Caballeronia hypogeia
  REGION 1..210: note = tr|A0A157Z7G6|A0A157Z7G6_9BURK 7-carboxy-7-deazaguanine synthase OS=Caballeronia hypogeia; OX = 1777140 GN=queE PE=3 SV=1
MTYAVKEIFYTLQGEGANAGRPAVFCRFAGCNLWSGREEDRADAVCQFCDTDFVGTDGENGGKYKTPAELVAKIASLWPEGAAHKFVVCTGGEPMLQIDQPFVDALHEAGFEMAIETNGSLPVLESIDWICVSPKADAPLVVTKGNELKVVVPQDNQRLADYEKLDFQYFLVQPMDGPSRDINTKLAIDWCKRHPKWRLSMQTHKYLNIP

SEQ ID NO: 28674 - protein, 210 aa, unidentified
  source 1..210: note = Caballeronia jiangsuensis
  REGION 1..210: note = tr|A0A038GP18|A0A038GP18_9BURK 7-carboxy-7-deazaguanine synthase OS=Caballeronia jiangsuensis OX=1458357 GN=queE PE=3 SV=1
MTYAVKEIFYTLQGEGANAGRPAVFCRFAGCNLWSGREEDRADAVCQFCDTDFVGTDGENGGKYKTPAELVAKIASLWPEGAAHRFVVCTGGEPMLQIDQPFVDALHEAGFEMAIETNGSLPVLESIDWICVSPKADAPLVVTKGNELKVVVPQDNQRLADYEKLDFEYFLVQPMDGPSRDINTKLAIDWCKRHPKWRLSMQTHKYLNIP

SEQ ID NO: 28675 - protein, 210 aa, unidentified
  source 1..210: note = Caballeronia megalochromosomata
  REGION 1..210: note = tr|A0A149RNK9|A0A149RNK9_9BURK 7-carboxy-7-deazaguanine synthase OS=Caballeronia megalochromosomata OX=1399969 GN=queE PE=3 SV=1
MTYAVKEIFYTLQGEGANAGRPAVFCRFAGCNLWSGREEDRADAVCQFCDTDFVGTDGENGGKYRTPAELVAKIASLWPEGAAHKFVVCTGGEPMLQIDQPFVDALHEAGFEMAIETNGSLPVLESIDWICVSPKADAPLVVTKGNELKVVVPQDNQRLADYEKLDFEYFLVQPMDGPSRDINTKLAIDWCKRHPKWRLSMQTHKYLNIP

SEQ ID NO: 28676 - protein, 210 aa, unidentified
  source 1..210: note = Caballeronia mineralivorans
  REGION 1..210: note = tr|A0A0J1FT76|A0A0J1FT76_9BURK 7-carboxy-7-deazaguanine synthase OS=Caballeronia mineralivorans PML1(12) OX=908627 GN=queE PE=3 SV=1
MTYAVKEIFYTLQGEGANAGRPAVFCRFAGCNLWSGREEDRADAVCQFCDTDFVGTDGENGGKYRTPAELVAMIASQWPEGEAHKFVVCTGGEPMLQIDQPFVDALHAAGFEMAIETNGSLPVLDSIDWICVSPKAGAPLVVTKGNELKVVVPQDNQPLADYAKLDFQYFLVQPMDGPSRDINTKLAIDWCKRHPQWRLSMQTHKYLNIP

SEQ ID NO: 28677 - protein, 210 aa, unidentified
  source 1..210: note = Caballeronia pedi
  REGION 1..210: note = tr|A0A158A294|A0A158A294_9BURK 7-carboxy-7-deazaguanine synthase OS=Caballeronia pedi; OX = 1777141 GN=queE PE=3 SV=1
MTYAVKEIFYTLQGEGANAGRPAVFCRFAGCNLWSGREEDRADAVCQFCDTDFVGTDGENGGKYRTPAELVAKIASLWPEGAGHRFVVCTGGEPMLQIDQPFVDALHDAGFEMAIETNGSLPVLESIDWICVSPKADAPLVVTKGNELKVVVPQDNQRLAEYEKLDFEYFLVQPMDGPSRDINTKLAIDWCKRHPKWRLSMQTHKYLNIP

SEQ ID NO: 28678 - protein, 210 aa, unidentified
  source 1..210: note = Caballeronia peredens
  REGION 1..210: note = tr|A0A158FZX7|A0A158FZX7_9BURK 7-carboxy-7-deazaguanine synthase OS=Caballeronia peredens; OX = 1777132 GN=queE PE=3 SV=1
MTYAVKEIFYTLQGEGANAGRPAVFCRFAGCNLWSGREEDRADAVCQFCDTDFVGTDGENGGKFKTPAELVAKIASLWPEGAGHKFVVCTGGEPMLQIDQPFVDALHEAGFEMAIETNGSLPVLESIDWICVSPKADAPLVVTKGNELKVVVPQDNQRLAEYEKLDFDYFLVQPMDGPSRDLNTKLAIDWCKRHPKWRLSMQTHKYLNIP

SEQ ID NO: 28679 - protein, 210 aa, unidentified
  source 1..210: note = Caballeronia ptereochthonis
  REGION 1..210: note = tr|A0A158CVZ6|A0A158CVZ6_9BURK 7-carboxy-7-deazaguanine synthase OS=Caballeronia ptereochthonis OX=1777144 GN=queE PE=3 SV=1
MTYAVKEIFYTLQGEGANAGRPAVFCRFAGCNLWSGREEDRADAVCQFCDTDFVGTDGENGGKYRTPAELVAKIASLWPEGAAHRFVVCTGGEPMLQIDQPFVDALHEAGFEMAIETNGSLPVLESIDWICVSPKADAQLVVTKGNELKVVVPQDNQRLAEYEKLDFDYFLVQPMDGPSRDINTKLAIDWCKRHPKWRLSMQTHKYLNIP

SEQ ID NO: 28680 - protein, 210 aa, unidentified
  source 1..210: note = Caballeronia sordidicola
  REGION 1..210: note = tr|A0A242MJL7|A0A242MJL7_9BURK 7-carboxy-7-deazaguanine synthase OS=Caballeronia sordidicola OX=196367 GN=queE PE=3 SV=1
MTYAVKEIFYTLQGEGANAGRPAVFCRFAGCNLWSGREEDRAEAVCQFCDTDFVGTDGENGGKYKTPADLVAMIASQWPEGEAHKFVVCTGGEPMLQIDEPFVDALHAAGFEMAIETNGSMPVLDTIDWICVSPKAGAPLVVTKGNELKVVVPQDNQPLADYAKLDFEYFLVQPMDGPSRDINTKLAIDWCKRHPQWRLSMQTHKYLNIP

SEQ ID NO: 28681 - protein, 210 aa, unidentified
  source 1..210: note = Caballeronia sordidicola
  REGION 1..210: note = tr|A0A226WJR0|A0A226WJR0_9BURK 7-carboxy-7-deazaguanine synthase OS=Caballeronia sordidicola OX=196367 GN=queE PE=3 SV=1
MTYAVKEIFYTLQGEGANAGRPAVFCRFAGCNLWSGREEDRADAVCQFCDTDFVGTDGENGGKYRTPADLVAMIASQWPEGEAHKFVVCTGGEPMLQIDPPFVDALHAAGFEMAIETNGSLPVLDSIDWICVSPKAGAPLVVTRGNELKVVVPQDNQPLADYAKLDFEYFLVQPMDGPSRDINTKLAIDWCKRHPQWRLSMQTHKYLNIP

SEQ ID NO: 28682 - protein, 210 aa, unidentified
  source 1..210: note = Caballeronia telluris
  REGION 1..210: note = tr|A0A158J9J1|A0A158J9J1_9BURK 7-carboxy-7-deazaguanine synthase OS=Caballeronia telluris; OX = 326475 GN=queE PE=3 SV=1
MTYAVKEIFYTLQGEGANAGRPAVFCRFAGCNLWSGREEDRADAVCQFCDTDFVGTDGENGGKYRTPADLVAMIASLWPEGEAHKFVVCTGGEPMLQIDQPFVDALHEAGFEIAIETNGSLPVLDTIDWICVSPKADAPLVVTKGNELKVVVPQDNQRLADYAKLDFEYFLVQPMDGPSRDINTKLAIDWCKRHPKWRLSMQTHKYLNIP

SEQ ID NO: 28683 - protein, 210 aa, unidentified
  source 1..210: note = Caballeronia temeraria
  REGION 1..210: note = tr|A0A157ZIA6|A0A157ZIA6_9BURK 7-carboxy-7-deazaguanine synthase OS=Caballeronia temeraria OX=1777137 GN=queE PE=3 SV=1
MTYSVKEIFYTLQGEGANAGRPAVFCRFAGCNLWSGREEDRADAVCQFCDTDFVGTDGENGGKYKTPSELVAKIASLWPEGEAHKFVVCTGGEPMLQIDQPFVDALHEAGFEMAIETNGSLPVLESIDWICVSPKADAPLVVTKGNELKVVVPQDNQRLAEYEKLDFDYFLVQPMDNASRDINTKLAIDWCKRHPKWRLSMQTHKYLNIP

SEQ ID NO: 28684 - protein, 210 aa, unidentified
  source 1..210: note = Caballeronia terrestris
  REGION 1..210: note = tr|A0A158JFR0|A0A158JFR0_9BURK 7-carboxy-7-deazaguanine synthase OS=Caballeronia terrestris OX=1226301 GN=queE PE=3 SV=1
MTYAVKEIFYTLQGEGANAGRPAVFCRFAGCNLWSGREDDRADAVCQFCDTDFVGIDGENGGKFRTPADLVAMIASLWPEGEAHKFVVCTGGEPMLQIDQPFVDALHEAGFEIAIETNGSLPVLETIDWICVSPKADAPLVVTKGNELKVVVPQDNQRLADYAQLDFEYFLVQPMDGPSRDINTKLAIDWCKRHPKWRLSMQTHKYLNIP

SEQ ID NO: 28685 - protein, 210 aa, unidentified
  source 1..210: note = Caballeronia turbans
  REGION 1..210: note = tr|A0A158FHL8|A0A158FHL8_9BURK 7-carboxy-7-deazaguanine synthase OS=Caballeronia turbans; OX = 1777134 GN=queE PE=3 SV=1
MTYAVKEIFYTLQGEGANAGRPAVFCRFAGCNLWSGREEDRADAVCQFCDTDFVGTDGENGGKYKTPAELVAKIASLWPEGAAHRFVVCTGGEPMLQIDQPFVDALHEAGFEMAIETNGSLPVLESIDWICVSPKADAPLVVTKGNELKVVVPQDNQRLAQYEKLDFDYFLVQPMDGPSRDINTKLAIDWCKRHPKWRLSMQTHKYLNIP

SEQ ID NO: 28686 - protein, 210 aa, unidentified
  source 1..210: note = Caballeronia udeis
  REGION 1..210: note = tr|A0A3M0V530|A0A3M0V530_9BURK 7-carboxy-7-deazaguanine synthase OS=Caballeronia udeis; OX = 1232866 GN=queE PE=3 SV=1
MTYAVKEIFYTLQGEGANAGRPAVFCRFAGCNLWSGREEDRADAVCQFCDTDFVGTDGENGGKYRTPAELVAMIASQWPEGEAHQFVVCTGGEPMLQIDQPLVDALHAAGFEMAIETNGSLPVLDSIDWICVSPKAGAPLVVTKGNELKVVVPQDNQPLADYAKLDFQYFLVQPMDGPSRDINTKLAIDWCKRHPQWRLSMQTHKYLNIP

SEQ ID NO: 28687 - protein, 210 aa, unidentified
  source 1..210: note = Caballeronia udeis
  REGION 1..210: note = tr|A0A158F8X0|A0A158F8X0_9BURK 7-carboxy-7-deazaguanine synthase OS=Caballeronia udeis; OX = 1232866 GN=queE PE=3 SV=1
MTYAVKEIFYTLQGEGANAGRPAVFCRFAGCNLWSGREEDRADAVCQFCDTDFVGTDGENGGKYRTPAELVAMISSQWPEGEAHKFVVCTGGEPMLQIDPPFVDALHAAGFEMAIETNGSLPVLDSIDWICVSPKAGAPLVVTRGNELKVVVPQDNQPLADYAKLDFEYFLVQPMDGPSRDINTKLAIDWCKRHPQWRLSMQTHKYLNIP

SEQ ID NO: 28688 - protein, 250 aa, Caldalkalibacillus thermarum
  REGION 1..250: note = tr|F5L557|F5L557_CALTT 7-carboxy-7-deazaguanine synthase OS=Caldalkalibacillus thermarum (strain TA2.A1); OX = 986075 GN=queE PE=3 SV=1
MTLIRPPLVWKKRVYTAEEMARFSIPMVEIFETVEGEGLRAGFPTVFVRVFHCNLRCVWCDTPYSYAPAKPEFEATVAEIAQKVQTYTSRAICLTGGEPLIHGHKSAALIHFLSYLESFEDIHIETNGAIDLTPFAELRQQDPMWNKKVRFIMDYKLPGSGEMERMIHTNFDHLKEQDEIKFVIGSDEDFQCALEVMERYHQQGTVLMSPVWETMPPHKLVEKVLSHGLAHVKVSLQLHKIIWDPDKRGV

SEQ ID NO: 28689 - protein, 211 aa, Caldanaerobius fijiensis
  REGION 1..211: note = tr|A0A1M4ZPE4|A0A1M4ZPE4_9THEO 7-carboxy-7-deazaguanine synthase OS=Caldanaerobius fijiensis DSM 17918 OX=1121256 GN=queE PE=3 SV=1
MLKVNEIFTSIQGESTSTGYLTVFVRLTGCNLRCSYCDTRYAYDEGQLMTVGQVYSDIARRGIKRVCITGGEPLLQPDVQRLIDMLEDYEVSIETNGSVDLSQFKLYDRHRFVMDMKVPSSGSSNSMNYENFNYLRSHDEIKFVIGNKSDYYWAKDVIKKYYKRGIITFSPVYGVIEPVEIVNWMIEDKLDNVRFQLQLHKYIWDPGIRGV

SEQ ID NO: 28690 - protein, 247 aa, unidentified
  source 1..247: note = Calderihabitans maritimus
  REGION 1..247: note = tr|A0A1Z5HXH6|A0A1Z5HXH6_9THEO 7-carboxy-7-deazaguanine synthase OS=Calderihabitans maritimus OX=1246530 GN=queE PE=3 SV=1
MRSPISEVFSSIQGEGLYVGRRQIFIRFAGCNLSCAYCDTIESRSGKVKYCNIEVKPGSAQYRQLPNPLSVEDLLDNIVDLLEFPHHSVSLTGGEPLLYHHFVRETGKRLKEKEQLIYLETNGTLPDRLAEVLPYVDIVSMDVKLPTHTGKSYWAEHKEFLNIARRKEVFVKIVVSASSPVEEIREAINLVAGVDYNIPLVLQPVTPVREEMDRCPGKWLMYLQDMALEKLAQVSVIPQTHRLVGVK

SEQ ID NO: 28691 - protein, 225 aa, Caldicellulosiruptor bescii
  REGION 1..225: note = tr|B9MMB5|B9MMB5_CALBD 7-carboxy-7-deazaguanine synthase OS=Caldicellulosiruptor bescii (strain ATCC BAA-1888 / DSM 6725 / Z-1320) OX=521460 GN=queE PE=3 SV=1
MSDLYIKSENPIKFNVVEKFVSIEGEGIRSGYPAVFVRFAGCNLSCSWCDTKYANENPQYEQIGIDALLDFILSTGIKRVTLTGGEPLIQPHIYILIDRLIYEGFEVNIETNGSVSIKHVPRDAIITMDYKCPSSGMEDRMIVDNISLLGQKDVLKFVVGTYEDLKTAERIIKTFKPRCNIFFSPVFGMIKPAEIVKFLIENKLFDTRVQIQLHKIIWSENTRGV

SEQ ID NO: 28692 - protein, 217 aa, unidentified
  source 1..217: note = Caldicellulosiruptor changbaiensis
  REGION 1..217: note = tr|A0A3T0D391|A0A3T0D391_9FIRM 7-carboxy-7-deazaguanine synthase OS=Caldicellulosiruptor changbaiensis OX=1222016 GN=queE PE=3 SV=1
MKKAKFKVVEKFVSIEGEGIRSGFPAIFLRFAGCNLNCSYCDTRYATQNPDYEEITLDQILEYVNSIGFKRVTLTGGEPLIQPHIHDLIDSLIKEGFEVNIETNGSVDIRYVNRNAIITMDYKCPSSGMEDKMLLENIKYLGKSDVLKFVVGTNQDLERAFEIIRLFEPSCNIYFSPVYGKIEPKEIVSFILSHKLQNCRVQLQLHKIIWPDREKGV

SEQ ID NO: 28693 - protein, 225 aa, Caldicellulosiruptor hydrothermalis
  REGION 1..225: note = tr|E4Q980|E4Q980_CALH1 7-carboxy-7-deazaguanine synthase OS=Caldicellulosiruptor hydrothermalis (strain DSM 18901 / VKM B-2411 / 108) OX=632292 GN=queE PE=3 SV=1
MSDLYIKSENPIKFNVVEKFVSIEGEGIRSGYPAVFVRFAGCNLRCSWCDTKYANENPEYEEIDIDNLMNFITSTGIKRVTLTGGEPLIQPYIYLLIDRLISEGFEVNIETNGSVSIKHVPRDAIITMDYKCPSSGMEDRMIVDNIHFLGQKDVLKFVVSTYEDLKTAERIIKTFKPRCNIFFSPVFGKIEPREIVKFVLENGLFDARVQLQLHKIIWPENSRGV

SEQ ID NO: 28694 - protein, 225 aa, Caldicellulosiruptor kristjanssonii
  REGION 1..225: note = tr|E4S6I4|E4S6I4_CALKI 7-carboxy-7-deazaguanine synthase OS=Caldicellulosiruptor kristjanssonii (strain ATCC 700853 / DSM 12137 / I77R1B) OX=632335 GN=queE PE=3; SV = 1
MLVQNAKSENPIKFNVVEKFVSIEGEGIRSGYPAVFVRFAGCNLSCSWCDTNYATENPKYEQIDIDTLLSFIASTGIKRVTLTGGEPLIQPYIYILIDRLIYEGFEVNIETNGSVSIKHVPRDAIITMDYKCPSSGMEDRMIVDNINFLGQKDVLKFVVGTYEDLKSAERIIKTFKPRCNIFFSPVFGKIEPREIVKFLLENELFDARLQLQLHKIIWSPDARGV

SEQ ID NO: 28695 - protein, 225 aa, Caldicellulosiruptor kronotskyensis
  REGION 1..225: note = tr|E4SHH2|E4SHH2_CALK2 7-carboxy-7-deazaguanine synthase OS=Caldicellulosiruptor kronotskyensis (strain DSM 18902 / VKM B-2412 / 2002) OX=632348 GN=queE PE=3 SV=1
MSDLYIKSENPFKFNVVEKFVSIEGEGIRSGYPAVFVRFAGCNLRCSWCDTKYANENPEYEEIDIDNLMNFITSTGIKRVTLTGGEPLIQPYIYLLIDRLISEGFEVNIETNGSVSIKHVPRDAIITMDYKCPSSGMEHRMIVNNIHLLGEKDVIKFVVATYEDLKTAERIIKTFKPRCNIYFSPVFGKIEPREIVKFVLENGLFEARVQLQLHKIIWSENSRGV

SEQ ID NO: 28696 - protein, 225 aa, Caldicellulosiruptor lactoaceticus
  REGION 1..225: note = tr|G2PWR2|G2PWR2_9FIRM 7-carboxy-7-deazaguanine synthase OS=Caldicellulosiruptor lactoaceticus 6A; OX = 632516 GN=queE PE=3 SV=1
MSVQNTKSDNPIKFNVVEKFVSIEGEGIRSGYPAVFVRFAGCNLNCSWCDTRYANENPQYEQVDIDTLLNFISSTGIKRITLTGGEPLIQPYIYILIDRLIYEGFEVNIETNGSVSIKHVPRDAIITMDYKCPSSGMEDRMIVDNINFLGQKDVLKFVVGTYEDLKKAERIIKTFKPRCNIFFSPVFGKIEPREIVKFLLENELFDARLQLQLHKIIWSPDARGV

SEQ ID NO: 28697 - protein, 224 aa, unidentified
  source 1..224: note = Caldicellulosiruptor obsidiansis
  REGION 1..224: note = tr|D9THJ1|D9THJ1_CALOO 7-carboxy-7-deazaguanine synthase OS=Caldicellulosiruptor obsidiansis (strain ATCC BAA-2073 / strain OB47) OX=608506 GN=queE PE=3 SV=1
MLNLYNNEELIKFNVVEKFVSIEGEGIRSGYPAVFVRFAGCNLSCSWCDTKYATENPKYEQIDIDTLLNFIASTGIKRVTLTGGEPLIQPYIYILIDRLIYEGFEVNIETNGSVSIKCVPRDAIITMDYKCPSSGMEDRMIVDNINFLGQKDVLKFVVATHEDLKSAERIIKTFNPKCNIFFSPVFGKIEPAEIVKFLLENGLFDARVQLQLHKIIWSENSRGV

SEQ ID NO: 28698 - protein, 224 aa, Caldicellulosiruptor owensensis
  REGION 1..224: note = tr|E4Q2B4|E4Q2B4_CALOW 7-carboxy-7-deazaguanine synthase OS=Caldicellulosiruptor owensensis (strain ATCC 700167 / DSM 13100 / OL) OX=632518 GN=queE PE=3 SV=1
MLNLYNNEDLIKFNVVEKFVSIEGEGIRSGYPAVFVRFAGCNLSCSWCDTKYATENPKYEQIDIDTLLSFIASSGIKRVTLTGGEPLIQPYIYILIDRLIYEGFEVNIETNGSVSIKHVPRNAIITMDYKCPSSGMEDRMIVDNIHFLGQKDVLKFVVGTYEDLKSAERIIKTFKPRCNIFFSPVFGKIEPAEIVKFLLENGLFDARVQLQLHKIIWSENSRGV

SEQ ID NO: 28699 - protein, 217 aa, Caldicellulosiruptor saccharolyticus
  REGION 1..217: note = tr|A4XFS3|A4XFS3_CALS8 7-carboxy-7-deazaguanine synthase OS=Caldicellulosiruptor saccharolyticus (strain ATCC 43494 / DSM 8903 / Tp8T 6331) OX=351627 GN=queE PE=3; SV = 1
MKKAKFKVVEKFVSIEGEGIRSGFPAIFLRFAGCNLNCSYCDTRYATQNPDYEEITLDQILEYVNSIGFKRVTLTGGEPLIQPHIHDLIDSLIKEGFEVNIETNGSVDIRYVNRNAIITMDYKCPSSGMEDKMLLENIKYLGKSDVLKFVVGTNQDLERAFEIIRLFEPSCNIYFSPVHGKIEPKEIVSFILSHKLQNCRLQLQLHKIIWPDRERGV

SEQ ID NO: 28700 - protein, 212 aa, unidentified
  source 1..212: note = Caldimicrobium thiodismutans
  REGION 1..212: note = tr|A0A2N7PK17|A0A2N7PK17_9BACT 7-carboxy-7-deazaguanine synthase OS=Caldimicrobium thiodismutans OX=1653476 GN=queE PE=3 SV=1
MSLKISEIFFSLQGEGPLIGVPTYFVRLFGCNLSCSWCDTPYAKEGSNYEKKEISEILLPWKENYALIPYVTITGGEPLLQEETLELIKAFLLEGAILVLETNGSLSIKNIPEEVIVIMDLKTPSSGMERFNNLENLQFLKKDDALKFVIKDERDFHWSLSVIEKYDLFSKTNCFFSPCEPFMPPEKLAKMILEVKRPIRFQIQLHKFLKIK

SEQ ID NO: 28701 - protein, 212 aa, unidentified
  source 1..212: note = Caldimicrobium thiodismutans
  REGION 1..212: note = tr|A0A0U5AW41|A0A0U5AW41_9BACT 7-carboxy-7-deazaguanine synthase OS=Caldimicrobium thiodismutans OX=1653476 GN=queE PE=3 SV=1
MNLKVSEIFFSIQGEGPWVGFPTFFVRLYGCNLACKWCDTPYAREGQDYKEMKPEEIIAFWKKNYPEIPYVTLTGGEPLLQDEIYILIDEFLQKGARVLLETNGALSIENVPEEVLVVMDLKTPSSGMENFNLYKNIYFLSEKDALKFVIKDEADFDWSLKIIEEFNLLSKVTCFFSPCAPFMSPKKLADLILKTKKPLRLQIQLHKFLNLK

SEQ ID NO: 28702 - protein, 237 aa, Calditerrivibrio nitroreducens
  REGION 1..237: note = tr|A0A2J6WPE3|A0A2J6WPE3_9BACT 7-carboxy-7-deazaguanine synthase OS=Calditerrivibrio nitroreducens OX=477976 GN=queE PE=3 SV=1
MPLQNTSSEGFIKEVFTSIQGEGKYVGALQLFVRLSGCSIGCKGCDTDYSFSDSFDLDGISVLSNPITAEKLSYIIYDHIKPNSIHSISITGGEPLLQKDFLKELIFYLKGYGYRIFLETSGFFIDRLNEVGDMVDIISLDFKLGESFGVEFSLDEIGKIKDEIKDKIYVKIVLKDSFDFVVGRKILDGLALLGKTEFYLHFFDNCIKTNKIIMNYFYSNGVDVFYVPQLHKLLEIK

SEQ ID NO: 28703 - protein, 237 aa, Calditerrivibrio nitroreducens
  REGION 1..237: note = tr|E4TF30|E4TF30_CALNY 7-carboxy-7-deazaguanine synthase OS=Calditerrivibrio nitroreducens (strain DSM 19672 / NBRC 101217 / Yu37-1) OX=768670 GN=queE PE=3 SV=1
MPLLNTSSEGFIKEVFTSIQGEGKYVGALQLFVRFSGCSIGCKGCDTDYSFTDSFDFNGTSVLSNPIKPERLACIIYDHIKPNSIHSISITGGEPLLQKDFLKELIFYLKGYGYRIFLETSGFFIDRLNEVGDMVDIISLDFKLGESFGVEFSLDEIRKIKDEIKNKIYIKIVIKNNLDFVVGRKILDGLALLNKTEFYLHFYDNCIKINQGIMDYFYSNGVDVFYVPQLHKLLEIK

SEQ ID NO: 28704 - protein, 217 aa, Caldithrix abyssi
  REGION 1..217: note = tr|H1XNF0|H1XNF0_9BACT 7-carboxy-7-deazaguanine synthase OS=Caldithrix abyssi DSM 13497 OX=880073 GN=queE; PE = 3 SV=1
MAGKDVLKINEIFYSIQGESTYAGLPCVFVRLTYCNLRCTYCDTEYAFYEGQEMGLDEIIARIKTYQCNLVEITGGEPLIQPAVYPLMERLLDNGFEVLLETGGHMDVSKVDQRVKRIMDVKCPSSGEAEKTHWPNMELLKNDDQVKFVIGDRKDFDYALEVLEKYNLLNRCPVLFSPVFGRLENGQLAEWILATQKPIRMQLQLHKYIWKPDQRGV

SEQ ID NO: 28705 - protein, 211 aa, Caldithrix sp.
  REGION 1..211: note = tr|A0A523I0H9|A0A523I0H9_9BACT 7-carboxy-7-deazaguanine synthase OS=Caldithrix sp.; OX = 1962856 GN=queE PE=3 SV=1
MQITEIYHSIQGESRFAGLPCVFVRTTGCNLRCVWCDTEYSFYGGQKMSLDEIIKQVESYDCKLVEITGGEPLLQKEVPELALRLLSKNQTVLIETSGEQDISVLDKRVIKIMDLKCPGSGESHQNRWENLEHLTPEDEVKFVIKDRQDYEWSREVIKKHSLENRLRVLFSPVWDNLDLEDLAKWILQDKLNVRYQLQLHKFIWSPETKGV

SEQ ID NO: 28706 - protein, 211 aa, Caldithrix sp.
  REGION 1..211: note = tr|A0A523HLX0|A0A523HLX0_9BACT 7-carboxy-7-deazaguanine synthase OS=Caldithrix sp.; OX = 1962856 GN=queE PE=3 SV=1
MRITEIYHSIQGESRFAGRPCVFVRTTGCNLRCVWCDTEYAFYGGAEMSLDQIVAKTDRFGCKLVEITGGEPLLQKDVPELAQLLVDRDYTVLVETSGERDISVLDKRVIKIMDLKCPGSGESHRNRWQNIAHLSAQDEVKFVVKDRKDYDWAVDVIKKRGLERRCHILISPVFSELAPDELVNWILQDGLDVRFQLQLHKLVWSPDTKGV

SEQ ID NO: 28707 - protein, 215 aa, unidentified
  source 1..215: note = Calditrichaeota bacterium
  REGION 1..215: note = tr|A0A3N9MRN9|A0A3N9MRN9_9BACT 7-carboxy-7-deazaguanine synthase OS=Calditrichaeota bacterium OX=2212469 GN=queE PE=3 SV=1
MPESLKINEIFFSIQGESTFAGLPCIFIRLAHCNLRCNYCDTEYAFYQGTEMTFAEILDKINQYSCNLVEVTGGEPLLQKNVLPFIRLLLDKGRRVLVETGGHMDISGIDERAVIIMDIKCPGSGESDKNLWDNIGYLKKTDQVKFVISHRQDYLWTKDIINKYQLTDNHEVLLSPVFGRIDNQELAEWIIKDQLPVRLQLQIHKYIWAPDRRGV

SEQ ID NO: 28708 - protein, 235 aa, unidentified
  source 1..235: note = Calditrichaeota bacterium
  REGION 1..235: note = tr|A0A3M1XE40|A0A3M1XE40_9BACT 7-carboxy-7-deazaguanine synthase OS=Calditrichaeota bacterium OX=2212469 GN=queE PE=3 SV=1
MKLPTPTRKIKPRVDETTLMVNEIFYSIQGESSHAGRPCLFVRLTYCNLRCSYCDTEYAFYEGQPRQIDSLLAEIVDHPCPVVEITGGEPLLQPAVFPLMKALCEAGKTVLLETSGSRPLEKVDPRVIKIVDFKCPSSGMAGKNLESNVNCLSPRDEVKFVVGTREDFDWAVAFVEKHRLASRVGWILFSPVWGQLPPLQLTEWLLGEPRLRALPSVRLQLQMHKFIWPPDQRGV

SEQ ID NO: 28709 - protein, 193 aa, Caloramator australicus
  REGION 1..193: note = tr|I7KVN5|I7KVN5_9CLOT 7-carboxy-7-deazaguanine synthase OS=Caloramator australicus RC3 OX=857293 GN=queE; PE = 3 SV=1
MYRVNEIFHSVQGEGSYLGCPATFVRLSGCNLNCAWCDTDHSEKEFLTAEEIANRVDYEKVIITGGEPTIYDLKPLLLELKKRGKKTMLETNGTNPTDDIRHLLDWIVCSPKPETNWAINERCLFDELKYVVDGNFEPEIHIPKGIKEKYKDRIWLQPESSNFNLRSKEAFYFAMKDSSLRVGIQLHKIINVR

SEQ ID NO: 28710 - protein, 193 aa, Caloramator fervidus
  REGION 1..193: note = tr|A0A1H5WSU0|A0A1H5WSU0_9CLOT 7-carboxy-7-deazaguanine synthase OS=Caloramator fervidus; OX = 29344 GN=queE PE=3 SV=1
MYPISEIFSSIQGEGSFLGCPATFIRFSGCNLNCPWCDTDFSFKKYMTVDEIVSFVEYQKVIITGGEPTLYDLEPLLVKLKELGKIVMLETNGTNPTDKIRHLIDWIVCSPKPEVNWEINERCLFDELKYVVDGQFNPKLHIKEDIKQKYKDKIWLQPESSRFYERAKQAFEMAMKEPYLRVGLQMHKIINVR

SEQ ID NO: 28711 - protein, 193 aa, Caloramator mitchellensis
  REGION 1..193: note = tr|A0A0R3JYF3|A0A0R3JYF3_9CLOT 7-carboxy-7-deazaguanine synthase OS=Caloramator mitchellensis OX=908809 GN=queE PE=3 SV=1
MYKVAEIFHSVQGEGSFLGCPATFIRLSGCNLSCSWCDTDFSPKHDMTAKEIADIALCEKVVITGGEPTIYDLEPLLLELKNRGKVTMLETNGTNPTDNIRGLLDWIVCSPKPQNNWGINPGCMFDELKFVVDGQFNPKIHIKDEIKEMYKNRIWLQPESSMFKIRSKEAYEFAMEDMRLRVGIQLHKIIDVR

SEQ ID NO: 28712 - protein, 243 aa, Caloramator proteoclasticus
  REGION 1..243: note = tr|A0A1M4TRM5|A0A1M4TRM5_9CLOT 7-carboxy-7-deazaguanine synthase OS=Caloramator proteoclasticus DSM 10124 OX=1121262 GN=queE PE=3 SV=1
MKREEFLNEKIPMVEIFNSISGEGITSGFLTTFVRVYGCNLRCSYCDTKYSYDGEYSLMAPIEILGEVNRLNCKRVIVTGGEPLEEEKIKRYIPLYLAQNGYEVRIETNGSVRLYDEDEIYQFTSKKERKNLFYTLDIKCPSSNMDKFNIFEENFKRLILGDEIKFVVGNVDDLDYSIDVVKRYKEYFKGVTLNFSPVFSKIEPSQIVDYLKIINKFFAENNLDVRLNLQLHKIIWDKDKRGV

SEQ ID NO: 28713 - protein, 193 aa, unidentified
  source 1..193: note = Caloramator quimbayensis
  REGION 1..193: note = tr|A0A1T4YGC5|A0A1T4YGC5_9CLOT 7-carboxy-7-deazaguanine synthase OS=Caloramator quimbayensis OX=1147123 GN=queE PE=3 SV=1
MYKISEIFSSVQGEGSYLGCPASFIRLAGCNLRCSWCDTDFSLKYVMTTQEIIDKIKYEKVIITGGEPTIYDLKPLLLELKKRGKVTMLETNGTNPTDDIRHLIDWIVCSPKPEKNWTINERCIFDELKYVVDGQFNPDKHIPKEIKEKYKDRIWLQIESSNFAVLAKEAFTFVMNDSALRVGLQLHKIIDVK

SEQ ID NO: 28714 - protein, 193 aa, Caloramator sp.
  REGION 1..193: note = tr|A0A5B7TDC9|A0A5B7TDC9_9CLOT 7-carboxy-7-deazaguanine synthase OS=Caloramator sp. E03; OX = 2576307 GN=queE PE=3 SV=1
MYKIAEIFNSVQGEGSYLGCPASFIRLSGCNLHCSWCDTDFSLKYIMTAEEIIDKIKYEKVIITGGEPTIYDLKPLLLELKKRSKVTMLETNGTNPTDDIRHLLDWIVCSPKPEKNWTINERCIFDELKYVVDGQFNPDKHIPKAIKEKYKDRIWLQPESSNLILRAKEAFDFSMNDNALRVGLQLHKIIDVK

SEQ ID NO: 28715 - protein, 210 aa, Caloranaerobacter azorensis
  REGION 1..210: note = tr|A0A096DQJ8|A0A096DQJ8_9CLOT 7-carboxy-7-deazaguanine synthase OS=Caloranaerobacter azorensis H53214 OX=1156417 GN=queE PE=3 SV=1
MLKVNEIFLSIQGEGISTGLPTIFVRLTGCNLRCSYCDTTYSYNYGNHMTIQQVINKIESYGYKRVCITGGEPLLQKDIINLLEKLTDYEVNIETNGSIDISKYKLIEKHRLTMDVKTPTSNEHSKMRLSNFDYLRDNDEIKFVIGTFEDYNWSKEIIRKYYNKGIITFSPIYNMIEPKEIVNWILKDKLDVRFQLQLHKIIWNPDERGV

SEQ ID NO: 28716 - protein, 210 aa, Caloranaerobacter azorensis
  REGION 1..210: note = tr|A0A1M5RTW1|A0A1M5RTW1_9CLOT 7-carboxy-7-deazaguanine synthase OS=Caloranaerobacter azorensis DSM 13643 OX=1121264 GN=queE PE=3 SV=1
MLKVNEIFLSIQGEGISTGLPTIFVRLTGCNLRCSYCDTTYSYNYGNHMTIQQVINKIESYGYKRVCITGGEPLLQKDIINLLEKLTDYEVNIETNGSIDISKYKLIEKHRFTMDVKTPTSNEHSKMRLSNFGYLRDNDEIKFVIGTFEDYNWSKEIIRKYYNKGIITFSPIYNMIEPKEIVNWILKDKLDVRFQLQLHKIIWNPDERGV

SEQ ID NO: 28717 - protein, 210 aa, Caloranaerobacter sp.
  REGION 1..210: note = tr|A0A0P8VK31|A0A0P8VK31_9CLOT 7-carboxy-7-deazaguanine synthase OS=Caloranaerobacter sp. TR13 OX=1302151 GN=queE PE=3 SV=1
MLRVNEIFLSIQGEGISTGLPTIFIRLTGCNLRCSYCDTIYSYNYGNLMTIEQIVDKIKNFDYKRICITGGEPLLQKDIIKLLEKLADYEVNIETNGSVDISKYKLIKKHRFTMDIKTPTSNEHKKMKLNNFNYLRDNDEIKFVIGTWEDYNWCKEIIKKYYKKGIITFSPIYNMIEPKEIVSWILQDRLDVRFQLQLHKIIWNPDERGV

SEQ ID NO: 28718 - protein, 265 aa, unidentified
  source 1..265: note = Calothrix brevissima
  REGION 1..265: note = tr|A0A1Z4JZ50|A0A1Z4JZ50_9CYAN 7-carboxy-7-deazaguanine synthase OS=Calothrix brevissima NIES-22 OX=1973478 GN=queE PE=3 SV=1
MTSKTTLNPTARLIEVFSAIQGEGLNVGTRQIFIRFAFCDLRCHFCDSAHTWNAPDTCNIEQTPGLRDFEVHSNPVSLPTLLQWVERQNIPFLHDSISLTGGEPLLHAPFLASFLPQVRSLTNLPIYLETGGHRPEQLAMLLPYLDSVGMDFKLPSVSGESYWQEHAQCLKLGYDSHLDVFVKIIISENTEPTELERSALLVADVSPEIPIFLQPVTPLADWQKLANKPILAPLPEQVLKWQALMKKFVHHVRVVPQTHKMLNQL

SEQ ID NO: 28719 - protein, 267 aa, unidentified
  source 1..267: note = Calothrix desertica
  REGION 1..267: note = tr|A0A433UZR2|A0A433UZR2_9CYAN 7-carboxy-7-deazaguanine synthase OS=Calothrix desertica PCC 7102 OX=232991 GN=queE PE=3 SV=1
MTAKTTVTTATTNARLVEVFSAIQGEGLNVGTRQIFIRFALCDLRCHFCDSSNTWNAPTTCRIERYPGLRDFEVYSNPVTLSMLVEWVERQNIPQLHDSISLTGGEPLLHASFLVEFLPQVRSATKLPIYLETGGHRSEQLAMVLPYLDSVGMDFKLESVSGEKRLVEHARFLQLCYDSQVEVFVKIIVSSSTDVEELKQAAQIVADINPSIPIFLQPVTPLISPTHAEKEIMAPEPDQVLVWQAMMKRIVKHVRVVPQTHKMLNQL

SEQ ID NO: 28720 - protein, 266 aa, unidentified
  source 1..266: note = Calothrix elsteri
  REGION 1..266: note = tr|A0A2A2TNE0|A0A2A2TNE0_9CYAN 7-carboxy-7-deazaguanine synthase OS=Calothrix elsteri CCALA 953 OX=987040 GN=queE PE=3 SV=1
MTENTNVTPNARLIEIFSGIQGEGLNVGTRQIFIRFALCDLRCHFCDSSSTWIAPNECKIERSPGLRDFEIHSNPVSLSMILEWVKRQNIPCLHDSISLTGGEPLLHASFLKEFLPQVRAATGLPIYLETGGHRPEQLMMVLPYIDSIGMDFKLNSVSGEKRFSEHARFLQLCNESQVETFVKIIISDRTDSMELERVAELLANVNPQIPVFLQPVTPLGESAQIVDAPIVLAPSPDQVLIWQGMMKRLVKQVRVVPQTHKMLNQL

SEQ ID NO: 28721 - protein, 265 aa, Calothrix parasitica
  REGION 1..265: note = tr|A0A1Z4LQD3|A0A1Z4LQD3_9CYAN 7-carboxy-7-deazaguanine synthase OS=Calothrix parasitica NIES-267 OX=1973488 GN=queE PE=3 SV=1
MTTKTTVNQTASLIEVFSAIQGEGLNVGTRQIFIRFAFCDLRCHFCDSAHTWNAPATCRIEQTPGSRDFEIFSNPVSLPMLIKWVERQNIPRLHDSISLTGGEPLLHARFLSKFLPQISLTTGLPIYLESGGHRPEQLATILPYLDSVGMDLKLPSVSGESRWQEHEKFLQICYEARTEVFVKIIISRDTDVAELKRSAELIAAVNAAIPVFLQPATPLTDVRQIKDSAVLTPTPKQVIDWQALMKNFLKSVRVIPQTHKMIDQL

SEQ ID NO: 28722 - protein, 265 aa, Calothrix sp.
  REGION 1..265: note = tr|A0A1Z4FQ18|A0A1Z4FQ18_9CYAN 7-carboxy-7-deazaguanine synthase OS=Calothrix sp. NIES-2098 OX=1954171 GN=queE PE=3 SV=1
MTAKTTVKPTARLIEVFSAIQGEGLNVGTRQIFVRFALCDLRCHFCDSAHTWNAPSTCKIERTPGLRDFEVHSNPVPLPILLEWVERQNLPSLHDSISLTGGEPLLHAPFLALFLPQVRDITNLPIYLETGGHRPEQLAIILPYLDSVGMDFKLPSVSGESYWQEHAECLKLCHDSHLNVFIKIIVSQTTDPTELERAALLVAAVSPEIPVFLQPVTPLADSEKLTAKSILAPSPDQVLKWQALMKKFVPHVRVVPQTHKMLNQL

SEQ ID NO: 28723 - protein, 275 aa, Calothrix sp.
  REGION 1..275: note = tr|A0A1Z4RBP3|A0A1Z4RBP3_9CYAN 7-carboxy-7-deazaguanine synthase OS=Calothrix sp. NIES-4101 OX=2005461 GN=queE PE=3 SV=1
MIDAAHRYHHMTANTTVIPTARLVELFSAIQGEGLNVGTRQIFIRFALCDLRCHFCDSANTWNAPTQCKIESYPGLRNFEIHSNPISLPVLLQWVERQNIPSLHDSISLTGGEPLLHASFLKEFLPQVRAATGLPIYLETGGHRPEQLAMVLPYIDSVGMDFKLASVSGEQRFSEHARFLQLCNDSQVETFVKIIISDRTDTGELERFAQLVADVNPEIPVFLQPVTPLVEPALVGGLVLLAPSPSQVLGWQTMMKRLVKQVRVIPQTHKMLHQL

SEQ ID NO: 28724 - protein, 210 aa, Camelimonas lactis
  REGION 1..210: note = tr|A0A4R2GWK9|A0A4R2GWK9_9RHIZ 7-carboxy-7-deazaguanine synthase OS=Camelimonas lactis; OX = 659006 GN=queE PE=3 SV=1
MTYAVKEIFKTLQGEGAQAGSAAVFCRFAGCNLWTGREEDRHKAVCQFCDTDFVGMDGEGGGRFASPAALLDAIEAAWGPGRVNRLIVFTGGEPLLQLDAPALAEAHRRGFRCAVETNGTIAAPEGLDWICVSPKAGADLAQRRGHELKLVFPQPTLMPDAVADLDFAHFFLQPMDGPDRAANTAAAVQWCMDHPQWRLSVQTHKVIGIP

SEQ ID NO: 28725 - protein, 232 aa, Caminibacter mediatlanticus
  REGION 1..232: note = tr|A0A4P9DQH7|A0A4P9DQH7_9PROT 7-carboxy-7-deazaguanine synthase OS=Caminibacter mediatlanticus TB-2 OX=391592 GN=queE PE=3 SV=1
MRENLLPISEIFYSIQGEGKYSGTPSIFVRVGGCNLTCPGFGNKGCDSYYAVDKSYKNEWKNFSIEEIKKEFSKYLKFNPHLVITGGEPTLYYEKLYPLIEWFSGEITIETNATIFIDFEKYPKYKDVTFAMSVKLSNSGEEYKKRVNKKAILNISKNAKKSFFKFVIDKDLKKEIEDITEGINLEIYCMPLGASKEELEKNAKFVFDFCLKNGYSYSDRIHIRLFGKKKGV

SEQ ID NO: 28726 - protein, 209 aa, Caminicella sporogenes
  REGION 1..209: note = tr|A0A1M6R8I8|A0A1M6R8I8_9CLOT 7-carboxy-7-deazaguanine synthase OS=Caminicella sporogenes DSM 14501 OX=1121266 GN=queE PE=3 SV=1
MKVNEIFLSIQGEGVSTGFPTIFIRFTGCNLRCSFCDTKYSYEDGEEMSVEEIYNEVKKFKYKRVCITGGEPLLQEDLSKLLYLLKEYEVNIETNGSVDLGKYRLLPNHRFTMDMKVPSSMESKKMIFTNFKYLKDRDEIKFVIGTREDYEWAKEVIKKYYRKGIITFSPVFNKIEPKEIVNWILQDNLDVRFQLQIHKIIWEPDEKGV

SEQ ID NO: 28727 - protein, 249 aa, Campylobacter avium
  REGION 1..249: note = tr|A0A222MZL6|A0A222MZL6_9PROT 7-carboxy-7-deazaguanine synthase OS=Campylobacter avium LMG 24591 OX=522484 GN=queE PE=3 SV=1
MYIVEKFLSLQGEGKFSGKLAFFIRFAGCNINCVGFNVSKEKNAEVLIGCDTLRAVYTEHFKNEYENVNVNTLVKMIKDITKDKEIIIVITGGEPTLWHKNKKFIELMLELEQMKLEVHFESNASIYIDFDQYELYKNCIFAMSVKLSNSGVKQEQRINPKAIKAIVANSKDSFYKFVLDKNFIKSGEAQKEIKALLDIAKTQVYCMPMGQNNKELKINAKEVAKFCIENGYNYSDRLHIRLWGSKEGV

SEQ ID NO: 28728 - protein, 248 aa, unidentified
  source 1..248: note = Campylobacter blaseri
  REGION 1..248: note = tr|A0A2P8R1K1|A0A2P8R1K1_9PROT 7-carboxy-7-deazaguanine synthase OS=Campylobacter blaseri; OX = 2042961 GN=queE PE=3 SV=1
MLLKLVEWFYSIQGEGKYAGSSAIFFRFAGCNLRCRGFNVKQISPKTNEALVGCDTIRAVYTSHFEYENIDIASQLFKKIDSLKLNHKPIIVITGGEPLLHYKNSVFYEFVSRLLELEYEVHFETNGSIEVDFINFPNYKKCIFCISPKLSNSLEKNEKRLNYNALNTIKNSSKDSFYKFVISKEITLKDEILDIIKNAPNSVFCMPMSKNKKELEENAKYTFNFCLENGYNYSDRIHIRIFDDKDGI

SEQ ID NO: 28729 - protein, 247 aa, Campylobacter coli
  REGION 1..247: note = tr|W8L0N5|W8L0N5_CAMCO 7-carboxy-7-deazaguanine synthase OS=Campylobacter coli RM4661 OX=1183379 GN=queE; PE = 3 SV=1
MQLVESFLSIQGEGKYSGKLAIFMRFAGCNFNCSGFGVKLIKNEKVLKGCDTIRAVFTKEFNEEYENLNASELFKRVLDLKKDFDPIVVITGGEPLIHHENPEFIYFIQTLLENNFEVHFESNGSIELDFEKYPFYKECIFALSVKLQNSGMSKERRLNINALKAFKQYAKDSFYKFVLNSSQLESSALEILEILEKAPNEIFCMPMGENEQNLKQNALKIAEFCIKNGYNYSDRIHIRLWNDKEGV

SEQ ID NO: 28730 - protein, 247 aa, Campylobacter coli
  REGION 1..247: note = tr|A0A3Z9W7G9|A0A3Z9W7G9_CAMCO 7-carboxy-7-deazaguanine synthase OS=Campylobacter coli; OX = 195 GN=queE PE=3 SV=1
MQLVESFLSIQGEGKYSGKLSIFMRFAGCNFNCSGFGVKLIKNGKTLKGCDTIRAVFTKEFNEEYEILNASELFKRVLDLKKDFNPIVVITGGEPLIHHENPEFIDFIQALLKNNFEVHFESNGSIELDFEKYPFYKECVFALSVKLQNSGMGKEKRLNFNALKGFKHYAKDSFYKFVLNSSQLESLSLEILEILEKAPNEIFCMPMGENEQNLKQNALKIAEFCIKNGYNYSDRIHIRLWNDKEGV

SEQ ID NO: 28731 - protein, 251 aa, Campylobacter concisus
  REGION 1..251: note = tr|U2FNH3|U2FNH3_9PROT 7-carboxy-7-deazaguanine synthase OS=Campylobacter concisus UNSW2 OX=1242965; GN = queE PE=3 SV=1
MSKELELVEAFLSIQGEGAYQGRLAVFLRFLGCNLNCSGFGVKTRSLKTGEELLGCDSIRAVFKGHFHHKTYSADEILSLVDGLCKGLEQKPIVVLTGGEPLIWHQNENFINLVRNLLINYEVHFETNGTILVDFDKFEIYKNCHFALGVKLANSGVSEQKRINLDAILAIKNNAKSSFLKFVLSRFDKSELDEILYIKNRANLPVWCMAMGANEDELGKNALKTAQFAIKHGFNYSERIHIRLWGDKEGV

SEQ ID NO: 28732 - protein, 251 aa, Campylobacter concisus
  REGION 1..251: note = tr|U2G889|U2G889_9PROT 7-carboxy-7-deazaguanine synthase OS=Campylobacter concisus UNSW1 OX=1242967; GN = queE PE=3 SV=1
MSKELELIEAFLSIQGEGAYQGRLAIFLRFLGCNLNCSGFGVKTRSLKTGEELLGCDSIRAVFKGHFHHKRYSTDEILSLVDGLCKGLEQKPIVVLTGGEPLIWHQNENFINLVRNLLINYEVHFETNGTILVDFDKFEIYKNCHFALGVKLANSGVSEQKRINLDAILAIKDNAKSSFLKFVLSRFNKSELEEILYIKNRANLPVWCMAMGANEDELGKNALKTAEFAIKHGFNYSERIHIRLWGDKEGV

SEQ ID NO: 28733 - protein, 244 aa, Campylobacter cuniculorum
  REGION 1..244: note = tr|A0A1W6BUW0|A0A1W6BUW0_9PROT 7-carboxy-7-deazaguanine synthase OS=Campylobacter cuniculorum DSM 23162 = LMG 24588 OX=1121267 GN=queE PE=3; SV = 1
MQVVESFLSIQGEGKFAGKLAVFIRFAGCNLNCIGFGVKRQKNGKILQGCDTLRAVFTKEFESQTYDSKSLFERVLELKKDFRVIIVITGGEPLIHHQDEEFINFIELLLNANLEVHFESNGSIELDFNKYPLYKKCIFALGIKLSNSGIAKEKRINFKAIESIVKNTQSFYKFVLDSKSIQRSASEIDEIVSQIPNEVYCMPLGENEDKLRANALKIVEFCIKNGYNYTDRIHIRLWGEQEGV

SEQ ID NO: 28734 - protein, 255 aa, Campylobacter curvus
  REGION 1..255: note = tr|A7GWA6|A7GWA6_CAMC5 7-carboxy-7-deazaguanine synthase OS=Campylobacter curvus (strain 525.92) OX=360105; GN = queE PE=3 SV=2
MRDGGRGLELVESFLSVQGEGAYQGRLAVFLRFFGCNLNCIGFDVKTRSNKTGEILIGCDSARAVFKGHFKSKRYSSDEILSLVKNICKGLKTRPIVVLTGGEPLIHHKNENFINLVQNLLNLGFDVHFETNGTIEVNFAKFPVYKKCKFALGIKLANSGVSVDKRINVKAIEAICKNAKESFYKFVLSSPGDNDLEQILQVLKISDAPVWCMAMGASRSELEQNAPRVADFAIKHGFNYSERIHIRLWDKKEGV

SEQ ID NO: 28735 - protein, 241 aa, Campylobacter fetus
  REGION 1..241: note = tr|A0A0E1GK45|A0A0E1GK45_CAMFE 7-carboxy-7-deazaguanine synthase OS=Campylobacter fetus subsp. fetus 04/554 OX=1240980 GN=queE PE=3 SV=1
MVNVVEYFTSVQGEGKFSGRYSLFIRLGGCNLSCKGFGVKIKSPKTGEILVGCDTIKAVQTEHFEHNKFDFEALVNLVKETEFKPLIVITGGEPLLWYKDEDLIKFIQWCFEQNYEVHFETNGSIFVDFDKFKVYKKCKFAVSVKLAISGEPKSKRINQKALQAIFANADAFYKFVICRSELGEINEILELQNGEVWCMPLGKNISELSKNAKRVAEFCIKNGFNYSDRLHVRLWNDKEGV

SEQ ID NO: 28736 - protein, 241 aa, Campylobacter fetus
  REGION 1..241: note = tr|A0A0S4RX47|A0A0S4RX47_CAMFE 7-carboxy-7-deazaguanine synthase OS=Campylobacter fetus subsp. fetus OX=32019 GN=queE PE=3 SV=1
MVSVVEHFTSIQGEGKFSGRYSLFIRLGGCNLSCKGFGVKTRSLKTGEILVGCDTIKAVQTSHFEHSKFDYKTLVNLVKETEFKPLIVITGGEPLLWHKDEDLIKFAQWCFEQDYEVHFETNGTVFVDFDKFEVYKKSKFAVSVKLSISGEPKSKRINQKALQAIFANADAFYKFVICGSELDEINEILELQNGEVWCMPLGKDRFELGKNALNVAEFCIKNGFNYSDRLHVRLWNDKEGV

SEQ ID NO: 28737 - protein, 248 aa, unidentified
  source 1..248: note = Campylobacter geochelonis
  REGION 1..248: note = tr|A0A128ECZ4|A0A128ECZ4_9PROT 7-carboxy-7-deazaguanine synthase OS=Campylobacter geochelonis OX=1780362 GN=queE PE=3 SV=1
MLKLVEFFHSIQGEGKFAGKNAIFFRFAGCNLRCAGFGVKLNSLKTGEVLTGCDTIRAVYTSHFEYENITSKEALLSKFEELDLQNAKPIIVITGGEPLLHHKDEIFYAFISEVLARGFEVHFETNGSVEVDFARFNEYKKCVFCISPKLSNSGEKREKRLNFKALNLIKENAKDSFYKFVISSEFNLQSEILEITQAAPNEVFCMPLGKNKKELEKNAKFTFEFCLKNGYNYTDRLHIRIFDDKDGI

SEQ ID NO: 28738 - protein, 321 aa, Campylobacter gracilis
  REGION 1..321: note = tr|C8PF27|C8PF27_9PROT 7-carboxy-7-deazaguanine synthase OS=Campylobacter gracilis RM3268 OX=553220; GN = queE PE=3 SV=1
MRLVESFLSIQGEGKYAGRLAFFFRFAGCNLRCAGFGGERVSPKTGEILRGCDTIRAVFTNHFEHEEILNLAQLLNKISNLSGSSCFAPACSAPGFCAAESFFESDTLNSAAAQTPPRPNGSAKNSLNLKSENSLNFAAQNSSNLNPQSSASPQSAKLHQKPIIIITGGEPMLHHKEALFYEFICELLARGYEVHFETNGTILVDFEKFPAYKSSVFAVSPKLSNSAEPRERRLNFAALRNLKQNAKDSFYKFVISPEFDAQPEIREILAACESEVYCMPRGADRRELESGAQFCVDFCLKNGYNYSDRLHIRIWGEKDGV

SEQ ID NO: 28739 - protein, 247 aa, Campylobacter helveticus
  REGION 1..247: note = tr|A0A1V0RHJ9|A0A1V0RHJ9_9PROT 7-carboxy-7-deazaguanine synthase OS=Campylobacter helveticus OX=28898 GN=queE PE=3 SV=1
MQIVESFLSVQGEGKFAGRLAVFVRFAGCNFNCVGFKVKRQKEGRELLGCDTIRAVFTKEYQKTYEDLNANELFARVLNLAKDFKPIIVITGGEPLIHHKKAEFLKFITLLLRAKFKVHFETNASIQIDFKKYPLYKKCVFSLGVKLSNSGISKDKRLNFKALKAFRKEAKKSFYKFVLDEGFLSKAKGEIEEILSVVKNEVYCMPLGENEEKLKKNALALVKFCLENGYNYSDRIHIRLWEDKEGV

SEQ ID NO: 28740 - protein, 247 aa, unidentified
  source 1..247: note = Campylobacter hepaticus
  REGION 1..247: note = tr|A0A424Z1C1|A0A424Z1C1_9PROT 7-carboxy-7-deazaguanine synthase OS=Campylobacter hepaticus OX=1813019 GN=queE PE=3 SV=1
MDLVESFLSIQGEGKYSGKLAIFMRFAGCNFNCSGFGVKISKNDKVLLGCDTIKAVFTKEFQKNYENLNAQKLFDRVIALKKHFNPIVVITGGEPLIHHENPEFINFIKMLIKANLQIHFESNGSIEIDFDKYPFYKKCIFALSVKLQNSGVAKNKRFNFKALKEIKMHAKDSFYKFVLDVKTLNHSSLEIEEIIKEVPNQIFCMPMGENEQCIRKNAQEIAEFCIKNGYNYSDRIHIRLWNDKEGV

SEQ ID NO: 28741 - protein, 247 aa, Campylobacter hominis
  REGION 1..247: note = tr|A7I088|A7I088_CAMHC 7-carboxy-7-deazaguanine synthase OS=Campylobacter hominis (strain ATCC BAA-381 / LMG 19568 / NCTC 13146 / CH001A) OX=360107 GN=queE PE=3; SV = 1
MLSLVESFASIQGEGKFAGRLAVFFRFAGCNLNCAGFNCELKSPKTGEILRGCDTIRAVKTAHFDYEKISTVSQLLDKIGTNFKNSLPIIVITGGEPLLNYANPLFYEFIDEILKRNFEVHFETNGTIFVDFQKFPLYKNCVFAVSVKLGNSKEPREKRLNFTALQNLKNNAKIFFYKFVICKNFDAKSEIYEILEHVYGEVWCMPLAKNREQLSQNALYCAEFCLQNGFNYSDRLHIRLWNDKNGV

SEQ ID NO: 28742 - protein, 241 aa, Campylobacter hyointestinalis
  REGION 1..241: note = tr|A0A172SP37|A0A172SP37_CAMHY 7-carboxy-7-deazaguanine synthase OS=Campylobacter hyointestinalis subsp. hyointestinalis LMG 9260 OX=1031746; GN = queE PE=3 SV=1
MVRVVEHFTSIQGEGKFSGRYSLFIRLGGCNLSCKGFGVKTRSPKTGEILVGCDTIKAVQTSHFGHSKFDYKALVNLVKETEFKPLIVITGGEPLLWHKDEDLIKFAQWCFEQDYEVHFETNGTVFVDFDKFEVYKKSKFAVSVKLSISSEPKSKRINQKALQAIFANADAFYKFVICGSEIDEINEILELQNGEVWCMPLGKDRFELGKNALNVAEFCIKNGFNYSDRLHVRLWNDKEGV

SEQ ID NO: 28743 - protein, 241 aa, Campylobacter hyointestinalis; identical to SEQ ID NO: 28736
  REGION 1..241: note = tr|A0A2S5J4Z1|A0A2S5J4Z1_CAMHY 7-carboxy-7-deazaguanine synthase OS=Campylobacter hyointestinalis subsp. hyointestinalis OX=91352 GN=queE; PE = 3 SV=1

SEQ ID NO: 28744 - protein, 241 aa, unidentified
  source 1..241: note = Campylobacter iguaniorum
  REGION 1..241: note = tr|A0A076F754|A0A076F754_9PROT 7-carboxy-7-deazaguanine synthase OS=Campylobacter iguaniorum OX=1244531 GN=queE PE=3 SV=1
MISVVEHFASIQGEGKFQGRYSFFIRLAGCNLSCKGFGCEMKSPKTGEILVGCDTIRAVAIKHFDYPKFDFVGLKNLVENLKFKPIIVLTGGEPLLWHKDVDLQKFIAWLLEREYEVHFETNGTVFVDFNQFEIYKKCKFAISPKLAISGEPKSKRLNQKALKSLFANASAFYKFVVRGDELDEIREILALQNGEVWCMPLGKNISELNANAINVANFCINHGFNYSDRLHIRLWNDKEGV

SEQ ID NO: 28745 - protein, 249 aa, Campylobacter insulaenigrae
  REGION 1..249: note = tr|A0A0A8H3S7|A0A0A8H3S7_9PROT 7-carboxy-7-deazaguanine synthase OS=Campylobacter insulaenigrae NCTC 12927 OX=1031564 GN=queE PE=3 SV=1
MEIVETFLSIQGEGAYSGKLAIFVRFAGCNFNCIGFGVSKKKDDNILIGCDTIRAVFTKNFASTYKKYTAQELFNEVIFLKKDFNPIIVITGGEPLLYYKNEEFLKWIKLLLEQNFLLHFETNASIEIDFKKYPVYEKCYFSLGVKLSNSGVSKEKRINKKALQAFKKNAKGSFYKFVLDEDFIFNHQAQEEIREILTICENEVYCMPMGSNREEISKNALSVAEFCIKNGYNYSDRLHIRVWGDKEGV

SEQ ID NO: 28746 - protein, 223 aa, Campylobacter jejuni
  REGION 1..223: note = tr|A0A4U9P206|A0A4U9P206_CAMJU 7-carboxy-7-deazaguanine synthase OS=Campylobacter jejuni; OX = 197 GN=queE_2 PE=3 SV=1
MQYPINEMFETLQGEGYFTGVPAIFIRLQGCPVGCSWCDTKHTWDKIADREVDMQRILVKTEESDAWGNATSEQLLEVIAQQGYTARHVVITGGEPCIYDLTVLTSLLEKNGFSCQIETSGTHEVRCSVNTWVTVSPKVNMRGGYDILPQALKRADEVKHPVARQRDIDALDVLLETLTDSKARIIALQPISQKEEATRLCIATCIARNWRLSMQTHKYLNIA

SEQ ID NO: 28747 - protein, 247 aa, Campylobacter jejuni
  REGION 1..247: note = tr|A0A381D0J6|A0A381D0J6_CAMJU 7-carboxy-7-deazaguanine synthase OS=Campylobacter jejuni subsp. doylei OX=32021 GN=queE PE=3 SV=1
MQLVESFLSIQGEGKYNGKLAIFMRFAGCNFNCLGFNVKISKNDKTLIGCDTIRAVFTKDFKESYETLSTNELLKRVIKLKQGFNPIVVITGGEPLIHYENPEFIEFIQMLLKNKFEIHFESNGSIEIDFDRYPFYKECIFALSVKLQNSGIKKDKRLNFKALKAFKNYAKDSFYKFVLDANTLDNSFLEINEILKEAPNQIFCMPMGENEQNLKKNAQKIAEFCIKNGYNYSDRIHIRLWNDKEGV

SEQ ID NO: 28748 - protein, 241 aa, Campylobacter lanienae
  REGION 1..241: note = tr|A0A1X9SPD4|A0A1X9SPD4_9PROT 7-carboxy-7-deazaguanine synthase OS=Campylobacter lanienae NCTC 13004 OX=1031753 GN=queE PE=3 SV=1
MVEVVEYFHSIQGEGRYQGKNAFFIRLAGCNLRCQGFGSIMKSPKNGEILLGCDTIKAAQSSHFSYEKFNFERLSSLLISLKHKPLIIITGGEPLLYHSDWDLIKFLEYAFSVGFSVQFESNGTIEIDFAKYPIYKKCTFAVSVKLSISGEPAHKRINKKALKSLFNNADCFYKFVTTANEFDEIKEILSIQNGEVWCMPLAKNQDELNQNAKSVASFAIKNGFNYSDRLHIRIWNDLDGV

SEQ ID NO: 28749 - protein, 241 aa, Campylobacter lanienae
  REGION 1..241: note = tr|A0A562Y0W7|A0A562Y0W7_9PROT 7-carboxy-7-deazaguanine synthase OS=Campylobacter lanienae OX=75658 GN=queE PE=3 SV=1
MVEVVEYFHSIQGEGRYQGKNAFFIRLAGCNLRCQGFGSIMKSPKNGEILLGCDTIKAAQSSHFIYEKFNFERLSSLLISLKHKPLIVITGGEPLLYHSDWDLIKFLEYAFSIGFSVQFESNGTIEIDFAKYPIYKKCTFALSVKLSISGEPAHKRINKKALKSLFNNTDCFYKFVTTANEFDEIKDILSIQNGEVWCMPLAKNQDELNQNAKSVASFAIKNGFNYSDRLHIRIWNDLDGV

SEQ ID NO: 28750 - protein, 249 aa, Campylobacter lari
  REGION 1..249: note = tr|B9KDV1|B9KDV1_CAMLR 7-carboxy-7-deazaguanine synthase OS=Campylobacter lari (strain RM2100 / D67 / ATCC BAA-1060) OX=306263 GN=queE PE=3 SV=2
MEVVETFLSIQGEGKYSGNLAIFVRFAGCNFNCVGFGVKKEKDSKILLGCDTIRAVFTKEFKTCYKTYTSVKLFDEVLKLANSRKAIVVITGGEPLLNYQNKDFLCFINLLLENDFMVHFETNASIEIDFEKYPLYKKCYFALGVKLSNSGVKKEKRINEKALKAFKHYAKDSFYKFVLDKDFLQESKALNEINEILQICENEVFCMPMGSNEEEISKNALSVAEFCIKNGYNYSDRLHIRIWGDKEGV

SEQ ID NO: 28751 - protein, 249 aa, Campylobacter lari
  REGION 1..249: note = tr|A0A0A8I064|A0A0A8I064_CAMLA 7-carboxy-7-deazaguanine synthase OS=Campylobacter lari NCTC 11845 OX=1388749 GN=queE PE=3 SV=1
MEVVETFLSLQGEGKYSGNLAIFVRFAGCNFNCIGFGVKKEKYSKMLLGCDTIRAVFTKEFKTCYKTYTSAKLFDEVLKLANSRKVIVVITGGEPLLNYQNKDFLYFVNLLLENDFKVHFETNASIEIDFKKYPLYKKCYFALGVKLSNSGVKKEKRINEKALKAFKHYAKDSFYKFVLDKDFLQESKALGEINEILQICENEVFCMPMGSSEEEISKNALSVAEFCIKNGYNYSDRLHIRIWGDKEGV

SEQ ID NO: 28752 - protein, 249 aa, unidentified
  source 1..249: note = Campylobacter ornithocola
  REGION 1..249: note = tr|A0A1C2FU02|A0A1C2FU02_9PROT 7-carboxy-7-deazaguanine synthase OS=Campylobacter ornithocola OX=1848766 GN=queE PE=3 SV=1
MEIVETFLSLQGEGKYSGNLAIFVRFAGCNFNCIGFGVKKEKDSKILLGCDTIRAVLTKEFKACYKTYNAKELFDEVLKLVNLCKPIVVITGGEPLLNYQNKEFLCFISLLLEHNFKVHFETNASIEIDFEKYPLYKKCYFALGVKLSNSGVKKEKRINEKALEAFKNHAKGSFYKFVLDRDFLEENKALKEINEILQICENEVFCMPMGVNELEVSKNALSVAEFCIKNGYNYSDRLHIRIWGDKEGI

SEQ ID NO: 28753 - protein, 249 aa, Campylobacter peloridis
  REGION 1..249: note = tr|A0A0A8GUI4|A0A0A8GUI4_9PROT 7-carboxy-7-deazaguanine synthase OS=Campylobacter peloridis LMG 23910 OX=1388753 GN=queE PE=3 SV=1
MEVVETFLSLQGEGKYSGNLAVFVRFAGCNFNCAGFGVKKQKNSKEFLGCDTIRAVFTKEFKNTYKFYEAKELFKELLKLAKDFKPIVVITGGEPLLNYKNADFLEFISLLLENDFIVHFETNASIEIDFEKYPLYKQCYFALGIKLSNSGVKKEKRINEKALKAFKKNAKDSFYKFVLDEKFIQENKALEEINEILQLCENEVFCMPMGAKEEEISKNSLSVAEFCIKNGYNYSDRLHIRIWGDKEGV

SEQ ID NO: 28754 - protein, 249 aa, Campylobacter peloridis
  REGION 1..249: note = tr|A0A5C7DZ19|A0A5C7DZ19_9PROT 7-carboxy-7-deazaguanine synthase OS=Campylobacter peloridis OX=488546 GN=queE PE=3 SV=1
MEVVETFLSLQGEGKYSGNLAVFVRFAGCNFNCVGFGVKKQKNSKEFLGCDTIRAVFTKEFKNTYKFYEAKELFKELLKLAKDFKPIVVITGGEPLLNYKNADFLEFISLLLENDFKVHFETNASIEIDFEKYPLYKQCYFALGIKLSNSGVKKEKRINEKALKAFKKNAKDSFYKFVLDEKFIQENKALEEINEILQLCENEVFCMPMGAKEEEISKNSLSVAEFCIKNGYNYSDRLHIRIWGDKEGV

SEQ ID NO: 28755 - protein, 251 aa, unidentified
  source 1..251: note = Campylobacter pinnipediorum
  REGION 1..251: note = tr|A0A1S6TPV8|A0A1S6TPV8_9PROT 7-carboxy-7-deazaguanine synthase OS=Campylobacter pinnipediorum subsp. pinnipediorum OX=1660067 GN=queE PE=3; SV = 1
MASLSLVEEFISIQGEGKYQGHLGIFLRFFGCNLNCYGFDVKQISNKTGDTLIGCDTIRAVFTSHFDATQIQTEDEILNLVNARIKDLKKLPMIVITGGEPLLHHKNKIFINLVSKLIDSGFKIQFETNSSIFVDFEKFPIYKKCSFAMSVKLKNSGEKYEKRINKEAIKAICENSYDSFYKFVILGKDKELDEINDILKIYNQDVWCMPMGSNKIELEKNALNVANFAIKNGFNYSDRMHIRIWDNKEGV

SEQ ID NO: 28756 - protein, 251 aa, unidentified
  source 1..251: note = Campylobacter pinnipediorum
  REGION 1..251: note = tr|A0A1S6U8A5|A0A1S6U8A5_9PROT 7-carboxy-7-deazaguanine synthase OS=Campylobacter pinnipediorum subsp. caledonicus OX=1874362 GN=queE PE=3; SV = 1
MASLSLVEEFISIQGEGKYQGHLAIFLRFFGCNLNCYGFDVKQISNKTGDTLIGCDTIRAVFTSHFDATQIQTEDEILNLVNARIKGLKKLPMIVITGGEPLLHHKNKIFINLVSKLINSGFKIQFETNSSIFVDFEKFPIYKKCSFAMSVKLKNSGEKYEKRINKEAIKAICENSYDSFYKFVILGKDKELDEINDILKIYNQDVWCMPMGSNKIELEKNALNVANFAIKNGFNYSDRMHIRIWDNKEGV

SEQ ID NO: 28757 - protein, 254 aa, Campylobacter rectus
  REGION 1..254: note = tr|B9CYW0|B9CYW0_CAMRE 7-carboxy-7-deazaguanine synthase OS=Campylobacter rectus RM3267 OX=553218 GN=queE; PE = 3 SV=1
MSLNLVENFLSIQGEGASSGRLAIFLRFAGCNLNCAGFGVRAISPKTGETLVGCDTVRAVFTGHFSYQKISRADELAKITQNLSVNLRQKPILVITGGEPLLHHKNRILLDFLDFATSEGYEPHFETNGTIEVDFARFEIYKKCRFAVSVKLENSGESEARRINATALKAIKQNAAGSFYKFVLDKKSVEDGSAIAQISRILGLCDADVFCMPQGYDKISLERNARAVAQFAIKHGFNYSDRLHIRLWGAKEGV

SEQ ID NO: 28758 - protein, 254 aa, Campylobacter rectus
  REGION 1..254: note = tr|A0A3P1X8T1|A0A3P1X8T1_CAMRE 7-carboxy-7-deazaguanine synthase OS=Campylobacter rectus; OX = 203 GN=queE PE=3 SV=1
MSLNLVESFLSIQGEGASSGRLAIFLRFAGCNLNCAGFGVRAISPKTGEILTGCDTVRAVFTGHFSYQKISRADELIKITQNLSVNLRQKPILVITGGEPLLHHKNRILLDFLNFATSEGYEPHFETNGTIEVDFAKFEIYKKCRFAVSVKLENSGESEARRINATALKAIKQNAAGSFYKFVLDKKSVEDGSAIAQISRILGICDADVFCMPQGYDKISLERNASAVAQFAIKHGFNYSDRLHIRLWGTKEGV

SEQ ID NO: 28759 - protein, 254 aa, Campylobacter showae
  REGION 1..254: note = tr|M3GWM9|M3GWM9_9PROT 7-carboxy-7-deazaguanine synthase OS=Campylobacter showae CC57C OX=1073353 GN=queE; PE = 3 SV=1
MSLNLVESFLSIQGEGASSGRLAIFLRFAGCNLNCAGFGVRTVSPKTGETLTGCDTIRAVFTGHFSYQKITRADELIKITQNLSANLRRKPIIVITGGEPLLHHKSQILLDFLNFAISEGYEPHFETNGTIEVDFAKFEIYKKCRFAVSVKLENSGESEARRINASALKAIKQNSAGSFYKFVLDKKSAEDGSAIAQISRILEICDTEVFCMPQGYDKISLEQNARAVAQFTITHGFNYSDRLHIRLWGAKEGV

SEQ ID NO: 28760 - protein, 254 aa, Campylobacter showae
  REGION 1..254: note = tr|C6RE11|C6RE11_9PROT 7-carboxy-7-deazaguanine synthase OS=Campylobacter showae RM3277 OX=553219 GN=queE; PE = 3 SV=1
MSLNLVESFLSIQGEGASSGRLAIFLRFAGCNLNCAGFGVRTVSPKTGETLTGCDTIRAVFTGHFSYQKITRADELIKIIQNLSANLRRKPIVVITGGEPLLHHKNQILLDFLNFATSEGYEAHFETNGTIEVDFGKFEIYKKCRFAVSVKLENSGESEARRINQVALKAIKQNSAGSFYKFVLDKKSAEDGSAIAQISRILELCDAEVFCMPQGYDKISLEQNALSVAQFAIKHGFNYSDRLHIRLWGAKEGV

SEQ ID NO: 28761 - protein, 247 aa, Campylobacter sp.
  REGION 1..247: note = tr|A0A2G4R6G1|A0A2G4R6G1_9PROT 7-carboxy-7-deazaguanine synthase OS=Campylobacter sp. 73/13 OX=1655501 GN=queE PE=3 SV=1
MQVVESFLSIQGEGKFAGNLAVFVRFSGCNFNCVGFNVKKQKEGKELVGCDTLRAVFTKEYQNTYSKFNARELFLRVLTLAKDFKPIVVITGGEPLIHHKKPEFLRFITLLLEAKFEVHFETNASIKIDFKKYPLYKKCIFALGIKLSNSGVSKEKRLNYKALKAFKKKAKKSFYKFVLEEKFLNKAEEEIEKILSVVKNEVYCMPLGENETKLKKNALALVNFCLKNGYNYTDRMHIRLWGDKEGV

SEQ ID NO: 28762 - protein, 241 aa, Campylobacter sp.
  REGION 1..241: note = tr|A0A1X9T342|A0A1X9T342_9PROT 7-carboxy-7-deazaguanine synthase OS=Campylobacter sp. RM8964 OX=1660074 GN=queE PE=3 SV=1
MVEVVEYFSSIQGEGKFQGKNAFFIRFGGCNLKCVGFGCSLRSPKTGEMLMGCDTIRAAQSSHFKYDKFDSQRLSGLLLGLKHKPLIVLTGGEPLIHHADRDLLKFLEYAISVGFNIQFETNGTIDVDFAKFPIYKKCTFAVSVKLALSGEPAHKRINKKALKSLFNNASCFYKFVTTGAELAEIKDILAIQNGEVWCMPLARDQNELEYNAKNVVNLCIENGFNYSDRLHIRIWNDLDGV

SEQ ID NO: 28763 - protein, 250 aa, Campylobacter sputorum
  REGION 1..250: note = tr|A0A381DIY0|A0A381DIY0_9PROT 7-carboxy-7-deazaguanine synthase OS=Campylobacter sputorum biovar sputorum OX=32024 GN=queE PE=3 SV=1
MLSLVESFISIQGEGKYSGKYALFVRFAGCNLRCTGFGVNLKSLKTGEILVGCDTIKAVETSHFSYQNISNLQELLNLSVAKIPINLKPIVVITGGEPLIHHKNHIFCEFINYLLNHKFEVHFETNGSVFVDFDKFSFLKSCIFCVSIKLSNSGEIRQNRINLDALRAIKKNAKDSFYKFVLNAKDISNLSKEIKEILDIVPNEVYCMPMGATQTEIISNAAKVCDFCIKNGYNYTDRLHIRLWNDKEGV

SEQ ID NO: 28764 - protein, 249 aa, Campylobacter subantarcticus
  REGION 1..249: note = tr|A0A0A8HBE5|A0A0A8HBE5_9PROT 7-carboxy-7-deazaguanine synthase OS=Campylobacter subantarcticus LMG 24374 OX=1388751 GN=queE PE=3 SV=1
MEVVETFLSLQGEGKYSGNLAVFVRFAGCNFNCIGFGAKKEQNSKILLGCDTIRAVFTQEFKACYQSYKTKELFDEVVKLANSHQAIVVITGGEPLLNYQKPEFLCFVNLLLKNDFKVHFETNASIEIDFEKYPLYKKCYFALGVKLSNSGVKKEKRINEKALRAFKKYPRDSFYKFVLDRDFLEENKALEEIKEILQICKNEVFCMPMGANGLEISKNALSVAEFCIKNGYNYSDRMHIRIWGDKEGV

SEQ ID NO: 28765 - protein, 247 aa, Campylobacter upsaliensis
  REGION 1..247: note = tr|A0A448KLS1|A0A448KLS1_CAMUP 7-carboxy-7-deazaguanine synthase OS=Campylobacter upsaliensis OX=28080 GN=queE PE=3 SV=1
MKVVESFLSIQGEGKFAGRLAVFVRFAGCNFNCVGFNVKKQKENRELVGCDTLRAVFTKEYQNTYENLNAKELFLRVLKMAKDLKPIIVITGGEPLLHHKKSEFLKFIKLLLEAKFEVHFETNASIRVDFKKYPLYKKCIFALGVKLSNSGVSKEKRLNYKALKAFKKEAKKSFYKFVLEEEFLSKAEEEIKEILSVVKNEVYCMPLGENEARLKKNALALVNFCLKNGYNYSDRTHIRLWGDKEGV

SEQ ID NO: 28766 - protein, 247 aa, Campylobacter upsaliensis
  REGION 1..247: note = tr|A0A3X8R3C1|A0A3X8R3C1_CAMUP 7-carboxy-7-deazaguanine synthase OS=Campylobacter upsaliensis OX=28080 GN=queE PE=3 SV=1
MKVVESFLSIQGEGKFAGRLAVFVRFAGCNFNCVGFNVKKQKEGRELVGCDTLRAVFTKEYQNTYENLNAKELFLRVLKMTKDLKPIIVITGGEPLLHHKKSEFLKFIKLLLEAKFEVHFETNASIRVDFKKYPLYKKCIFALGVKLSNSGVSKEKRLNYKALKAFKKEAKKSFYKFVLEEEFLSKAEGEIKEILSVVKNEVYCMPLGENETRLKKNALALVNFCLKNGYNYSDRTHIRLWGDKEGV

SEQ ID NO: 28767 - protein, 250 aa, Campylobacter ureolyticus
  REGION 1..250: note = tr|A0A2I1N8Q7|A0A2I1N8Q7_9PROT 7-carboxy-7-deazaguanine synthase OS=Campylobacter ureolyticus OX=827 GN=queE PE=3 SV=1
MSLNLVEVFHSIQGEGKYTGINAIFFRFAGCNLKCPGFNVVKISPKTGEALKGCDTIKAVFTSHFNYKKIDCVKTLLSKIPKLDYKPAIIITGGEPLIHHKNPIFYDFITEILHQGYEVHFETNGTIEIDFEKFPLYKNCIYAISTKLSISGETKEKRLNFKALNLLKQNTKECFYKFVISPDFNPNDEICEILNAIKDAKKSDVFCMPLAKNIDELKKNAKFAFNFCLENGYNYTDRVHIRIFNDKEGV

SEQ ID NO: 28768 - protein, 250 aa, Campylobacter ureolyticus
  REGION 1..250: note = tr|A0A0K1HHJ7|A0A0K1HHJ7_9PROT 7-carboxy-7-deazaguanine synthase OS=Campylobacter ureolyticus RIGS 9880 OX=1032069 GN=queE PE=3 SV=1
MSLNLVEVFHSIQGEGKYTGTNAIFFRFAGCNLKCPGFNVIKISPKTGEALKGCDTIKAVFTSHFNYEKIECTKTLLSKIPKMYYKPAIIITGGEPLIHHKNPIFYDFISEILHQGYEVHFETNGTIEIDFEKFPLYKNCIYAISIKLSISGETKEKRLNFKALNLLKQNTKECFYKFVISPSFNPNDEICEILNDIKDAKKSDVFCMPLAKNIDELKKNAKFAFNFCLENGYNYTDRVHIRIFNDKEGV

SEQ ID NO: 28769 - protein, 249 aa, Campylobacter volucris
  REGION 1..249: note = tr|A0A5C8L0J0|A0A5C8L0J0_9PROT 7-carboxy-7-deazaguanine synthase OS=Campylobacter volucris OX=1031542 GN=queE PE=3 SV=1
MEIVETFLSIQGEGKYSGKLAIFVRFAGCNFNCVGFGVSKCKDDKIFVGCDTIRAVFVKEFASTYEKYNAKNLFEKINFLKKDFNPIVVITGGEPLIHYKNEEFIQFICLLLENNFCVHFETNASIELDFIKYSMYKDCYFALGVKLSNSGIIKEKRINQKALQNFKQYAKDSFYKFVLDENIILENKALIEIKEILQLCENEVFCMPMGSTQEEISKNALSVAEFCLKNGYNYSDRLHIRLWGDKEGV

SEQ ID NO: 28770 - protein, 249 aa, Campylobacter volucris
  REGION 1..249: note = tr|A0A5C7E1L0|A0A5C7E1L0_9PROT 7-carboxy-7-deazaguanine synthase OS=Campylobacter volucris OX=1031542 GN=queE PE=3 SV=1
MEIVETFLSIQGEGKYSGNLAIFVRFAGCNFNCVGFGVSKCKGDKIFVGCDTIKAVFVKEFASTYEKYNAKNLFEKINFLKKDFNPIVVITGGEPLIHYKNEEFVKFICLLLENNFCVHFETNASIELDFTKYSMYKDCHFALGVKLSNSGMIKEKRINQKALQNFKQYAKDSFYKFVLDENIILENKALMEIKEILQLCENEVFCMPMGNTQEEISKNALSVAEFCLKNGYNYSDRLHIRLWGDKEGV

SEQ ID NO: 28771 - protein, 254 aa, unidentified
  source 1..254: note = Campylobacteraceae bacterium
  REGION 1..254: note = tr|A0A1Y1RCF0|A0A1Y1RCF0_9PROT 7-carboxy-7-deazaguanine synthase OS=Campylobacteraceae bacterium 4484_4 OX=1970775 GN=queE PE=3 SV=1
MIPLVEHFYSFQGEGKYAGTPSIFIRFGGCNLGCPGFNVESISPKDGSRLLGCDSIRAVKEAHFEEQWQKLTSSDELITIIKSYLKNLSFKPDIVFTGGEPLLYHQDPVLLETLEYFISRSHNVTIETNATILIDFDRYPIYKKITFAMSVKLSNSGEPYEKRIRPDTIRAICTHTKDSFFKFVLSKESLYESAKEIEEIRRLCPDIPVYCMPMGATAGELAKNDRAVAEFCIRHGYRYIDRMHIRLWDNEEGR

SEQ ID NO: 28772 - protein, 252 aa, unidentified
  source 1..252: note = Campylobacterales bacterium
  REGION 1..252: note = tr|A0A258X362|A0A258X362_9PROT 7-carboxy-7-deazaguanine synthase OS=Campylobacterales bacterium 16-40-21 OX=1970501 GN=queE PE=3 SV=1
MLQLVEHFYSIQGEGKYTGVPSLFFRFGGCNLTCPGFGCRETAPDGTEVVGCDTAYAVDRKAFGELWQEVEELQTLIWIMNSYRLPPHVDIVLTGGEPLIYANEPVFVEFIDYLVAQGHRVTFETNATITPDFIRYPFYKEAVYALSVKLSNSGEPYDKRVKLEVLDWIIANTKGSFFKFTVDEPSLVSHIEAEIDEIIAKYPTTPVYCMPLGGDKSHIEANCEAVIEFCKRRGFIYSDRLHIRIWDQNHGV

SEQ ID NO: 28773 - protein, 218 aa, unidentified
  source 1..218: note = Scalindua sp.
  REGION 1..218: note = tr|A0A286TUL6|A0A286TUL6_9BACT 7-carboxy-7-deazaguanine synthase OS=Candiadtus Scalindua japonica OX=1284222 GN=queE PE=3 SV=1
MSKKEHHIRVNEIFKSIQGESTYAGIPCVFVRLTGCNLRCSYCDTTYAYNKGIEMSLSDIIGTINSYECRNVCITGGEPLLQENINNLINLLYKDSFNIYIETNGSLNIDTLPEGVVRIVDIKCPDSRMEPEIDWKNIKRLRQKDEVKFIISSKSDYEWAKGITKKHKIADRTTVLFGFVYGKLKPKTLAGWILKDGLDVRLHLQLHKIIWPDKIRGV

SEQ ID NO: 28774 - protein, 263 aa, unidentified
  source 1..263: note = Zixibacteria bacterium
  REGION 1..263: note = tr|A0A1F4YP86|A0A1F4YP86_9BACT 7-carboxy-7-deazaguanine synthase OS=candidate division Zixibacteria bacterium RBG_16_53_22 OX=1802787 GN=queE; PE = 3 SV=1
MFGKNMVAKNLGSLNGASLSVKEIFGSIQGEGSSAGCPAVFVRLAGCNLRCHFCDTDFESDAETLLVTDILCRVAEAAIYMGAPTVPLVVITGGEPLRQNITQLVKGLLENSIRVEVETAGTIMPPELAESLATFYRTGDFRLICSPKTPDINLLVALYCDTYKYVVQVGDGCFDEGTPCSNTQYKGGKREQLYHPGGAKWVSIFVQPMEEYKDAGWFDLLLGRERRAPDDEKTLANHAYAVKIAQRYGYRVSIQIHKLLGLP

SEQ ID NO: 28775 - protein, 230 aa, unidentified
  source 1..230: note = Unknown
  REGION 1..230: note = tr|A0A1F4U5I7|A0A1F4U5I7_9BACT 7-carboxy-7-deazaguanine synthase OS=candidate division WOR-1 bacterium RIFOXYC2_FULL_46_14 OX=1802587 GN=queE; PE = 3 SV=1
MSGAQLHEIFSSIQGEGLYVGDRQLFIRFSGCNLSCDYCDSKEALTLQPQFKVEDKKIDNPVTAEKLLEIVSSFTKNKNLHSAISITGGEPLLQVDFLAKFLPELKIPVYLETNGTLPNHLSEIINHVNIISMDFKAGHAKEHFHFMEIAYTSGKELFVKFPVGPEVTTKDIDEAAGLISQISPLIPLVLQPLHPIKIKKDQLLSFQAVAKRKLERVKIIPQVHKILHMF

SEQ ID NO: 28776 - protein, 217 aa, unidentified
  source 1..217: note = Abyssubacteria bacterium
  REGION 1..217: note = tr|A0A3A4NVM1|A0A3A4NVM1_9BACT 7-carboxy-7-deazaguanine synthase OS=Candidatus Abyssubacteria bacterium SURF_5 OX=2093360 GN=queE PE=3; SV = 1
MSLKINEIFFSIQGEARYAGFPCAFVRLTGCNLRCAYCDTRYAYDEGREMSLDQIQRALGRYPARLVEITGGEPLLQAETPQLITRLADDGYTVLLETNGTVSIEAVDSRAVIIMDIKCPDSGMADRTLWENIDILKPADEVKFVIGSRADYTWALDVIDRYRLAERHAVILSPAAGILEPRELAEWMLASPETARGNIRLQLQLHKLIWPHVERGV

SEQ ID NO: 28777 - protein, 219 aa, unidentified
  source 1..219: note = Abyssubacteria bacterium
  REGION 1..219: note = tr|A0A419EQ88|A0A419EQ88_9BACT 7-carboxy-7-deazaguanine synthase OS=Candidatus Abyssubacteria bacterium SURF_17 OX=2093361 GN=queE PE=3; SV = 1
MKIHEIFFSIQGESSHAGVPCAFVRLTGCNLRCSYCDTRHAYEEGDEMTAEQVIERVGRFRAPLVEVTGGEPLLQPETPALVMALADRCYKVLIETNGSLPLKGIDERATVIMDLKCPGSGMSEHMLWENLDALRPHDEIKFVLTDRYDYDWALDIIKTHRLSERHVVHLSPAYGMLEPAELAAWMLEPLTDEALARGLNVRFQLQLHKYIWPGVERGV

SEQ ID NO: 28778 - protein, 219 aa, unidentified
  source 1..219: note = Accumulibacter sp.
  REGION 1..219: note = tr|A0A080M639|A0A080M639_9PROT 7-carboxy-7-deazaguanine synthase OS=Candidatus Accumulibacter sp. SK-02 OX=1453999 GN=queE PE=3 SV=1
MKATARPLALKISEIFVSLQGESSRVGLPSVFIRLTGCPLRCVWCDTTYAFNGGQTMSLPEILAEVAHHALPHVCVTGGEPLAQPACLPLLSELSEAGHAVSLETSGALDIGGVDPRVSRIVDLKAPGSGEFHRNRWQNLALLTANDELKLVLKDRADYEWARQLIVDRQLAALCPVLLSPVEGELPAVTLADWILADRLPVRFQLQLHKVLWGKMRGR

SEQ ID NO: 28779 - protein, 219 aa, unidentified
  source 1..219: note = Accumulibacter aalborgensis
  REGION 1..219: note = tr|A0A1A8XFG6|A0A1A8XFG6_9PROT 7-carboxy-7-deazaguanine synthase OS=Candidatus Accumulibacter aalborgensis OX=1860102 GN=queE PE=3 SV=1
MNASLRPLSLKISEIFLSLQGETSRAGLPTVFVRLTGCPLRCVWCDTAYAFSGGQTISLPEIIEQVACHGVNHVCVTGGEPLAQPACLPLLSALSDAGYAVSLETSGALDVAEVDARVSRIVDLKAPGSGEFGRNRWQNLALLTANDELKFVLKDRADYEWARQLVLDRRLAALCPLLFSPVDGELPAATLADWILADRLPVRFQLQLHKLLWGNIRGK

SEQ ID NO: 28780 - protein, 225 aa, unidentified
  source 1..225: note = Acididesulfobacter guangdongensis
  REGION 1..225: note = tr|A0A519BIW1|A0A519BIW1_9DELT 7-carboxy-7-deazaguanine synthase OS=Candidatus Acididesulfobacter guangdongensis OX=2597225 GN=queE PE=3; SV = 1
MSKIKNNDEFILKVNDIFYSIQGESSFAGSPCFFVRLAGCNIRCPYCDTKEALTDTNAKLMHISDIITEIIKYGENVKLAEITGGEPLIQEGVYELMKRFLNLKYTVLVETNGTLSLKSIPDEVIKIMDIKCPSSGYADYNNVENLNYINKNDELKFIIGNIADYEFAKNFININRKIIKTEKIIFSAVDVAENQFSSHILAEKILSDRLNVKIGLQLHKFLDLK

SEQ ID NO: 28781 - protein, 222 aa, unidentified
  source 1..222: note = Acididesulfobacter diazotrophicus
  REGION 1..222: note = tr|A0A519BK86|A0A519BK86_9DELT 7-carboxy-7-deazaguanine synthase OS=Candidatus Acididesulfobacter diazotrophicus OX=2597226 GN=queE PE=3; SV = 1
MNKIINNDDFFLKINDIFYSIQGESSFAGYPCFFVRLAGCNIKCPYCDTKEALTDINAKLFHISDIINEIITYGKNIKLVEITGGEPLMQSGVYELINRLLNLKYTVLLETNGTLSLKNVPDKVVKIMDVKCPSSGFEDYNNYKNLNFINKNDELKFVIGSNEDYEFAKNFINANKNVINTEKIIFSPVENHFAPHILADKILFDKLNVRIGLQLHKILNLK

SEQ ID NO: 28782 - protein, 210 aa, unidentified
  source 1..210: note = Acidulodesulfobacterium ferriphilum
  REGION 1..210: note = tr|A0A519BDQ4|A0A519BDQ4_9DELT 7-carboxy-7-deazaguanine synthase OS=Candidatus Acidulodesulfobacterium ferriphilum OX=2597223 GN=queE; PE = 3 SV=1
MLFVNDIFYSIQGESSFAGYPCKFVRLAGCNLKCSYCDTEEALTTENSRKLSVSEIVNDLSKIGGKIRLVEITGGEPLIQEAVYGLFDELIKLNYTVLLETNGSIDLKSVPGHVVKIVDIKCPSSGFSHKNNYKNLDYITATDELKFVIGTEDDYAFAKDFLKNNLIKTSKIIFSAAFAAMPSKDLALKILKDELNVRLGIQLHKVLQLK

SEQ ID NO: 28783 - protein, 199 aa, unidentified
  source 1..199: note = Aegiribacteria bacterium
  REGION 1..199: note = tr|A0A1V4MZ32|A0A1V4MZ32_9BACT 7-carboxy-7-deazaguanine synthase OS=Candidatus Aegiribacteria bacterium MLS_C OX=1775674 GN=queE PE=3 SV=1
MPYRIKEMVHTIQGEGSNAGRVVVLCRFEGCNLSCDFCDTDHEGIDGPGGGEFGTGVEVAERAVSLWRGGPGMKAVLCTGGEPLLQLDAPLVEEFHRRGFSVLVETNGTLPLPTGVDFVCVSPKAPVLPVIRSGDELKLPFPLPGCDPGIFLGLDFRHFFIQPVWGRNYASSMRKAVEYCMEHPEWRISMQMHRYLGIP
